United States Patent Application Publication US 2003/0099974 A1 - sequence listing, part 3

SEQ ID NO: 5984 - DNA, 849 bp, Homo sapiens
  misc_feature 547, 597, 669, 672, 679, 686, 698, 718, 727, 732, 761, 762,767, 785, 796, 834: n = A,T,C or G
aggaccgcgtaatcgactcactatagggcgaattggagctccccgcggtggcggcccgaggtaccctcaggcctggtgaggaggtccttgggaagaacctaataagcaaggccaaaggccatggtggctgaggaatggcctgcagggggatggggagtgggcacatgtggcaaatgaggtctgggttaagaccagactgggaagggatttatttgtcataccatggagtcagactttatcttaaaggtaacagggtttcttaatcttggaatttcaaatgacctgtgactccccacatctgcaaacttctccccacacacaaatgcagatggtttcagtatgtgtgcttctctgggaagaaggtccacagctgtcactgagtcctcaattcttaacccaatacctgtcaagaaccattgccaccgcaggtttcaagaaggatgaactaatgctccgtgcaccttggctcagcagcactcacatcccaggaccaggatctgcacacctggccctttatggagcagttctaccttaaagaacaggtgangccacatgcccccacgcacccttcagacccgacggacaaggaggtctcanacctcttttgttcatttgatttggtcaccccaacccactggccaacttccatttgcaagggtgggtacctgnccnggccggncgttttnaactaatggatnccccggcttgcaggaaatcnatatcaacntattnatcccgtccacctcaagggggggcccggnnccacnttttgttcccttaatganggttaattgcncccctggctaaacatgggcataactggttcctgggggnaaatgttttccctct

SEQ ID NO: 5985 - DNA, 462 bp, Homo sapiens
  misc_feature 2, 3, 4, 7, 12, 206, 213, 235, 396, 454: n = A,T,C or G
gnnnagntcccnatcactactatagggcgaattggagctccccgcggtggcggccgcccgggcaggtacacatatggtataaacaacataaaactgacttggaagcgattcctcagcagtgccccattgatctgccctgccaagtgactggctgccagtgcagggcttacctttatgtccccttgaatggtagccagcccatttcnctgcaangtgcaaacactttgctgatcangcacagtgctgcgcctggctttacatgcaatacatgttccaagtgttcaggattccatagctgcttcacttgtgcttgtggtcagcctgcatatgcccatgacacagtagtggaaactaagcaaggaaagattggctcaggaaaaaccagtgggtacaggnacattccttatgcagccatggggagggattaactggttttcagcctcgcttgggccgngaaggctt

SEQ ID NO: 5986 - DNA, 921 bp, Homo sapiens
  misc_feature 4, 6, 8, 12, 31, 32, 34, 77, 103, 112, 144, 164, 185, 200,221, 245, 247, 295, 336, 400, 413, 431, 497, 569, 576, 607,611, 639, 643, 650, 653, 685, 699, 713, 718, 720, 727, 739,740, 743, 749, 764, 780, 787, 789, 821, 830, 831, 840: n = A,T,C or G
  misc_feature 845, 847, 855, 864, 867, 868, 883, 886, 887, 888, 895, 899,909, 910, 912, 917, 919: n = A,T,C or G
attntntntgtnaattactactatagggcgnntnggagctccacccgcggtggcggcccgcccgggcaggtacgcgngtggctcatgcctttcaagacactgnttcttcttnccactccagttctcgcccacccccctcccctncagggccctgtatgcctgangtgtttttggaggcagcggtngcactgatccaggcnggcagagcccaagatgccttnactctatgtgaggagttgctcagncncacatcatctctgctacccaagatgtcccggctgtgggaagatgccanaaaaggaaccaaggaactgccatactgccactctgggtctntgccacccacctgcttcagggccaggcctgggttcaacttgggtgcccaaaaagtggcaattantgaatttagcaantgcctctagctgctcttncgggccacacctgaggaaaaagaacaaggggcagcttttaaactgtgagcaaggattgtaagtcangatgccggcacttgcagcagctttcgggcagaccgccctaattagtcgtggactggaatggggtaagccagnggcccangaataccaaaaaccttaaaaggaacttcctncctnagtggtgcaaaatgtgccccaaactttngaanaagcctnaantccggaaggatgaaggccccttcacctcttgntggaaagctgggangccccaaacctaanggggntnacattgnaagattcttttnnggntttttnccccttggtaccttngggcggttttaaaaanttatggnancccccgggctgcaaggaatttcgattttaaanctttttganncccgcccanccctnangggggggnccagttccncannttttttttccttttngtnnngggttanttgnccccttgggnntnaaaantngg

SEQ ID NO: 5987 - DNA, 900 bp, Homo sapiens
  misc_feature 1, 3, 5, 6, 10, 38, 44, 67, 70, 83, 130, 135, 136, 423, 525,559, 577, 581, 592, 632, 679, 695, 699, 704, 712, 720, 746,751, 757, 769, 776, 778, 779, 791, 795, 799, 803, 823, 827,834, 839, 845, 847, 849, 856, 858, 860, 861, 870: n = A,T,C or G
  misc_feature 871, 873, 874, 875, 876, 878, 880, 883, 889, 891: n = A,T,C or G
nanannattntgaactatccggcgaattggttttccanctgtgncggccgcccgggcaggtacgcgnttnagcatatattggnggatttttgtccatattttatctgctttaagaattaacgaaagcagngtcannacagtaaggattcaaaccatttgccaaaaatgagtctaagtgcatttactctcttcctggcattgattggtggtacctcggccgaggtacacagggaaaaactcagacacagattgacgaaaatgggaaacagaaattctaggcctaggggacaaaggaaagagggagccaaagagactccctctgacgttcccccggatagtcctttaaggagaatgctgcaggtttggagggacaacccttgaaccagggacaaggaaaaggaaaagatgataaagtattgctgntttacctggcccaaagacccgattcgcaagccttcaagtcttttgatttaagtttggctcagatgaagaactggggtgtgccaagctttaattctctatgtnaatgataaaaccccattctaggccagggcgcggngggcttacgcccgtggtnccancactttgggangcccaaggtgggtgggatcacgaagtcagggagaaccganaacatcctggctaacacaatgaaaaccccatcttttactaaaaaatncaaaaaatttaccccnggtngtggnggtggccnccctgtantcccaagctacttgggaaggcctgangccangaaaantggccggggaancccggangnngaaccttgcaantgancctnaaancccaccacttgaacttccancctnggcgganagaancaagantncncttaaancntnnaaaaaaaannannnngnanccnggaaangnccctggccg

SEQ ID NO: 5988 - DNA, 896 bp, Homo sapiens
  misc_feature 1, 21, 26, 39, 52, 65, 104, 108, 142, 165, 179, 181, 223,240, 243, 246, 250, 263, 270, 272, 277, 280, 288, 305, 306,309, 310, 312, 316, 320, 329, 339, 344, 348, 351, 359, 360,361, 362, 369, 371, 374, 378, 382, 387, 390, 393, 395: n = A,T,C or G
  misc_feature 396, 400, 403, 406, 410, 412, 417, 418, 425, 428, 431, 435,438, 439, 442, 444, 450, 456, 458, 460, 472, 477, 481, 485,487, 488, 494, 501, 504, 512, 516, 517, 523, 532, 543, 550,553, 555, 558, 565, 568, 570, 571, 575, 576, 592, 593: n = A,T,C or G
  misc_feature 597, 604, 617, 619, 622, 625, 631, 632, 633, 634, 635, 638,644, 649, 654, 658, 663, 664, 666, 671, 673, 675, 676, 682,683, 684, 686, 687, 691, 693, 698, 700, 702, 703, 704, 705,709, 711, 712, 721, 722, 725, 732, 733, 734, 735, 743: n = A,T,C or G
  misc_feature 749, 754, 756, 758, 761, 762, 764, 766, 774, 775, 777, 778,779, 780, 782, 783, 785, 786, 787, 788, 791, 793, 794, 795,797, 798, 799, 800, 801, 802, 803, 810, 812, 813, 816, 817,818, 819, 820, 821, 822, 825, 827, 828, 829, 830, 833: n = A,T,C or G
  misc_feature 834, 836, 838, 839, 840, 842, 843, 848, 849, 850, 851, 852,853, 855, 856, 860, 861, 862, 863, 864, 865, 866, 867, 868,869, 872, 873, 874, 875, 876, 878, 879, 880, 881, 882, 883,885, 887, 890, 891, 892, 893, 895: n = A,T,C or G
naacgttactcccactttggncgaancggagctccccgnggtggcggccgangtactcactgctnggcgataggtgattgtctcaccgctcagctataggctanggtntcaccactcggtgataggcgattgtcccatctangtcgccaaaatgtgtctggaatnggtgggttcttcgntnactgacttcaagaatgaagccgccgacactcacagtgagtgntgcagttcttaaaggcngcntgnctanagtttgtcccttntgatgancngatgngtncacagatncttccttctggtggggnncgnngnctcnctgnctcaggagngaagctgagnacctntgcngtntacaggtnnnncacgcanantgnaccnaaanagcgngcntcntnncaangtntcnctgngngcatnntaacaangcnttnacgntgnngcnanggcacncaaacncntnagcccctcggtnccttntacnaccngnngatccncaactantgnaatgaacncggnnttcaangcatttcgntttcccggccnactcaancgngnggnccctggnaangnngggnnccggtaccccaacttnngggnccctttnggcacggtttaantngcnccncttggnnnnnttnatggcngttangaaantttnctagnngnaaacngntnncccacnnncnntttnanccggnancnnnnaacngnnaagccttgnnggnccaaaannnnggggggcntatganttaantngnctnnantnaattgggnngnnnntnnannnngcnannntnnnnnnnggcaaancnnggnnnnnnnaantnnnnttnncnannngnnaaagnnnnnngnnaatnnnnnnnnnntannnnncnnnnnncngnacnnnncng

SEQ ID NO: 5989 - DNA, 633 bp, Homo sapiens
  misc_feature 9, 23, 28, 40, 61, 112, 254, 255, 256, 257, 258, 259, 261,264, 265, 267, 271, 272, 275, 276, 277, 280, 281, 283, 284,285, 287, 288, 296, 298, 299, 300, 302, 305, 307, 308, 312,313, 314, 315, 317, 320, 322, 323, 324, 325, 327, 330: n = A,T,C or G
  misc_feature 331, 333, 334, 335, 336, 337, 339, 340, 345, 346, 347, 351,353, 355, 356, 358, 361, 362, 363, 364, 366, 367, 368, 370,371, 374, 375, 376, 379, 380, 381, 385, 387, 388, 390, 391,392, 393, 394, 396, 397, 404, 406, 407, 409, 410, 411: n = A,T,C or G
  misc_feature 412, 413, 417, 418, 419, 420, 421, 424, 425, 426, 431, 434,437, 443, 445, 450, 451, 453, 467, 470, 472, 477, 479, 483,486, 490, 491, 494, 495, 499, 500, 501, 502, 504, 505, 506,507, 509, 510, 514, 517, 518, 519, 524, 525, 528, 529: n = A,T,C or G
  misc_feature 531, 532, 538, 540, 542, 545, 546, 547, 553, 554, 555, 558,559, 560, 561, 563, 564, 565, 566, 567, 568, 570, 574, 577,580, 583, 585, 586, 592, 595, 597, 598, 600, 601, 604, 605,607, 608, 609, 610, 611, 612, 613, 616, 617, 620, 621: n = A,T,C or G
  misc_feature 622, 624, 625, 626, 628, 630, 633: n = A,T,C or G
taccctggnctgtgtctctgggncgagnaggccactcatncaactgcaagtccagccagantgttttatacagctccaacaataaggaactacttagcttggtaccagcagnaaaccaggacagcctcctaagctgctcatttactgggcatctacccgggaatccggggtccctgaccgattcagtggcagcgggtctgggacagatttcactctcaccatcagcagcctgcaggctgaagatgggggggggnnnnnnanggnngngcgnnggnnngtnngnnngnnggaggggngnnngnggngnnggtnnnngngtngnnnngnctnntnnnnntnnccctnnncctncntnntngcnnnncnnntnntcnnnctnnnggtncnntnnnnngnncttcccncnncnnnnngccnnnnnccnnnggcgnggnggngagggngnggggnntngggagggggggggnggngnggggngngggnggngggnnctnnaggnnnngnnnngnngggngannngggtnnggnncnnttatcntntnatnnntcgggnnngcnnnntnnnnnntntccncgnggnggngnngggggntgngnntnnggnntnnnnnnngcnntcnnngnnngncntcn

SEQ ID NO: 5990 - DNA, 451 bp, Homo sapiens
  misc_feature 11, 20, 24, 33, 36, 43, 81, 97, 98, 134, 441: n = A,T,C or G
agttcgaaacnttttaatangacnactataggnttnattgganctccccgcggtggcggccgcccggtcaggtactgtccnttacctgacagtaatnntcggcctcatcctcggcttcgaccctactgatggtnagggtggccgtgttcccagagttggagccagagattcgctcagggatccctgagggccggtcgctgtcatcaaaagacggccaatgtagggacctggcctggcttctgctgataccagtgcacacttttactttcaatattgtctcccccacaggaaatcctggccgtctgtcccggggccactgacaccgagggtggctgagtcaggacataggaggtcacagagtctgtgcagtgaggagaggaggcccgagggaggagaaacggtccaagccatggctggaagcaccaccagtggctgcttttnttaaggccca

SEQ ID NO: 5991 - DNA, 464 bp, Homo sapiens
  misc_feature 2, 3, 4, 5, 6, 31, 243, 322, 337, 420: n = A,T,C or G
gnnnnnagggggcggccgcgtaatacgactnctatagggcgaattggagctccccgcggtggcggccgcccgggcaggtactgatttcactcaccactgtatcacatcttagcttctctgctagtctcttggcttgaacttgaatatctggtcttgaatggtcattgtctttttccaataaagaatccacagaaagctgaaaatcagctacttcttctttttgggaaaattgggaacctgcanatattgatgtgatcaagttttctggtggaagattcaacactctggaaagctggcaagcaatagcgcggcgaaagccgcncgccatgtccacctntacggaagtgcgccgcccccgcgtacctcggccgctctagaactagtggatcccccgggcctgcagggaattcgatattcaangcttattcggattacccgttcgaccctcgagggggggggccccg

SEQ ID NO: 5992 - DNA, 451 bp, Homo sapiens
  misc_feature 1, 4, 10, 213: n = A,T,C or G
nagnccctancactacttagggcgaattggagctccccgcggtggcggccgaggtactcagaagtgtcctggaatggggcccatgagatggttgtctgagagagagcttcttgtcctgtctttttccttccaatcaggggctcgctcttctgattattcttcagggcaatgacataaattgtatattcggttcccggttccaggcccagtaantagtaagccctctgtgacaccagggcggggccgagggaccacttctctgggaggagacccaggcttctcatacttgatgatgtagccggtaatcctggcacgtggcggctgccatgataccagcaaggaattgggtgtggtggccaggaaacgccaggttggatggtgcatcaatgggcagtggaagggcgttcgatgacccaacaggggggagctcccgaagcattgtcatttcaag

SEQ ID NO: 5993 - DNA, 588 bp, Homo sapiens
  misc_feature 1, 2, 3, 4, 7, 29, 37, 38, 39, 47, 73, 100, 188, 193, 220,221, 225, 226, 229, 238, 252, 260, 261, 273, 292, 309, 310,312, 314, 319, 331, 347, 357, 359, 364, 375, 378, 391, 392,407, 409, 428, 434, 442, 446, 478, 482, 490, 492, 494: n = A,T,C or G
  misc_feature 497, 500, 503, 505, 506, 514, 523, 528, 532, 533, 538, 555,556, 564, 568, 579, 582: n = A,T,C or G
nnnnagntcgaaggcctttaatacgactnctataggnnnaattgganctccaccgcggtggcggccgcccggncaggtacctggctttgcactccccttnttgagatgactaaggaaaattatcttcagatctggttttgtgtgtgtgtgtgtgtgtgtgtgtgtgtgtgtgtgtgtgtaatccctgnatatntatagtttaccagttaaatttgatttnnaaanncantttattatnggacatattataantttttcannaaaaattttaanaaattgggatatttggtgnttttaaaaaaaaaaatnntngncaaanaattaatttttntgtaaaaaataaaatnttaaaaaggngnttttntttttataacntgnattataaggggcnnaataaaaaatttttntnaagttaataaaaaaaaatncccatnaaaaaatntatngaaaaaaaaatacaaattaatacagataggtnaaanaaaaaagncntngcnctnaanannttttttgntggaaattntaacnaagnngaaanaattttttgaaaaaaannaaaatccngtangaaaaaacaantcnaaaatt

SEQ ID NO: 5994 - DNA, 930 bp, Homo sapiens
  misc_feature 609, 643, 654, 665, 671, 676, 691, 742, 747, 769, 794, 797,804, 807, 824, 829, 838, 865, 866, 868, 874, 875, 881, 889,890, 900, 904, 908, 910, 917, 920, 928, 929: n = A,T,C or G
taggggcgccgtatacgactactatagggcgaattggagctccaccgcggtggcggccgccacgctggttttgcatcttcaggagacgctcgtagccctcgcgcttctcctcggccaattcgcggaagaagtggctcacgccttccagagccacatcatcgcggtcgaaatagaagcccagagagaggtaggtgtaggaggcctgcaggtacctcggcccgctctagaactagtggatcccccgggctgcaggaattcgatatcaagcttatcgataccgtcgacctcgagggggggcccggtacccagcttttgttccctttagtgagggttaattgcgcgcttggcgtaatcatggtcatagctgtttcctgtgtgaaattgttatccgctcacaattccacacaacatacgagccgggagcataaagtgtaaagcctggggtgcctaatgagtgagctaactcacattaattgcgttgcgctcactgcccgctttccagtcgggaaacctgtcgtgccagctgcattaatgaatcggccaacgcgcggggagaggcggtttgcgtattgggcgctcttccgcttcctcgctcactgactcgcttgngctcggtcgttcggcttgcggcgagcggtatcanctcacttaaangcggtaatacnggtatnccaanaatcaggggataacncaggaaagacatgtgagcaaaaggcaaccaaaaggcaggaaccgtaaaaangccgngttgctgcgtttttcatagctncgccccctgacgacataaaaaaatnacncttaaantanaagtggcgaaacccacnggctnttaaagatnccaggcgtttcccctggaagctccttnngncctttnntgttcnaacctgcnntttaccgganaccngccncnttttccnttngggaaacnng

SEQ ID NO: 5995 - DNA, 447 bp, Homo sapiens
  misc_feature 447: n = A,T,C or G
aggccctaacactacttagggcgaattggagctccccgcggtggcggccgaggtactgcctcgaccttttttcagctcatcctggaacatatacagagttgagagttttagacaatctctaggtagaggagacaagatgtagacccagacagaagaaatctgcttccctaccatggctattccagcaccccaacctgtaatttgccaagtcctctaaggtaccttgcccgggcggcccgctctagaactagtggatcccccgggctgcaggaattcgatatcaagcttatcgataccgtcgacctcgagggggggcccggtacccagcttttgttccctttagtgagggttaattgcgccgcttggccgtaatcatggtcatagctgtttcctgtgtgaaattggttatccgctcacaatttccacaccaacaataccgagcccggn

SEQ ID NO: 5996 - DNA, 460 bp, Homo sapiens
  misc_feature 2, 3, 4, 5, 8, 28, 100: n = A,T,C or G
gnnnnagntgaagcgcttaatacgactnctatagggcgaattggagctccccgcggtggcggccgcccgggcaggtactcagtatttcaaatcagaacanaagattggaacttttggaaaaatgggttcaagctttcctattagccatggaaatgcaaagtttagcagaagcaagcaattaggcagagaacaaaaatgttaagcatggtgttgtctatcttattgaagtggttggaaatgaaagcttttaatttgatagatttatcagtataaaattagggaaaccacgtgtggggaatgaatcaatttagagcttcgggaattgtgaggtgacttttgtaacttttgttctgtgtgtgacctgtgaaccactagggatgtgatctgcccttgtgggcaggtcccagccatagttagggagttaagggctttagcattaaaatttcttagctggtatctg

SEQ ID NO: 5997 - DNA, 453 bp, Homo sapiens
  misc_feature 1, 2, 3: n = A,T,C or G
nnnaggccctatcactacttagggcgaattggagctccccgcggtggcggccgccacctccaagtggagtgagccacgctaccactaacactgaactcaagcacaagagctcctgcgaaagcagaggggcgggaaacaaagaagcgggtggttaagggcacgaaccgcacactgcgggacgccggcatctttgaattcgcccacttcactcctacagagccaaactgcaaaacaacagaattaaaaagttactctccccaatcaaagacctggaggaataaatcgtgagtgaagacctgtcgaagcaaaggttgagaggtgatggagtggtgatgggagtggtaaacacagtgtgaaaatcgtcagcaccttcccacccagcccacgtggagtttctcaagggctgagggcgggagccagaagttgggcagggaatccccgcgtacctcggcc

SEQ ID NO: 5998 - DNA, 449 bp, Homo sapiens
  misc_feature 2, 4, 5, 12, 15: n = A,T,C or G
gntnnaggcccnaancactacttagggcgaattggagctccccgcggtggcggccgcccgggcaggtactaaaaatacaaaatttagctgagtgtggtggcaggcgcctgtaatccagctactcgggaggctgaggcaggagaatcacttgaacccaggaggtggaggttgtagtgagccgagatcacgtcactgcatttcagcctgagcgacagagtgaaactgtctcaaaaaagagagacttccgggacagtcattatcagataggccccaagcctgtgatttttcttgggcaagattggtgtttacttaggggtgctttaaaaatatatttttacaagtatacttgtaggaagttggttttttattttctatttttgtttgtttttgggagtttggtttaaacgactcttttatttttctggttttgcccttatcttactaaaagt

SEQ ID NO: 5999 - DNA, 477 bp, Homo sapiens
  misc_feature 2, 3, 4, 5, 8, 9, 10, 13, 19, 33, 97: n = A,T,C or G
gnnnnatnnnccnttatcnactcctatagggcntattggagctccccgcggtggcggccgggggccattgagactgccatggaagacttgaaaggtnacgtagctgagacttctggagagaccattcaaggcttctggctcttgacaaagatagaccactggaacaatgagaaggagagaattctactggtcacagacaagactctcttgatctgcaaatacgacttcatcatgctgagttgtgtgcagctgcagcggattcctctgagcgctgtctatcgcatctgcctgggcaagttcaccttccctgggatgtccctggacaagagacaaggagaaggccttaggatctactgggggagtccggaggagcagtctcttctgtcccgctggaacccatggtccactgaagttccttatgctactttcactgagcatcctatgaaatacaccagtgagaaattccttgaaatttgc

SEQ ID NO: 6000 - DNA, 480 bp, Homo sapiens
  misc_feature 2, 3, 4, 16: n = A,T,C or G
gnnnatccgacggcgnatacgactactatagggcgaattggagctccaccgcggtggcggccgcccgggcaggtacaaagaagcaaaatataggaatatgagtaggtaaagggtgtttgggcagtgtgtggatgtcagggagtagacaatgtttaagttacataatccctggatgtcatagctgctttaaaaatttccccacagaagcataatttctttagcaaattagaactgaattattttattataaaaggtatgataatcatgctatagaaattttggaaaatagaaaaaaaaattacctataatctcgccttaacacagccactgtttctttttgtgtatgttttgttttttgttaggttgaatatgcactattaacattagaattctaacagaaggatttgtcaaattactgcatattatttccatcttttgtaaatgggattgcattagagcttgttgtcatttttttaaacc

SEQ ID NO: 6001 - DNA, 468 bp, Homo sapiens
  misc_feature 2, 3, 4, 5, 6, 10: n = A,T,C or G
gnnnnnttgnggcccgtatacgactactatagggcgaattggagctccccgcggtggcggccgcacccggcaaccgctagggtgcatggagacacattaggttacataacccttcaccgtgttcgaaaccctttcttgatcgtgtgggtggctctgaaaagagcctttgggttcaggacgccgaggaacgcctcacttggagctggtgtacctcggccgctctagaactagtggatcccccgggctgcaggaattcgatatcaagcttatcgataccgtcgacctcgagggggggcccggtacccagcttttgttccctttagtgagggttaattgcgcgcttggcgtaatcatggtcatagctgtttcctgtgtgaaattgttatccgctcacaattccacacaacataccgagccgggagcataaaagtgtaaagcctggggtgcctaatgagtgagctaactcac

SEQ ID NO: 6002 - DNA, 505 bp, Homo sapiens
  misc_feature 2, 3, 4, 5, 12, 15, 240, 304, 350, 352, 357, 371, 376, 378,399, 405, 411, 429, 448, 474, 477, 488: n = A,T,C or G
gnnnncgccgcncgncgaatacgactactatagggcgaattggagctccccgcggtggcggccgcccgggcaggtaccacaggaagccgcctagtgcagagaggttgtgaaaacagcagcaatgcaatgtggaaattgtagcgtttcctttcttccctcatgttctcatgtttgtgcatgtatattactgatttacaagactaacctttgttccgtatataaagtttaccacccgttgtntgttttacaccttttggggaagcccagggaaagcgtttttggaaaaccgtatcaccttttccanattctcggattctcagactctttgcaacagcactttgcttgcgggnantcttnctggaatgcatttnactanancatccccaacccgttgcaaangtgtanacttgntgcttttgcaaaagtaantttgatctagaaattcctnctgtaagaaatttaagcttatacaanttnaagaagaaatnagccatgttttcacttg

SEQ ID NO: 6003 - DNA, 772 bp, Homo sapiens
  misc_feature 1, 2, 3, 4, 6, 7, 11, 15, 18, 19, 21, 23, 26, 28, 39, 40,41, 42, 44, 45, 49, 57, 62, 69, 70, 71, 72, 74, 80, 81,84, 93, 95, 98, 102, 103, 109, 112, 117, 170, 323, 352,364, 372, 381, 406, 420, 429, 431, 437, 451, 462, 463, 473,478: n = A,T,C or G
  misc_feature 480, 485, 498, 499, 500, 513, 520, 529, 533, 534, 536, 540,554, 562, 563, 564, 569, 574, 576, 578, 579, 586, 587, 589,591, 593, 605, 619, 622, 628, 630, 644, 658, 663, 668, 670,671, 696, 697, 701, 705, 706, 713, 715, 717, 726, 736: n = A,T,C or G
  misc_feature 741, 742, 743, 763, 770: n = A,T,C or G
nnnntnntttngttnatnntntnatnanttttttatttnnnnanntttnatatttcnttttntttattnnnnanttttannttnttttcattntnttntagnnaggggnccnatacnactcctatagggcgaattggagctccaccgcggtggcggccgaggtacgcggngaggcattgaggcagccagcgcaggggcttctgctgagggggcaggcggagcttgaggaaaccgcagataagtttttttctctttgaaagatagagattaatacaactacttaaaaaatatagtcaaataggttactaaagatatttgcttanccgttaaagtttttttaaaccgtaaattnttaaataggctnttaagganttttttaanaggaaggaaaaaattattggaaagnacctttaagaaaanaagtttagncnaattgnaaggggtaaagggnaaaaataatannttacaataanctatntntattntatttaaatatannnggtttcctcttgncccccgngggccgggnctcnngntttnttaaaaaaccttanttttgggnnntcccnccccngngnnctttggnnangngnaaatttttcctnatttttttcaaaangcnctttantntgggatttaacccntttcttgaaactcnttttnaaaangnnggggggggggctcccccggtgttanncccncagnnatttttntngnttttccccnttttttaaanttggnnnggggggttttaaaatttttnctacccncc

SEQ ID NO: 6004 - DNA, 500 bp, Homo sapiens
  misc_feature 9, 61, 194, 217, 222, 237, 238, 292, 300, 316, 326, 378,399, 407, 473: n = A,T,C or G
gccctatcnctacttagggcgaattggagctccccgcggtggcggccgaggtacaaatgtnaaggctgtaacaagttgtagaggctttttccagacattcctatgcaatgttctccacagtaaatacctgggggcagccaagagggaagatttcagataagtgcaaacagtgattggatgttatctacctacantccctttaagacatttttgaganaactntgtttaaatgtttgnntaactctcccaccccgaccaatgaattccttacggaccagcagtgccctggganactgagtnatgaaaacatcctgtnaagctttcangacctttgggcagatgggactctgcatacccgtgggagcacaaaggactaanaaagctgccaggtaaccgttntttgggtnaaccccgaagaaccaacaacccttgggcccaccagggattaaactttggccaaaaattttccccangaaaccccttggctttcttgggcctct

SEQ ID NO: 6005 - DNA, 467 bp, Homo sapiens
  misc_feature 2, 3, 4, 5, 14, 465: n = A,T,C or G
gnnnncgcccgtancactactatagggcgaattggagctccccgcggtggcggccgaggtacaagttgtctttatgctgcgagataagtcctctcttggtttgagctcccaccttttcagtgaactcttacattttgggggatctgctcttgtaaaggacatcctttctggtctttgattacttgagaaaagtgagtgaggtggggccaagatggttgactagaagcagctagtgtgtgccactctcacaaatagcagaaagagtggtgaagacactagctcttcaaccggaacatccaggtggacacataaggattcatcagtgacatagtgtgaccttcggatcacggagaagagtgggacagatcaaccattcacccaggagtggcacagacccaggggaatccccctacaagaaaatggtgagtgagtgaagagtcccgtgggatgcatatttctgccacnga

SEQ ID NO: 6006 - DNA, 468 bp, Homo sapiens
  misc_feature 1, 2, 3, 4, 11: n = A,T,C or G
nnnnagcctancactacttagggcgaattggagctccccgcggtggcggccgaggtacaaaattttattaaaggtctttagagagcaacatccagactccagaatacagctgccaaggagaccctgaaaccaaataaagcacaaaagtaagaaactttaccagagttattaagttcctgatttaccaaatggatacacacccgcgtacctgcccgggcggccgctctagaactagtggatcccccgggctgcaggaattcgatatcaagcttatcgataccgtcgacctcgagggggggcccggtacccagcttttgttccctttagtgagggttaattgcgcgcttggcgtaatcatggtcatagctgtttcctgtgtgaaattgttatccgctcacaattccacacaacataccgagccgggagcataaagtgtaaagcctggggtgcctaatgagtgagctaact

SEQ ID NO: 6007 - DNA, 421 bp, Homo sapiens
  misc_feature 8, 35, 175, 179, 182, 185, 194, 206, 207, 210, 214, 215,225, 228, 229, 230, 231, 233, 234, 238, 259, 260, 262, 263,264, 269, 271, 284, 285, 286, 289, 290, 301, 304, 305, 306,311, 312, 313, 314, 343, 360, 365, 366, 367, 368, 371: n = A,T,C or G
  misc_feature 373, 376, 382, 383, 394, 396, 397, 414, 415: n = A,T,C or G
gagccccncgtaataccgactcactatagggcganttggagctccaccgcggtggcggccgaggtacttttttttttttttttttttttttttttcttttttttttttttttttttttttttttttttttttttttttttttttttttttttttttttttttttttttttttttncccnaanggnaaaaaaaancccttttttttnnggnaaannaaaaaaaaanccnnnnannattnggaaaaaaaaaaaaaaaaatnntnnnccccnanccccaaaaaaaannnaannaaaaaaaaatnggnnnggccnnnncccccaaaaaaaaaaaaaaaatttttttnaaaaaaaaaaaaaaaanccccnnnnttncnaantttttnnaaaaaaaaaangnnttttttttttttttttnnaaaaac

SEQ ID NO: 6008 - DNA, 425 bp, Homo sapiens
  misc_feature 36, 85, 425: n = A,T,C or G
gtttcgcgtaacacgactcactatttggcgaattgnagctccaccgcggtggcggccgaggtactatttttattttgctatattngggttactaatattttgcttaaaatttttcatctaagtttgagaaatttgcctgtaatttcccattcttgtaaagctcttgtcaggttttggaaacatgtttatgttgaccttattaactagtttgatggcgttttcttatgttcccaagatgatgttgcaaaagttttctgttatttcttccttatatttggtccattttataagtaaaactttgagttcatagagatttgaaaaaaaatagcttaaataggctgggtgtggaggctcatgcctgtaagctcagcactttgggaggccgaggcaggtggatcacctaaggccaggagttcgagaccagn

SEQ ID NO: 6009 - DNA, 485 bp, Homo sapiens
  misc_feature 149, 183, 188, 268, 407, 412, 483, 485: n = A,T,C or G
ggagctccccgcggtggcggccgaggtaacaggtatccttaatgactattccttttctttttttgcaaatctgcactaggtatagatttagatcggatccatttgaaattatattttgaggagcacagagcagagatagtgatcaactnatttaaccttttgaaatgatagtgaggtattttnatagngttagaaaaggaaaatttttcttaatatgaaaaatcatcttaagaaaactaactcaaagttcagcaaatttatacatcanatgtatgaaaacatactagatttcttttgctgaaataatcagtgcaagatgaagaaaatgtgtcactaggaggtgttttttccccaaataatgttgtgtgccctgttttttttattttccctattgggcttcatttcantcctnggccttgtattgttatttaaattttatttctaattacctggggggggaaaccagtaacccaaccccatttngn

SEQ ID NO: 6010 - DNA, 485 bp, Homo sapiens
  misc_feature 32, 173, 376, 377, 384, 403, 410, 427, 431, 435, 445, 454,457, 462, 466: n = A,T,C or G
ggagctccccgcggtggcggccgcccgggcanggtacaattactcctatttggaatttagtaaggagcaaacagcacaggagtgtgggcggtccgaatgggtccgggagctggccgcaggagtgccggaggaagcgcagaagtctggaacagtgttgctgctggagcaagtcnaagactgaaagggggaactcactgccacttgcttgctgccggctgctgcaagctgctagagggttttggtatgaattcgttggagccaatggctttgaaaggttcttttgaaaatactaatttttacccccagtgggatgtgcctgtcttctgtaagtttgttgtaacggactgtattttaggtttcgggggcttcccagcannctctgtnctttgtgccttcctactgntaatgtngcttgattaagtttgcntttncgantttgaccgtnccacatcanaanatttncacnagttgaaaatgttttttta

SEQ ID NO: 6011 - DNA, 461 bp, Homo sapiens
  misc_feature 334, 359, 382, 404, 405, 408, 414, 459, 461: n = A,T,C or G
ggcgaattggagctccaccgcggtggcggccgcccgggcaggtacttttttttttttttttttttttttacaagaaaaccaaaagaagccaaaaagtgtccaatttctttatatactctaggttttatttttggatgaagattatttatttagctccccacccttcactcccattaaaaattgcacctcagcttcatggacctgagatttcacttggtatactggaaaaacctttttggcaagagggacgggttttgtggaagacaatttttccacagggggtgggcgggaatggtttcgggataaaaactgttccacctgggattagattttnttaaggagcaccacctagatccctncttgcaagcgcaattcacaatanagttcacgtccccatgagaatnntanatgccncttgccaggtgctaatgcttggcctgcacctcacgtgcggcccantn

SEQ ID NO: 6012 - DNA, 408 bp, Homo sapiens
  misc_feature 5, 193, 302, 320: n = A,T,C or G
gagcnccgccgtaatacgacctcactatagggcgaattggagctccaccgcggtggcggccgcccgggcaggtacttttttttttttttttttttttttttaggtttacttctgcttcatattgctatcttcactcttattttaaaacaatttcttatgttaaattcttagcccatcttttccaataatttancttcagttgttcagtctgtggccttttttaaatactgtatttacttctccagcatctagttacttttgctctgagtccaaattctcctgcaggtgtcacccctcagcanagaatctcaggcacccanaagaactacggaacagtttgctttccctgtaataagcattaggtcagaatttcaacttcaaattgtaagaaaggagtagcatggaaag

SEQ ID NO: 6013 - DNA, 882 bp, Homo sapiens
  misc_feature 4, 79, 84, 85, 86, 208, 567, 656, 661, 669, 676, 697, 707,717, 743, 756, 763, 764, 768, 775, 776, 778, 779, 788, 799,800, 804, 813, 821, 822, 826, 828, 834, 845, 868, 878, 880: n = A,T,C or G
tagncactactatagggcgaattggagctccccgcggtggcggccgcccgggcaggtactttttttttttttttttttnttttnnntttgggacggagtttcgctcttgttgcccaggctggagtgcaatagcacgatctcagctcactgcaacctccgcctcctgggttcaagcgattctcctgcctcagcctcccgagtagctganattacaagcatgtgccaccaggcccggctaattttatacttttagtagagatggggtttctccatgttggtcaggctggtctcgaactcttgacctcaggtgatccacccactttggcctcccaaagtgttaggattacaggcgtgagccactgtgctggctggttttatttttaattgttaataaccaactatacagtaaatgatttataaaataaatactgttaatacttgagttgaaagagaaaaaaatgtgtgtgtgtctgagtttatgggtgccttaatctcaccatgttaaaaagtgacccgttaatttaatgatccctgataactaaatcatgttaacgtttccttggttgngttctaactgactgcttctaatacggaaggaaaaagctgccaaacgaagttcttgtttgtaccttggccgctctagaactaagtggatnccccnggctggangaattcnatttaagcttatcgaaacccnccaccttganggggggcccngtcccacttttgttccctttaatgangggtaattgcccncttgggnnaatnaagggcnnannggttcctgngggaaaatgtnntccnttacaattncccacaannttcnanccgggnccttaaagggnaaaccctggggggcctaatgagngggctactcnantt

SEQ ID NO: 6014 - DNA, 889 bp, Homo sapiens
  misc_feature 2, 29, 48, 52, 63, 77, 106, 114, 207, 213, 217, 241, 261,374, 375, 381, 393, 449, 476, 486, 507, 516, 579, 616, 643,687, 690, 716, 722, 740, 759, 761, 762, 764, 767, 769, 775,783, 784, 789, 790, 791, 792, 804, 805, 808, 809, 816: n = A,T,C or G
  misc_feature 817, 818, 819, 820, 821, 823, 824, 827, 830, 837, 838, 843,846, 847, 850, 854, 860, 864, 873, 880, 885, 888: n = A,T,C or G
gncactactatagggcgaattggagctcnccgcggtggcggccgccgngcangtaccaccatngctcgatgtatgtncacagttcatacacaggcaccatgaagantcccactntaccacaacttctcctgtgggtgaaaaggaaagcaggaggacttcaaaagctttcatgactggggaccctgcaagtcattgctgcctttgcanacactntcanccttgtctactaaaaacgctgtantcttcaccagtgctgacctnagctgatggaactacctggagtctaactgctgcccactcctggagctggaacagccactgtgtccttcagagaagaagctaccacacccacccagttggtggcttcatacctnnccatangtgaggtctttncttactgaagccagtaccttggccgctctagaactagtggatcccccgggctgcangaattcgatatcaagcttatcgatacncgtcgacctngagggggggcccggtacccancttttgttncctttagtgagggttaattgcgcgcttggcgtaatcatggtcatagctgtttctgtgtgaaantggtatccgctcacaattgcacacaacatacgaaccngggagcataaaatgtgaagcctggggngcctaatgaagtgaactaactcacattaattgggttgggcctantgnccggttttcagtcgggaaacccgtcntgccancttcatttatgaaatggncaaccccccggggaaagcngnntnccnantgggcnctctttcnntttcnnnnttaattgaattnnttnnctacggnnnnnngnntgnggnaaacggnnttaanttnnttnaaangggggnaatncggttttcnaaaaatnagggntanc

SEQ ID NO: 6015 - DNA, 889 bp, Homo sapiens
  misc_feature 647, 661, 793, 805, 807, 834, 858, 863, 870, 881, 889: n = A,T,C or G
cgccgcgtatacgactcactatagggcgaattggagctccccgcggtggcggcccgcccgggcaggtacttttttgtgactgacttttttcatttagcctaatgtcctcaagggtcatgcgtgttgtattctatgtcacagttacctacccttttaaggctaaataatatcaccgtgtgtgtgtgtgtgtatacatatatataccctgcagtttgagaattgtgcatatacatacatatatatcacatttttaaattcattttttaatcaatggacacatgggttgcatctacattttagctattgtgaatatggctgccataaacatggatatacaaatatctccttcagagtgttctttcagtaatcctgggtatatactcagaagtgaaattgctgactcatatggtaattctattttatattttgtaagaaatcacatattgtttttcacaacagttatatcattttacattccaacaacacaaaagttccagtatctctacatccctgccaatacttgttatttcctggcttggcattgttcaatagtggccccttctaggccctaggtcctggatgatatttctaggcacaacctgtgccagaagggaatctgctgccttgaagggaagtatccagttcangcagaatctatcanctgctaccaaagatccctttgactctgaataaccagcagtgattcccaagtagtatgccatgggccctacatgagactctgagacatactggcttcaggtgaccccaaacattggccactggggggagtatnggaaagaaactncntatgcctgaaggaagccaaagggaaangggacttttaattgcaccttaggnccctnggccgtntaaaaactagnggatcccn

SEQ ID NO: 6016 - DNA, 458 bp, Homo sapiens
ggcgaattggagctccaccgcggtggcggccgaggtacgagttgctacgctgctgacagtaataaactgcaaaatcttcaggctctaggctgctgatggtgagagtgaagtctgtcccagacccactgccactgaacctggctgggatgccagtggccctgttggatgcatcatagatgaggagcctgggagcctggccaggtttctgttggtacctgcccgggcggccggctctagaactagtggatcccccgggctgcaggaattcgatatcaagcttatcgataccgtcgacctcgagggggggcccggtacccagcttttgttccctttagtgagggttaattgcgcgcttggcgtaatcatggtcatagctgtttcctgtgtgaaattgttatccgctcacaattccacacaacatacgagccgggagcataaagtgtaaagcctggggtgcc

SEQ ID NO: 6017 - DNA, 422 bp, Homo sapiens
gcgtaataccgactcactatagggcgaattggagctccaccgcggtggcggccgcccgggcaggtacgcgggcttgcctgcactggaaaacagtagatgctcttcaggctctgtgcccccaacagtttctgcgcatcccttctcatccagcctctcactggggggctggcgtcattattcccattttgcagctctggaaatggagtctgcacaagtcctcgctgccttttccctgcctacagtaccactatggtatcctaacacgccacccactctagtgtccctttaggctatttatttatttatttatttattttgagactgtgttccgaaaaaaaaaaaaaaaaaaaaaaaaaaaagtacctcggccgctctagaactagtggatcccccgggctgcaggaattcgatatcaagcttat

SEQ ID NO: 6018 - DNA, 422 bp, Homo sapiens
  misc_feature 3, 422: n = A,T,C or G
gcnccccgtaatacgacctcactatagggcgaattggagctccaccgcggtggcggccgcccgggcaggtactcgcaaaatatgctggaacttttcagggatcactagagacatggctgcagcacaagcggcggcgtgtaggcctcctgtggaagagccccgcgtactattaggactccaattgtcaataccagtcctcaggacctttcctaactttctacctagcacctcaatactctctaggaaactgcattctgacaaagggtttagaacatgtatgcaatcctcatcttttttcctcctctctgtctgtcattcattcgttcattaaaatttagttgagtcaaatacttgcccagacaggcaaaagatatgttaggaacaaagcttttctatcttatatttcttatcttaatcttctn

SEQ ID NO: 6019 - DNA, 440 bp, Homo sapiens
  misc_feature 5, 161, 241, 304, 341, 351, 358, 360, 402, 417, 440: n = A,T,C or G
gagcnccgccgtaatacgactcactatagggcgaattggagctccaccgcggtggcggccgaggtacacaagggttggcctgagtccctgtgttgtgaaagttggcctacaaaatgagtccacagggactgtcatgggttttgagtttatggaggtttgtncattgctggagtctactgggatgagccttggtctgctgagcaggtatggaacctgagtctggggaagtgtggggccatanaggtcagactgaagggtagggttatggggactagcctattacctgcccgggcggccgctctanaactagtggatcccccgggctgcaggaattcgatatnaagcttatcnataccgncnacctcgagggggggcccggtacccagcttttgttccctttantgagggttaattgcncgcttggcgtaatcatggtcatn

SEQ ID NO: 6020 - DNA, 411 bp, Homo sapiens
  misc_feature 7: n = A,T,C or G
gtatacnactcactatagggcgaattggagctccaccgcggtggcggccgcccgggcaggtactaaaaagtgttcctaacagcacaggttgtaatactcctaaactggaaagtagctagatactaaaaaatagtagaatggacaaaggtagcagagcgcggtggctcgtgcctgcctcgacctcccaaagtgctgggattacaggtgtgagtcaccgcagccagccaagtctagatttttccgattcccagttcttaattctttccaggaaactagactgcgcccggccagccctgttgtctttcaaagaacctcggccccagtgatggctgatctcactcccactgtctcgtagaattacactccttcctgaggatccctcttcctgcagccttgtccttggggagtacc

SEQ ID NO: 6021 - DNA, 434 bp, Homo sapiens
gcgtaatacgactcacctatagggcagaattggagctccaccgcggtggcggccgaggtacgcgggtgcttactttgtatttctaattttaggattcacaatttagctggagaactattttttaacctgttgcacctaaacatgattgagctagaagacagttttaccatatgcatgcattttctctgagttatattttaaaatctatacatttctcctaaatatggaggaaatcactggcatcaaatgccagtctcagacggaagacctaaagcccatttctggcctggagctacttggctttgtgacctatggtgaggcataagtgctctgagtttgtgttgcctcttttgtaaaatgagggtttgacttaatcagtgattttcatagcttaaaatttttttgaagaacagaactttttttaaaaacagtta

SEQ ID NO: 6022 - DNA, 370 bp, Homo sapiens
  misc_feature 210, 270, 271, 284, 287, 300, 303, 320, 335, 345, 346, 347,353, 360, 361, 370: n = A,T,C or G
gagcgcgcgtaataccgactcactatagggcgaattggagctccaccgcggtggcggccgaggtcattggtttttagaaacgatgctgaatacataggagcaatccctgagaccagatattcacttcagcagggctctgtgttctcctctggctatgtgagacgagaactcatacccgatcatggctttcgatatccacacatgttacanttcgaaaggggtcacggaagcccggggcagcccatgtgaattcgtgaaccatcacataannccaggaaagaggnccncggcagtgggtcncanccgatacacaatccatnaaccttccctttccnttgttggatnnnttttgnaaaaaanntttttgggn

SEQ ID NO: 6023 - DNA, 410 bp, Homo sapiens
  misc_feature 350, 385, 407: n = A,T,C or G
gagcgcgcgtaatacgactcactatagggccgaattggagctccaccgcggtggcggccgaggtacctttcgggctcctgactcctgccgcttctcttccccttccgtgggtcagggccggtccggtccggaacctgcagcccctttcccagtgttctagttcgcccgtgacccggaataatgagcaaggagggtgtggtgggttgaaagccatcctactttactcccgagttagagcatggattcagttttagtcttaaggggggaagtgaggttggagatttttatttttaattttgggcagaagcaggttgactctagggatctccagagcgagaggatttaacttnatgttgctcccgtgtttgaaggaagacaataaaantcccacccgggcaaaattttcntaa

SEQ ID NO: 6024 - DNA, 404 bp, Homo sapiens
  misc_feature 170, 188, 193, 194, 229, 233, 249, 267, 269, 271, 275, 284,286, 288, 292, 293, 300, 302, 303, 306, 309, 310, 313, 314,315, 321, 325, 330, 332, 338, 339, 345, 354, 357, 358, 361,362, 364, 367, 369, 374, 375, 377, 379, 383, 391, 394: n = A,T,C or G
  misc_feature 398, 399, 400, 401: n = A,T,C or G
gagcgcgcgtaatacgactcactatagggcgaattggagctccaccgcggtggcggccgcccgggcaggtacctggtgctgggaaagagttgactaggccagcatccctttcctcaaagggtggggctcctagactggggggagggctggacatctgaatacatcctgangagacagtgtgggacagnatggnngcagtggaaccagccgtgattctgctcttggtcgnctgnaaaggagtatatgtangggatggtttagaagaangnangtgnacataaacntntntaanntgacaanannaangannggnnnattacnaagncactnanaaggcnncataanccctatgcntanntannanctntntccanngntnaatnggctcatncanacannnncat

SEQ ID NO: 6025 - DNA, 415 bp, Homo sapiens
  misc_feature 5, 387: n = A,T,C or G
gagcnccgcgtaatacgactcactatagggcgaattggagctccaccgcggtggcggccgcccgggcaggtacccttgtgtgtgaggttctagtaattgggttgttttcccaacttaggaatgatccaggccctgggaggcttctttacttactttgtgattctggctgagaacggcttcctcccaattcacctgttgggcctccgagtggactgggatgaccgctggatcaacgatgtggaagacagctacgggcagcagtgggtgagtgggcacctctgacctgaccagtgtcagagctcctcaagccccagaagactgaggccacactgccaccagccatgcaggtgaagagccagagctcatcttctgtcttctgcatttcanacctatgagcagaggaaaatcgtggagt

SEQ ID NO: 6026 - DNA, 388 bp, Homo sapiens
  misc_feature 312: n = A,T,C or G
gagcgcgcgtaatacgactcactatagggcgaattggagctccaccgcggtggcggccgaggtacagatacagtttttaaacctaaagttactggtgaaacaagcttgctattactgagatgtataatgaatgtcttaaagctataaatccactcatcgttgtgtttaaggaggaactgaagcacaattgttaagaacaagtgaattaggtgaatatacatttgacaaaaggttgataataaagttgtcagaatttcaaaaataatttaagtgtgactttggaatcttaaaatcatgttatattaaattaangtaacactttactgatttaatatttgagtcatttcttaaggaaaatactgaaatatcaattgcttaacagaagttt

SEQ ID NO: 6027 - DNA, 414 bp, Homo sapiens
  misc_feature 5, 197, 201, 203, 205, 214, 216, 220, 222, 226, 228, 231,234, 239, 244, 246, 247, 256, 258, 260, 261, 269, 273, 275,281, 285, 287, 289, 292, 295, 298, 300, 305, 308, 309, 310,312, 320, 325, 330, 336, 352, 354, 360, 362, 370, 373: n = A,T,C or G
  misc_feature 386, 394, 397, 399, 404, 407, 412: n = A,T,C or G
gagcnccgcgtaatacgactcactatagggcgaattggagctccaccgcggtggcggccgcccgggcaggtacgcgggatagcaaggactaacccctataccttctgcataatgaattaactagaaaaaaaaaaaaaaaaaaaaaaaaaaaaaaaaaaaaaaaaaaaaaaccaaaaaaaaaaaaaaaaaaaaaaagntccntngnccgcccggncnggtncntttntncantgnaaaantaggnanntgtaaaaanantnncaatggtntttntnaaaatnaaantncnttnaanatntnttgtnaannnantaaaaaangggtnaaaantaaaantttgtaaaattaaaantntaaatngntaaaaaanttnaaaaaataaacanggccaggngtnanggttnacncctgnaa

SEQ ID NO: 6028 - DNA, 410 bp, Homo sapiens
  misc_feature 5: n = A,T,C or G
gagcnccgcgtaatacgactcactatagggcgaattggagctccaccgcggtggcggccgaggtacaggagctaatgatcacgacaaaatctttagctaccatttgtaatactttcctgttgatgctcttgtaagttaccataaacttagtggcttaaaacaacagaaatttcttttcttactattccagaattcagaagtttaaaattggttttactaggccaaaatcaagctgtcaacagacatgcattccttctggaggttctaggggaaaatccgtttcctttccatttttgcttctagaagctggttgcattcattggcttatgacccccttccccatcttcaaagccagcagaatagcattttaaaatctaaatcacatcctctgactccctgctttcatcttc

SEQ ID NO: 6029 - DNA, 406 bp, Homo sapiens
cgcgtaatacgactcactatagggcgaattggagctccaccgcggtggcggccgaggtactctaaggtgattacaggaatatggggcaggcccctttccatctggaaagttcatgagttgagtggagagtcctataaacccagatggaaaccagaaaccagataaaaggctgagaaatcaagggttaaggaggaagagcttactttgaggaagatcccgcgtactgctacatgtagtgagattatttttcaagctgaattgaaaccacacattatataaagtttagcaacaaacaaccatgtagacatgctgcaccatctatcagttaaaaaaaaaaaaatcaaaataggaagcaggctcgggccactcctgtcactgagaggcaatttcatttcctatcctaaaa

SEQ ID NO: 6030 - DNA, 422 bp, Homo sapiens
gagccccgccgtaataccgactcactattagggcgaattggagctccaccgcggtggcggccgcccgggcaggtactacctctaggaagatggtggtgagagtgcacaggggtcagggttgggtggtgagagggttttcaggaaggttcttgtatttggcacaaaggcaccccccgccagagagcagtcaagtcactcccttggagttggaggaagcactggcctgtgacttttgggattaggatgtgccgagttggggtctcctcaccactgcagtagaaaagggctttcctcattcttattaaggttactgtcatcaagtgattatagaaggcgtataattttaaatgctcctttaaaaaaaattgtttcctcttctcacatcattactttgcttttttgcttttttttttttcaggaca

SEQ ID NO: 6031 - DNA, 388 bp, Homo sapiens
  misc_feature 1, 5, 7, 64, 66, 103, 127, 135, 136, 142, 143, 152, 173,183, 205, 243, 256, 260, 261, 262, 278, 281, 282, 283, 336,346, 347, 363, 364, 366, 367, 368, 373, 376: n = A,T,C or G
nagcncnccgtaataccgactcactatagggcgaattggagctccaccgcggtggcggccgacngnccaggtactttttttttttttttttttttttcggtgnatacaaggggctccttcatatatncaatattnnaatatnncgggctgtnttctatcgcaatcttcctcanatctaacttncaatccactggatattaccttntaccatatctaacctaatgtttaatccatccattaagntatttatttaaangtgnnnttcatttctaaaaatncannngggccctttttaaaaatcttctcctttttcatatagcactattattttattangctttctatnncttcctttatctcttnnannnttgcnttnagcacaaggatt

SEQ ID NO: 6032 - DNA, 395 bp, Homo sapiens
  misc_feature 2, 4, 9, 41, 45, 47, 92, 101, 109, 126, 142, 152, 154, 166,179, 182, 191, 197, 232, 246, 258, 264, 266, 325, 395: n = A,T,C or G
tntngggcnaattggagctccaccgcggtggcggccgcggnctcngncactcgaataacccgacatggcgtcaatggttgcggttggcaggngaactgaantatataanaaaagcagtgctgacangtcacatggaaatggnctcgatgacngngaatccttgcanggggcggcagcgngangaaggacanccgatnacaccagccgaagctgcactactagagaccggtanaaatgaatgaggtncccgcgtacctnggccgntntagaactagtggatcccccgggctgcaggaattcgatatcaagcttatcgataccgtcnacctcgagggggggcccggtacccagcttttgttccctttagtgagggttaattgcgcgcttggcgtaan

SEQ ID NO: 6033 - DNA, 429 bp, Homo sapiens
  misc_feature 5, 429: n = A,T,C or G
gagcnccgcgtaatacgactcactatagggcagaattggagctccaccgcggtggcggccgcccgggcaggtacctcagatttcaagcttgtgacccactagctcagcctggccaggttaaattggtgtcttaggttccctgtagaaagggtctgtgattgtcaacctggctgcgtgggagtaaagaaggtgatgtctgtgacaggcccagcactcagggactgagtcctgcactgatgcaggagctgtgtacctcggccgctctagaactagtggatcccccgggctgcaggaattcgatatcaagcttatcgataccgtcgacctcgagggggggcccggtacccagcttttgttccctttagtgagggttaattgcgcgcttggcgtaatcatggtcatagctgtttcctgtgtgaaattgttatn

SEQ ID NO: 6034 - DNA, 410 bp, Homo sapiens
gcgtaataccgactcacctatagggcgaattggagctccaccgcggtggcggccgcccgggcaggtactaggattacaagtgtgaagcactgcgcccagcctcagatggcgaaccttattgtgaactgcacatgccagagatctaggttgtgtgctccttatgagaatctaacgcctgatgatctgtcactgtctcccatcacccccagactatctgggactatctagttgcaggaaaacaagcttaggactccacagattctacattatgatgagttatagaattatttcattatatataacaatgtaataatagaaacaaagtgcacaataaatgtaatgctcttgaatcatcccgaaaccatcccccactaaccctcaggctgtggaaaaattgtcttccacaaaac

SEQ ID NO: 6035 - DNA, 843 bp, Homo sapiens
  misc_feature 8, 10, 21, 28, 33, 38, 66, 68, 69, 73, 77, 82, 86, 91, 93,97, 106, 107, 113, 116, 117, 123, 124, 127, 128, 130, 131,132, 138, 144, 150, 151, 154, 155, 158, 162, 164, 175, 181,185, 191, 193, 194, 197, 209, 213, 214, 218, 220, 235: n = A,T,C or G
  misc_feature 236, 242, 244, 266, 281, 289, 295, 297, 301, 312, 316, 320,321, 323, 324, 328, 332, 335, 350, 380, 399, 416, 510, 533,561, 571, 579, 585, 589, 597, 616, 625, 628, 653, 656, 664,666, 681, 687, 694, 700, 713, 725, 746, 747, 754, 763: n = A,T,C or G
  misc_feature 767, 768, 780, 781, 782, 783, 784, 785, 786, 787, 788, 790,791, 792, 793, 794, 795, 796, 797, 798, 799, 800, 801, 803,804, 805, 808, 809, 818, 822, 823, 825, 832, 833, 834, 835,837, 839, 840: n = A,T,C or G
agtccgtnangcgcgttatangacttantatanggctnattggagctccccgcggtggcggcccgncnngccnggtnctccntatntattnanggtntactgatgnnatgctnagnngggatnnacnntnnngaacanaggaanctgcannctnnacntgantnacatgctgacncttgtntccntagccnannctnacataacagacntctnnttgncnggtccagctcatatnnattaangnatacacacacctactggagtanaatatcaaacttatncttacctngaaccnanaggnggggcccactncctntctnncnntctntttnttnactggataaaggccnactataggtaatcatgtttcataattggtnactaatgataaatgttcanatgccatggactttcantatggttcacaaagagtggaaaccacaaatgataatctgtgaattccaagctactgtattatatggatatatgaatatagtttatgaatatatnttaaacaaaaataggatcatacnatgatgatgctttacaacttgctctttntaattaacantatctttncatttnaacncatacaancctaacttttttttaagtnttcattatntanatataccacaaccttttaaactatncanttgacctntnaacaacctggatttnaactgnatgggtncccttnccatggatttttnaaaataaatttnttggaaaatttttgaaatttnnacatttnaaaaatttnaaannaacttttccttnnnnnnnnnannnnnnnnnnnncnnnggnnttttaaaanaggnnancccccgnnnnanannttt

SEQ ID NO: 6036 - DNA, 840 bp, Homo sapiens
  misc_feature 13, 24, 68, 89, 90, 91, 99, 108, 111, 113, 115, 117, 119,120, 121, 130, 133, 134, 138, 139, 145, 157, 158, 160, 166,167, 168, 179, 180, 181, 190, 191, 192, 193, 196, 209, 210,220, 223, 224, 226, 230, 231, 239, 242, 245, 258, 276: n = A,T,C or G
  misc_feature 308, 315, 322, 330, 333, 381, 391, 395, 400, 402, 409, 419,457, 458, 473, 474, 475, 476, 477, 482, 484, 485, 508, 509,512, 514, 522, 523, 526, 527, 528, 532, 533, 534, 535, 549,550, 552, 553, 557, 558, 566, 568, 569, 570, 571, 572: n = A,T,C or G
  misc_feature 573, 574, 575, 576, 577, 578, 579, 581, 582, 583, 584, 585,586, 587, 588, 589, 590, 591, 592, 593, 594, 595, 596, 597,598, 599, 600, 601, 602, 603, 605, 606, 607, 608, 609, 610,611, 612, 613, 614, 615, 616, 617, 618, 619, 620, 621: n = A,T,C or G
  misc_feature 622, 623, 624, 625, 626, 627, 628, 629, 630, 631, 632, 633,634, 635, 636, 637, 638, 639, 640, 641, 642, 643, 644, 645,646, 647, 648, 649, 650, 651, 652, 653, 654, 655, 656, 657,658, 659, 660, 661, 662, 663, 664, 665, 666, 667, 668: n = A,T,C or G
  misc_feature 669, 670, 671, 672, 673, 674, 675, 676, 677, 678, 679, 680,681, 682, 683, 684, 685, 686, 687, 688, 689, 690, 691, 692,693, 694, 695, 696, 697, 698, 699, 700, 701, 702, 703, 704,705, 706, 707, 708, 709, 710, 711, 712, 713, 714, 715: n = A,T,C or G
  misc_feature 716, 717, 718, 719, 720, 721, 722, 723, 724, 725, 726, 728,729, 730, 731, 732, 733, 734, 735, 736, 737, 738, 739, 740,741, 742, 743, 744, 745, 746, 747, 748, 749, 750, 751, 752,753, 754, 755, 758, 759-765, 768-804, 806-840: n = A,T,C or G
gccgtatcgactnactatagggcnaattggagctccccgcggtggcggccgcccgggcaggtactttnttttttttttttttttgaaannnaaaaaaanttttttggnttntncngngnnnaaacaaaanccnntttnnccccanccctgaaaattnngnaaaaannnttgtttttttnnnccccccttnnnnttnttttttttttttnntttccctttntcnntnctgnngggggggnggncanaagacttcatttntcatcacaaacatgagcnaaaagcacatacctaccccatgcctcaccccnacacacncacacanatgcacanaanacatacacacacacgcacagaggtgaacagaaactgaaacattttgtncacaacttcncggnacgtngncagactnggtttgcgtntcaacctgcaaaacacaaatacattttttaaaatcaannaaaaaaaaataaaannnnntcccncnngggggggcccccccccggggagnnccncntttccccnnaannngaannnnttaacccccccctnntnngggnnttttttanannnnnnnnnnnnannnnnnnnnnnnnnnnnnnnnnntnnnnnnnnnnnnnnnnnnnnnnnnnnnnnnnnnnnnnnnnnnnnnnnnnnnnnnnnnnnnnnnnnnnnnnnnnnnnnnnnnnnnnnnnnnnnnnnnnnnnnnnnnnnnnnnnnnnnnnnnnnannnnnnnnnnnnnnnnnnnnnnnnnnnntannnnnnnnnnnnnnnnnnnnnnnnnnnnnnnnnnnnnnnnnnnnnnnannnnnnnnnnnnnnnnnnnnnnnnnnnnnnnnnnn

SEQ ID NO: 6037 - DNA, 852 bp, Homo sapiens
  misc_feature 6, 34, 94, 109, 121, 147, 150, 152, 154, 159, 163, 165, 170,173, 178, 183, 184, 185, 197, 198, 204, 205, 206, 223, 225,228, 231, 232, 235, 236, 243, 244, 246, 247, 248, 249, 250,256, 264, 266, 271, 278, 282, 286, 287, 306, 312: n = A,T,C or G
  misc_feature 318, 319, 322, 335, 344, 346, 347, 350, 356, 370, 372, 390,394, 412, 426, 435, 439, 441, 457, 477, 479, 489, 490, 503,512, 513, 514, 524, 540, 552, 553, 565, 575, 593, 594, 603,614, 617, 626, 628, 629, 630, 631, 632, 633, 634, 635: n = A,T,C or G
  misc_feature 636, 637, 638, 639, 640, 641, 643, 644, 645, 646, 647, 648,649, 650, 651, 652, 653, 654, 655, 656, 657, 658, 659, 660,661, 662, 663, 664, 665, 666, 667, 668, 669, 670, 671, 672,673, 674, 675, 676, 677, 678, 679, 680, 681, 682, 683: n = A,T,C or G
  misc_feature 684, 685, 686, 687, 688, 689, 690, 691, 692, 693, 694, 695,696, 697, 698, 699, 700, 701, 702, 703, 704, 705, 706, 707,708, 709, 710, 711, 712, 713, 714, 715, 716, 717, 718, 719,720, 721, 723, 724, 725, 726, 727, 728, 729, 730, 731: n = A,T,C or G
  misc_feature 732, 733, 734, 735, 736, 737, 738, 739, 740, 741, 742, 743,744, 745, 746, 747, 748, 749, 750, 751, 752, 753, 754, 755,756, 758, 760, 761, 762, 763, 764, 765, 766, 768, 769, 770,771, 772, 773, 774, 775, 776, 777, 778, 779, 780, 781: n = A,T,C or G
  misc_feature 782, 783, 784, 785, 786, 787, 788, 789, 790, 791, 792, 793,794, 795, 796, 797, 798, 799, 800, 801, 802, 803, 804, 805,806, 807, 808, 809, 810, 811, 812, 813, 814, 815, 816, 817,818, 819, 820, 821, 822, 823, 824, 825-848, 850-851: n = A,T,C or G
agccgnaacgcataatacgacttactatagggcnaattggagctccccgcggtggcggccgaggtactttttttttttttttttttttttaaangattttttttttttntttttttttttnttttttttttttttttttttttccgnccncncnccctntaantnataantanaactnacggnnnaaaaaaaaaaanngtgttnnntttattaaaaaaaaaananttngtnnttnntaaatgnnannnnncttttnccccttgntnagttnataaaancatnctannacctgccattctgactttnttaaanaaaaannaanaccagaggggggnggagatgtnannagnaaaacnagatgggggaaaananaaaaaaattgctttatgngggnccaaaatctttttgtatngtaaaaaatgcacntttattatngctngngcctcaactgtttaantgaatattaaagggcttggngngggggggttnnaaaaaaaaaaaanccccccccnnngggggaaaantttttttttttttttnttttcccccccnngggggggggggncccccccccntttttttttttttttaannaaaaaaaanccccccccccnaanaaaaaaaanannnnnnnnnnnnnntnnnnnnnnnnnnnnnnnnnnnnnnnnnnnnnnnnnnnnnnnnnnnnnnnnnnnnnnnnnnnnnnnnnnnnnnnnnnnnnannnnnnnnnnnnnnnnnnnnnnnnnnnnnnnnnnanannnnnnnannnnnnnnnnnnnnnnnnnnnnnnnnnnnnnnnnnnnnnnnnnnnnnnnnnnnnnnnnnnnnnnnnnnnnnnnnnnnnnnnannc

SEQ ID NO: 6038 - DNA, 854 bp, Homo sapiens
  misc_feature 3, 4, 5, 6, 7, 11, 279, 332, 405, 423, 465, 506, 519, 576,583, 585, 589, 590, 591, 593, 594, 595, 596, 597, 598, 599,600, 601, 602, 603, 604, 605, 606, 607, 608, 609, 610, 611,612, 613, 614, 615, 616, 617, 618, 619, 620, 621, 622: n = A,T,C or G
  misc_feature 623, 624, 625, 626, 627, 628, 629, 630, 631, 632, 633, 634,635, 636, 637, 638, 639, 640, 641, 642, 643, 644, 645, 646,647, 648, 649, 650, 651, 652, 653, 654, 655, 656, 657, 658,659, 660, 661, 662, 663, 664, 665, 666, 667, 668, 669: n = A,T,C or G
  misc_feature 670, 671, 672, 673, 674, 675, 676, 677, 678, 679, 680, 681,682, 683, 684, 685, 686, 687, 688, 689, 690, 691, 692, 693,694, 695, 696, 697, 698, 699, 700, 701, 702, 703, 704, 705,706, 707, 708, 709, 710, 711, 712, 713, 714, 715, 716: n = A,T,C or G
  misc_feature 717, 718, 719, 720, 721, 722, 723, 724, 725, 726, 727, 728,729, 730, 731, 732, 733, 734, 735, 736, 737, 738, 739, 740,741, 742, 743, 744, 745, 746, 747, 748, 749, 750, 751, 752,753, 754, 755, 756, 757, 758, 759, 760, 761, 762, 763: n = A,T,C or G
  misc_feature 764, 765, 766, 767, 768, 769, 770, 771, 772, 773, 774, 775,776, 777, 778, 779, 780, 781, 782, 783, 784, 785, 786, 787,788, 789, 790, 791, 792, 793, 794, 795, 796, 797, 798, 799,800, 801, 802, 803, 804, 805, 806, 807, 808, 809, 810: n = A,T,C or G
  misc_feature 811, 812, 813, 814, 815, 816, 817, 818, 819, 820, 821, 822,823, 824, 825, 826, 827, 828, 829, 830, 831, 832, 833, 834,835, 836, 837, 838, 839, 840, 841, 842, 843, 844, 845, 846,847, 848, 849, 850, 851, 852, 853, 854: n = A,T,C or G
agnnnnnggcncgcgtatacgactactatagggcgaattggagctccaccgcggtggcggccgaggtactcaagccacctgcctgtcatggccccccaaaatgctgggattgcaggccaccataaccggtcatcggggcaactatccttcagggcttcctccagtagggctccccaggttggccttgagggccacaataaaaaatctgacttagctatactccttccctgtccccaaccacagttattcttgtggatgaggcaaatggcagcaggacanctggagtataccatagttgactcatttattttatgcatgcttagtgtggcatncctggggacatgaaattccagtgaaatccagtctttgtgctggagaagctcatagatctgtgggaggaagcanatgccccccactcactgnacctgcccgggcggccgctctagaactaatggattccccggncttgaagaattctatttaagcttattgataccgtcgacctntaaggggggcccngtcccaacttttggtccctttaatgaaggttaattgccgcttggcgtaatcatggtnatagctngntttnnngnnnnnnnnnnnnnnnnnnnnnnnnnnnnnnnnnnnnnnnnnnnnnnnnnnnnnnnnnnnnnnnnnnnnnnnnnnnnnnnnnnnnnnnnnnnnnnnnnnnnnnnnnnnnnnnnnnnnnnnnnnnnnnnnnnnnnnnnnnnnnnnnnnnnnnnnnnnnnnnnnnnnnnnnnnnnnnnnnnnnnnnnnnnnnnnnnnnnnnnnnnnnnnnnnnnnnnnnnnnnnnnnnnnnnnnnnnnnnnnnnnnnnnnnnnnnnnnnnnnnnn

SEQ ID NO: 6039 - DNA, 846 bp, Homo sapiens
  misc_feature 165, 170, 205, 225, 228, 366, 401, 450, 482, 500, 554, 588,589, 594, 597, 598, 599, 600, 601, 602, 603, 604, 605, 606,607, 608, 609, 610, 611, 612, 613, 614, 615, 616, 617, 618,619, 620, 621, 622, 623, 624, 625, 626, 627, 628, 629: n = A,T,C or G
  misc_feature 630, 631, 632, 633, 634, 635, 636, 637, 638, 639, 640, 641,642, 643, 644, 645, 646, 647, 648, 649, 650, 651, 652, 653,654, 655, 656, 657, 658, 659, 660, 661, 662, 663, 664, 665,666, 667, 668, 669, 670, 671, 672, 673, 674, 675, 676: n = A,T,C or G
  misc_feature 677, 678, 679, 680, 681, 682, 683, 684, 685, 686, 687, 688,689, 690, 691, 692, 693, 694, 695, 696, 697, 698, 699, 700,701, 702, 703, 704, 705, 706, 707, 708, 709, 710, 711, 712,713, 714, 715, 716, 717, 718, 719, 720, 721, 722, 723: n = A,T,C or G
  misc_feature 724, 725, 726, 727, 728, 729, 730, 731, 732, 733, 734, 735,736, 737, 738, 739, 740, 741, 742, 743, 744, 745, 746, 747,748, 749, 750, 751, 752, 753, 754, 755, 756, 757, 758, 759,760, 761, 762, 763, 764, 765, 766, 767, 768, 769, 770: n = A,T,C or G
  misc_feature 771, 772, 773, 774, 775, 776, 777, 778, 779, 780, 781, 782,783, 784, 785, 786, 787, 788, 789, 790, 791, 792, 793, 794,795, 796, 797, 798, 799, 800, 801, 802, 803, 804, 805, 806,807, 808, 809, 810, 811, 812, 813, 814, 815, 816, 817: n = A,T,C or G
  misc_feature 818, 819, 820, 821, 822, 823, 824, 825, 826, 827, 828, 829,830, 831, 832, 833, 834, 835, 836, 837, 838, 839, 840, 841,842, 843, 844, 845, 846: n = A,T,C or G
agcctatcgactactatagggcgaattggagctccccgcggtggcggccgcccgggcaggtacctgtaggaggtggctggagacccctgttgggaggtctcacccagtcaggaggaatgagatcaggggcccacttaaagaagtagtctggctgctttttggtancacanctatgctgcatggtggaggacccttcctcatccantctggactctcacaaagcangcngactggaatagctgagttgatcaaactgcaaagatagtggccaccactccatctgggaactcaatccatcttaggcagacttcaacctgtcaccactggctggctggaattccaagccagcaggtcttaacttgtaangtgctgtgaaagtggggcccacataacaagactgnttggctccctggattcagccccctttaggtgtacctcggcccgctctanaactagtggatcccccgggctgcaggaattcnatatcaagcttatcgatnccgtcgacctctagggggggcccggtcccaacttttggtccctttaatgagggntaattgccgcttggcgtaatcatggtcatagctnnttttnccnnnnnnnnnnnnnnnnnnnnnnnnnnnnnnnnnnnnnnnnnnnnnnnnnnnnnnnnnnnnnnnnnnnnnnnnnnnnnnnnnnnnnnnnnnnnnnnnnnnnnnnnnnnnnnnnnnnnnnnnnnnnnnnnnnnnnnnnnnnnnnnnnnnnnnnnnnnnnnnnnnnnnnnnnnnnnnnnnnnnnnnnnnnnnnnnnnnnnnnnnnnnnnnnnnnnnnnnnnnnnnnnnnnnnnnnnnnnnnnnnnnnnnnnnn

SEQ ID NO: 6040 - DNA, 827 bp, Homo sapiens
  misc_feature 25, 26, 131, 145, 161, 256, 390, 432, 437, 474, 480, 484,522, 535, 538, 547, 560, 594, 623, 634, 652, 659, 664, 668,670, 671, 673, 678, 710, 716, 717, 720, 742, 744, 749, 752,753, 754, 755, 756, 757, 758, 759, 760, 764, 765, 766: n = A,T,C or G
  misc_feature 767, 768, 769, 770, 771, 772, 773, 774, 775, 776, 777, 778,779, 780, 781, 782, 783, 784, 785, 786, 787, 788, 789, 790,791, 792, 793, 794, 795, 796, 797, 798, 799, 800, 801, 802,803, 804, 805, 806, 807, 808, 809, 810, 811, 812, 813: n = A,T,C or G
  misc_feature 814, 815, 816, 817, 818, 819, 820, 821, 822, 823, 824, 825,826, 827: n = A,T,C or G
gcccttatcgactcactatagggcnnattggagctccaccgcggtggcggccgaggtacaggagggactttgtggagaattcagggtggcagaataagctcctgagaatttaacttaatcttattcttctnaaatttagcttcantgaagagaaatgaaanctattgtttctcattctcacatctcccagaaagtaacattgaaggtaatctcagtgtccttgaagttagcctttttgagtggttaagttgaaaanaagttctatcttggtgggctcccccagaggctaaatgggcctttgcattgggaggtcaaagtccgggttcatgccattctcccgcctcagcctcctgagtagctgggactacagcccatgaggctactgagctncagtttttgtttgaagatggaggagaagaagagggtctcacngttanaagtggccccatcccttggggtgtctaaaagcttccngatacntacnaaagtcaggggttgcaattctcaagttggaagacatangaacccatttgangcntagcctctnatgtgacgatccnccagggggatgcctgcttggcaccttccaggganaaagaattattacctgcccggccggccgntctaaaactantggatcccccggctggangaattcnttccncttntnntnccgcnacctcagggggggccccggccccacttttgtncccttnnganggtaattggcccccttgcctancntgggntannnnnnnnntcgnnnnnnnnnnnnnnnnnnnnnnnnnnnnnnnnnnnnnnnnnnnnnnnnnnnnnnnnnnnnnnnn

SEQ ID NO: 6041 - DNA, 867 bp, Homo sapiens
  misc_feature 12, 28, 80, 81, 98, 99, 103, 109, 110, 113, 114, 119, 120,127, 141, 143, 162, 167, 193, 200, 205, 211, 254, 491, 602,699, 707, 715, 719, 723, 731, 739, 741, 742, 748, 772, 787,788, 800, 804, 811, 825, 826, 849, 854, 863, 865, 866: n = A,T,C or G
  misc_feature 867: n = A,T,C or G
agccctaagagngcgtaatacgacttantatagggctaattggagctccccgcggtggcggccgcccgggcaggtacttnnttttttttttttttttnntttnaaattnntgnnttctnnttgattnattttttttatatntnccgaggtctttttttttanaaaanttacaaaaaatgacttttaaaaatanaaatatnttttnatactnttgggaactacttttaagcaaccaaggagttagaactcaaatngttttcttctttgtaacagcaacaatgaccacggctctgtgccatggcaatcactgctgagtgtcttctcctacaattacacaggcccgagctgtgtctggtggaaaggtctccactcaggtcagagtctgaaggagcaagatcttctcattaatgcagaacctgtgcagaaccaccatcagattctctccacagcgggagacctggcgctccatggccaggcgaaagtcctccttnacgcctttggtgatgcctcgagttacaagtgtggtgcttgatcaacattcctttgattgggtagtaatttccagatgaatttttcccaccttccttgagttctcaaagtangcaaaattccttcaaccatattaatatttgtaaccgtacctgccccgggcgggccgaaggacttttggatttttttttttaaaaaaaaaggggtttncccagggnggccagcntggnttgnaaaatccnggcctaangnnaatttnccaccttattccttcaaaaagtgntggggattacaaggnnttaaccccttgncctnggccttnaaaaacatttttanncattttttctaaaaatttttaanccctntaatggtanannn

SEQ ID NO: 6042 - DNA, 867 bp, Homo sapiens
  misc_feature 8, 20, 25, 79, 82, 97, 132, 164, 168, 231, 268, 272, 275,276, 277, 279, 284, 290, 295, 303, 307, 314, 315, 317, 335,345, 356, 366, 369, 373, 377, 384, 385, 386, 390, 396, 400,412, 418, 419, 423, 436, 441, 442, 443, 444, 445, 446: n = A,T,C or G
  misc_feature 448, 449, 450, 451, 453, 454, 455, 456, 457, 459, 460, 461,462, 463, 465, 470, 473, 474, 475, 476, 477, 478, 479, 480,481, 482, 483, 484, 485, 486, 488, 489, 490, 491, 493, 495,496, 498, 501, 502, 503, 504, 506, 510, 511, 512, 513: n = A,T,C or G
  misc_feature 514, 515, 516, 517, 518, 519, 521, 522, 524, 525, 528, 531,532, 533, 534, 535, 536, 537, 538, 539, 540, 541, 542, 543,544, 545, 546, 547, 548, 550, 551, 553, 554, 556, 560, 561,562, 563, 564, 566, 567, 568, 569, 570, 572, 573, 574: n = A,T,C or G
  misc_feature 576, 577, 578, 579, 580, 581, 582, 584, 586, 588, 589, 590,591, 592, 594, 595, 596, 597, 598, 599, 600, 601, 603, 604,606, 607, 612, 614, 615, 617, 618, 619, 620, 621, 622, 623,624, 625, 626, 627, 628, 629, 630, 632, 636, 637, 638: n = A,T,C or G
  misc_feature 639, 640, 641, 644, 645, 646, 647, 648, 649, 651, 652, 653,654, 655, 658, 659, 660, 661, 662, 663, 664, 665, 666, 667,668, 669, 670, 671, 672, 674, 677, 678, 679, 680, 682, 684,685, 686, 687, 688, 689, 690, 691, 692, 693, 694, 695: n = A,T,C or G
  misc_feature 696, 698-704, 706-723, 725, 727-730, 731, 732, 735, 737-740,743, 747, 749, 751, 752, 753, 756, 757, 759-776, 778, 781-783,787-789, 781-785, 787, 789-798, 802-805, 808, 812-815, 818-830,832-839, 841-851, 853-854, 856-857, 859-862, 864, 866-867: n = A,T,C or G
gtcctaancgactactatgnggtanttggggctgattggagctccccgcggtggcggccgggggccattgagactgccntgnaagacttgaaaggtnacgtagctgacacttctggagagaccattcaaggnttctggctcttgacaaaaacggatccattaanccancaccaaggagaacatcttgacactttatggaatttcaaaaagtatgatatgatggcaataaantggctcttcagccaaaaaaaaatgaaagcaatccgtnttcntcnnncnctctntaaaanatggntccccccngctncaggaanncnattttaaccttttttatncccccgaccnccagggggggncccccccccnccntttnttcnctttttnnngggnttattnggcncttggggtaaanatggtnntaangtgttttttgganaaaannnnnnannnntnnnnnannnnntnattanaannnnnnnnnnnnnnannnngntnnanttnnnnantttnnnnnnnnnngnntnnttnttnnnnnnnnnnnnnnnnnntnntnncntttnnnnntnnnnntnnntnnnnnnnantntnnnnnannnnnnnnannannatatnannannnnnnnnnnnnnntntttnnnnnnaannnnnntnnnnnttnnnnnnnnnnnnnnnanaannnnanannnnnnnnnnnnntnnnnnnntnnnnnnnnnnnnnnnnnntntnnnnnnttntnnnntantagngngnnnttnncnnnnnnnnnnnnnnnnnnanaannnattnnntnnnnnantnnnnnnnnnnaaannnnaannnnnnnnnnnnnannnnnnnnannnnnnnnnnntnntnnannnnangnn

SEQ ID NO: 6043 - DNA, 825 bp, Homo sapiens
  misc_feature 1, 3, 11, 15, 18, 27, 399, 403, 407, 409, 411, 416, 417,422, 423, 426, 428, 434, 441, 443, 447, 448, 451, 452, 454,455, 456, 457, 463, 465, 466, 467, 469, 470, 474, 475, 483,485, 488, 492, 495, 496, 497, 504, 506, 508, 510, 511: n = A,T,C or G
  misc_feature 519, 523, 527, 531, 544, 545, 553, 582, 590, 591, 592, 595,597, 599, 602, 603, 608, 610, 630, 644, 645, 646, 658, 666,668, 669, 675, 678, 682, 683, 684, 685, 686, 687, 688, 689,692, 693, 694, 695, 696, 697, 698, 699, 700, 701, 702: n = A,T,C or G
  misc_feature 703, 704, 705, 706, 707, 708, 709, 710, 711, 712, 713, 714,715, 716, 717, 718, 719, 720, 721, 722, 723, 724, 725, 726,727, 728, 729, 730, 731, 732, 733, 734, 735, 736, 737, 738,739, 740, 741, 742, 743, 744, 745, 746, 747, 748, 749: n = A,T,C or G
  misc_feature 750, 751, 752, 753, 754, 755, 756, 757, 758, 759, 760, 761,762, 763, 764, 765, 766, 767, 768, 769, 770, 771, 772, 773,774, 775, 776, 777, 778, 779, 780, 781, 782, 783, 784, 785,786, 787, 788, 789, 790, 791, 792, 793, 794, 795, 796: n = A,T,C or G
  misc_feature 797, 798, 799, 800, 801, 802, 803, 804, 805, 806, 807, 808,809, 810, 811, 812, 813, 814, 815, 816, 817, 818, 819, 820,821, 822, 823, 824, 825: n = A,T,C or G
nancgcgtatngacntanttgagggcngattggagctccccgcggtggcggccgaggtacagtgcagaggactggaatggatataatgtctgcaaaacaaaaacatgtctagtgagccatctactaatctcaaccactggtctaactcatgacagtctcaaaatgaatatttaagaaaaaagtagtggcatctaaaaatatagacgttttgcaactgactcagggagagctctttcttcaactactgaatatactggttttaaatgatggagtgagacaaagaggctcttgctgacgtgctctactttgatttctatcctaaaatctaacaggtaatcaatgtgtttggctacctataggagcatccaccaactgatatcattttttttttttttttgnaaanaaantntnttttnnccccnnagntngggggncaggggncnaatnnccnntnnnngaaccntnnncnncccnnttaaaggnanttntccnccnnnacccccnantntnngggaatancggntttntccntcccgggggggcnntttaaaanttggggtccccccgggtggggggaatttnaatttaannnttntnanccnnccccncngggggggggcccgcccccanttttttcccttttnnngggggtaaatgnccccctgngnnaataanggnaaannnnnnnnccnnnnnnnnnnnnnnnnnnnnnnnnnnnnnnnnnnnnnnnnnnnnnnnnnnnnnnnnnnnnnnnnnnnnnnnnnnnnnnnnnnnnnnnnnnnnnnnnnnnnnnnnnnnnnnnnnnnnnnnnnnnnnnnnnnnnnn

SEQ ID NO: 6044 - DNA, 847 bp, Homo sapiens
  misc_feature 2, 5, 14, 22, 24, 29, 33, 421, 548, 551, 554, 557, 601, 604,617, 644, 649, 659, 674, 716, 717, 718, 719, 720, 729, 738,740, 744, 764, 765, 769, 770, 771, 779, 781, 786, 787, 788,791, 792, 811, 812, 817, 827, 837: n = A,T,C or G
tnttnggagtcgtnttcgactnantatanggcnaattggagctccccgcggtggcggccgcccgggcaggtacctttggttaagagtagacaaggcagacatctgagcctgcatgactcatcaagtttagggtgcaggcacatactccacttgttgtataacctgtttgtgtaagctgatacttgccttggagccactattgtctgtaaaaggtataactgccctgctgacactgtgcatgggggacatggcttggcttggctcttgggcatggcttgacatggctcttgcgctcatgcccagagagagaaggagataaactgctgaccctgaagggagagctggccacacagctgtgcgtgggggcagccgcagcaagcagccgagacagaacagacagtgtagaagagctgctgatgancgagctgctgaataaagccatatttcccctactgacagccccccgagtgttgtttcagctatctgccattcatcccccacttccttcaaaccttaacatgggctggaacttggacttgaacctgacncanaanaanccagaaaatagttgtttggctgggtgccggtgctcacacctgtnatnccagcacttttanaaaacaaggtgggcaaatactttgaancacangaatttaaanaacaacctgggcganacaaaaaaaaccgtctttaccaaaaaaaaaaaaaaaaaaaannnnncttgggccntttaaaaanangggncccccggggcggggaaattnntttnnntttttttnanccccnnnccnngggggggggcgggcccccnntttgncccctttaanggggtaaaanccccctggcc

SEQ ID NO: 6045 - DNA, 855 bp, Homo sapiens
  misc_feature 1, 9, 15, 85, 96, 97, 124, 126, 132, 143, 155, 317, 327,369, 489, 496, 520, 556, 599, 600, 601, 603, 605, 606, 607,608, 609, 610, 611, 613, 614, 615, 616, 617, 618, 619, 620,621, 622, 623, 624, 625, 626, 627, 628, 629, 630, 631: n = A,T,C or G
  misc_feature 632, 633, 634, 635, 636, 637, 638, 639, 640, 641, 642, 643,644, 645, 646, 647, 648, 649, 650, 651, 652, 653, 654, 655,656, 657, 658, 659, 660, 661, 662, 663, 664, 665, 666, 667,668, 669, 670, 671, 672, 673, 674, 675, 676, 677, 678: n = A,T,C or G
  misc_feature 679, 680, 681, 682, 683, 684, 685, 686, 687, 688, 689, 690,691, 692, 693, 694, 695, 696, 697, 698, 699, 700, 701, 702,703, 704, 705, 706, 707, 708, 709, 710, 711, 712, 713, 714,715, 716, 717, 718, 719, 720, 721, 722, 723, 724, 725: n = A,T,C or G
  misc_feature 726, 727, 728, 729, 730, 731, 732, 733, 734, 735, 736, 737,738, 739, 740, 741, 742, 743, 744, 745, 746, 747, 748, 749,750, 751, 752, 753, 754, 755, 756, 757, 758, 759, 760, 761,762, 763, 764, 765, 766, 767, 768, 769, 770, 771, 772: n = A,T,C or G
  misc_feature 773, 774, 775, 776, 777, 778, 779, 780, 781, 782, 783, 784,785, 786, 787, 788, 789, 790, 791, 792, 793, 794, 795, 796,797, 798, 799, 800, 801, 802, 803, 804, 805, 806, 807, 808,809, 810, 811, 812, 813, 814, 815, 816, 817, 818, 819: n = A,T,C or G
  misc_feature 820, 821, 822, 823, 824, 825, 826, 827, 828, 829, 830, 831,832, 833, 834, 835, 836, 837, 838, 839, 840, 841, 842, 843,844, 845, 846, 847, 848, 849, 850, 851, 852, 853, 854, 855: n = A,T,C or G
ncgcgtatngaccgngtatacgacttactatagggcgaattggagctccaccgcggtgggcggccgcccgggcaggtacacatcngctcctgggcnnaccttacaagtatctcaaactcatatntncatganaggtatataanctacgtagacangggaagccaagataacagggaagacaggagactatctgcctatctaaaaacactcaaattcttttctataagcactgctgatttaatccattacaccaccagcagctgccagtttacaatctctgctacacaagccctccattgagtttaaagacaaccgtnaaaatatctntccagtttctccattcacctgactgttaccatagagaatgcnggtattcccactctggcctgctgtgtgcagggttttctcctatcagaatccaaaccacctaccagtccccgtaccttggccgctctagaactagtggatcccccgggctgcaggaattcnatatcangcttatcgatacccgtcgacctcnagggggggcccggtacccaacttttgttccctttantgagggttaattgcgcgcttggcgtaatcatggtcatagctgnnntngnnnnnnnannnnnnnnnnnnnnnnnnnnnnnnnnnnnnnnnnnnnnnnnnnnnnnnnnnnnnnnnnnnnnnnnnnnnnnnnnnnnnnnnnnnnnnnnnnnnnnnnnnnnnnnnnnnnnnnnnnnnnnnnnnnnnnnnnnnnnnnnnnnnnnnnnnnnnnnnnnnnnnnnnnnnnnnnnnnnnnnnnnnnnnnnnnnnnnnnnnnnnnnnnnnnnnnnnnnnnnnnnnnnnnnnnnnnnnnnnnnnnnnnnn

SEQ ID NO: 6046 - DNA, 850 bp, Homo sapiens
  misc_feature 3, 4, 5, 6, 10, 155, 246, 267, 268, 271, 303, 304, 306, 311,312, 314, 316, 326, 340, 345, 346, 348, 359, 376, 380, 381,382, 384, 385, 389, 395, 411, 444, 445, 463, 471, 492, 495,504, 506, 511, 519, 538, 546, 551, 566, 576, 583: n = A,T,C or G
  misc_feature 592, 604, 639, 655, 660, 664, 675, 687, 693, 701, 713, 714,717, 718, 720, 721, 732, 738, 745, 746, 751, 768, 776, 785,791, 794, 799, 828, 832, 841, 844: n = A,T,C or G
agnnnnatgngcgcgtatacgactactatagggcgaattggagctccaccgcggtggcggccgaggtactatgccttttcctccactctgagagtttgaacaaaagaattcaatgacctgatctttttaacaaaattaaaaatttaaatgtcctnatttttgaaaaacctaaactcagtgctcataggttatttggcatacagcaagaatttggttaaagaggaatatgaagtggaacttggtttntaagtcatacatagcagatgnntangtgtgtgttttccacacttaaatgaggccacnnantcttnnananactttaactnaccccctacccccntccanngngatcattggtncctttgctggagagttngctnnntnntttntaatgngcgtcttccttaatgncagcatgcctgtttttccagccacccaagcacnntgttttataaacattcanctgccaanataaaagactatacatgaacnccngctctgggngntgtanaagtgctnaatgctccgctcccttttnaggggcanatgtntaaatgaatttgtcngccctctggntgtcatnttttttccncccggaaagaanggttgacctcccagctttcgtgattggttacgccnttttgaacttaagccnacacncccnccattggggtnccattgggtccncctganaggggtanggggggaatttnnatnntnngaagaaaagcnggcttnttttaanngtgtnaatggaaggatttcccntttccaanggggcgttnaaactnaancccanttggacccccctggacccaaacccggtcnttgnccaggtccnggnggccct

SEQ ID NO: 6047 - DNA, 814 bp, Homo sapiens
  misc_feature 3, 35, 216, 225, 276, 316, 326, 397, 451, 468, 491, 509,514, 526, 528, 565, 590, 597, 672, 677, 680, 682, 683, 684,685, 686, 690, 692, 693, 694, 695, 696, 697, 698, 699, 700,701, 702, 703, 704, 705, 706, 707, 708, 709, 710, 711: n = A,T,C or G
  misc_feature 712, 713, 714, 715, 716, 717, 718, 719, 720, 721, 722, 723,724, 725, 726, 727, 728, 729, 730, 731, 732, 733, 734, 735,736, 737, 738, 739, 740, 741, 742, 743, 744, 745, 746, 747,748, 749, 750, 751, 752, 753, 754, 755, 756, 757, 758: n = A,T,C or G
  misc_feature 759, 760, 761, 762, 763, 764, 765, 766, 767, 768, 769, 770,771, 772, 773, 774, 775, 776, 777, 778, 779, 780, 781, 782,783, 784, 785, 786, 787, 788, 789, 790, 791, 792, 793, 794,795, 796, 797, 798, 799, 800, 801, 802, 803, 804, 805: n = A,T,C or G
  misc_feature 806, 807, 808, 809, 810, 811, 812, 813: n = A,T,C or G
agncgtaggcgcgcgtatacgactactatagggcnaattggagctccccgcggtggcggcgcgaggtacttggaaacccgtttggattaattagaggtctgtctgaaggagttgaagctttattctatgaacccttccagggtgctgttcaaggccctgaagaatttgcagaggggttagtgattggagtgagaagcctctttggacacacagtangtggtgcancaggagttgtatctcgaatcaccggttctgttgggaaaggtttggcagcanttacaatggacaaggaatatcaccaaaaaaagaagagaanagttgagtcnacagcccagagattttggagacagcctggccagaggaggaaagggctttctgcgaggagttgttggtggantgactggaataataacaaaacctgtggaaggtgccaaaaaggaaggagctgctngattctttaaaggaatnggaaaacggcttgtgggtgctgnggcccgtccaactggtgnaatcnttatatggccantnatacctgcccgggcggccctctaaaactaatggatcnccgggctgctgaattcgatatcaancttattnattccgccgactccaaggggggcccgggcccccttttgttcctttattgaggtttattgagcccttggcctaccntggtntantnnnnntttngnnnnnnnnnnnnnnnnnnnnnnnnnnnnnnnnnnnnnnnnnnnnnnnnnnnnnnnnnnnnnnnnnnnnnnnnnnnnnnnnnnnnnnnnnnnnnnnnnnnnnnnnnnnnnnnnnnnnnnnnnng

SEQ ID NO: 6048 - DNA, 829 bp, Homo sapiens
  misc_feature 3, 4, 5, 6, 10, 21, 26, 37, 119, 230, 259, 269, 325, 360,405, 425, 429, 462, 476, 488, 496, 497, 500, 515, 530, 561,586, 597, 600, 602, 643, 644, 645, 646, 649, 652, 654, 662,679, 682, 683, 685, 708, 710, 711, 724, 727, 728, 734: n = A,T,C or G
  misc_feature 766, 768, 784, 791, 795, 805, 809, 827, 828, 829: n = A,T,C or G
agnnnnagangcgcgttatangactnactatagggcnaattggagctccccgcggtggcggcccgcccgggcaggtaccggggctggctgtgctgcctcctctgcttttaatcttctgnggatatttctccgatttcccccaaaagcccacagatcctgggggaagccaccccattcggccaccgatcatggaagaaagtattactttttatttaccaaacattttaaanatgttggaagatccatatgctgcctggangctgttgttnctagggacacaagtatccagcctatattgttacaatttttttcaagaactgccgtnttctttgcctgcactaacggaacatcatcttcagngggctatttcagcacatcaggtgtatggcgagaagagggataatntggttataccggtcccaaangcanaaagtaatattgcttactatgagtctatatatnctggggaatttaanatgccaaagttnctcatttnnatnagccttttaatttgnatgctgaacaacctnattatgatttggattctgaaaatgaagtatntgtgaataaagtgaaaaaaaaaatngacatttgccnttngnatttgaggagatgaatgacccccttaaaaaaaggaatgggnnnnagnccngncaattgangggaagccaactactgnttnnanaaaaatatgaactgattccagangnncttgaaaattggnttnnaaaganaaaaaaatgttttgggccatttttatttcttngnaaaaaaaaaaaaaccnatttgtnccanccaaaggaancttntgggggttttaaaagggnnn

SEQ ID NO: 6049 - DNA, 845 bp, Homo sapiens
  misc_feature 19, 23, 88, 90, 93, 95, 103, 106, 113, 114, 116, 125, 128,129, 134, 135, 137, 140, 142, 143, 145, 148, 150, 154, 164,168, 169, 170, 173, 175, 177, 181, 185, 187, 188, 189, 190,191, 193, 194, 198, 201, 203, 213, 214, 215, 217, 219: n = A,T,C or G
  misc_feature 225, 226, 229, 233, 235, 240, 242, 244, 254, 261, 264, 268,269, 271, 278, 284, 292, 299, 304, 307, 310, 312, 317, 319,326, 327, 329, 332, 334, 339, 343, 348, 355, 362, 363, 364,365, 366, 401, 419, 477, 530, 542, 544, 561, 566, 578: n = A,T,C or G
  misc_feature 610, 627, 628, 638, 664, 667, 675, 681, 683, 688, 693, 700,703, 705, 706, 709, 712, 718, 720, 723, 729, 736, 741, 746,747, 750, 753, 756, 758, 762, 763, 767, 769, 770, 773, 775,778, 779, 781, 782, 783, 789, 791, 798, 801, 803, 804: n = A,T,C or G
  misc_feature 805, 810, 811, 821, 822, 823, 824, 827, 828, 829, 830, 834,837, 839, 840, 842: n = A,T,C or G
agcttatcgactactatanggcnaattggagctccccgcggtggcggccgaggtactttaatttttttttttttttttttggggaaanantangncctccctnttncccccgnntngttttaaanccnnggggnnanaangnncnccncncaantccctttaangggnnnggntnangagnttanannnnntnncccnggncnttttaaaccnnngngncccccnnggntggnanatttntntncaaccttttntataccngtnaccnngnggggggnccccgncccccgcntttttcnccttntanggngngtaantngcccccnngnccnanaaagngctnagggngggcccngaaaacnnnnnaaaggatgacttggcgggtaggggaggaaaatacnaccgtccccctctaacanaatataaccaacgtccccctacctggggataggctggttagaatttggtttaaaggcnactgggtgacaagcaaggagggaggatgcaaaaaaactctctctcactttctnctttttccccanancttaaagcgaccctatncgcanggagcggggtanttccttggctttatcattaatctgggaggcanctggaataatgggttanncattcttacnatggttgttattgaggatggggtggnccnttggctangggctngnttttncttcntccccanttnannctnctncccctntnacntttttnttttttnccggnactgnnttnatnttntnccanntttncnnttntnaanntnnngggccntncccaaantgngnnngcccnnaaaatttccnnnnctnnnnaacnccntnntngaa

SEQ ID NO: 6050 - DNA, 873 bp, Homo sapiens
  misc_feature 5, 7, 11, 16, 21, 22, 29, 34, 39, 489, 493, 494, 495, 496,497, 498, 499, 500, 501, 502, 503, 504, 505, 506, 507, 508,509, 510, 511, 512, 513, 514, 515, 516, 517, 518, 519, 520,521, 522, 523, 524, 525, 526, 527, 528, 529, 530, 531: n = A,T,C or G
  misc_feature 532, 533, 534, 535, 536, 537, 538, 539, 540, 541, 542, 543,544, 545, 546, 547, 548, 549, 550, 551, 552, 553, 554, 555,556, 557, 558, 559, 560, 561, 562, 563, 564, 565, 566, 567,568, 569, 570, 571, 572, 573, 574, 575, 576, 577, 578: n = A,T,C or G
  misc_feature 579, 580, 581, 582, 583, 584, 585, 586, 587, 588, 589, 590,591, 592, 593, 594, 595, 596, 597, 598, 599, 600, 601, 602,603, 604, 605, 606, 607, 608, 609, 610, 611, 612, 613, 614,615, 616, 617, 618, 619, 620, 621, 622, 623, 624, 625: n = A,T,C or G
  misc_feature 626, 627, 628, 629, 630, 631, 632, 633, 634, 635, 636, 637,638, 639, 640, 641, 642, 643, 644, 645, 646, 647, 648, 649,650, 651, 652, 653, 654, 655, 656, 657, 658, 659, 660, 661,662, 663, 664, 665, 666, 667, 668, 669, 670, 671, 672: n = A,T,C or G
  misc_feature 673, 674, 675, 676, 677, 678, 679, 680, 681, 682, 683, 684,685, 686, 687, 688, 689, 690, 691, 692, 693, 694, 695, 696,697, 698, 699, 700, 701, 702, 703, 704, 705, 706, 707, 708,709, 710, 711, 712, 713, 714, 715, 716, 717, 718, 719: n = A,T,C or G
  misc_feature 720, 721, 722, 723, 724, 725, 726, 727, 728, 729, 730, 731,732, 733, 734, 735, 736, 737, 738, 739, 740, 741, 742, 743,744, 745, 746, 747, 748, 749, 750, 751, 752, 753, 754, 755,756, 757, 758, 759, 760, 761, 762, 763, 764, 765, 766-873: n = A,T,C or G
agcgntngagngcgcnttatnngacttantatanggctnattggagctccaccgcggtggcggcccgcccgggcaggtaccagctggggtagtaagtagtagagactgagccagagctcaagccacaagtgagtgtgactgtccctccaggggacactgagaacgatggctcctgggtcaccacagtctgagaatccactcctgatccataagcaaggagtccgaggagaagcatcatccaggccatggtggggacactcatgaaggctaagtgttctcaggcttcccagctggggtttgttttcctcagggccttttcccccgcgtacctcggccgctctagaactagtggatcccccgggctgcaggaattcgatatcaagcttatcgataccgtcgacctcgagggggggcccggtacccagcttttgttccctttagtgagggttaattgcgcgcttggcgtaatcatggtcatagctgtttccntgannnnnnnnnnnnnnnnnnnnnnnnnnnnnnnnnnnnnnnnnnnnnnnnnnnnnnnnnnnnnnnnnnnnnnnnnnnnnnnnnnnnnnnnnnnnnnnnnnnnnnnnnnnnnnnnnnnnnnnnnnnnnnnnnnnnnnnnnnnnnnnnnnnnnnnnnnnnnnnnnnnnnnnnnnnnnnnnnnnnnnnnnnnnnnnnnnnnnnnnnnnnnnnnnnnnnnnnnnnnnnnnnnnnnnnnnnnnnnnnnnnnnnnnnnnnnnnnnnnnnnnnnnnnnnnnnnnnnnnnnnnnnnnnnnnnnnnnnnnnnnnnnnnnnnnnnnnnnnnnnnnnnnnnnnnnnnnnnnnnnnnnnnnnnnnnnnnnnnnnnnnnnnnnnnnnnnnnnnnnn

SEQ ID NO: 6051 - DNA, 869 bp, Homo sapiens
  misc_feature 14, 36, 160, 164, 183, 287, 367, 387, 389, 391, 397, 406,410, 455, 462, 468, 475, 480, 533, 536, 539, 550, 567, 572,573, 576, 590, 597, 606, 607, 608, 614, 619, 621, 623, 624,641, 644, 649, 652, 659, 679, 680, 682, 688, 695, 703: n = A,T,C or G
  misc_feature 704, 706, 712, 713, 732, 734, 735, 751, 767, 770, 771, 774,778, 792, 796, 803, 809, 823, 834, 836: n = A,T,C or G
agccgtatggacgnattatcgacttactatagggcnaattggagctccccgcggtggcggccgcccgggcaggtacaactgtccttcccatctccatctgccaaactcattcttacccctaggacctgctgagatgctgcctctaccatgaagccatccntganaacagtagcttgttatttntactgctgcttccagctttgattggctcttccctactcatcccctcacctgacatccggacagtgtgtgcaacaacttattatgattattattgggatggtctnctccggcacccataatcctgtcctgagtgagcaccctgcacatgaggttgtttgagaacactggctgaacctgtcaacanttggtggattctgatccagnancngatagngggcagganaatnggggtgtggctttccaagctctgaggcccccacattctcaaaggnaactganatgatnccaatangtgcnggttcacgcctagtggaaaaatccaaaacatgtgcctttggcttggcccaaanctntcnctctctctctntatttttttttttaganggaanntcnctcttttgcccaancttgaantcccctggnnngatttngggtnantnnaaccttgaaattccaangcnaaaanaanggtcccngccttaaccttccggggttnntngggaanaaagggnccaccccnncnttcccnngtttttttttttttttttngnnaaaaaaggggtttttncaatatgggcaagggnggnnttnaaanccccgccccaaggnaaanaaaatgntttttnccccccaaagggcngggtttaaaangnggaccaaggggcccggccccaaattttttttta

SEQ ID NO: 6052 - DNA, 848 bp, Homo sapiens
  misc_feature 5, 8, 12, 16, 21, 25, 28, 30, 32, 33, 38, 74, 81, 85, 93,96, 98, 101, 103, 105, 115, 116, 133, 137, 146, 153, 154,163, 178, 184, 187, 195, 199, 208, 213, 216, 217, 218, 220,229, 230, 232, 238, 241, 243, 266, 269, 270, 271, 272: n = A,T,C or G
  misc_feature 275, 276, 277, 282, 298, 299, 300, 302, 304, 305, 306, 319,320, 324, 330, 332, 336, 338, 342, 352, 356, 359, 361, 369,372, 375, 378, 380, 399, 497, 536, 540, 545, 546, 548, 549,550, 551, 552, 553, 554, 555, 556, 557, 558, 559, 560: n = A,T,C or G
  misc_feature 561, 562, 563, 564, 565, 566, 567, 568, 569, 570, 571, 572,573, 574, 575, 576, 577, 578, 579, 580, 581, 582, 583, 584,585, 586, 587, 588, 589, 590, 591, 592, 593, 594, 595, 596,597, 598, 599, 600, 601, 602, 603, 604, 605, 606, 607: n = A,T,C or G
  misc_feature 608, 609, 610, 611, 612, 613, 614, 615, 616, 617, 618, 619,620, 621, 622, 623, 624, 625, 626, 627, 628, 629, 630, 631,632, 633, 634, 635, 636, 637, 638, 639, 640, 641, 642, 643,644, 645, 646, 647, 648, 649, 650, 651, 652, 653, 654: n = A,T,C or G
  misc_feature 655, 656, 657, 658, 659, 660, 661, 662, 663, 664, 665, 666,667, 668, 669, 670, 671, 672, 673, 674, 675, 676, 677, 678,679, 680, 681, 682, 683, 684, 685, 686, 687, 688, 689, 690,691, 692, 693, 694, 695, 696, 697, 698, 699, 700, 701: n = A,T,C or G
  misc_feature 702, 703, 704, 705, 706, 707, 708, 709, 710, 711, 712, 713,714, 715, 716, 717, 718, 719, 720, 721, 722, 723, 724, 725,726, 727, 728, 729, 730, 731, 732, 733, 734, 735, 736, 737,738, 739, 740, 741, 742, 743, 744, 745, 746, 747, 748: n = A,T,C or G
agccntanagtncgcnttatngacntantntnnggctnattggagctccaccgcggtggcggcccgcccggccnggtacanatancttagagnatntnctntnantagtcctgannataaggggtagggaggnaaangggtttaantcataannaagggcctngatcccaatccaacnccatcnctngacacatntccntatctgaantctgngcnnncntgtcccacnntnaaagtncangnttctcatagattcaggattcctnccnnnngcnnntcatngcccccaaccgggaannngntnnnggtacgccccttnnaaanactatncngacntncaancggtcgcttngacnttncntgaacttnatnacnttncnggtacctcggccgctctanaactagtggatcccccgggctgcaggaattcgatatcaagcttatcgataccgtcgacctcgagggggggcccggtacccagcttttgttccctttantgagggttaattgcgcgcttggcgtaatcatggtcatanctgnttctnngnnnnnnnnnnnnnnnnnnnnnnnnnnnnnnnnnnnnnnnnnnnnnnnnnnnnnnnnnnnnnnnnnnnnnnnnnnnnnnnnnnnnnnnnnnnnnnnnnnnnnnnnnnnnnnnnnnnnnnnnnnnnnnnnnnnnnnnnnnnnnnnnnnnnnnnnnnnnnnnnnnnnnnnnnnnnnnnnnnnnnnnnnnnnnnnnnnnnnnnnnnnnnnnnnnnnnnnnnnnnnnnnnnnnnnnnnnnnnnnnnnnnnnnnnnnnnnnnnnnnnnnnnnnnnnnnnnnnnnnnnnnnnnnnnnnnnnnnnnnnn

SEQ ID NO: 6053 - DNA, 857 bp, Homo sapiens
  misc_feature 16, 20, 265, 274, 276, 279, 280, 281, 284, 286, 292, 294,297, 303, 310, 314, 315, 317, 319, 320, 328, 329, 335, 336,338, 340, 341, 350, 351, 352, 355, 363, 365, 366, 368, 369,372, 373, 375, 376, 378, 383, 387, 392, 394, 395, 396: n = A,T,C or G
  misc_feature 404, 409, 412, 413, 414, 415, 419, 424, 425, 427, 428, 430,449, 457, 458, 480, 482, 483, 492, 522, 523, 525, 526, 527,532, 544, 545, 546, 549, 552, 561, 613, 614, 619, 624, 626,628, 633, 646, 647, 657, 658, 674, 681, 688, 689, 696: n = A,T,C or G
  misc_feature 717, 723, 724, 731, 732, 733, 734, 735, 755, 760, 764, 768,769, 770, 771, 772, 773, 774, 775, 776, 777, 778, 780, 781,783, 784, 785, 786, 787, 788, 789, 790, 791, 792, 793, 794,795, 796, 797, 798, 799, 800, 801, 802, 803, 804, 805: n = A,T,C or G
  misc_feature 806, 807, 808, 809, 810, 811, 812, 813, 814, 815, 816, 817,818, 819, 820, 821, 822, 823, 824, 825, 826, 827, 828, 829,830, 831, 832, 833, 834, 835, 836, 837, 838, 839, 840, 841,842, 843, 844, 845, 846, 847, 848, 849, 850, 851, 852: n = A,T,C or G
  misc_feature 853, 854, 855, 856, 857: n = A,T,C or G
atccgtatcgacttantatntggctgattggagctccccgcggtggcggccgcccgggcaggtactgatcagctctggactgtcctctcaaccaatccacaaattagtgagaaaagaaatagccaaggctaggcatggtggctcaaacctataatcccagtgctttgggacaataaggtgggagaatcacttaaggccaggagttccggaccagtctgagcatcatggcaagactgtgtctctaccaaaaaaaaaaaaaaaaaancccgggggngnttnnnttntngggggngngcncccccntttccantttnncncnnaaaaaaannttttcnntngnnggggggtannnggnccaaaaangnntnnggnngnncntttgnaaanccccngnnnctttgggnccggnttnnnnttgnccaanntnntnttttcttcccccccatgtnttaaaaannggggcttttttttggggccttngnnggggccaanttaaatttttttggcccccaaaaaaacccnntnnnaaaanagggggggttcnnnaanttnaaggctttnaaatttaaaaaaattggggctaaaaaagcgctaacccaaatgggttgggggnnaaaanccccngncnctttnaaaatttggggtnnccccggcctnngggatttttttttaanttttttnttccccnnccccctngggggggggccgggccccccnttttgnnccctttnnnnngggtaaatggccccctgggnaaaangggnaaannnnnnnnnnntnntnnnnnnnnnnnnnnnnnnnnnnnnnnnnnnnnnnnnnnnnnnnnnnnnnnnnnnnnnnnnnnnnnnnnnnnnnnn

SEQ ID NO: 6054 - DNA, 873 bp, Homo sapiens
  misc_feature 19, 20, 34, 145, 165, 178, 181, 186, 191, 193, 196, 201,203, 204, 207, 210, 214, 215, 218, 226, 228, 233, 237, 241,242, 245, 254, 279, 281, 293, 296, 306, 318, 321, 322, 325,333, 343, 353, 354, 364, 370, 376, 385, 402, 409, 436: n = A,T,C or G
  misc_feature 438, 439, 451, 454, 460, 465, 466, 468, 485, 486, 498, 501,504, 510, 511, 515, 521, 522, 525, 526, 540, 544, 558, 559,570, 588, 600, 623, 638, 646, 647, 655, 656, 658, 665, 675,676, 677, 678, 694, 702, 719, 723, 742, 743, 744, 746: n = A,T,C or G
  misc_feature 760, 770, 786, 788, 792, 810, 819, 820, 821, 834, 835, 836,837, 838, 853, 859, 865: n = A,T,C or G
aagcgtatcgacttagtanngcgcttatcgactnactatagggctaattggagctccaccgcggtggcggccgccgggcaggtacgcgggggcacatgcgcattgcgcccgcagccctggaccatttgtcaggactactcgtganacggagaaaaaaaaaaaganaaaatttgggganccnttagnaaaantnttnaaagngnncancanttgnnaanatcgccananagttntgtntttnntcnccgccaaanggttaaaaaataaatcatgactgantntgcctttatcanaantggtaaaaantttgatgttttnagnnttntggactgnaaaaatggantgggcacttnnccaggaagtnacttanagtttngggtaaatnattttggacccctgganctttttnctgaaaaaaaaaaaaaaaaaaatttcntnnccccccccgganggntttttngtaannantttaaaagggggggggnntttttaaaaacnttnctnccttanngganggggtnnttnnctactggaaatccncccnggccttttagggannaagtgtccccntataggcacccttttttnaagttattcccnactcctttaaaaaaagggggaanacctttttttaaaanttttttannttttttgnnanggggggncccctttttnnnncccttaaaattttttnaaaaaaangggctgggaaaaatccnggtnaacttcccgaaggggtttnnncnaaatttttttttcnaaaatggggncccaaaaacccccccntnaaantttttttttaaaattccngggggcctnnnttttcccggggcnnnnnttttttaaaaaaaantttttngggccntttcccca

SEQ ID NO: 6055 - DNA, 871 bp, Homo sapiens
  misc_feature 1, 3, 16, 25, 26, 499, 588, 589, 592, 593, 594, 595, 596,597, 598, 599, 600, 601, 602, 603, 604, 605, 606, 607, 608,609, 610, 611, 612, 613, 614, 615, 616, 617, 618, 619, 620,621, 622, 623, 624, 625, 626, 627, 628, 629, 630, 631: n = A,T,C or G
  misc_feature 632, 633, 634, 635, 636, 637, 638, 639, 640, 641, 642, 643,644, 645, 646, 647, 648, 649, 650, 651, 652, 653, 654, 655,656, 657, 658, 659, 660, 661, 662, 663, 664, 665, 666, 667,668, 669, 670, 671, 672, 673, 674, 675, 676, 677, 678: n = A,T,C or G
  misc_feature 679, 680, 681, 682, 683, 684, 685, 686, 687, 688, 689, 690,691, 692, 693, 694, 695, 696, 697, 698, 699, 700, 701, 702,703, 704, 705, 706, 707, 708, 709, 710, 711, 712, 713, 714,715, 716, 717, 718, 719, 720, 721, 722, 723, 724, 725: n = A,T,C or G
  misc_feature 726, 727, 728, 729, 730, 731, 732, 733, 734, 735, 736, 737,738, 739, 740, 741, 742, 743, 744, 745, 746, 747, 748, 749,750, 751, 752, 753, 754, 755, 756, 757, 758, 759, 760, 761,762, 763, 764, 765, 766, 767, 768, 769, 770, 771, 772: n = A,T,C or G
  misc_feature 773, 774, 775, 776, 777, 778, 779, 780, 781, 782, 783, 784,785, 786, 787, 788, 789, 790, 791, 792, 793, 794, 795, 796,797, 798, 799, 800, 801, 802, 803, 804, 805, 806, 807, 808,809, 810, 811, 812, 813, 814, 815, 816, 817, 818, 819: n = A,T,C or G
  misc_feature 820, 821, 822, 823, 824, 825, 826, 827, 828, 829, 830, 831,832, 833, 834, 835, 836, 837, 838, 839, 840, 841, 842, 843,844, 845, 846, 847, 848, 849, 850, 851, 852, 853, 854, 855,856, 857, 858, 859, 860, 861, 862, 863, 864, 865, 866-870: n = A,T,C or G
nanccgtatcgactantatagggcnnattggagctccccgcggtggcggccgcccgggcaggtaccatggcagtcatgcaaagcatgggacagaagaaataccacggcagtgaactgtgaggataacttccattttttccctcggagagaacagtttacggggcagaggtgatatgttctgcttttgaagattactggcacacgttcagctttttcacctctctaatcgactggaagcagccagccgatcactagtcctccatccccctcgagtcctccgattgtcatgcctaggccttgccacaaagacagcacctttatgtgaaaaaaaacttagaaaaaatgcaggttaaagaaagcaataaactttctttaaaaaagttaaatggagatcttctgggaaaccaggccatgaatgcgagtttgtacctcggccgctctagaactagtggatcccccgggctgcaggaattcgatatcaagcttatcgataccgtcnacctcgagggggggcccggtacccaacttttgttccctttagtgagggttaattgcgcgcttggcgtaatcatggtcatagctgttttnnggnnnnnnnnnnnnnnnnnnnnnnnnnnnnnnnnnnnnnnnnnnnnnnnnnnnnnnnnnnnnnnnnnnnnnnnnnnnnnnnnnnnnnnnnnnnnnnnnnnnnnnnnnnnnnnnnnnnnnnnnnnnnnnnnnnnnnnnnnnnnnnnnnnnnnnnnnnnnnnnnnnnnnnnnnnnnnnnnnnnnnnnnnnnnnnnnnnnnnnnnnnnnnnnnnnnnnnnnnnnnnnnnnnnnnnnnnnnnnnnnnnnnnnnnnnnnnnnnnnnnnnnnnnnnnnnnnnnnnnng

SEQ ID NO: 6056 - DNA, 855 bp, Homo sapiens
  misc_feature 14, 17, 22, 23, 359, 410, 411, 417, 421, 422, 461, 472, 482,505, 517, 533, 539, 550, 555, 581, 585, 590, 625, 630, 635,638, 665, 672, 681, 688, 690, 692, 704, 708, 716, 740, 763,785, 802, 813, 821, 842: n = A,T,C or G
agcgtatcgactanttngggcnnattggagctccccgcggtggcggccgaggtactaatgatgctatttctttttgtggtggtgaaacaaagctcagcctgcactactgtctcatgagaaattttttattatctttcatcagatgaaagagtatttgcctacacattgccaatattcatccagatatattttgggaaaaaaagctcttcaatttctcaagcacttttttcatcttttgaactggaatccaagtcatggaggcccatcaccttacagcttcttaaatggcaaacataattattctttgattttgcttttcctcaggctgcattcttaagtaatttaattttccttttgtnatatgtgattggcaacaatgcgcacaatgagtttgtatctaacacaatttnnaaatancgtnntttcttttttatgtctcataatcattgcagggtgtaacncaaacttagtntacgccaccntggcaagtggccgcggctcaatncttcctcttganagtcaaatggccggcntgcatnactaatctatnatagngcgtattgaacaaatccaaagtttgnacanttttntccataaaagctaaaagccttttgtaatcccaatntaatntttgnctnctccttttctggaatttaataaatctnggatggntgaacaagnttacatngntngggaagaatacncttncccttttnaaaacaaaaaggccatggtgtttnaaaagtttaaataaatctggttnatccgtacctgcccggcggccnttttaaaaaaaaggatnccccggctgcnggaattcntatcaacctaataaatccccnacctccggggggg

SEQ ID NO: 6057 - DNA, 876 bp, Homo sapiens
  misc_feature 1, 14, 24, 32, 40, 45, 46, 47, 56, 92, 194, 226, 300, 305,387, 395, 407, 423, 432, 506, 517, 563, 579, 595, 623, 630,641, 646, 647, 662, 677, 719, 732, 740, 773, 774, 775, 776,787, 817, 833, 876: n = A,T,C or G
nagcgtatcgactnacttagggcnaataggantcactatngggcnnnttggagctncaccgcggtggcggccgggcactgctacccattctncagtggcacaagcaccccaatgattactttagtaaggaggcatccaaattgtacctgcccgggcggccgaggtacgcgggtcctatgaacagatatacagtngtgtgtataaatgtgtatgccagcagcactcngaacagatgtatagtgatctgattaaaaagataactaatcacttatagagagtctcaaaggagctgcaggccanccctncagatctctatattgaaagatttaatataactcttggacaatatatgggagcattgcagagcattgtgcctcttttcatatntatgaatnagttttacatcnaaaccaagcttaacanagacttaanagatgaccttataaagctgtttacggaacatgttgcagaaaagcacatttacagcctaatgcctttacttttanaagcccagtcnacaccatttcaggtcacaccttcaactatggcaaatattgtgaaangcctgtataccctcanaccaaagtgggttcanatggctccactctattttctaaatttantccaaanattttccttcngcggnngaatctgaactttcngaatatgctggtcangatcataaatttcaaagaaaacttataccgaatggttttacnaggggggaccacntccggaanaaaacttggggataattggctttttataacccnnnngcattttcaanttccaaggggtacttgccggccggccggtnttaaaactattggatncccccggccttcaggaaatcattttgagctttttgataccggn

SEQ ID NO: 6058 - DNA, 819 bp, Homo sapiens
  misc_feature 1, 72, 82, 87, 92, 97, 109, 110, 122, 135, 136, 143, 147,158, 159, 163, 166, 184, 187, 193, 209, 210, 258, 262, 263,264, 276, 332, 355, 359, 374, 381, 387, 388, 390, 391, 392,399, 406, 407, 417, 418, 419, 421, 424, 429, 435, 446: n = A,T,C or G
  misc_feature 471, 478, 502, 507, 508, 510, 543, 547, 583, 584, 585, 586,587, 589, 591, 593, 594, 595, 596, 597, 598, 599, 600, 601,602, 603, 604, 605, 606, 607, 608, 609, 610, 611, 612, 613,614, 615, 616, 617, 618, 619, 620, 621, 622, 623, 624: n = A,T,C or G
  misc_feature 625, 626, 627, 628, 629, 630, 631, 632, 633, 634, 635, 636,637, 638, 639, 640, 641, 642, 643, 644, 645, 646, 647, 648,649, 650, 651, 652, 653, 654, 655, 656, 657, 658, 659, 660,661, 662, 663, 664, 665, 666, 667, 668, 669, 670, 671: n = A,T,C or G
  misc_feature 672, 673, 674, 675, 676, 677, 678, 679, 680, 681, 682, 683,684, 685, 686, 687, 688, 689, 690, 691, 692, 693, 694, 695,696, 697, 698, 699, 700, 701, 702, 703, 704, 705, 706, 707,708, 709, 710, 711, 712, 713, 714, 715, 716, 717, 718: n = A,T,C or G
  misc_feature 719, 720, 721, 722, 723, 724, 725, 726, 727, 728, 729, 730,731, 732, 733, 734, 735, 736, 737, 738, 739, 740, 741, 742,743, 744, 745, 746, 747, 748, 749, 750, 751, 752, 753, 754,755, 756, 757, 758, 759, 760, 761, 762, 763, 764, 765: n = A,T,C or G
  misc_feature 766, 767, 768, 769, 770, 771, 772, 773, 774, 775, 776, 777,778, 779, 780, 781, 782, 783, 784, 785, 786, 787, 788, 789,790, 791, 792, 793, 794, 795, 796, 797, 798, 799, 800, 801,802, 803, 804, 805, 806, 807, 808, 809, 810, 811, 812-819: n = A,T,C or G
nagcgcttatcgactactatagggcgaattggagctccaccgcggtggcggccgcccgggcaggtactcggnggctctcttnctgtntttgnggctncggaaaggcgtnngggatgccaacnatcaggctgctgnnatttgtngtgntggctctattnnctgncantcaagcaaaggaaggagncangctttnggcttccaaatcactnntgaacacatacgccgtggagggacatagacctgaccttgcagtacctnggcnnntctacaactatnggatcccccgggctgcatgaattcaatattaagcttatcgataccgctacctctanggggggcccggtacccatgattntgtnccctttaatgagggnaaattgngctctnngnnnaatcatngcaatanntggtcctggnnntnacntgggnaccttnggccgctctanaactagtggatcccccgggctgcangaattcnatatcaagcttatcgataccgtcnacctnnanggggggcccggtacccaacttttgttcctttantganggttaattgccccttggcgtaatcatggcatagctnnnnncntngnnnnnnnnnnnnnnnnnnnnnnnnnnnnnnnnnnnnnnnnnnnnnnnnnnnnnnnnnnnnnnnnnnnnnnnnnnnnnnnnnnnnnnnnnnnnnnnnnnnnnnnnnnnnnnnnnnnnnnnnnnnnnnnnnnnnnnnnnnnnnnnnnnnnnnnnnnnnnnnnnnnnnnnnnnnnnnnnnnnnnnnnnnnnnnnnnnnnnnnnnnnnnnnnnnnnnnnnnnnnnnnnnnn

SEQ ID NO: 6059 - DNA, 804 bp, Homo sapiens
  misc_feature 16, 100, 133, 161, 188, 242, 262, 287, 300, 362, 373, 378,382, 459, 462, 479, 483, 502, 544, 546, 548, 553, 640, 688,717, 749, 762, 765, 800, 801: n = A,T,C or G
agcgcgtatcgactanttgttggctgattggagctccccgcggtggcggccgaggtacgcggggtgtttttgaaagggtctgataggaattgcaatggtntaggttaagtaagataaagtcacatttactgantgggctctttggggacagcatacatcanagcatatagtcttcttggctaacaaanaataatggttatgaaaattaaccatttagggctagagaaggtcttggaaattgnatagccaagcctcttcattntgtcagtgaggggattgattctccngctgatttaggtntaaatctgtgacaatgatttatatacctattcatgaccacttaactggtattattaatggcnattaatatganccaancagnggtttaaatgctttgcatatattaacccattactccacaacaactccataggtaggtgtattattatcccgcttgtnaanatgaataaactaaggtnatanagtgtacttcactcaactnaaatcaccttttcagcctatttgtcaaaatctgtcaattttntntntcacnacaattcctctctgagcccagctacaatcaccccaatctggacttctgcaaaggcctctaccagggattctaacatccctcttactnctaaattaaatcttccttctaacaatccatttaaatcccatctggtantacccttccctcttttaaaaccctaattnccttcaggattttaggaggaaccctttcttgntttttgaggcctnttnatcccctttccttgtaatggacctgccggccggcnnttt

SEQ ID NO: 6060 - DNA, 650 bp, Homo sapiens
  misc_feature 32, 33, 61, 65, 69, 87, 88, 89, 90, 92, 93, 96, 97, 109,123, 132, 134, 140, 151, 153, 154, 158, 160, 166, 168, 171,172, 174, 175, 176, 177, 178, 179, 180, 192, 202, 221, 231,241, 244, 251, 387, 388, 395, 396, 397, 398, 399, 400: n = A,T,C or G
  misc_feature 401, 402, 403, 404, 405, 407, 409, 410, 415, 416, 417, 418,419, 420, 421, 422, 423, 425, 426, 431, 432, 433, 434, 435,436, 437, 438, 439, 442, 444, 445, 446, 447, 448, 451, 452,453, 454, 458, 459, 461, 462, 463, 464, 465, 466, 467: n = A,T,C or G
  misc_feature 468, 469, 470, 471, 472, 473, 474, 475, 476, 478, 480, 481,482, 483, 484, 485, 487, 488, 489, 490, 491, 492, 493, 494,495, 496, 497, 498, 499, 500, 501, 502, 503, 504, 505, 506,507, 508, 509, 510, 511, 512, 513, 514, 515, 516, 517: n = A,T,C or G
  misc_feature 518, 519, 520, 521, 522, 523, 524, 525, 526, 527, 528, 529,530, 531, 532, 533, 534, 535, 536, 537, 538, 539, 540, 541,542, 543, 544, 545, 546, 547, 548, 549, 550, 551, 552, 553,554, 555, 556, 557, 558, 559, 560, 561, 562, 563, 564: n = A,T,C or G
  misc_feature 565, 566, 567, 568, 569, 570, 571, 572, 573, 574, 575, 576,577, 578, 579, 580, 581, 582, 583, 585, 586, 587, 588, 589,590, 591, 592, 593, 594, 595, 596, 597, 598, 599, 600, 601,602, 603, 604, 605, 606, 607, 608, 609, 610, 611, 612: n = A,T,C or G
  misc_feature 613, 614, 615, 616, 617, 618, 619, 620, 621, 622, 623, 624,625, 626, 627, 628, 629, 630, 631, 632, 633, 634, 635, 636,637, 638, 639, 640, 641, 642, 643, 644, 645, 646, 647, 648,649, 650: n = A,T,C or G
gagcgcgcgtaatacgacttactatgagggcnnattggagctccaccgcggtggcggccgnccgnccangcactgtcttttactgtnnnntnnttnntgaagtacctcnaggcctggcttganatgaggctntnattgtnaaaccactganannaatncncctcangngannannnnnnntagacactttanagtcacactnaccttctccagcaccctgnacctgcccgntcggccgatntanaactagntggatcccccgggctgcaggaattccatatcaagcttatcgataccgacgacctcgagggggggcccggtacccagcttttgttccctttagtgagggttaattgcgcgcttggcgtaatcatggtcatagctggnntcctggnnnnnnnnnnncntnnttttnnnnnnnnnannaaaannnnnnnnnttntnnnnnttnnnnaaanntnnnnnnnnnnnnnnnnanannnnnntnnnnnnnnnnnnnnnnnnnnnnnnnnnnnnnnnnnnnnnnnnnnnnnnnnnnnnnnnnnnnnnnnnnnnnnnnnnnnnnnnnnnnnnnnnnnnnnnnannnnnnnnnnnnnnnnnnnnnnnnnnnnnnnnnnnnnnnnnnnnnnnnnnnnnnnnnnnnnnnnnn

SEQ ID NO: 6061 - DNA, 643 bp, Homo sapiens
  misc_feature 32, 465, 466, 467, 468, 469, 472, 473, 475, 476, 477, 478,479, 480, 481, 482, 483, 484, 485, 486, 487, 488, 489, 490,491, 492, 493, 494, 495, 496, 497, 498, 499, 500, 501, 502,503, 504, 505, 506, 507, 508, 509, 510, 511, 512, 513: n = A,T,C or G
  misc_feature 514, 515, 516, 517, 518, 519, 520, 521, 522, 523, 524, 525,526, 527, 528, 529, 530, 531, 532, 533, 534, 535, 536, 537,538, 539, 540, 541, 542, 543, 544, 545, 546, 547, 548, 549,550, 551, 552, 553, 554, 555, 556, 557, 558, 559, 560: n = A,T,C or G
  misc_feature 561, 562, 563, 564, 565, 566, 567, 568, 569, 570, 571, 572,573, 574, 575, 576, 577, 578, 579, 580, 581, 582, 583, 584,585, 586, 587, 588, 589, 590, 591, 592, 593, 594, 595, 596,597, 598, 599, 600, 601, 602, 603, 604, 605, 606, 607: n = A,T,C or G
  misc_feature 608, 609, 610, 611, 612, 613, 614, 615, 616, 617, 618, 619,620, 621, 622, 623, 624, 625, 626, 627, 628, 629, 630, 631,632, 633, 634, 635, 636, 637, 638, 639, 640, 641, 642, 643: n = A,T,C or G
gagcgccgcgtaatacgactcactatagggcnaattggagctccaccgcggtggcggccgaggtacctggctacgtcggggcaaccccagtatgtgctctgggcatccaacatcagctcccccggctgtgagaaagtgccaataaatacatcatgcaaccccacggcccaccttgtgaactcctcgtgcccagggctgatgtgcgtcttccagggctactcatccaaaggcctaatccaacgttctgtcttcaatctgcaaatctatggggtcctggggctcttctggacccctaactgggtacctgcccgggcggccgctctagaactagtggatcccccgggctgcaggaattcgatatcaagcttatcgataccgtcgacctcgagggggggcccggtacccagcttttgttccctttagtgagggttaattgcgcgcttggcgtaatcatggtcatactgnnnnnccnngnnnnnnnnnnnnnnnnnnnnnnnnnnnnnnnnnnnnnnnnnnnnnnnnnnnnnnnnnnnnnnnnnnnnnnnnnnnnnnnnnnnnnnnnnnnnnnnnnnnnnnnnnnnnnnnnnnnnnnnnnnnnnnnnnnnnnnnnnnnnnnnnnnnnnnnnnnnnnnnnnnnnnnnnn

SEQ ID NO: 6062 - DNA, 643 bp, Homo sapiens
  misc_feature 3, 31, 516, 519, 531, 546, 550, 600, 614, 629, 637, 642: n = A,T,C or G
gancgcgcgtaatacgacttactatagggcnaattggagctccaccgcggtggcggccgaggtactccctacggcactagtctacagggggaaggacgctctgtgctggcagcggtggctcacatggcctgtctgcactgtaaccacaggctgggatgtagccaggacttggtctccttggaagacaggtctgatgtttggccaatccagtccttcagaccctgtctgaaacttgtatcttacgtgaacttaaagaataaaatgcatttctaccccgatctcgcccccaggactggcacgacaggcccacggcagattagatcttttcccagtaccaggcctgtaacgatgaggtttcttcacccctccagtagagggcgcactcttgcgagcggcttttgtagccagttgcttcctgggtgctttaccaccggtcgatttgcgggcagtctgctttgtacctgcccgggcggccgaggtaccgctttgtaggggaaggaggagtaaggatgttcnganacctgtgtccangtgcaccgatgccanacanacgctcccatgtggctgaatggggcccaccctgcccttggggatggcatnaccaaccacactgnctgtgcccattggantggcaacntgctnt

SEQ ID NO: 6063 - DNA, 641 bp, Homo sapiens
  misc_feature 32, 62, 216, 217, 224, 233, 249, 255, 257, 258, 260, 263,267, 268, 271, 274, 275, 276, 288, 304, 315, 317, 323, 325,329, 342, 343, 349, 350, 356, 357, 358, 359, 361, 362, 363,364, 365, 368, 369, 370, 371, 373, 377, 380, 381, 382: n = A,T,C or G
  misc_feature 383, 384, 385, 387, 388, 389, 390, 392, 395, 399, 403, 404,409, 411, 413, 415, 417, 418, 419, 420, 422, 423, 424, 425,426, 427, 428, 429, 432, 433, 434, 435, 436, 437, 441, 442,443, 445, 446, 447, 450, 452, 454, 455, 456, 457, 458: n = A,T,C or G
  misc_feature 460, 462, 463, 464, 465, 466, 467, 468, 469, 470, 471, 472,473, 474, 475, 476, 477, 478, 479, 480, 482, 483, 484, 485,486, 487, 488, 489, 490, 491, 492, 493, 494, 495, 496, 497,498, 499, 500, 501, 502, 503, 504, 505, 506, 507, 508: n = A,T,C or G
  misc_feature 509, 510, 511, 512, 513, 514, 515, 516, 517, 518, 519, 520,521, 522, 524, 525, 526, 527, 528, 529, 530, 531, 532, 533,534, 535, 536, 537, 538, 539, 540, 541, 542, 543, 544, 545,546, 547, 548, 549, 550, 551, 552, 553, 554, 555, 556: n = A,T,C or G
  misc_feature 557, 558, 559, 560, 561, 562, 563, 564, 565, 566, 567, 568,569, 570, 571, 572, 573, 574, 575, 576, 577, 578, 579, 580,581, 582, 583, 584, 585, 586, 587, 588, 589, 590, 591, 592,593, 594, 595, 596, 597, 598, 599, 600, 601, 602, 603: n = A,T,C or G
  misc_feature 604, 605, 606, 607, 608, 609, 610, 611, 612, 613, 614, 615,616, 617, 618, 619, 620, 621, 622, 623, 624, 625, 626, 627,628, 629, 630, 631, 632, 633, 634, 635, 636, 637, 638, 639,640, 641: n = A,T,C or G
gagcgcgcgtaatacgactcactatagggcgnattggagctccaccgcggtggcggccgctntactaactagtggatcccccgggctgcaggaattcgatatcaagcttatcgataccgtcgacctcgagggggggcccggtacccagcttttgttccctttagtgagggttaattgcgcgcttggcgtaatcatggtcatactggtttcctggannaatgtangaagaatanaaaaaaatgaataaangaacanannanaangganncancannnacaacaaagcanaaaaaaacatggaggngcaccaagtananaatggnanggangaaagggctgatnnctactnncaaaannnncnnnnnctnnnnanaatnccnnnnnncnnnnanaanccangccnngcccntntntngnnnntnnnnnnnnacnnnnnnaggnnntnnngantncnnnnncnannnnnnnnnnnnnnnnnnngnnnnnnnnnnnnnnnnnnnnnnnnnnnnnnnnnnnnnnnnnannnnnnnnnnnnnnnnnnnnnnnnnnnnnnnnnnnnnnnnnnnnnnnnnnnnnnnnnnnnnnnnnnnnnnnnnnnnnnnnnnnnnnnnnnnnnnnnnnnnnnnnnnnnnnnnnnnnnn

SEQ ID NO: 6064 - DNA, 868 bp, Homo sapiens
  misc_feature 129, 155, 217, 296, 303, 429, 451, 457, 479, 484, 485, 566,582, 607, 624, 627, 673, 679, 680, 683, 701, 709, 713, 717,739, 745, 757, 764, 775, 793, 796, 801, 810, 820, 824, 826,827, 828, 840, 848, 857, 868: n = A,T,C or G
tcgactactatagggcgaattggagctccccgcggtggcggccgaggtgggcggatcacaaggtcaggagatggagaccatcctggctaacgtggtgaaaccccatctctactaaatacaaaaaattanccgggtgtgacagcatgtgcctgtantcccagctactcaggatgctgaggcaggagaatggtgtgaacccgggaagcagagcttgcantgagcatagatcgtgcccctgcactccagcctgggcgaacagagcgagactatgcctcaaaacaaaacaaaaacactanagggcanttttgcatgcaaattatgctaaggcataatttttagtattatcttagtatttctcaaaatgtagtcatctatggatttactgaacaaatttgccatatctgcttataatcatacactacttcatantttttgacaaccataaataatntaattnccttgacatgttaatgggtatnattgnnattatcatgtgatgctttggagactgattatcatactatgtgaggcattacaaaaaaaatcaaagactcttagcagactgngaagcatttttctttncctaatagatgtgaagaaaaaattnctgcttggttttactgnganaattttggatccaacctacgttctcatttaggaatcagaaattccnaaatcnnaantctaatgaaatttcaaangaagcccncatngctnttgcaaaaggaatttggggttnttgganatgggatccccnactttgntttttgagccnattccatttttttttttnganggggnaaaaatgcntgggcccaanttgntnnntttattcccccnaaggaatnggggggaangttaaaacccn

SEQ ID NO: 6065 - DNA, 637 bp, Homo sapiens
  misc_feature 32, 62, 104, 230, 233, 246, 517, 528, 588, 605, 607, 617,624, 626, 632: n = A,T,C or G
gagccccgcgtaatacgactcactatagggcnaattggagctccaccgcggtggcggccgangtacttggttttaacatcatattaaggaaagaggcactaaanaggataagaaagatagtcttgaattgcctacaccatccttcccctaatccctggcactggcagcatggcgcaggagagagaatttatgtgcttgtggaagggagaaaaaagagtgattgtgggacntancactggaatttantgctgccctgtcacagcagaaagcaacaccaggcagaactcagccagcatccacagagggagcatttagaccagcactagtcagaagggaagcctccatcccagcggtcagaaccagagttctggcaagccccaccaccatgggataaggtgctctgggatctgaaataaactgaagggcaagttttgggccataagggctctaattcctgggcaagcttctgtgctgtgctgggcttaaagccagtggacttggggtgcacgtgacctantgagacaccanctagggcagccacgggagtacctgcccgggccggccgctctagaactagtggatcccccnggctgcaggaattcatntnaagcttatcnataccgncnacctcnagggg

SEQ ID NO: 6066 - DNA, 644 bp, Homo sapiens
  misc_feature 31, 61, 63, 64, 66, 68, 69, 76, 86, 116, 117, 127, 134, 157,171, 179, 219, 499, 521, 523, 529, 549, 565, 580, 606, 607,608, 609, 610, 611, 612, 613, 614, 615, 616, 617, 618, 619,620, 621, 622, 623, 624, 625, 626, 627, 628, 629: n = A,T,C or G
  misc_feature 630, 631, 632, 633, 634, 635, 636, 637, 638, 639, 640, 641,642, 643, 644: n = A,T,C or G
gagcgcgcgtaatacgactcactatagggcnaattggagctccaccgcggtggcggccgcncnngnanntgcgcanggagctctantgactactaacatatcgcccaaaaagaaannggccatactntggaggncggtgtgctagcgatttttcatnataccttgtagctnatggagcnctcaggacttatgggctatcaaagaataacatgttgatcntccaggccgagttctatctgaatcctgaccaatcaggcgagtttatgtttgactttgatggtgatgagattttccatgtggatatggcaaagaaggagacggtctggcggcttgaagaatttggacgatttgccagctttgaggctcaaggtgcattggccaacatagctgtggacaaagccaacctggaaatcatgacaaagcgctccaactatactccgatcaccaatgtacctcggccgctctagaactagtggatcccccgggctgcaggaattcnatatcaagcttatcgataccgncnacctcnagggggggcccggtacccancttttgttccctttantgagggttaattgcncccttggcgtaatcatggtcatactnnnnnnnnnnnnnnnnnnnnnnnnnnnnnnnnnnnnnnn

SEQ ID NO: 6067 - DNA, 813 bp, Homo sapiens
  misc_feature 9, 14, 18, 35, 182, 494, 535, 545, 580, 588, 601, 609, 644,673, 679, 680, 681, 682, 683, 684, 685, 687, 689, 690, 691,692, 693, 694, 695, 696, 697, 698, 699, 700, 701, 702, 703,704, 705, 706, 707, 708, 709, 710, 711, 712, 713, 714: n = A,T,C or G
  misc_feature 715, 716, 717, 718, 719, 720, 721, 722, 723, 724, 725, 726,727, 728, 729, 730, 731, 732, 733, 734, 735, 736, 737, 738,739, 740, 741, 742, 743, 744, 745, 746, 747, 748, 749, 750,751, 752, 753, 754, 755, 756, 757, 758, 759, 760, 761: n = A,T,C or G
  misc_feature 762, 763, 764, 765, 766, 767, 768, 769, 770, 771, 772, 773,774, 775, 776, 777, 778, 779, 780, 781, 782, 783, 784, 785,786, 787, 788, 789, 790, 791, 792, 793, 794, 795, 796, 797,798, 799, 800, 801, 802, 803, 804, 805, 806, 807, 808: n = A,T,C or G
  misc_feature 809, 810, 811, 812, 813: n = A,T,C or G
agcggtatngaccnttancgacttactatagggcnaattggagctccaccgcggtggcggccgcccgggcaggtacgcggggactcacttgtgcccagagagagaataaagccatgtcgaaactatctacgattccttgagtgtttttccagctacctgccacttgcccacccactcccctnagatctcagttagaacatgacaattgggctcatgaacaggatcctgagtggttgcaggtgaacaagcagttggcacaagggcaaagtgatcacatcctgattgagtggctatggacagccatacagactgtgtggaacaacgctggtgaaatacccaaaccgtgagtaaataccagtctatgtggtttggtgcaagtcattcgggagacgggtatgcggcaggctatgtttgacctgaatacccagggaccaggagatgaatgcttcagctaccacatgggagaatcttgtgttgggttctgcacccctgantgcctttgactccctagctactgtcctcaacctggacctangccgctctanaactagtggatcccccgggctgcaggaattcgatnttaagctnatcgatacccccnacctccanggggggcccggtcccactttggtccctttaatganggttaattgccccttgcgtaatcatggtnataagnnnnnnntntnnnnnnnnnnnnnnnnnnnnnnnnnnnnnnnnnnnnnnnnnnnnnnnnnnnnnnnnnnnnnnnnnnnnnnnnnnnnnnnnnnnnnnnnnnnnnnnnnnnnnnnnnnnnnnnnnnnnnnnnnnnnn

SEQ ID NO: 6068 - DNA, 825 bp, Homo sapiens
  misc_feature 5, 8, 9, 16, 20, 26, 55, 61, 66, 68, 86, 107, 118, 140, 145,147, 180, 187, 284, 325, 482, 499, 525, 529, 530, 532, 533,534, 535, 536, 537, 538, 539, 540, 541, 542, 543, 544, 545,546, 547, 548, 549, 550, 551, 552, 553, 554, 555: n = A,T,C or G
  misc_feature 556, 557, 558, 559, 560, 561, 562, 563, 564, 565, 566, 567,568, 569, 570, 571, 572, 573, 574, 575, 576, 577, 578, 579,580, 581, 582, 583, 584, 585, 586, 587, 588, 589, 590, 591,592, 593, 594, 595, 596, 597, 598, 599, 600, 601, 602: n = A,T,C or G
  misc_feature 603, 604, 605, 606, 607, 608, 609, 610, 611, 612, 613, 614,615, 616, 617, 618, 619, 620, 621, 622, 623, 624, 625, 626,627, 628, 629, 630, 631, 632, 633, 634, 635, 636, 637, 638,639, 640, 641, 642, 643, 644, 645, 646, 647, 648, 649: n = A,T,C or G
  misc_feature 650, 651, 652, 653, 654, 655, 656, 657, 658, 659, 660, 661,662, 663, 664, 665, 666, 667, 668, 669, 670, 671, 672, 673,674, 675, 676, 677, 678, 679, 680, 681, 682, 683, 684, 685,686, 687, 688, 689, 690, 691, 692, 693, 694, 695, 696: n = A,T,C or G
  misc_feature 697, 698, 699, 700, 701, 702, 703, 704, 705, 706, 707, 708,709, 710, 711, 712, 713, 714, 715, 716, 717, 718, 719, 720,721, 722, 723, 724, 725, 726, 727, 728, 729, 730, 731, 732,733, 734, 735, 736, 737, 738, 739, 740, 741, 742, 743: n = A,T,C or G
  misc_feature 744, 745, 746, 747, 748, 749, 750, 751, 752, 753, 754, 755,756, 757, 758, 759, 760, 761, 762, 763, 764, 765, 766, 767,768, 769, 770, 771, 772, 773, 774, 775, 776, 777, 778, 779,780, 781, 782, 783, 784, 785, 786, 787, 788, 789, 790-825: n = A,T,C or G
agccntanngacatantatngggctnattggagctccaccgcggtggcggccgangtacangctgntnaccagcttgctcagaatnacgccattcttcagccagacntggaagcccangcgcccacggtctgggcggtcnacatnanggccacactgcactatgatccactccaccggcntctaganctatgtggatcccccgggctgcaggaattcgatatcaagcttatcgataccgtccacctcgagggggggcccggtacccagcttttgttccctttantgagggttaattgcgcgcttggcagtaatcatggtcatagntgattctgacccacctggtgacacaaacagccttttcccaggtacctcggccgctctagaactagtggatcccccgggctgcaggaattcgatatcaagcttatcgataccgtcgacctcgagggggggcccggtacccaacttttgttccctttantgagggttaattgcgcncttggcgtaatcatggtcatagctgnttcnngnnnnnnnnnnnnnnnnnnnnnnnnnnnnnnnnnnnnnnnnnnnnnnnnnnnnnnnnnnnnnnnnnnnnnnnnnnnnnnnnnnnnnnnnnnnnnnnnnnnnnnnnnnnnnnnnnnnnnnnnnnnnnnnnnnnnnnnnnnnnnnnnnnnnnnnnnnnnnnnnnnnnnnnnnnnnnnnnnnnnnnnnnnnnnnnnnnnnnnnnnnnnnnnnnnnnnnnnnnnnnnnnnnnnnnnnnnnnnnnnnnnnnnnnnnnnnnnnnnnnnnnnnnnnnnnnnnnnnnnnnnnnnnnnnnnnnn

SEQ ID NO: 6069 - DNA, 517 bp, Homo sapiens
  misc_feature 259, 267, 276, 310, 316, 317, 333, 338, 381, 412, 436, 439,440, 444, 449, 455, 461, 464, 474, 475, 484, 486, 487, 498,499, 500, 502, 503, 505, 506, 507, 512: n = A,T,C or G
ggcgaattggagctccaccgcggtggcggccgaggtaccttgaggcgaacaaaaaaattaaattttaaccatgagggaaatcgtgcacatccaggctggtcagtgtggcaaccagatcggtgccaagttctgggaggtgatcagttgatgaacatggcatcgaccccaccggcacctaccacggggacagcgacctgcagcttggaccgcatctcttgtgtacctgcccgggccggccgcttttagaaactagtggatncccccggngctggcaangaattcgatatcaagcttatctgataccgttcanaccttnnagggggggccccggtncccanctttttgttcccttttagtgaggggtttaaattgcgccgcttnggccgtaaattcatgggtcatagcttgtttntcctggtgtgaaaaattggttttnccnngttnacaantttccnaccatnaancattttcganncccgggagncnntttaaaaatgnnnannannnccttnggggg

SEQ ID NO: 6070 - DNA, 404 bp, Homo sapiens
  misc_feature 5: n = A,T,C or G
gagcnttcgtaatacgactcactatagggcgaattggagctccaccgcggtggcggccgcccgggcaggtacaggaattaccagatcgtcttcatcgtcttcggcgttctcatgaccatggccttgatcgttgccactcagttccggttccgctacaaccatttcaaaaacgatgattctaaagggaaagaggtggagatcccgcaggtggaaaggaacaactctacagagtcctctgaggagacaccaaccaccacaagccactcgcaggccttcaacttttgggacttaatcaagctgctctgcagcgtgcagtatggctcagtgctgtttgtggcttggttcatgggttttggatatggcttcgtgttcacctttctctactggcatttggaagacctcaa

SEQ ID NO: 6071 - DNA, 400 bp, Homo sapiens
gtatacgactcactatagggcgaattggagctccaccgcggtggcggccgcccgggcaggtacgcggagattgaagtgctgcgccagcgggtgctgagaattgaaggcaaagacgaggaaattaagagagcagaggatctgtgtcgtctgatgaaggagaaacttgaagaggaagaaaacctcacccgggagctgaaatctgagattgagcggcttcagaaacgaatggctgaattagagaagctagaagaggccttcagcaggagtaagaatgactgtacctcggccgctctagaactagtggatcccccgggctgcaggaattcgatatcaagcttatcgataccgtcgacctcgagggggggcccggtacccagcttttgttccctttagtgagggt

SEQ ID NO: 6072 - DNA, 922 bp, Homo sapiens
  misc_feature 13, 15, 575, 602, 608, 652, 677, 680, 692, 752, 757, 761,795, 797, 854, 866, 875, 898, 899, 900, 906, 918, 921: n = A,T,C or G
catgtacgactcncncgtaatacgactactataggggcgaattggagctccccgcggtggcggcccgcccgggcaggtacaccacccaacctggttattttttaaaatttctatacagactgggtctcagtatgttgcccaggctggtctggaactcctggcttcaagtgatcctcccacctcagcctctcaaatgctgggattacaggtgggatccactgcacctgtcctctgctctcttcttctttttaactcttatgtatggttctttagcaaatagccataacttttctttgtagctttggtagggacaacgttgtctttgagaggacgtttgcatctatgactactgaagtcttgtatctgcaaccagtgcttctaggaagctgacggttatgctgtagcattctgggctaccctggagaacaagttagaaacagtcataaacaaacgtatccatttgcccagtgaacacagtgaggtttcaatatgtggaaagcattgtgcagacactgttgcaagagagagttgaatcaagatagtaatgtgtcttcttcctacaagtgtacctcggncgctctaagaactaagtggatcccccnggctgnaaggaattcgatatcaaagcttatcgattcccgtcgacctcgangggggggcccggtacccaacttttngtnccttttagtgangggtaattgcgccccttggccgtaatcatgggcatagctggtttctggtgtggaaaatgnttttnccgnttacaatttcccacaacaataccaagcccgggancnttaaagtgttaaagcctggggggccctaatgaggggagcctacctcccattaattgnggttgcgctcanttggcccgntttccaattcgggaaaacctggnnngcccanctcatttaatgnatnt

SEQ ID NO: 6073 - DNA, 913 bp, Homo sapiens
  misc_feature 17, 25, 35, 37, 495, 547, 625, 673, 686, 696, 753, 781, 793,795, 826, 861, 869, 871, 873, 896, 900, 903: n = A,T,C or G
tacgtcgactactatanggcgactnagtatctggngnattggagctccccgcggtggcggcccgaggtacccagggaacaaatgctactgggactccacacctacctaagaagcagctctacccagactccacatggctctctgttttggtctggagaccccagctggggtatctcctgagcccagggattcaaaggttcgtggcggaaatatgcatcccacgggactctcactcactcaccattttcttgtagggggattcccctgggtctgtgccactcctgggtgaatggctgatctgtctcactcttctccgtgatccgaaggtcacactatgtcactgatgaatccttatgtgtccacctggatgttcggttgaagagctagtgtctcaccactctttctgctatttgtgagaagtggcacacactagctgcttctagtcaaccatcttggccccacctcactcacttttctcaagtaatcaaagaccanaaaggatgtcctttacaagagcagatcccccaaaaatggaagagttcactgnaaagggtgggagctcaaaccaaagagaggacttatttcgcaacataaagaccaacttgtaccttgccgggccggccgntctagaactagtggatcccccgggctgcaggaattcgatattaaagcntatcgataccctngaccttcganggggggcccggtcccaaccttttggttccctttagtgaggggtaattgcgccccttnggcgtaaatcaatggtcatagctggttncctgtgggaaantngttatccgcttacaattccccacaaaaatancaagccggggaccttaaagtgttaaagcctggggngcctaaanangngagctaactcaaattaattggcntggngcntactggcccg

SEQ ID NO: 6074 - DNA, 926 bp, Homo sapiens
  misc_feature 1, 19, 20, 27, 587, 592, 597, 631, 663, 666, 687, 689, 708,742, 759, 764, 767, 777, 781, 787, 795, 798, 802, 803, 819,841, 845, 862, 870, 885, 912, 919, 924: n = A,T,C or G
ncgtccgactcactataanncgactantatagggcgaattggagctccccgcggtggcggcccgcccgggcaggtacctcaggacgtgactgtatttggagacagggcctttaaagagattaggttaaaatgagtccattagggtgagccttattgctatccaacttaggtccttattagaagagaaaattcggacatacaaagagacatgagggatgcaagggcatcctagaaagaccatgtgaggacacagaagaaagtagccatctgtaatacagggagagagaccttaggagaaaccaaacttactgataccttgatctcagaactgtgaaaataaatttctgttgtttaagccacacaggctgtcctattttgttacgttagtcctagaaaatccaatagatccaggagactcaatatccacataatgggcattttaagagaattgtaatagaaaaaaaaatggaacaaagaaaatagtaacagaaataatgcaagtaacttttctggacctgaacatgtattttccagatggaaatgacccattatgtcctgagaaccaatgggcaaaaacaggtacctcngccgntctanaactagtggatcccccgggctgcaaggaattcgntatcaaagcttatcggatacccgtcgaccctngangggggggccccgggtccccancntttggtccctttaagtgangggtaaattgccccgcttggggtaattcattggncatagcctgtttcctgnggtgnaangggtatcccnttancaattnccacaacnatncgannccgggagccttaaagngttaagccctggggtgccttantggnggggacctacctcacanttaattgnggttgggctcactgncccgcttttcaagcggggaaaccttgngtgcccntttgntt

SEQ ID NO: 6075 - DNA, 908 bp, Homo sapiens
  misc_feature 2, 5, 9, 12, 20, 30, 38, 61, 217, 220, 223, 235, 284, 285,289, 319, 333, 343, 357, 363, 367, 368, 378, 397, 421, 428,430, 442, 444, 450, 458, 466, 468, 469, 476, 492, 496, 505,510, 512, 513, 519, 522, 540, 541, 544, 545, 546, 555: n = A,T,C or G
  misc_feature 557, 560, 563, 587, 594, 604, 605, 617, 621, 623, 624, 625,626, 627, 628, 632, 633, 635, 638, 640, 652, 658, 659, 661,663, 664, 668, 674, 676, 678, 694, 695, 701, 704, 707, 716,722, 731, 732, 738, 749, 753, 759, 764, 770, 775, 779: n = A,T,C or G
  misc_feature 782, 794, 799, 800, 802, 808, 811, 812, 813, 818, 826, 827,839, 841, 848, 851, 857, 860, 863, 864, 867, 869, 870, 871,877, 879, 883, 892, 905, 907: n = A,T,C or G
tncgncacnacnataatacnactactatanggcgaatnggagctcccccgcggtggcggcncgcccgggcaggtaccactgtttattgcttgggacagttcagcaatgacagggttgctatttctgtgagctggtttagggggagggatagggggctgcttggcagggaccatatgagtgaggcttggggtagcagtagtgttagtgctggcaggancancangcacagtcctgngtgctggggaaggggtgacagagagattaacagtctttgcaaggcttgnngcancaagtggtggcagtgggtgctgtggtgatngaaagtggaatatnatgaaccttnccttgccggcagangaagtngcannctttgcttgncctttaacttgctttcatnagaagaggacaagggtcttttggnaagaaantnaaagtggttttngntccttngcccgttntaaaaacnanncgatacnccaggcctggaagaanttcnatttttaancctantnnataccnatnaaatcctccaaggggggnnccnnntccccaaantnttnttncctttattgaaaggtttaattaanccccttncccaaacaanngtaataacttgnttcncnnnnnnaaannanttncngttccaatttcncccaanntntnncaancctggntncnttaaattttaaaaccnnggggtnccntantggaggaanctaacnttcaaattnntttttntggggttaatncccntttttnaaaangaaaanttttntttnccncttctttttttnatttnncncccccnggnnnaaggncctttttnntttggccttttncnttttttnatnaattanccnttnnctngnnnttcaantngggngtcggttanattatccaaaacngnt

SEQ ID NO: 6076 - DNA, 890 bp, Homo sapiens
  misc_feature 650, 746, 751, 755, 757, 765, 769, 781, 793, 805, 808, 820,828, 832, 839, 840, 842, 851, 860, 875, 877: n = A,T,C or G
ccgtcgactactatagggcgaattggagctccaccgcggtggcggccgcccgggcaggtacttttttttttttttttttttttttgggatttttagtagagatggggtttcaccacgttggccaaactggtctcaaactcctgacctcagatgatcctcctgccttggcctcctaaagtgctgggattacaggtgtgagccagcatgcccggctctttatcacttttttaatatgagtggacactgtccactgacatcaattcccattcctagatcagtggctccatggactctctgctgaagtattcagggaaaagcagtgagcctctggcagagggcttctagtttctgcagtcctcgtggacctcacctgtgtgacattcatgagggggtggctacagtggggagccttctcggagaagctgccctgctgtgtgtacctcggccgctctagaactagtggatcccccgggctgcaggaattcgatatcaagcttatcgataccgtcgacctcgagggggggcccggtcccagcttttgttccctttagtgagggttaattgcgcgcttggcgtaatcatggtcatagctgtttcctgtgtgaaattggtatccgctcacaattccacacaaacatacgaacccggancataaagtgtaaaacctggggtgcctaatgagggaacctaactcacattaaattgcgtttgcgcccaattgccgcttttccagtcggggaaacctntccgngccnancttcattnattnattcggccaacnccccggggagangcgggttgcgtnttnggggcttttccntttcttgnttanttaattnntnggctcggcnttcggttgnggggaacggtttacntnctcaaaagggggg

SEQ ID NO: 6077 - DNA, 901 bp, Homo sapiens
  misc_feature 25, 630, 667, 671, 682, 687, 692, 742, 762, 764, 768, 771,794, 839, 859, 872, 887, 900: n = A,T,C or G
cgtccgactcactatagggcgaatnggagctcccccgcggtggcggccgcccgggcaggtacgcgggtaagcaactaaaccaactttacaaatgttaaattcaataaactcaatatctctttaaagcaggatttctttctctccctgggcatcatttgctgatagataaaaacagagtaataaataagtggcttcctgaaggcaggtaaggcaacctccatgccagaccagttctcaatacagtgaccaaaattccccccattttcttgcttttactctctataactgttaattataataaaccatatggaaatgttttccttaaatggaaaaaaaaaaaaaagtacctcggcccgctctagaactagtgggatcccccgggctgcaggaattcgatatcaagcttatcgataccgtcgacctcgagggggggcccggtacccagcttttgttccctttagtgagggttaattgcgcgcttggcgtaatcatggtcatagctgtttcctgtgtgaaattggtatccgctcacaattccacacaacataccgagcccgggagcataaagtgtaaagcctggggtgcctaatgagtgagctaactcacattaattgcgttgcgctcactggnccgctttccagtcgggaaaccctggcgggccagctgnattnatggaatcggnccacnccccngggagagggcggtttggcgtttttgggcgcctcttccgttttcttgcttnaatgactcgtttggctcggncnttcnggntggcggggagccggtatttaacntacttaaaagggcggtaattccggtttcccaaaaaccaggggatncccccggaaagaacatgggnccaaagggcgccnaaaggccggaacccnaaaaaggccggtng

SEQ ID NO: 6078 - DNA, 914 bp, Homo sapiens
  misc_feature 26, 664, 686, 696, 704, 729, 779, 781, 787, 808, 827, 855,871, 874, 875, 881, 884, 893, 902, 907: n = A,T,C or G
tacgtacgactactatagggcgaatnggagctccccgcggtggcggccgaggtaccagttaaaccgtaaacatttcagcatccagagctggtccagctcagcaaggttcttccaatgccagcacacctgtgcacaacgacaaaggctccgagggtccaggaaagaaaagatgtataaagataacacccttggaagcttggttgtaaagtccagggcttctgctggaattttctcttgaagctttcgacagcagaacttttgctgggacagcgagcagcgctccaacaggcctgtgaggattcttcttctttgagagtctgtccatttgtcaaaccatttgccaagcagggctcttctttcttcaaatacccggtcattcaatagctgatggtttaggggtgtccaggtgctcatctttgtctgcattttgggaccatctgtgttttttggaggtgcaaatgccatcatgaaacaactggatatccttccataagaaaaacaacacctcttttagcttgtctccctcttcaagcctcaagcgctgaccgttgccacaagtttcattaggtcaagcttttttcttcccccgcgtaccaaggaggccttggatgtcatcagaggggaaaattagggagagaaagttgacaagtgagattcaaagtcngggaaaataaaatgcatgggtntataccttgncccgggcnggccgctcttagaactaggtggatnccccgggctggcaggaaattcgaattttcaaagcttatcgatacccgccnanctcgangggggggcccgggtccccacnttttgttcctttaagtgangggtaattgcgcgcttggcggaatcatnggcataggctgtttcnggnngaaatngtnttccgtcanaatccccanaacantacaaat

SEQ ID NO: 6079 - DNA, 909 bp, Homo sapiens
  misc_feature 2, 3, 4, 24, 28, 30, 451, 514, 525, 526, 544, 546, 562, 574,578, 582, 597, 621, 625, 675, 678, 683, 702, 714, 715, 719,725, 730, 745, 760, 776, 783, 787, 788, 791, 796, 810, 846,893, 904: n = A,T,C or G
cnnnataaggctaaatagtatccngcancntgggagctcccccgcggtggcggcccgaggtactgggaaaaaacccctgtcaactaggaatattatactcagcaaagctatctccttcagaaataaaggagaaataaagtcccagacaagcaaaacataagggaattcactatcactaacctgattttataagaaatgctcaagggagccttgcatctgaaagtgaaaagataataatgtgaacccaaaatatctgagacaggtcgcagtcaatttagaaagtttattttgccaaggttaaggatgcacccatgacacagcctcaggtggtcctgaggcttggacatgtgcccaaggtggttgggggaatagcttgcttttatgcatttcagggagacatgagacacttcaggacaacttgaagtgggggctttcaggtcagaagttgatnagagacaaaagggtgcattcttttaagtcctcgatcagcttttcacttgaatacacaatttantctggcttggnncatctgcatttggttccntnaaggaattagaccganggaaaccaatcngatnttcnttttgtcttaaggcnaccctcagaagggtgactttgaantctngtcctttggccacaaaggaattttctttggacaaaggaaatttccaagtnttnaaacncttaaaacatcaaaaattnttttcaaatatnntatntggacncccgngggaattaactttgncttcatttcccagangggacattttaaactntgcaatncctnnggngttanaaaaaatccttttnaatggcccattgggggaagggattaaatttgggaanggggatttaaaaattccttggacccattgaaatttgaaccccccttncccaacctttngggct

SEQ ID NO: 6080 - DNA, 919 bp, Homo sapiens
  misc_feature 340, 394, 515, 541, 602, 618, 655, 666, 684, 694, 698, 705,706, 711, 713, 723, 731, 740, 748, 749, 752, 759, 762, 768,775, 776, 777, 780, 796, 802, 803, 804, 808, 818, 826, 828,832, 837, 845, 846, 852, 854, 857, 869, 871, 873, 875: n = A,T,C or G
  misc_feature 880, 882, 884, 885, 889, 894, 896, 902, 908, 910, 913: n = A,T,C or G
cgaattggagctccacccgcggtggcggccgcccgggcaggtactggtgactcaccattctgccagcggccactttgcactgggcaccagcacataccagcccccatcaggaaatgtgcacagtccatctcatcttgtttcatcttcattttattaatgaggaactgagagtccaagaaggttcaatcatttgctcaaggacaaagaagtgcatatcaactcaagatctgagcgactccaaagcccaagctctgtgcccccgataacactaaagggctctggaaccttccctcactgtgccaaattctggtcaccacactttaggaaaggtacctcgggncgctctagaactagtggatcccccgggctgcaggaattcgatatcaagcttatngaatacccgtcgacctcgagggggggcccggtacccagcttttgttcccttttagtgaggggttaattgcgcgcttggcgtaatcatggtcatagctgtttcctgtgtgaaattggtattncggctcacaattccacacaacattcnaagccgggagcataaagtgtaaagcctggggtggcctaatggaggggagcttacctcaacnataatttgcggttggngcctcaactggcccgctttttcaatatgggaaaaccntgttgctgccnacttgcatttaatgaaantcgggccaancccnccggggnngaggncngtttgcgtanttgggggnttttttcgnttttcttnnttnaattganttncttganctcgggnnnttngggttggggggaagcngtattnnntttnactcaaaggngggtgaancngggntttcncaaaatannggggananccnaggaaaaacatngngngncaaangncnnccanagggncngaaccnttaaangnccntttttg

SEQ ID NO: 6081 - DNA, 902 bp, Homo sapiens
  misc_feature 456, 495, 539, 542, 550, 579, 592, 599, 608, 612, 632, 633,638, 639, 640, 653, 658, 662, 665, 675, 677, 692, 709, 718,727, 728, 740, 742, 743, 745, 751, 754, 759, 775, 782, 787,794, 804, 809, 812, 841, 842, 843, 845, 861, 864, 869: n = A,T,C or G
  misc_feature 894, 897, 898: n = A,T,C or G
cgaattggagctccaccgcggtggcggccgcccgggcaggtacaccctgtcctcaagataaatcggaaacaatcaacccaaaaacatgttctcccaaagaatatttggaaactttcatctttcctgttctgcttcccggaatggctagcctgcttcaccaagcgaagaaagaaaaatgttttgagaggaaaagaaccaaattcattgcctgtgattttctgactgagtggttatacaaccaaaatccaaagagggcaggggagccattcacagaatttttctccattccatttgtggaggagcggctaaagcaacacccacggccgctctagaactagtggatcccccgggctgcaggaattcgatatcaagcttatcgataccgtcgactcgagggggggcccggtacccaagcttttgttccctttagtgagggttaattgcgcgcttggcgtnatcatggtcatagctgttcctgtgtgaaaattgttatcncgctcacaatttcacaccaacatacgagcccgggagcataaagngtnaaagcctnggggtgcctaatgaggtgagctaacccanattaattgcgttncgcttcnctggcccgntttncaagtcgggaaaacctggcnntgccnnnctgcatttaatgnaatcnggcnacnccccgggganangccggtttgcggtanttgggccgcctttttcncttctttgnttacttganntcgtttggcttngnncntttggntgngggcnagccggattaacttanttcaaanggggntaaatancgggtattcnaaaantanggggataaccccagggaaagaaattttannnanaaggccactaaaaggnccnaaacnttaaaaaggcccggttgttggggtnttnntaag

SEQ ID NO: 6082 - DNA, 923 bp, Homo sapiens
  misc_feature 202, 234, 266, 269, 304, 331, 351, 446, 463, 466, 472, 478,487, 507, 519, 524, 547, 553, 555, 588, 602, 614, 615, 635,645, 650, 658, 660, 664, 673, 674, 678, 692, 699, 704, 714,716, 732, 737, 738, 743, 748, 750, 757, 758, 759, 773: n = A,T,C or G
  misc_feature 775, 781, 784, 790, 791, 798, 799, 804, 806, 808, 809, 810,818, 832, 838, 851, 853, 857, 859, 860, 867, 870, 874, 894,900, 902, 906, 907, 908, 910, 911, 913, 918, 922: n = A,T,C or G
gaattggagctccccgcggtggcggccgcccgggcaggtacgcgggtaaaaaatacttttttaaaggactgtttaactactcacaaggctgcaaactctttggaagtgtttacactacaaaaaaagtgcttgagtttgttccaggtattattataaactttcttcagccctatcaaaggtagggtttttgcagctttcacangcagatgtcctccaggcttactgccttgtagntgtatcaagagaggacctttctggctgtcctnctnactacttgctctccataaagccagacttcactgtncctgtgggggcattcactctcttacancactgcctagacaagctcanattcttcaagacagaatcccccagtttttgcttcagaagatcagattaactggacatctaagggcccaaatgttccctccaaaacttggccaagncttacttgggcaggaanccnaggccnatgggncccattagnagtggtaaaaaaagcttgtnttatgtggccanaaatngggggcttttggttaattttgtnggttcntnctggttctgggaaacaaaatacttcttgattgnaagccatggggggnttaaatccttgnnttatccatttgggacagggngggggtttantttgnaaccaaantnctgnttggatggnntgcnactgtcattgtttnggggggngggtnaaggggcttntntgtttcaccagccccntatgnntggtncaatnanacacaannncttccaccgtcacntnatattntgngaaggnnattgggnnaaacncntnnnattatganctatgtggcccttntgaggncccactttatgantnttgntnnccaaaantgntaangtgttatttttatatgaganaaactntnttgnnntnngncaaantacnt

SEQ ID NO: 6083 - DNA, 899 bp, Homo sapiens
  misc_feature 3, 512, 536, 543, 554, 576, 599, 626, 669, 708, 711, 712,719, 740, 743, 758, 763, 766, 774, 779, 783, 798, 802, 822,823, 824, 826, 830, 833, 835, 837, 843, 846, 852, 859, 861,871, 874: n = A,T,C or G
cgncgactactatagggcgaattggagctccacccgcggtggcggccgcccgggcaggtactgctgttgtgtctgttaggtccagctggtatgatgctgttcaagttctgtcttgcgactgatcttctgtctggttgtcctatccgttactgaaagtgggctactgcagtctcctactcttactgtagaactatccatttcttcctttgattctgtcaatgtttgtttcatatattttgggctctgatgtttggtgcatatatattacatcttggtgaattttcaaactttttaaatttcaacatgaagatgaaattataggatgtctgggatttcctttgaatccgtggggctgggagtaactataaatgaaacaagattggcccggaatttgaggctgcaaggataggtacctcggccgctctagaactagtggatcccccgggctgcaggaattcgatatcaagccttatcgataccgtccgacctcgagggggggcccgggtacccancttttgttcccttttagtgagggntaattgncccccttggcngtaaatcatggtcataagctgntttcctgtgtgaaattggtaatnccgctcacaattccacaacaacatacnaacccgggaacataaaagtgtaaaccctgggggtgccctaatnagtgagctaactccacattaatttccttgccctcactgnccnntttccantcgggaaaccctgtcttccanatncattaattaattggnccacnccncgggagangcggnttgngtatttggccttttncccnttcttggttaattgattgtnnncntggncgntngnttcggnagnggattnattttantnaaaaggcggnaanacggttattccaaaaaaagggggat

SEQ ID NO: 6084 - DNA, 923 bp, Homo sapiens
  misc_feature 428, 447, 474, 477, 540, 569, 578, 580, 585, 587, 596, 648,656, 666, 670, 683, 686, 689, 700, 706, 709, 746, 771, 773,774, 791, 798, 800, 817, 825, 837, 838, 850, 865, 866, 869,885, 893, 895, 896, 907, 921, 923: n = A,T,C or G
tcctatagggcgaattggagctccccgcggtggcggcccgaggtactgtttattactttgctatgcaggagaaacaaaacagctttttatttgtgtgtatactctgaagtcaatgtgcatgggttaaatcccacctctgcttcattttatttgtgtggctttggacaagttcctaagccctctgtgtcaggcccctcattaacaaaatggagtttatgatggcatctacctcacatggttattgtgtggttgaaattagttaaaatctgtaaagtatgttgatgagtatctggtacagctattggaatcagatgcaaagatggtgttgtctttggggtagaaaaattagtccttctaaactttatgaaagaagggtccaacaaaaagactttttaatgttgatccggcattgttggaatggcacgtancaagtttgttggcagatgncttcgttctttagccagaccatggcanganaaagaagcttccaacttcagatctaactttggctacaacatttcccttaaaaccatcttgcanacaagagtggccatggtatgtgccatgcnatatacccntntacangnccttgttanacccttttggctgcagtttcaatgttaggggccttaccaggtgtgaatggancggtgcgncaactcttcnatgnattggaccccatncanggnggtttcatacncggtanttnggggcttgggcccatttggaaaagccaggccagcttncaaagaaccggaaaaatagaaaacntnnaaatgaaagaaatggcnctgcccngnattcgttaaaagaagtnccaaaaanaattacaatatnncccgggccgggngggccggttttaaannaanggatcccccgggctgngaggaatnanntttaagctttntgaaaccggcgacncn

SEQ ID NO: 6085 - DNA, 918 bp, Homo sapiens
  misc_feature 2, 3, 5, 81, 82, 83, 87, 89, 92, 93, 97, 99, 173, 236, 266,287, 304, 332, 347, 363, 367, 376, 385, 387, 393, 399, 414,420, 421, 430, 434, 454, 459, 460, 464, 467, 468, 472, 473,480, 497, 505, 509, 514, 521, 529, 540, 542, 547, 550: n = A,T,C or G
  misc_feature 551, 555, 557, 560, 566, 568, 569, 575, 597, 598, 599, 610,625, 626, 639, 640, 647, 656, 657, 664, 668, 676, 690, 702,707, 708, 731, 736, 740, 748, 771, 772, 773, 777, 778, 779,791, 792, 797, 799, 801, 803, 804, 805, 806, 814, 824: n = A,T,C or G
  misc_feature 831, 833, 835, 849, 859, 863, 866, 870, 879, 880, 885, 888,890, 893, 894, 897, 901, 906, 907, 917: n = A,T,C or G
gnncncgcgtatacgactcactatagggcgaattggagctccacccgcggtggcggcccgcccgggcagggtactttaatnnntttngnttnngttncnggaattcctcacacagtaacatctaatgtgttcttttatttttgaaacagcaggaaaagagccctttccttcanaggaaaataaaaactttatctgttgcttaagccaaactccagggaggaaggtgtggtcctctngggaaagtaaagggatggggatgtatggangaaaatggactccccttcatnagcacttaaggggaaangaattgctggaggcatctttgggacagntaaacagcttcctgncctttgcccttgctcnctgnacactgctnaccggcgtnanacatgnggaccnggccatacttttttnctagannggaaccacntttnctcttttggacttttttaanatttnnttgnaanncttnnatcaaanccttttcgggggaaggnactctccncggnatgantatatgnccttgggnttggtgatttnanattcnatnnactnanttngcaccngnnaccttnagcggtttttaaacttaggggnnncccccgggcgngggaagaattggganntcaaaccttaagnntcccctncaccctcgnnggggggncccntttccccnatatttttttcccntttaaagaaggnttaannccccctccacgaaaattatggcncaaanatgnggcctggntttaaaattttttcccctcatannntagnnnaaaattcccggnncgggngnanannnnttaaaacnccggggtccntatgagngngnaaacatcacatttnatgcctttgngtcnctncgcntttttaatnngaaanatntngtnnccncttnttaannatacaccccnt

SEQ ID NO: 6086 - DNA, 934 bp, Homo sapiens
  misc_feature 3, 5, 9, 25, 39, 51, 53, 207, 214, 229, 239, 262, 295, 300,313, 317, 324, 342, 364, 367, 373, 380, 411, 423, 431, 434,437, 440, 451, 467, 471, 482, 486, 490, 515, 524, 546, 551,555, 556, 561, 562, 572, 573, 581, 583, 606, 612, 613: n = A,T,C or G
  misc_feature 616, 626, 635, 638, 658, 664, 670, 679, 684, 696, 697, 700,721, 722, 723, 730, 740, 742, 753, 758, 760, 762, 767, 770,773, 775, 783, 784, 788, 790, 798, 809, 817, 822, 824, 825,828, 832, 836, 837, 840, 841, 845, 853, 864, 867, 870: n = A,T,C or G
  misc_feature 876, 890, 898, 899, 914, 915, 923, 924, 927, 930: n = A,T,C or G
ggncnaatngcagctccaccgcggnggcggccgcccggncaggtacccacngnacaaatgctactgggactccacacctacctaagaagcagctctacccagactccacatggctctctgttttggtctggagaccccagctggggtatctactgagcccagggattcaaaggttcgtggcagaaatatgcatcccacgggactctnctcactnaccattttcttgtanggggattccnctgggtctgtgccactcctgggngaatggctgatctgtctcacttttctccgtganccganggtcacactatgncacngatgaanccttatgtgtccacctgnatgttccgggtgaagagctagngtngcaccnctctttntgctatttttgtgagagtgggcacacactancctgcttctagncaaccaanttnggnccnaccttgacttnctttttcttaagttancaanggaccagaaangggntggncctttacaagaagcagaattccccnaaaattgtnaggagtttacttggaaaagggngggangctnnaaccnnggagaaggannttattgtntncagcaataaaagaacaactttgnaccctnnggnccgttctaanaaactagtnggncccccccggcttggcacggnaattcnaatttnaatcttatngatanccggccgacccnnganggggggggccccgggtacccnnncttttgnttcccttttngnggggggtaaantgggncncnttggngtnaanantgggcatnncctngnttccttgngtgaaaatttngtaacccntttanannatnccanccannatnncatncccgggancataaaagggnaangcntggggngccaaatagggganctaacctnnatttattggggttgnnccacaatnnccnatntcct

SEQ ID NO: 6087 - DNA, 904 bp, Homo sapiens
  misc_feature 29, 258, 380, 387, 415, 497, 500, 521, 526, 550, 553, 554,583, 600, 614, 618, 620, 642, 647, 657, 658, 660, 666, 669,678, 682, 693, 705, 710, 718, 729, 741, 758, 769, 778, 783,788, 792, 793, 796, 799, 802, 806, 820, 823, 840, 845: n = A,T,C or G
  misc_feature 849, 856, 866, 868, 871, 872, 873, 884, 894, 895, 899, 901,903: n = A,T,C or G
gaattggagctccacccgcggtggcggcncgaggtacagtggcctctacatgtgtgcacagcagctctggtcttagtgtctagctattactatttggtagatccatagatgggggggaaataaggagtcaggccagcaggttcaacttcttatttctcagtagcttcctataatgattccacctctaatgaggtgaattactactgcatgaaaaaggagaaaaaagggttttggccatcttagctaataaatcacatngactgcctggctgatcagatcaattgtgcataaatcagtgctttaaagagtcttaaaataagattctaccaagaccagtcgatccacaggcttgtgtaccggcaggtcctcttgcccatggnaaactgncaggagttcacagtttttgagacagttncatgtggcccaaatgttgaaaatgaatgtttcacatctcagaggcatggctctggtgtggaaaagtaagttaagtttgtgantgncaatgggaagtttttttcatntcctncaggttcacacttggtaccttaanggnngcaaggaaaaatttaattcttgaaatacntacctcaaaaaccttanggttttttaaagcngttngncaccaaggtgttaattttttangaaanggtttcccannanagaatntcnattttgttntttncaaaaagaaanttgtcatttatntccangggaaggntttttttttcncaatattttctngagatttacataacctnagggtttgacnccggcaggnctttntgagngatnnggnaanttngatntttggtttccatgnttnaaattgcccgggtgagngatgncatngtaagtnggattaatgngnaannnttttcttcgtnttcagagggnnggtnanant

SEQ ID NO: 6088 - DNA, 908 bp, Homo sapiens
  misc_feature 2, 89, 175, 184, 189, 191, 248, 258, 261, 270, 294, 295,349, 377, 411, 416, 426, 447, 466, 481, 482, 485, 498, 519,523, 528, 533, 536, 541, 543, 556, 560, 567, 572, 576, 580,589, 590, 599, 604, 605, 620, 621, 629, 632, 635, 639: n = A,T,C or G
  misc_feature 640, 641, 647, 655, 657, 668, 672, 681, 695, 696, 698, 700,701, 702, 711, 719, 721, 723, 727, 730, 733, 734, 737, 740,742, 748, 754, 755, 757, 758, 763, 765, 773, 780, 783, 789,798, 800, 804, 809, 811, 821, 827, 828, 832, 834, 840: n = A,T,C or G
  misc_feature 842, 848, 849, 851, 855, 857, 860, 861, 862, 864, 865, 872,874, 877, 882, 888, 893, 900, 904, 906: n = A,T,C or G
tncaccgcggtggcggccgcccgggcaggtacgcgggtcccttcagagcctctaaagtagaacctttcttgcctcttcccagcttctgngggtggcagcaacccttggtcttcctggcttgaagctatatcgctccaatctctgtttctgtcctcacgtgatgttcaccctgtgnttctgtctnctgtntngtaagtgcaatagtcatattggacccaccatcctccagtatgacctcatcttaattnaagctaattnccncagcaaagnccctatttctgaattacagcaaannatgagatacttggaattggaactttatcttatctttttggggcacaagcaattnagttcatatcacacacacacacctattncttgtgcaaaaactagatttttaagtgcataatnttatntgcattagcntatttttatctcaacatattngaaaataacttcccatggncactaaattaaagannaancatgaataaaagntctcaaaggttacttgccttnaganttttnagtgnaanaaggntnaaagagttttaantttncaaattnggttnttcnaaanatgtggatnntattttatnacccnnatggggctttttggnnaggggacntangcncccnnntctgangggaatgntngggagaaaccngggncatgttatnaattattctttagnnantnnnagaaccccncaaattcngncntatntcnccnnccnttncncgggantattgnnannaaaanantaaaaacntggtganggngtgatnacacattangngacncatgngncgtatatganattgtnngatncnccgggncntgaggnnanttgntntannngnntatgcgntnccncatgntccctnggggngggcccngttncncg

SEQ ID NO: 6089 - DNA, 923 bp, Homo sapiens
  misc_feature 7, 10, 12, 210, 467, 493, 513, 553, 567, 568, 570, 578, 589,609, 626, 629, 641, 642, 652, 686, 692, 752, 763, 775, 799,817, 865, 871, 903, 905, 914, 915, 922: n = A,T,C or G
tacgctncgncngcgcgcgtatacgactcactatagggcgaattgggagctccaccgcggtggcggcccgaggtaccaggctagccttcctgatgactgcagcagcaaggctgcccatgggccaccccagacagcctgcttagaatcttctagaagagctgcttgatgtaagacattaagacattcttaaacgaagccagtctttaaggnctagaataaatccttaattctttcaatacatagacattaacgtaaaagcaacaagaaacaaggaaagtcaaatagacatagcactccccaaagcatataataatctctaaggtgatccaaagataccaaactggctgacaaataatttcaaaatagctcattaaaaaatgctcacttaacttccataggatacaggggaaacaattcaatggaatcagggaaacaattaattaccaaaaagaggatattttccaaantaccaaaattaccaaattaccaaaanttaccaaaaggagatatttnaccagacagattggaaatttttaaaccaaaccaaccaccnccaacaaccaaccnnanattcaacnggaattttctnggggcagaaaaattaggagnggaaccgaaataaaaanccnccagagaaaatnntcagttaacnggaatggatcaagttggaaaaaaggattttttcnttgaanttggaagacaaggttatttggaaattttcccggccggaaggggaaaaaaattaaaccaantaaaaaggggntaaggaaatttnttttttagaaatttttaggacttntgggaaaaattttccaanggccaaattttcaaggttgtaagagtttcaggaaggggaagaagaacnaagggntggaaaggtttccaacttttttttaaggaagnantagccttcnnttttccnt

SEQ ID NO: 6090 - DNA, 891 bp, Homo sapiens
  misc_feature 5, 6, 7, 8, 9, 10, 11, 13, 14, 48, 179, 492, 511, 513, 524,568, 570, 619, 666, 671, 689, 719, 749, 770, 783, 790, 853,867, 871: n = A,T,C or G
tacgnnnnnnngnncgcgcgtaatacgactactataggggcgaattgnagctccccgcggtgggcggcccgcccgggcaggtaccagcactgtggaaaggcttaggtgcaaggaattgtggcctcccgccaatggccagtgaggaactgagatctccagccaatagccttgtgactaanccatcttacaggagaatcattcaggcccatgcaacctttaggtgactgcagccccacccactgtcctaactgctacctcatgagaaaccctgagctagaaccagccaactaaattagaatttctaatttgtaggaataatgagaaaataaatgtttgctctttttaaagccactacattttttttgatgtagcaatacataagtaatacaaccacctctcccattttcatttcagctcaatccaattagatattttcaattttcatgtcaataaaattattatatatataaattacatatattcatatatatncacacaccaaacacaaatntntataaaattgnttaaatacctggtaagcacatagaacagtatctggccctgagangngcttcgttatttaaaattactattactctattattacaagcagcagganggaatatatggagccactggaggactggccatcttggtaaaacccangaagntaaatggccggtcctggntttctttacctttacaagtaccttgggcgntttagaactagtgggatcccccggctggangaattcgatttcaagcttatngatacccgtcgancctcganggggggcccggtccccacttttggttcccttttagtggagggtaaattgggccccttgggggnaatcatgggcatancctngtttcctgggggaaatgttt

SEQ ID NO: 6091 - DNA, 876 bp, Homo sapiens
  misc_feature 5, 648, 684, 725, 739, 756, 768, 771, 772, 798, 830, 865: n = A,T,C or G
cacgncactactatagggcgaattggagctccaccgcggtggcggccgaggtacttcccctgcttggggccatctgtgctaggacatgatgatttttctatgaaagcagctgttctcaccatcacaaccagccttgaacttggtggcacaacctggatcctaaatagtggctctggagcaactgggaatagggccccggggaccacccacccaggtggcagcgctgggctgcaccaagggggagtcaggccagaaaaaaagctttgccctgctccctgctgctttttgccagcccagccagaagccctgcagaaaacctgtgctgaccggcccgacatgtggcaaggtacctgcccgggcggccgctctagaactagtggatcccccgggctgcaggaattcgatatcaagcttatcgataccgtcgacctcgagggggggcccggtacccagcttttgttccctttagtgagggttaattgcgcgcttggcgtaatcatggtcatagctgtttcctgtgtgaaattgttatccgctcacaattccacacaacatacgagccgggagcataaagtgtaaagcctggggtgcctaatgagtgagctaactacattaattgcgttgcgctcactgcccgcttttcagtcnggaaacctgtcgtgccagctgcattaatgaatcggncaacgcccgggagaggcgggttgcgtattgggcgcttcttncgctttcttgttantgactggttggctcggncgttcggttggnggnnagcggtataactcactcaaaggcggnaatacgggttttcacagaaacaggggataacncaggaaaaaacatgtgaaccaaaaggccaccaaanggcaggaaccc

SEQ ID NO: 6092 - DNA, 861 bp, Homo sapiens
  misc_feature 9, 15, 101, 114, 115, 127, 168, 175, 182, 194, 206, 219,240, 263, 266, 275, 287, 290, 297, 307, 316, 393, 396, 401,405, 439, 463, 466, 471, 494, 520, 528, 547, 550, 580, 585,596, 611, 631, 633, 638, 640, 641, 661, 709, 729, 731: n = A,T,C or G
  misc_feature 732, 774, 785, 794, 800, 802, 803, 815, 820, 823, 829, 830,836, 840, 846, 848: n = A,T,C or G
ggggcggcncgcgtnactcactatagggcgaattggagctccaccgcggtggcggccgcccgggcaggtactttggcctctctgggatagaagttattcancaggcacacaacnnaggcagttccanatttcaactgctcatcacatggcgggaagatgaagacaganggtgcanccacagntcgtttgatttncaccttggtccnttggccgaacgtnccaagtgagctaccatactgntgacagtaatacactgcaaaatnttnaggctccantctgctgatggnganagtgaantctgtcccanacccactgncactgaacctgtctgggatgccagtggccctgctggatgcaccatagatgaggagcctgggagcctggccaggtttntgntggtncctnggccgctctagaactagtggatcccccgggctgnaggaattggatatcaagcttatcnatncccgncgacctctagggggggcccggtnccagcttttgggtccctttaggtganggttaaangcgccccttggcgtaattnatnggcatagctgttttctgtgtggaaaatggntattncgctcacaaanttcccacaacatacnaacccgggaagcataaagtntnaaggncnnggggtgcctaatgagtgagntaacctcacattaaatgcgttgcgctcactggccgcttttccaggtcnggaaaacctgtcctgccagntnnatttatgaaattcggcccaaaccccccggggagaaggccggnttgcgtatttnggccgcttnttcccntnngcttccctaaanttganttncttgannctccgntcantccggntncgggccaaccggc

SEQ ID NO: 6093 - DNA, 869 bp, Homo sapiens
  misc_feature 1, 4, 15, 25, 30, 71, 73, 74, 123, 229, 280, 282, 286, 301,352, 358, 398, 408, 409, 420, 460, 467, 474, 480, 490, 495,501, 513, 525, 539, 542, 545, 547, 548, 556, 571, 574, 575,584, 597, 604, 636, 640, 643, 650, 651, 655, 662, 671: n = A,T,C or G
  misc_feature 672, 673, 674, 685, 697, 699, 703, 710, 711, 713, 714, 715,716, 722, 744, 750, 755, 760, 771, 784, 792, 803, 807, 826,831, 839, 840, 841, 859, 861, 862, 867: n = A,T,C or G
nagncgcgtgcgcgnatacgactantatanggcgaattggagctccccgcggtggcggcccgcccgggcangnncaccacacgttaagcatcccaagcagcttatgagtgggtctgctgatanagtctgcaaagtggttagtaggatacacagccctttcttgagtttcaagccctgactgtgagtccctccctgttctccctgctcctagtctctcctagacacttanccaggctgatcccattattctgggtgagtcaaaaagaggtgggtcttttcnantgtnctgcacaagtagaanaccaggagcttactcactatgctctcacttcctctgtgggaagaatcacangttganggaatctctcttggaacccagctgtgccatcttggggcangaatgatgcnngtgaactgaanacggtcttacattctttaatggggtctatttttccaatanttttctnggacttnttttgncttttaaccnccaanaagggngggtggcaaaantggtgccctggnggggagaaggacantanatncnncttatttntttattttactttcnttnnccatttctnaatgaaaaaattnggctggnttttttttgttggttaaacgggggaattttanaacnccnttttaanngganaaaggcncctccccgnnnntttttttggtngggaaatttttngnccanccggggnnannnnaataanaccccctttaaaaaaaacaaanttttanctttnttatncccaaaaatgnaatttaaggcccngggttttnccctttggganccancttggaaaaacaaaaaaantttcncccccttnnncccaaaaaaattttgggntnncccgnaa

SEQ ID NO: 6094 - DNA, 992 bp, Homo sapiens
  misc_feature 1, 3, 8, 9, 11, 20, 21, 27, 43, 140, 228, 263, 308, 311,312, 315, 317, 318, 319, 323, 330, 333, 334, 336, 338, 340,343, 357, 365, 367, 371, 380, 381, 385, 386, 388, 391, 405,411, 413, 418, 424, 429, 437, 439, 440, 444, 445, 448: n = A,T,C or G
  misc_feature 455, 456, 458, 459, 461, 462, 463, 465, 471, 476, 480, 481,485, 489, 490, 493, 495, 499, 503, 507, 509, 510, 512, 516,517, 519, 520, 521, 524, 529, 537, 541, 542, 545, 549, 559,563, 565, 567, 569, 574, 575, 579, 580, 588, 595, 596: n = A,T,C or G
  misc_feature 597, 600, 613, 614, 616, 617, 619, 620, 622, 623, 624, 625,626, 627, 628, 630, 632, 633, 634, 638, 640, 645, 647, 648,660, 662, 664, 681, 684, 685, 690, 694, 699, 700, 702, 704,707, 708, 709, 711, 714, 715, 717, 721, 722, 726, 727: n = A,T,C or G
  misc_feature 730, 733, 736, 737, 738, 745, 747, 749, 751, 753, 754, 756,768, 769, 770, 774, 778, 779, 785, 790, 797, 800, 810, 822,823, 827, 831, 833, 835, 844, 847, 848, 851, 852, 856, 858,861, 871, 877, 883, 885, 887, 889, 891, 892, 893, 894: n = A,T,C or G
  misc_feature 896, 897, 903, 905, 910, 926, 934, 939, 940, 947, 948, 958,961, 963, 969, 970, 971, 974, 977, 980, 984: n = A,T,C or G
ngncgcgnncnccgacttannctaagnataaggcgaattggangctccacccgcggtgggcggcccggcccggtgccccggctccttttcctcctttcggccttcgccgtccaccaagtccctctcttttgtccccggcncgctctaagaactaagtggatcccccgggctgcaggaaattcgatatcaagcttatcgataccgcgacctcgaggggggggcccgggnacccagcttttgttcctttaagtgaggggtaattngcgccgccttgccgtaaatcatgggtcatagcttgtttctggaanaannaanannnaacncatacangtnntnananaanggagtagtgttatnataattananatanttatgaaannatanngntantttaaatgtgaatnaaagantntgacntaatanaagcnaatagtantnntatnncanaattaannannannnanaatatnataanaatnngatngaanngcntntcanaaanaaantnnanttannannntancaatntcacaatntaanntanaganttaataatantatnananangactnngacnngttatacncaatatnnnagntgataatgaaaannannanntnnnnnnngnannngtangntacanannaatataataatnantntggtatagagcagaatnaanntatanaacnacgtnntnanaannnanctnnangaannatanntanatnatnnntacaatntnanananngntctgattaattnnntatntaannatcaanatggnaaatagnaantctattacantatatagtttanntgtnaaanananatgtcattnacnnatnnttanantcnttataatcgntgtganataaanancnanannnncnnacacangngtaanaaatatgacaatgtantattaacnatatnnaattcgnnaaaaggttantanantagacnnncantanatnatantgaaacac

SEQ ID NO: 6095 - DNA, 873 bp, Homo sapiens
  misc_feature 6, 57, 341, 344, 345, 385, 386, 387, 388, 389, 390, 391,392, 393, 394, 395, 396, 397, 399, 400, 401, 402, 403, 404,405, 406, 407, 408, 409, 410, 411, 412, 413, 414, 415, 416,417, 418, 419, 420, 421, 422, 423, 428, 429, 431, 432: n = A,T,C or G
  misc_feature 433, 434, 446, 447, 448, 449, 450, 451, 452, 453, 454, 455,456, 457, 458, 459, 460, 461, 462, 463, 464, 465, 466, 467,470, 471, 472, 473, 474, 475, 476, 477, 478, 479, 480, 485,488, 490, 492, 498, 499, 502, 503, 504, 505, 506, 507: n = A,T,C or G
  misc_feature 508, 509, 512, 515, 516, 517, 518, 519, 521, 524, 527, 528,529, 532, 551, 553, 555, 557, 558, 561, 562, 563, 564, 565,566, 567, 568, 569, 570, 571, 572, 574, 575, 576, 578, 579,580, 581, 582, 583, 584, 586, 587, 588, 589, 591, 592: n = A,T,C or G
  misc_feature 593, 594, 595, 596, 597, 598, 599, 600, 601, 602, 603, 604,605, 606, 607, 608, 609, 610, 611, 612, 613, 614, 615, 616,617, 618, 619, 620, 621, 622, 623, 624, 625, 626, 627, 628,629, 630, 631, 632, 633, 634, 635, 636, 637, 638, 639: n = A,T,C or G
  misc_feature 640, 641, 642, 643, 644, 645, 646, 647, 648, 649, 650, 651,652, 653, 654, 655, 656, 657, 658, 659, 660, 661, 662, 663,664, 665, 666, 667, 668, 669, 670, 671, 672, 673, 674, 675,676, 677, 678, 679, 680, 681, 682, 683, 684, 685, 686: n = A,T,C or G
  misc_feature 687, 688, 689, 690, 691, 692, 693, 694, 695, 696, 697, 698,699, 700, 701, 702, 704, 705, 706, 707, 708, 709, 710, 711,712-815, 817-820, 821, 825-828, 831, 834-835, 837-840, 842-847,849-857, 861, 868-871, 873: n = A,T,C or G
agggancgcgtaatcgactactatagggcgaattggagctccaccgcggtggcggcncgcccgggcaggtacagcctgcagaactggcccttgtcctctgtcgtctacatcagacctgcctcgtcccatccaagccgatcaccttctgagaggacctggcccccgagctcaggagcaccccagctctcaggacacagcccctcgtggtgggacagcgcctgcacctgcagccctgtagcccctgcacaaggaatttgttgagggaatttgtattttctgctgctttctccttgaacctatttgcattttaaataattaaaacattaaagctgaaaaatttnttnnaaaaaaaaaaaaaaaaaaaaaaaaaaaaaaaaaaaaaaannnnnnnnnnnnntnnnnnnnnnnnnnnnnnnnnnnnnnggggnngnnnnaaaaaaaaaaannnnnnnnnnnnnnnnnnnnnnggnnnnnnnnnnnccccnccncncngggccnnaannnnnnnnttnttnnnnngngcncgnnnggngggggggggggcccccccntntntnnttnnnnnnnnnnnnannnannnnnnncnnnngnnnnnnnnnnnnnnnnnnnnnnnnnnnnnnnnnnnnnnnnnnnnnnnnnnnnnnnnnnnnnnnnnnnnnnnnnnnnnnnnnnnnnnnnnnnnnnnnnnnnnnnnnnnnnnnnannnnnnnnnnnnnnnnnnnnnnnnnnnnnnnnnnnnnnnnnnnnnnnnnnnnnnnnnnnnnnnnnnnnnnnnnnnnnnnnnnnnnnnnnnnnnnnnnnnnnnnnnnnnnnnntnnnntnccnnnnccnccnncnnnncnnnnnncnnnnnnnnnccccncccccnnnntn

SEQ ID NO: 6096 - DNA, 901 bp, Homo sapiens
  misc_feature 5, 13, 17, 18, 22, 26, 39, 308, 337, 338, 381, 391, 394,406, 417, 420, 434, 435, 436, 440, 441, 460, 467, 468, 489,495, 497, 501, 502, 503, 505, 516, 521, 524, 528, 529, 547,550, 560, 563, 564, 572, 580, 586, 596, 597, 600, 608: n = A,T,C or G
  misc_feature 615, 620, 629, 634, 635, 637, 638, 646, 648, 666, 667, 677,679, 700, 707, 708, 711, 740, 748, 764, 776, 782, 790, 791,798, 801, 810, 818, 829, 831, 834, 838, 841, 845, 848, 849,862, 867, 871, 884, 895, 901: n = A,T,C or G
ttttngagcgcgnttanntagnctgntggctgattgganctccaccgcggtggcggccgcccgggcaggtactcttctagccatctgaaatacgttttctagggaaatgtttcaacgtgcgcaagcgttgcggcggcgggcagaggactactacagatgcaaaatcaccccttctgcaagaaagccttttgcaacccggtgcacttacaatttggtattacctgggagtgaaaagaaatattacagccatgcctaactgacttcttgagggtcaaaatggcggcagtggaacatcgtcattcttcaangattgcctactggccctacctcacagctnnaactttaaaaaacagggatgggccagcaagcaacttcttcaanttaacaacanttntattaattgatnaattcctgggnctntagaaaacctttcnnngtgnngggctctattccctttcancccttanngggatgattatttttaagaanaccttncnagtnnntnttttattcccntttcnccntagnntttttcctttaagggganganaaattttaanaanncctttccnaatgcctntttttnttccccttcnnccntaaagggntgataanttttnaaaaaaacncccgnngnngggtgggntnattccctttcacccctanngttcaacctntngggggtgaaaaaatttaaganacccccnnganaggggttttggttaacccccttttccctnttgggggnaaaaaactccgaaaantttggggaaaantttcantttgggtnnaaaaaanaanttttaaaanttccttcnccaggggggtntnacnccanaantttnccnnagaaaaaaaaaanttttncccncccccccgggggngaaacccttanattttn

SEQ ID NO: 6097 - DNA, 854 bp, Homo sapiens
  misc_feature 4, 21, 464, 466, 467, 469, 476, 482, 494, 501, 509, 511,512, 516, 517, 525, 532, 534, 547, 564, 566, 579, 599, 610,611, 620, 621, 622, 623, 624, 625, 627, 631, 632, 633, 634,635, 636, 637, 638, 639, 640, 641, 642, 643, 644, 645: n = A,T,C or G
  misc_feature 646, 647, 648, 649, 650, 651, 652, 653, 654, 655, 656, 657,658, 659, 660, 661, 662, 663, 664, 665, 666, 667, 668, 669,670, 671, 672, 673, 674, 675, 676, 677, 678, 679, 680, 681,682, 683, 684, 685, 686, 687, 688, 689, 690, 691, 692: n = A,T,C or G
  misc_feature 693, 694, 695, 696, 697, 698, 699, 700, 701, 702, 703, 704,705, 706, 707, 708, 709, 710, 711, 712, 713, 714, 715, 716,717, 718, 719, 720, 721, 722, 723, 724, 725, 726, 727, 728,729, 730, 731, 732, 733, 734, 735, 736, 737, 738, 739: n = A,T,C or G
  misc_feature 740, 741, 742, 743, 744, 745, 746, 747, 748, 749, 750, 751,752, 753, 754, 755, 756, 757, 758, 759, 760, 761, 762, 763,764, 765, 766, 767, 768, 769, 770, 771, 772, 773, 774, 775,776, 777, 778, 779, 780, 781, 782, 783, 784, 786, 787: n = A,T,C or G
  misc_feature 788, 789, 790, 791, 792, 793, 794, 795, 796, 797, 798, 799,800, 801, 802, 803, 804, 805, 806, 807, 808, 809, 810, 811,812, 813, 814, 815, 816, 817, 818, 819, 820, 821, 822, 823,824, 825, 826, 827, 828, 829, 830, 831, 832, 833, 834: n = A,T,C or G
  misc_feature 835, 836, 837, 838, 839, 840, 841, 842, 843, 844, 845, 846,847, 848, 849, 850, 851, 852, 853: n = A,T,C or G
aggncgcgcgtaatcgactantatagggcgaattggagctccccgcggtggcggcccgaggtacatcttttacaaataaactttacagtaaatcctatcacacctatagaatatataccgtggcaatgaagtgatcaattcaagatatcctgagaaaaacagattgttttcaaaagtcacacatacatcggggaaactatactatgccaacaaattcacatatgtccaacaatagtctgttccaattgttagagtctgtgggctgacagtgctgtgtggatccttctcttttacagtggcacaagatgtggtctggacccgcgtacaccatagtccctgcagagattgaatcccaggtggaagaatgcagaaaagctttagaagacatagatgagaagattagcaatgaagtcttaaaaagctcaccatcatatgcaaaaaaaaaaaaaaaaaaaaaaattccncnncnggggggncctttnaaaaaagggggnacccccngggcgggnannattnnatttaaanttttttnancccccccccccgngggggggcccggccccncnttttttccctttnaaaggggggaaaatggcccncgggggaaaannggggaaaannnnnntncggnnnnnnnnnnnnnnnnnnnnnnnnnnnnnnnnnnnnnnnnnnnnnnnnnnnnnnnnnnnnnnnnnnnnnnnnnnnnnnnnnnnnnnnnnnnnnnnnnnnnnnnnnnnnnnnnnnnnnnnnnnnnnnnnnnnnnnnnnnnnnnnnnnnnnnnnnngnnnnnnnnnnnnnnnnnnnnnnnnnnnnnnnnnnnnnnnnnnnnnnnnnnnnnnnnnnnnnnnnnnnnc

SEQ ID NO: 6098 - DNA, 840 bp, Homo sapiens
  misc_feature 586, 654, 668, 714, 757, 773, 831, 832, 837: n = A,T,C or G
cgcgcgtaatacgactcactatagggcgaattggagctccaccgcggtggcggcccgaggtactttgagttctcacgtgcgtcttaaggcatgagtgttcactgaagacttctccacattgctcacagtcacagagttcccttccattgtgttttccttccaattgtatcccaatggatgtcggacccctcaaaaagtcctgctgaagtatagaccactgggtttcaagtcgcatttcccatccttggagaactcctccctgaactgtccttgactcttcttgttccaaccaagagattagactgggtttgatgatctgacctcctactgtggccaggttcttgtagttctccagcatcacgtcactgtagaggcttctctgagttgagtccagtaaagtccactcctcctgggtgaagtccacagccacatcgtcaaaggtcactgaatccatgggacaaatcagcagctgccatcccgcgaggtgagaacgtgtcagaaccctcctttcattgatgtcaccatcacttcaggacacctcattaatctaaatggacagtggcaatctccattcctctttaaacanggttattgggattccggaacactcagaaatcgccaggtccctgaaccgggaaaatcctggggacgganccaacgcggatgcnaaaggcaggcaattatttttccagccagtgaggccttactctgaangcaaaaagacttttaggcgcttacaggcggcgtacaaaacccncgtacctgccggcggncgttttaaactaatggatccccggcttcaggaattcatttaagcttattgatccggtnnacctnaag

SEQ ID NO: 6099 - DNA, 861 bp, Homo sapiens
  misc_feature 26, 73, 76, 77, 79, 103, 110, 135, 176, 182, 183, 195, 201,208, 225, 241, 246, 249, 252, 260, 289, 296, 302, 311, 312,323, 327, 336, 343, 351, 352, 353, 364, 382, 383, 404, 407,438, 457, 459, 465, 468, 486, 495, 498, 520, 521, 529: n = A,T,C or G
  misc_feature 530, 533, 536, 561, 566, 580, 581, 598, 599, 612, 658, 659,662, 664, 670, 674, 675, 681, 694, 698, 711, 713, 721, 722,726, 765, 784, 789, 793, 796, 798, 799, 805, 808, 809, 820,822, 826, 827, 828, 829, 834, 835, 836, 837, 840, 841: n = A,T,C or G
  misc_feature 844, 854, 861: n = A,T,C or G
agtcgcgtatcgactactatagggcnaattggagctccccgcggtggcggccgaggtacaacttgtcataaanggnngngtgggacatttacattcttttggnctacagntctgagactatcttttatgcatgtntgtatttattcagtaaacatttatcctctgctgcacgtcangcactnnccagacccgatnggaganaacccanggtgagtgtgacccggnctctgcttggaacganatggntgnctntagccagnccaggtgcttaccatgtgcctggtgtggngtccatnacaccnagcatggcnnacctatgcatnctgntggtgcagntctgtanaggggacnnnacagacaacanaccatgactccgagaaanngcaacatgtgccacgaggaancanaattccaggacaggaaggtcagggaatcctntctggaccaagggggagananaaccancangggatggtattctggcanacggggcantancttgaatcccccaaagtggaanngttatganntcntgnagggtggaaaggaaatgggagctgngaaangggggcatcaattnncatattctaaacacgannatcttgaaccttntattttgttatcccaaatgcattaaggcattgttccaggattttannccngntaatgnttgnnaatcantttgaaaaaaaanaatntgggtgccaaggntnctcggttnntaangggatttttttaaggccctgacctggattggaggcccgnttgccctttattaaccttntgaanaggntantnntccgcnaannggaccatgaancncccnnnnttggnnnnggnnttnggaaaaaaangggggan

SEQ ID NO: 6100 - DNA, 874 bp, Homo sapiens
  misc_feature 10, 26, 287, 288, 289, 290, 291, 292, 293, 294, 295, 296,297, 298, 299, 300, 301, 302, 303, 304, 305, 306, 307, 308,309, 310, 311, 312, 313, 314, 315, 316, 317, 318, 319, 320,321, 322, 323, 324, 325, 326, 327, 328, 329, 330, 331: n = A,T,C or G
  misc_feature 332, 333, 334, 335, 336, 337, 338, 339, 340, 341, 342, 343,344, 345, 346, 347, 348, 349, 350, 351, 352, 353, 354, 355,356, 357, 358, 359, 360, 361, 362, 363, 364, 365, 366, 367,369, 370, 371, 372, 373, 374, 375, 376, 377, 378, 379: n = A,T,C or G
  misc_feature 380, 381, 382, 383, 384, 385, 387, 391, 392, 393, 394, 395,396, 397, 398, 399, 400, 401, 402, 403, 404, 405, 406, 407,408, 409, 410, 411, 412, 413, 414, 415, 416, 417, 418, 419,420, 421, 422, 423, 424, 425, 426, 427, 428, 429, 430: n = A,T,C or G
  misc_feature 431, 432, 433, 434, 435, 436, 437, 438, 439, 440, 441, 442,443, 444, 445, 446, 447, 448, 449, 450, 451, 453, 454, 455,456, 457, 458, 459, 460, 461, 462, 463, 464, 465, 467, 469,470, 471, 472, 473, 475, 476, 478, 479, 480, 481, 484: n = A,T,C or G
  misc_feature 485, 487, 488, 489, 491, 493, 494, 495, 496, 497, 503, 504,505, 506, 507, 509, 510, 511, 512, 515, 518, 519, 522, 525,526, 528, 534, 536, 543, 544, 545, 546, 547, 548, 549, 550,551, 552, 553, 554, 555, 556, 557, 558, 559, 560, 561: n = A,T,C or G
  misc_feature 562, 563, 564, 565, 566, 567, 568, 569, 570, 571, 572, 573,574, 575, 576, 577, 578, 579, 580, 581, 582, 583, 584, 585,586, 587, 588, 589, 590, 591, 592, 594, 595, 596, 597, 598,599-603, 605-615, 617-621, 623-873: n = A,T,C or G
agcgcgtatncgactactatagggcnaattggagctccacccgcggtggcggccgcacctctggggccagaccactggtctccagagaggcgcggggacctccaccagggatcggagtggtacctcggccgctctagaactagtggatcccccgggctgcaggaattcgatatcaagcttatcgataccgtcgacctcgagggggggcccggtacccagcttttgttccctttagtgagggttaattgcgcgcttggcgtaatcatggtcatagctgtttcctggannnnnnnnnnnnnnnnnnnnnnnnnnnnnnnnnnnnnnnnnnnnnnnnnnnnnnnnnnnnnnnnnnnnnnnnnnnnnnnnnannnnnnnnnnnnnnnnncncctnnnnnnnnnnnnnnnnnnnnnnnnnnnnnnnnnnnnnnnnnnnnnnnnnnnnnnnnnnnnngnnnnnnnnnnnnntntnnnnntnntnnnnccnncnnncntnnnnngaattnnnnntnnnnctnatnnatnccnntnaccttnanggggggnnnnnnnnnnnnnnnnnnnnnnnnnnnnnnnnnnnnnnnnnnnnnnnnnngnnnnnnnnnngnnnnnnnnnnntnnnnngnnnnnnnnnnnnnnnnnnnnnnnnnnnnnnnnnnnnnnnnnnnnnnnnnnnnnnnnnnnnnnnnnnnnnnnnnnnnnnnnnnnnnnnnnnnnnnnnnnnnnnnnnnnnnnnnnnnnnnnnnnnnnnnnnnnnnnnnnnnnnnnnnnnnnnnnnnnnnnnnnnnnnnnnnnnnnnnnnnnnnnnnnnnnnnnnnnnnnnnnnnnnnnnnnnnnnnnnnnnnnnnnnnnnnnnnnnnnnnnnnnnnnnnnnnnt

SEQ ID NO: 6101 - DNA, 858 bp, Homo sapiens
  misc_feature 3, 5, 7, 9, 17, 23, 39, 42, 51, 55, 509, 594, 622, 630, 642,656, 668, 680, 716, 741, 761, 762, 781, 803, 804, 806, 848: n = A,T,C or G
atntnantngacatagntgttanctgatggcaactccancgnggtggcggncgangtaccaggctgtagatttgataagctagatgcagtagaccgaaaccatccaaaacctgtttagcttcttcctccattggagtttattgggacaaacaggagagccagccattgtctccagtacgcgggtttcaatttaaatgttgctaaccttcctttcccactggctctgtataaaaaacttctggaccaaaagccatcattggaagatttaaaagaactcagtcctcggttggggaagagtttgcaagaagttctagatgatgctgctgatgacattggagatgcgctctgcatacgcttttctatacactgggaccaaaatgatgttgacttaattccaaatgggatctccatacctgtggaccaaaccaacaagagagactatgtttctaagtatattgattacattttcaaccgtctctgtaaaagcaagtttatgaggaatttcaganaggattttatagaatctgtgagaaggagatacttaaacatttctaccctgaagaactaatgacagccatcattggaaatactgantattgactggaaacagtttgaacagaantcaaagtntgagccagggtncccaaaatcacatnctactatacagntggtttggaagnttttcccaactacccttggatgaaaagaaaaaattnctcttttttcttcaggacctgatangcttgcatgccaaagcttcnnaaaatgggaaaagtttttnctttcctgaactttagggaaannantacccacatcaatacctggcataaattctctcccccctaagnttctacaagg

SEQ ID NO: 6102 - DNA, 492 bp, Homo sapiens
  misc_feature 19: n = A,T,C or G
taatcactactatagggcnaattggagctccccgcggtggcggccgcccgggcaggtacgcggggggcttccggaagctcatctcaaaatgctgaactgctctttggaagtcgccggtgctgttgtagttggagtctgttcacgggcctgagcttcgaggccaggctcctgggtgtcgttaatgttcggggccgccgggcgccaaccgatcggagctccagcagccaggaacagctggcatttcagtagaaccatggaggagctggttcatgaccttgtctcagcattggaagagagctcagagcaagctcgaggtggatttgctgaaacaggagaccattctcgaagtatatcttgccctctgaaacgccaggcaaggaaaaggagagggagaaaacggaggtcgtataatgtgcatcacccgtgggagactggtcactgcttaagtgaaggctctgattctagtttagaagaaccaagcaaggactataa

SEQ ID NO: 6103 - DNA, 493 bp, Homo sapiens
  misc_feature 486: n = A,T,C or G
ctaacactacttagggctaattggagctccccgcggtggcggccgcccgggcaggtacgcggggatgcattactgtattcccccatgtatggcagttgctcagaaaatgcttgaggaaggaaagaagaaagaaaggaaggaagaataaaggaaataaggtctgctggtgtttgctggacgtccgctccagaccctgtttgcctgggtatcagcagcagaggctgcagcacagcaaaaattgctgcctgtcccttcctctggaagcttcatcccagaggggcacccaccagatgccagccaaagctctccggtatgaggtgtctgtcgacccctgctgggaggtatctctcagccaggaggcacaggggtcagggacccacttgaggaggcagtctggcacttaacagagctcagagatctgctgctctcttcggacagaaacgtttaagtcaactgaagctgccccacagccactcctttccccanacaatgg

SEQ ID NO: 6104 - DNA, 853 bp, Homo sapiens
  misc_feature 6, 7, 21, 25, 587, 592, 636, 657, 658, 659, 660, 665, 666,667, 668, 669, 670, 671, 672, 673, 674, 675, 676, 677, 678,679, 680, 681, 682, 683, 684, 685, 690, 691, 711, 729, 730,732, 733, 734, 735, 736, 737, 738, 744, 745, 746, 751: n = A,T,C or G
  misc_feature 753, 769, 791, 792, 794, 816, 817, 821, 822, 823, 824, 825,826, 827, 828, 829, 830, 831, 832, 833, 834, 835, 836, 837,838, 839, 842, 843, 845, 846, 847, 848, 849, 850, 851, 852,853: n = A,T,C or G
agcgcnncgcgtatcgactantatngggcgaattggagctccccgcggtggcggcccgcccgggcaggtacagaaaacaacacaaaataaaacttggtggataaattatttgtatataacattaaaagaagtagaagattttcagttataattacaattaaagtatacttttatcttgaaaaaattactgatttttaaattagtgaataatgatgtaattaaactctcaaataactttatgctcttttttcattcctgctatattcacatgtgaaagcatgtgaccaattgttgctgcaccaaagatatgagagattcttttattaggtgggcattatttaaaacattttttatggaacagtaaggatattaaagtgtaagatgcagccaggcatggtggctcatgcctataatcccagcactttgggaggctgaggccggtggatcacctgaggtcaggagtttgagaccagcctgaccaacatggtgaaaccctgtctttactaaaaatacaaaaatttaccaggcacctataatcccagttacttcaaaggctgaagcaggagaatcacttgaacctggaaagntggangtctcagtgagcccgaaatcataccattgcactccacctgggcnacaaaagtcaaactcatctcnnnnggaannnnnnnnnnnnnnnnnnnnnccccnngcccctttaaaaattggggncccccggcgggggaaatnnannnnnnntttttnnnccccncnccccgggggggggccnggcccccccttttgtccctttnnangggtaaaggccccctgggaaanngggnnnnnnnnnnnnnnnnnnnttnngnnnnnnnnn

SEQ ID NO: 6105 - DNA, 889 bp, Homo sapiens
  misc_feature 7, 9, 12, 16, 19, 23, 24, 25, 30, 34, 36, 38, 39, 43, 45,49, 50, 52, 57, 61, 63, 67, 75, 78, 80, 81, 82, 88, 95,96, 101, 104, 108, 110, 112, 115, 116, 117, 118, 120, 127,133, 134, 137, 140, 141, 142, 144, 146, 148, 153, 155, 157: n = A,T,C or G
  misc_feature 159, 168, 170, 171, 172, 173, 177, 185, 186, 192, 305, 312,325, 326, 329, 348, 368, 380, 397, 435, 443, 444, 447, 449,470, 487, 492, 506, 518, 521, 523, 539, 541, 543, 546, 556,558, 568, 570, 574, 581, 590, 592, 594, 599, 604, 606: n = A,T,C or G
  misc_feature 622, 624, 629, 633, 638, 644, 646, 647, 650, 652, 663, 665,670, 671, 678, 693, 695, 720, 723, 732, 752, 756, 757, 764,769, 772, 774, 776, 800, 811, 812, 815, 820, 823, 833, 837,844, 849, 852, 857, 858, 875, 877: n = A,T,C or G
cgacacnanatntacnctncttnnnatacntctntncnnctangncttnnangtacncgantnactnaaactcgncgnannngattanattacgnntctanaantaancntnccnnnntngtaatantgatanntcntgnnngncnantagtngnantngacgcgcgntnnnngacntcacttgnnggcctnaattggagcctccacacgcggtggccggccgcccgggcaggtacaaactcctccatttccttaggtaggggtttgacaggtttgcagtgggaatcctccaacaaaatcaactntttggtnaggaatggatgannganaattgagaaactccatcgnagtttctgaaataagtccantattgtcaagcnttttcccatttgttctnaaaattaacgggtaagtgcggttctttcctaaaaaacntttcaacnntgngnaaatacttggattcctcaccntttcttttcattattcnagaancattttaggggaanctcatataaggntananaaaaataaagaaggcnancnatnagtaattcantnattttttttntntaancaccctnctttcccantngnaaacnagttncnattatatggaatacancntttanattnttgtnggaacnanntananccaaattaagngnttatnngtcacgngcaaaagggaagggngnaaaaaattcaaggcttcccttaccnacntgtttgccnctttttccatattttggatnggtnngcccccnagggncangntnaaaaaggccgggtaatagaccttngttaacccctnnagngaccngcntttcattaanaaanacattancgatnggnaattnncccccccggggaccttngncaagaggaaaag

SEQ ID NO: 6106 - DNA, 864 bp, Homo sapiens
  misc_feature 11, 26, 27, 547, 585, 597, 663, 671, 672, 673, 674, 675,676, 677, 678, 679, 680, 681, 682, 683, 684, 685, 686, 687,688, 689, 690, 691, 692, 693, 694, 695, 696, 697, 698, 699,700, 701, 702, 703, 704, 705, 706, 707, 708, 709, 710: n = A,T,C or G
  misc_feature 711, 712, 713, 714, 715, 716, 717, 718, 719, 720, 721, 722,723, 724, 725, 726, 727, 728, 729, 730, 731, 732, 733, 734,735, 736, 737, 738, 739, 740, 741, 742, 743, 744, 745, 746,747, 748, 749, 750, 751, 752, 753, 754, 755, 756, 757: n = A,T,C or G
  misc_feature 758, 759, 760, 761, 762, 763, 764, 765, 766, 767, 768, 769,770, 771, 772, 773, 774, 775, 776, 777, 778, 779, 780, 781,782, 783, 784, 785, 786, 787, 788, 789, 790, 791, 792, 793,794, 795, 796, 797, 798, 799, 800, 801, 802, 803, 804: n = A,T,C or G
  misc_feature 805, 806, 807, 808, 809, 810, 811, 812, 813, 814, 815, 816,817, 818, 819, 820, 821, 822, 823, 824, 825, 826, 827, 828,829, 830, 831, 832, 833, 834, 835, 836, 837, 838, 839, 840,841, 842, 843, 844, 845, 846, 847, 848, 849, 850, 851: n = A,T,C or G
  misc_feature 852, 853, 854, 855, 856, 857, 858, 859, 860, 861, 862, 863,864: n = A,T,C or G
agcgcgtatangactactatatggcnnattggagctccccgcggtggcggccgccgggcaggtacccaaaccgcaggtgaacaccgcagtctgtttctggtctgatagtcacaaatgtatttgtaactctcctccccaagctgggccaattgcccttggctttcagctcacccaaacctttagtcctacagggccttggtctcctctccaaataagaggacggaattgtccttaaccttcatgctacacctggtaggatataaggagacacacaggagcatcctagtttctatccattgcatggtaacagccccatttacccttggcaaccaggactaactccagccaactctgtggcccccatctgttgcctgttaacctagtgggatgaggagccagctattatcaggtgacactcctcacttccaatggcctttctggaagcactcctttcccttggagaaggcaacagaacacaatggttaagaatcaggctttgcagtcgtacctcggccgctctagaactagtggatcccccgggctgcangaattcgatatcaagcttatcgataccgtcgaccctcnagggggggcccngtcccagcttttgttccctttaatgagggttaattgcgcccttggcgtaatcatggtcatagctgnttttccgnnnnnnnnnnnnnnnnnnnnnnnnnnnnnnnnnnnnnnnnnnnnnnnnnnnnnnnnnnnnnnnnnnnnnnnnnnnnnnnnnnnnnnnnnnnnnnnnnnnnnnnnnnnnnnnnnnnnnnnnnnnnnnnnnnnnnnnnnnnnnnnnnnnnnnnnnnnnnnnnnnnnnnnnnnnnnnnnnnnnnnnnnnnnnnnnnn

SEQ ID NO: 6107 - DNA, 877 bp, Homo sapiens
  misc_feature 1, 21, 25, 182, 264, 280, 326, 370, 371, 372, 373, 374, 375,376, 377, 378, 379, 380, 381, 382, 383, 384, 385, 386, 387,388, 389, 390, 391, 392, 393, 394, 395, 396, 397, 398, 399,400, 401, 402, 403, 404, 405, 406, 407, 408, 409: n = A,T,C or G
  misc_feature 410, 411, 412, 413, 414, 415, 416, 417, 418, 419, 420, 421,422, 423, 424, 425, 426, 427, 428, 429, 430, 431, 432, 433,434, 435, 436, 437, 438, 439, 440, 441, 442, 443, 444, 445,446, 447, 448, 449, 450, 451, 452, 453, 454, 455, 456: n = A,T,C or G
  misc_feature 457, 458, 459, 460, 461, 462, 463, 464, 465, 466, 467, 468,469, 470, 471, 472, 473, 474, 475, 476, 477, 478, 479, 480,481, 482, 483, 484, 485, 486, 487, 488, 489, 490, 491, 492,493, 494, 495, 496, 497, 498, 499, 500, 501, 502, 503: n = A,T,C or G
  misc_feature 504, 505, 506, 507, 508, 509, 510, 511, 512, 513, 514, 515,516, 517, 518, 519, 520, 521, 522, 523, 524, 525, 526, 527,528, 529, 530, 531, 532, 533, 534, 535, 536, 537, 538, 539,540, 541, 542, 543, 544, 545, 546, 547, 548, 549, 550: n = A,T,C or G
  misc_feature 551, 552, 553, 554, 555, 556, 557, 558, 559, 560, 561, 562,563, 564, 565, 566, 567, 568, 569, 570, 571, 572, 573, 574,575, 576, 577, 578, 579, 580, 581, 582, 583, 584, 585, 586,587, 588, 589, 590, 591, 592, 593, 594, 595, 596, 597: n = A,T,C or G
  misc_feature 598, 599, 600, 601, 602, 603, 604, 605, 606, 607, 608, 609,610, 611, 612, 613, 614, 615, 616, 617, 618, 619, 620, 621,622, 623, 624, 625, 626, 627, 628, 629, 630, 631, 632, 633,634, 635, 636, 637, 638, 639, 640, 641, 642, 643, 644-877: n = A,T,C or G
ncgcttatacgactactatanggcnaattggagctccacccgcggtggcggcccgcccgggcaggtactactcgattgtcaacgtcaaggagtcgcaggtcgcctggttctaggaataatgggggaagtatgtaggagttgaagattagtccgccgtagttggtgtacctcggccgctctanaactagtggatcccccgggctgcaggaattcgatatcaagcttatcgataccgtcgacctcgagggggggcccggtacccancttttgttccctttantgagggttaattgcgcgcttggcgtaatcatggtcatagctgtttnctgattgcgcgcttggcgtaatcatggtcatagctgtttcctgnnnnnnnnnnnnnnnnnnnnnnnnnnnnnnnnnnnnnnnnnnnnnnnnnnnnnnnnnnnnnnnnnnnnnnnnnnnnnnnnnnnnnnnnnnnnnnnnnnnnnnnnnnnnnnnnnnnnnnnnnnnnnnnnnnnnnnnnnnnnnnnnnnnnnnnnnnnnnnnnnnnnnnnnnnnnnnnnnnnnnnnnnnnnnnnnnnnnnnnnnnnnnnnnnnnnnnnnnnnnnnnnnnnnnnnnnnnnnnnnnnnnnnnnnnnnnnnnnnnnnnnnnnnnnnnnnnnnnnnnnnnnnnnnnnnnnnnnnnnnnnnnnnnnnnnnnnnnnnnnnnnnnnnnnnnnnnnnnnnnnnnnnnnnnnnnnnnnnnnnnnnnnnnnnnnnnnnnnnnnnnnnnnnnnnnnnnnnnnnnnnnnnnnnnnnnnnnnnnnnnnnnnnnnnnnnnnnnnnnnnnnnnnnnnnnnnnnnnnnnnnnnnnnnnnnnnnnnnnnnnnnnnnnnnnnnnnnnnnnnnnnnnnnn

SEQ ID NO: 6108 - DNA, 834 bp, Homo sapiens
  misc_feature 2, 3, 31, 244, 274, 290, 299, 301, 450, 512, 518, 544, 568,589, 626, 633, 643, 648, 651, 652, 653, 661, 662, 663, 664,665, 666, 667, 668, 669, 670, 671, 672, 673, 674, 675, 676,677, 678, 679, 680, 681, 682, 683, 684, 685, 686, 687: n = A,T,C or G
  misc_feature 688, 689, 690, 691, 692, 693, 694, 695, 696, 697, 698, 699,700, 701, 702, 703, 704, 705, 706, 707, 708, 709, 710, 711,712, 713, 714, 715, 716, 717, 718, 719, 720, 721, 722, 723,724, 725, 726, 727, 728, 729, 730, 731, 732, 733, 734: n = A,T,C or G
  misc_feature 735, 736, 737, 738, 739, 740, 741, 742, 743, 744, 745, 746,747, 748, 749, 750, 751, 752, 753, 754, 755, 756, 757, 758,759, 760, 761, 762, 763, 764, 765, 766, 767, 768, 769, 770,771, 772, 773, 774, 775, 776, 777, 778, 779, 780, 781: n = A,T,C or G
  misc_feature 782, 783, 784, 785, 786, 787, 788, 789, 790, 791, 792, 793,794, 795, 796, 797, 798, 799, 800, 801, 802, 803, 804, 805,806, 807, 808, 809, 810, 811, 812, 813, 814, 815, 816, 817,818, 819, 820, 821, 822, 823, 824, 825, 826, 827, 828: n = A,T,C or G
  misc_feature 829, 830, 831, 832, 833, 834: n = A,T,C or G
gnngacgcgcgtatacgactactatagggcnaattggagctccccgcggtggcggccgaggtaccacatgcctgtaatcccagctacttggaagctgaggcaggagaatctcttgaacttggaaggcggaggttgcagtgaaccaaaatcacgccacagcactccagcctgggagacagagcaaggcttagttttaaaaaaaaaaatcaaatattgtgtgattctgtttataggaaatattcanaattggtaagtccataaggacaaaaaccanattgacaggggctganatgaaaaananaattggggtatggggagtgacagcttgataggtatgggttttgttggggggagataatgaaaacatttggaactaggagaatcacctgacatcaggagttcaagaccactgaactcgaacctgggtgacagagtgagactccgtctcanaaaaaaagaaaatgtttggaactagatggtggtggttgtacctgcccgggcggccgctctanaactantggatcccccgggctgcaggaattcnatatcaagcttatcgataccgtcnacctctagggggggcccggtncccaccttttgttccctttatgagggttaattgcgcncttggcntaatcatggncatanctnnntttctggnnnnnnnnnnnnnnnnnnnnnnnnnnnnnnnnnnnnnnnnnnnnnnnnnnnnnnnnnnnnnnnnnnnnnnnnnnnnnnnnnnnnnnnnnnnnnnnnnnnnnnnnnnnnnnnnnnnnnnnnnnnnnnnnnnnnnnnnnnnnnnnnnnnnnnnnnnnnnnnnnnnnnnnnnnnnnn

SEQ ID NO: 6109 - DNA, 813 bp, Homo sapiens
  misc_feature 8, 11, 15, 22, 29, 31, 32, 36, 44, 45, 46, 47, 50, 51, 52,53, 55, 62, 66, 67, 72, 76, 77, 81, 83, 84, 87, 93, 94,97, 98, 102, 111, 115, 116, 117, 118, 127, 132, 136, 140,145, 146, 147, 152, 153, 277, 283, 285, 292, 319, 365, 380: n = A,T,C or G
  misc_feature 383, 389, 390, 394, 398, 411, 413, 444, 452, 469, 472, 485,507, 520, 531, 540, 558, 562, 575, 578, 596, 600, 609, 614,620, 624, 628, 633, 645, 648, 657, 664, 667, 679, 703, 705,710, 718, 729, 738, 742, 760, 782, 811, 812: n = A,T,C or G
attctctnaanctanactttantatctantnnctanattttatnnnntannnntngtaatantctnnctttnaganncatncnnaanttcacnntannttcngtatttttnatannnngggggcccntcgcntatngacntactnnngggcnnattggagctccaccgcggtggcggccgcccgggcaggtacgcggggataccgttcttctggtagtgaacaagtctcacaagagctgatggttttatgaagggtttctacatttgcatcttcctnattttntnttgccgncgccacataagaagtgcctttcacctntcatcatgattctgtggcctccccagccatgtgggaacatttattntcttgcctggctacncantgtaannaagntgcncttttcaaccatntntggccaatggattttattgtaagacctttcnccccaagncccattgctggggaaanctngtttaatagattntcaaatttaaaaagcaacttcntttttttcgtttntttaaggatcncccaagggntgtggttatccttcaatnttcncgtggggccttgnggnatttcaaccaaccccaantccnaatggaaangggantttttntaanacanggggnaacaaaaccttnccntttgggggngggcccnggnccccaaacaacnttggaaaaaacacgccctttggancncgcantggcttgntcctttttgantgcctttgncacnacaaaaaaattacaaccngggggggggggccggcaaaaanatttttttgggaaccaccgaattttttcnna

SEQ ID NO: 6110 - DNA, 845 bp, Homo sapiens
  misc_feature 8, 16, 20, 27, 247, 277, 293, 302, 304, 478, 547, 562, 571,593, 618, 629, 655, 657, 658, 665, 666, 667, 668, 669, 670,671, 672, 673, 674, 675, 676, 677, 678, 679, 680, 681, 682,683, 684, 685, 686, 687, 688, 689, 690, 691, 692, 693: n = A,T,C or G
  misc_feature 694, 695, 696, 697, 698, 699, 700, 701, 702, 703, 704, 705,706, 707, 708, 709, 710, 711, 712, 713, 714, 715, 716, 717,718, 719, 720, 721, 722, 723, 724, 725, 726, 727, 728, 729,730, 731, 732, 733, 734, 735, 736, 737, 738, 739, 740: n = A,T,C or G
  misc_feature 741, 742, 743, 744, 745, 746, 747, 748, 749, 750, 751, 752,753, 754, 755, 756, 757, 758, 759, 760, 761, 762, 763, 764,765, 766, 767, 768, 769, 770, 771, 772, 773, 774, 775, 776,777, 778, 779, 780, 781, 782, 783, 784, 785, 786, 787: n = A,T,C or G
  misc_feature 788, 789, 790, 791, 792, 793, 794, 795, 796, 797, 798, 799,800, 801, 802, 803, 804, 805, 806, 807, 809, 810, 811, 812,813, 814, 815, 816, 817, 818, 819, 820, 821, 822, 823, 824,825, 826, 827, 828, 829, 830, 831, 832, 833, 834, 835: n = A,T,C or G
  misc_feature 836, 837, 838, 839, 840, 841, 842, 843, 844, 845: n = A,T,C or G
gcgcgtcncgttatangacntactatntggctgattggagctcccccgcggtggcggcccgaggtaccacatgcctgtaatcccagctacttggaagctgaggcaggagaatctcttgaacttggaaggcggaggttgcagtgaaccaaaatcacgccacagcactccagcctgggagacagagcaaggcttagttttaaaaaaaaaaatcaaatattgtgtgattctgtttataggaaatattcanaattggtaagtccataaggacaaaaaccanattgacaggggctganatgaaaaananaattggggtatggggagtgacagcttgataggtatgggttttgttggggggagataatgaaaacatttggaactaggagaatcacctgacatcaggagttcaagaccactgaactcgaacctgggtgacagagtgagactccgtctcaaaaaaaaagaaaatgtttggaactanatggtggtggttgtacctgcccgggcggccgctctaaaactagtggatcccccgggctgcaggaattcnatatcaagcttatcnataccgtcnacctcgagggggggccccggtncccaacttttgttccctttaatganggttaattgcncccttggcgtaatcatgggcatagcngnnttttcgnnnnnnnnnnnnnnnnnnnnnnnnnnnnnnnnnnnnnnnnnnnnnnnnnnnnnnnnnnnnnnnnnnnnnnnnnnnnnnnnnnnnnnnnnnnnnnnnnnnnnnnnnnnnnnnnnnnnnnnnnnnnnnnnnnnnnnnnnnnnnnncnnnnnnnnnnnnnnnnnnnnnnnnnnnnnnnnnnnnn

SEQ ID NO: 6111 - DNA, 484 bp, Homo sapiens
  misc_feature 435: n = A,T,C or G
cgaatacgactactatagggcgaattggagctccccgcggtggcggccgaggtacgcgggtctccatatatcttgaagtttttttgacttgattctgcacacttaaaaggtgtgttctttattcatactgatgattaaatgcaaccaaaatacaggtagtttctatgaattaggagttcatagcatcttctaaagcacagaattctgaatagaactcatccaggtgagaagcagaacattctaaagcagctttcagtttctttaacttggagtctccaactccaattcagaattattcttcctcatgccagtctccaggagcagcctggcccaggcttcaagagtaatacctcaagtctactttcaaaagattcccaaagactgttttttccctcacttgttttgattggatctcatttcaaagagggccttttntaagactgctgatgtttttttatggtaatctgcttaagtttctaatgag

SEQ ID NO: 6112 - DNA, 860 bp, Homo sapiens
  misc_feature 14, 422, 436, 437, 438, 439, 441, 447, 448, 449, 453, 462,463, 464, 465, 467, 468, 475, 477, 478, 479, 482, 483, 486,491, 492, 493, 494, 497, 498, 503, 504, 518, 528, 531, 534,548, 550, 557, 566, 576, 580, 585, 586, 587, 590, 595: n = A,T,C or G
  misc_feature 596, 597, 598, 599, 600, 601, 603, 608, 609, 610, 611, 612,613, 614, 615, 616, 617, 618, 619, 620, 621, 622, 623, 624,625, 626, 627, 628, 629, 630, 631, 632, 633, 634, 635, 636,637, 638, 639, 640, 641, 642, 643, 644, 645, 646, 647: n = A,T,C or G
  misc_feature 648, 649, 650, 651, 652, 653, 654, 655, 656, 657, 658, 659,660, 661, 662, 663, 664, 665, 666, 667, 668, 669, 670, 671,672, 673, 674, 675, 676, 677, 678, 679, 680, 681, 682, 683,684, 685, 686, 687, 688, 689, 690, 691, 692, 693, 694: n = A,T,C or G
  misc_feature 695, 696, 697, 698, 699, 700, 701, 702, 703, 704, 705, 706,707, 708, 709, 710, 711, 712, 713, 714, 715, 716, 717, 718,719, 720, 721, 722, 723, 724, 725, 726, 727, 728, 729, 730,731, 732, 733, 734, 735, 736, 737, 738, 739, 740, 741: n = A,T,C or G
  misc_feature 742, 743, 744, 745, 746, 747, 748, 749, 750, 751, 752, 753,754, 755, 756, 757, 758, 759, 760, 761, 762, 763, 764, 765,766, 767, 768, 769, 770, 771, 772, 773, 774, 775, 776, 777,778, 779, 780, 781, 782, 783, 784, 785, 786, 787, 788: n = A,T,C or G
  misc_feature 789, 790, 791, 792, 793, 794, 795, 796, 797, 798, 799, 800,801, 802, 803, 804, 805, 806, 807, 808, 809, 810, 811, 812,813, 814, 815, 816, 817, 818, 819, 820, 821, 822, 823, 824,825, 826, 827, 828, 829, 830, 831, 832, 833, 834, 835-860: n = A,T,C or G
cacgactactatanggcgaattggagctccacccgcggtggcggcccgcccgggcaggtacctgatggatgtttgataatgtcattccagtaggttgcttaagagtgatttaaaatttatttacttgggccaggcacggtggctcatgcctgtaatcccggcactttgggaggtgaaggcaggcagatcacctgaggtcaggagtttgagaccagcttggccaacagtgagaaacccagtctctactaaaaatacaaaaattagctgggtggtatggcaggctcccgtagtcccagctactcaggaggctgaggcaggagaatcacttgaacccaggaggcagaggttgcagtgtgctgagaccatgccattgcactccagcctgggtaacagagcgaaactctgtcccctcccaaaagaanaaagaaaaaaaaannnngncccccnnncccnttaaaaaannnngnnccccccngnnnggnnaanttttnnnnaannttttnnaacccccccccccngggggggggnccngcncccccctttttggncnttttaangggggtaantggccccctngggnaaaannnggnaaaannnnnnntnttaannnnnnnnnnnnnnnnnnnnnnnnnnnnnnnnnnnnnnnnnnnnnnnnnnnnnnnnnnnnnnnnnnnnnnnnnnnnnnnnnnnnnnnnnnnnnnnnnnnnnnnnnnnnnnnnnnnnnnnnnnnnnnnnnnnnnnnnnnnnnnnnnnnnnnnnnnnnnnnnnnnnnnnnnnnnnnnnnnnnnnnnnnnnnnnnnnnnnnnnnnnnnnnnnnnnnnnnnnnnnnnnnnnnnnnnnnnnnnnnnnnnnnnnnnnnn

SEQ ID NO: 6113 - DNA, 835 bp, Homo sapiens
  misc_feature 35, 53, 563, 594, 646, 649, 665, 681, 688, 709, 710, 711,712, 713, 714, 715, 716, 717, 718, 720, 721, 722, 723, 724,725, 726, 727, 728, 729, 730, 731, 732, 733, 734, 735, 736,737, 738, 739, 740, 741, 742, 743, 744, 745, 746, 747: n = A,T,C or G
  misc_feature 748, 749, 750, 751, 752, 753, 754, 755, 756, 757, 758, 759,760, 761, 762, 763, 764, 765, 766, 767, 768, 769, 770, 771,772, 773, 774, 775, 776, 777, 778, 779, 780, 781, 782, 783,784, 785, 786, 787, 788, 789, 790, 791, 792, 793, 794: n = A,T,C or G
  misc_feature 795, 796, 797, 798, 799, 800, 801, 802, 803, 804, 805, 806,807, 808, 809, 810, 811, 812, 813, 814, 815, 816, 817, 818,819, 820, 821, 822, 823, 824, 825, 826, 827, 828, 829, 830,831, 832, 833, 834, 835: n = A,T,C or G
cgactccttacggcgaattggagctccaccgcggnggcggccgaggtacctanaaacagaggtcagcgggccagagtttaagagaaaaagagaggggaaaaaagagcaggaaatccttgaaaggagctataataaaggacagagaatataaaggataaaaatggattccaaggaggaaaaagaatgggaggaatgtttattgaccatctgctgttgccaggcactagcctagggcttttccatatgttatctaatcttagaacccagttagatgaacaaccactatcaatattcccattttacagatggggaaactgggtttcagggggataaagtgacttccccaaggtcacagaaagcagcagtttgagctgaggcctgtgtgacccccagccaacaagtcatccatcgtcttgagggctagtccctcattcctggccatggtttgtagtcctagatgagagccgcacttgagatcttgagatttgacagatacttggagatcatactccaaggaatatggccattcctttgctgggaggcaattgctgtgtacctgcccnggccgcccgctctagaactagtggatccccnggctgcaggaattcgatatcaagcttatcgatccctcgacctcaaggggggnccngtcccaccttttggtnccttaattgagggttnaatgccncctggcgtatcatggcatacnnnnnnnnnncnnnnnnnnnnnnnnnnnnnnnnnnnnnnnnnnnnnnnnnnnnnnnnnnnnnnnnnnnnnnnnnnnnnnnnnnnnnnnnnnnnnnnnnnnnnnnnnnnnnnnnnnnnnnnnnnnnnn

SEQ ID NO: 6114 - DNA, 908 bp, Homo sapiens
  misc_feature 1, 10, 167, 415, 416, 417, 418, 419, 420, 421, 422, 423,424, 425, 426, 427, 428, 429, 430, 431, 432, 433, 434, 435,436, 437, 438, 439, 440, 441, 442, 443, 444, 445, 446, 447,448, 449, 450, 451, 452, 453, 454, 455, 456, 457, 458: n = A,T,C or G
  misc_feature 459, 460, 461, 462, 463, 464, 465, 466, 467, 468, 469, 470,471, 472, 473, 474, 475, 476, 477, 478, 479, 480, 481, 482,483, 484, 485, 486, 487, 488, 489, 490, 491, 492, 493, 494,495, 496, 497, 498, 499, 500, 501, 502, 503, 504, 505: n = A,T,C or G
  misc_feature 506, 507, 508, 509, 510, 511, 512, 513, 514, 515, 516, 517,518, 519, 520, 521, 522, 523, 524, 525, 526, 527, 528, 529,530, 531, 532, 533, 534, 535, 536, 537, 538, 539, 540, 541,542, 543, 544, 545, 546, 547, 548, 549, 550, 551, 552: n = A,T,C or G
  misc_feature 553, 554, 555, 556, 557, 558, 559, 560, 561, 562, 563, 564,565, 566, 567, 568, 569, 570, 571, 572, 573, 574, 575, 576,577, 578, 579, 580, 581, 582, 583, 584, 585, 586, 587, 588,589, 590, 591, 592, 593, 594, 595, 596, 597, 598, 599: n = A,T,C or G
  misc_feature 600, 601, 602, 603, 604, 605, 606, 607, 608, 609, 610, 611,612, 613, 614, 615, 616, 617, 618, 619, 620, 621, 622, 623,624, 625, 626, 627, 628, 629, 630, 631, 632, 633, 634, 635,636, 637, 638, 639, 640, 641, 642, 643, 644, 645, 646: n = A,T,C or G
  misc_feature 647, 648, 649, 650, 651, 652, 653, 654, 655, 656, 657, 658,659, 660, 661, 662, 663, 664, 665, 666, 667, 668, 669, 670,671, 672, 673, 674, 675, 676, 677, 678, 679, 680, 681, 682,683, 684, 685, 686, 687, 688, 689, 690, 691, 692, 693-907: n = A,T,C or G
nctactatanggcgaattggagctccaccgcggtggcggcccgaggtaccctccaagccgagtccttcttcaacccgcaactgaaagggcttcagtgggattttctataactctgcttttctggcctgagaagtccattgctaccagggaattctctgatatacttntcttaagcaatctaatcgcggtcacccagcacgtcctactctgctcttcttctgcacagagcattttcccccgcgtacctgcccgggcggccgctctagaactagtggatcccccgggctgcaggaattcgatatcaagcttatcgataccgtcgacctcgagggggggcccggtacccagcttttgttccctttagtgagggttaattgcgcgcttggcgtaatcatggtcatagctgtttcctggnnnnnnnnnnnnnnnnnnnnnnnnnnnnnnnnnnnnnnnnnnnnnnnnnnnnnnnnnnnnnnnnnnnnnnnnnnnnnnnnnnnnnnnnnnnnnnnnnnnnnnnnnnnnnnnnnnnnnnnnnnnnnnnnnnnnnnnnnnnnnnnnnnnnnnnnnnnnnnnnnnnnnnnnnnnnnnnnnnnnnnnnnnnnnnnnnnnnnnnnnnnnnnnnnnnnnnnnnnnnnnnnnnnnnnnnnnnnnnnnnnnnnnnnnnnnnnnnnnnnnnnnnnnnnnnnnnnnnnnnnnnnnnnnnnnnnnnnnnnnnnnnnnnnnnnnnnnnnnnnnnnnnnnnnnnnnnnnnnnnnnnnnnnnnnnnnnnnnnnnnnnnnnnnnnnnnnnnnnnnnnnnnnnnnnnnnnnnnnnnnnnnnnnnnnnnnnnnnnnnnnnnnnnnnnnnnnnnnnnnnnnnnnnnnnnnnnnnnnnnnnnnnnnnnnnnnnnnnnnnnnnnnnnnnnnnnc

SEQ ID NO: 6115 - DNA, 857 bp, Homo sapiens
  misc_feature 1, 2, 3, 4, 5, 6, 11, 12, 13, 15, 35, 83, 84, 99, 127, 128,129, 139, 146, 155, 177, 178, 180, 210, 256, 269, 272, 274,290, 291, 296, 297, 298, 301, 305, 307, 314, 317, 334, 335,337, 341, 362, 367, 384, 424, 450, 457, 481, 487, 489: n = A,T,C or G
  misc_feature 564, 572, 573, 574, 575, 576, 577, 578, 579, 580, 581, 582,583, 584, 585, 586, 587, 588, 589, 590, 591, 592, 593, 594,595, 596, 597, 598, 599, 600, 601, 602, 603, 604, 605, 606,607, 608, 609, 610, 611, 612, 613, 614, 615, 616, 617: n = A,T,C or G
  misc_feature 618, 619, 620, 621, 622, 623, 624, 625, 626, 627, 628, 629,630, 631, 632, 633, 634, 635, 636, 637, 638, 639, 640, 641,642, 643, 644, 645, 646, 647, 648, 649, 650, 651, 652, 653,654, 655, 656, 657, 658, 659, 660, 661, 662, 663, 664: n = A,T,C or G
  misc_feature 665, 666, 667, 668, 669, 670, 671, 672, 673, 674, 675, 676,677, 678, 679, 680, 681, 682, 683, 684, 685, 686, 687, 688,689, 690, 691, 692, 693, 694, 695, 696, 697, 698, 699, 700,701, 702, 703, 704, 705, 706, 707, 708, 709, 710, 711: n = A,T,C or G
  misc_feature 712, 713, 714, 715, 716, 717, 718, 719, 720, 721, 722, 723,724, 725, 726, 727, 728, 729, 730, 731, 732, 733, 734, 735,736, 737, 738, 739, 740, 741, 742, 743, 744, 745, 746, 747,748, 749, 750, 751, 752, 753, 754, 755, 756, 757, 758: n = A,T,C or G
  misc_feature 759, 760, 761, 762, 763, 764, 765, 766, 767, 768, 769, 770,771, 772, 773, 774, 775, 776, 777, 778, 779, 780, 781, 782,783, 784, 785, 786, 787, 788, 789, 790, 791, 792, 793, 794,795, 796, 797, 798, 799, 800, 801, 802, 803, 804, 805-857: n = A,T,C or G
nnnnnnggggnnncncgcgtatacgactactatanggcgaattggagctccaccgcggtggcggcccgcccgggcaggtacanntgaagctctgacctnacgagctcttctgtaggtgaagaatggnnnaaactatggntcctgtntgcctgggnccccccactcctagaactcatnnancccctaccaaaacttatagtacctcgaccnctctataactagtggattccccgggctgaaagaatttgatatcaancttatcgataccnccncntcgaggggaggccctnnacccnnnttntgancnctttagnganggttaattgcgcgctcnncntaancatagtgataactgtttcccnggggnttccatgtttgcaacangacccacggggccatgcccgcgtaccttgggccgctctanaactagtggatcccccgggcttgcangaattcnatatcaaacttatcgataccgtcnacctcnanggggggccggtacccaacttttgttcctttaatgagggttaattgcccccttggcgtaatcatggtcataactgnttctggannnnnnnnnnnnnnnnnnnnnnnnnnnnnnnnnnnnnnnnnnnnnnnnnnnnnnnnnnnnnnnnnnnnnnnnnnnnnnnnnnnnnnnnnnnnnnnnnnnnnnnnnnnnnnnnnnnnnnnnnnnnnnnnnnnnnnnnnnnnnnnnnnnnnnnnnnnnnnnnnnnnnnnnnnnnnnnnnnnnnnnnnnnnnnnnnnnnnnnnnnnnnnnnnnnnnnnnnnnnnnnnnnnnnnnnnnnnnnnnnnnnnnnnnnnnnnnnnnnnnnnnnnnnnnnnnnnnnnnnnnnnnn

SEQ ID NO: 6116 - DNA, 862 bp, Homo sapiens
  misc_feature 118, 160, 165, 180, 202, 203, 233, 275, 300, 307, 314, 342,346, 376, 408, 438, 439, 445, 490, 519, 538, 564, 599, 605,625, 643, 653, 656, 659, 668, 673, 694, 700, 714, 718, 736,752, 754, 760, 763, 768, 769, 770, 771, 772, 773, 774: n = A,T,C or G
  misc_feature 775, 776, 777, 778, 779, 780, 781, 782, 783, 784, 786, 791,792, 793, 794, 795, 796, 797, 798, 799, 800, 801, 802, 803,804, 805, 806, 807, 808, 809, 810, 811, 812, 813, 814, 815,816, 817, 818, 819, 820, 821, 822, 823, 824, 825, 826: n = A,T,C or G
  misc_feature 827, 828, 829, 830, 831, 832, 833, 834, 835, 836, 837, 838,839, 840, 841, 842, 843, 844, 845, 846, 847, 848, 849, 850,851, 852, 853, 854, 855, 856, 857, 858, 859, 860, 861, 862: n = A,T,C or G
ggctactatagggcgaattggagctccccgcggtggcggccgaggtacacacacacgcacacacacacacacacacacaaacgtgtgtatgcacctaccttcatacttgcctaaactntgtgcaatacagtctggatttttctattatattctctagttntgttntgtttttaagctggntataatccactaaagtgattcnngacacactagttgattgtgaccttcagttngaaaaattctattacagaatcaagagaccagggtgtgaatanatttaacatcttagaattctgttanataaatnagtgcanatgcaacattattttaaagatctatggntgantggtttactttattctaaaatttccataangatagaccaacaaaattcaatttttatagacnggcaaaatctactgggcttagccaaaggtnncagtgntatagatacagaccaacacaacacttatttattactattggctgncaaaatcttactcaggtgtatcttttatnttcaggccagggcgctcanggccggcgctaggtaatctgcctganaaagtcaatcttataatcactgatgaatgccagancttcgntggcctgtcctgcccggggngggccgttttaaactagnggatccccgnggntgnaagaattcnatatnaagctttttcgatccccgccnccctgnggggggggcccgcncccnccttttggtcccttttgngggggttaattgcccncntggcgnaanatggnnnnnnnnnnnnnnnnntnggcgnnnnnnnnnnnnnnnnnnnnnnnnnnnnnnnnnnnnnnnnnnnnnnnnnnnnnnnnnnnnnnnnnnnnnnnn

SEQ ID NO: 6117 - DNA, 843 bp, Homo sapiens
  misc_feature 2, 3, 4, 5, 6, 7, 364, 405, 440, 513, 528, 569, 573, 576,579, 625, 630, 639, 653, 661, 700, 708, 721, 737, 739, 745,758, 769, 776, 779, 791, 793, 809, 812, 813, 814, 815, 816,817, 818, 819, 820, 821, 822, 823, 824, 826, 827, 828: n = A,T,C or G
  misc_feature 830, 831, 832, 833, 834, 835, 836, 837, 838, 839, 840, 841,842, 843: n = A,T,C or G
gnnnnnncgcgtaatacgactactatagggcgaattggagctccaccgcggtggcggccgaggtacgcgggagattatgaaaatcgcgagtcaacacccaaactggcaaaattactgaaactactactttgggctcagaacgagctggaccagaagaaagtaaaatatcccaaaatgacagacctcagcaagggtgtgattgaggagcccaagtagcgcctgcgcttgcgtggtggatccaacaccagccctgcgtcgtgggacttgcctcagatcagcctgcgactgcaagattcttactgcagtagagaactctttttctcccttgtacgcgggacctggacgaaggcttgtcctacacgancatcttctatccggttgaagtttttgagagttcgctttcanatcctgggcccggaaagcaagatgacagcggccangatgtccccctgagggtccctggagtggttcctgtttttgatgcccacaacctttctgttggaagcgactatnatatccagttagaanaaaaaagtggtagtaacttggaacttgattacccaccagcnctgntcncanccgacatggataatccagaaaggactgggcctgaactgtcccactnacggngctcaagancgtttgaacttgangaattcantacctgcccggcgggcggtctaaaactagtggatccccnggctgcangaattcgattttnaacttatcatcccgtnanctcgangggggggccggtnccactttggtncctttanganggttattgcccncntgcgtaatcattgggnatnnnnnnnnnnnnntnnncnnnnnnnnnnnnnn

SEQ ID NO: 6118 - DNA, 852 bp, Homo sapiens
  misc_feature 137, 151, 158, 160, 169, 181, 188, 193, 228, 256, 259, 261,272, 283, 302, 313, 319, 326, 332, 334, 337, 408, 411, 412,427, 432, 433, 435, 440, 470, 471, 477, 490, 496, 508, 514,531, 532, 534, 546, 575, 605, 617, 632, 666, 667, 685: n = A,T,C or G
  misc_feature 696, 698, 707, 732, 746, 760, 783, 784, 812, 821, 822, 828,837: n = A,T,C or G
gcgcgcgtaatcgactactatagggcgaattggagctccacccgcggtggcggccgcccgggcaggtacaatttacgtcctaaggggggctactctaattatcccattcaaatggaatttttttcaaaattggatanaaggaattgaaganttgtaantngtgattagnctgctaatcagntcttcanatganatattgaatggtaacactctgagcttaaaactcancagtgtgtctgtgacctccacgcaaatnacnangaagcaatgcntccacgctgancctcaccatgtcttcctcncaactctcttnatactntctgagncttccngntcntctttctctggccggctctctttcctattctctctgcatatgtgagaacgcctgggcatcctgggtaacancannctcagctgccctctnctgtnncntgttncaagccccctgcactgacctttcttgaggnnctctgnctctgtgcatgtntttggnactctgctcatntggctnttcctctgggtgtgccnntntgtttgctcatngctatggctctggctaacacaccccttcncttatacacacatacttccaaaatggtaangctctggggaangatggaatcggactnagggttgaaaatccactgaaacctgcaggtccgnnaaaaaattcacggactgnaggtctattangnattaacccnttatgacggaagggttgttcccgtnttaccttaaccaantggaaaaaaaaccnaagaggggtttttacctttcctnncttgggaaagaaatgggcacgaaaccgnaaaaccggnnttcatncccaaaacnccccaaacccgaaaa

SEQ ID NO: 6119 - DNA, 891 bp, Homo sapiens
  misc_feature 3, 27, 414, 415, 416, 417, 418, 419, 420, 421, 422, 423,424, 425, 426, 427, 428, 429, 430, 431, 432, 433, 434, 435,436, 437, 438, 439, 440, 441, 442, 443, 444, 445, 446, 447,448, 449, 450, 451, 452, 453, 454, 455, 456, 457, 458: n = A,T,C or G
  misc_feature 459, 460, 461, 462, 463, 464, 465, 466, 467, 468, 469, 470,471, 472, 473, 474, 475, 476, 477, 478, 479, 480, 481, 482,483, 484, 485, 486, 487, 488, 489, 490, 491, 492, 493, 494,495, 496, 497, 498, 499, 500, 501, 502, 503, 504, 505: n = A,T,C or G
  misc_feature 506, 507, 508, 509, 510, 511, 512, 513, 514, 515, 516, 517,518, 519, 520, 521, 522, 523, 524, 525, 526, 527, 528, 529,530, 531, 532, 533, 534, 535, 536, 537, 538, 539, 540, 541,542, 543, 544, 545, 546, 547, 548, 549, 550, 551, 552: n = A,T,C or G
  misc_feature 553, 554, 555, 556, 557, 558, 559, 560, 561, 562, 563, 564,565, 566, 567, 568, 569, 570, 571, 572, 573, 574, 575, 576,577, 578, 579, 580, 581, 582, 583, 584, 585, 586, 587, 588,589, 590, 591, 592, 593, 594, 595, 596, 597, 598, 599: n = A,T,C or G
  misc_feature 600, 601, 602, 603, 604, 605, 606, 607, 608, 609, 610, 611,612, 613, 614, 615, 616, 617, 618, 619, 620, 621, 622, 623,624, 625, 626, 627, 628, 629, 630, 631, 632, 633, 634, 635,636, 637, 638, 639, 640, 641, 642, 643, 644, 645, 646: n = A,T,C or G
  misc_feature 647, 648, 649, 650, 651, 652, 653, 654, 655, 656, 657, 658,659, 660, 661, 662, 663, 664, 665, 666, 667, 668, 669, 670,671, 672, 673, 674, 675, 676, 677, 678, 679, 680, 681, 682,683, 684, 685, 686, 687, 688, 689, 690, 691, 692, 693-891: n = A,T,C or G
agnccgttatacgactactatagggcnaattggagctccacccgcggtggcggcccgcccgggcaggtaccagcagaaacctggcctggcgcccaggctcctcatctatgatgcatctagcagggccactggcatcccagacaggttcagtggcagtgggtctgggacagacttcactctcaccatcagcagactggagcctgaagattttgcagtgtattactgtcagcagtatggtgcctcaccgtacctcggccgctctagaactagtggatcccccgggctgcaggaattcgatatcaagcttatcgataccgtcgacctcgagggggggcccggtacccagcttttgttccctttagtgagggttaattgcgcgcttggcgtaatcatggtcatagctgtttcctgggnnnnnnnnnnnnnnnnnnnnnnnnnnnnnnnnnnnnnnnnnnnnnnnnnnnnnnnnnnnnnnnnnnnnnnnnnnnnnnnnnnnnnnnnnnnnnnnnnnnnnnnnnnnnnnnnnnnnnnnnnnnnnnnnnnnnnnnnnnnnnnnnnnnnnnnnnnnnnnnnnnnnnnnnnnnnnnnnnnnnnnnnnnnnnnnnnnnnnnnnnnnnnnnnnnnnnnnnnnnnnnnnnnnnnnnnnnnnnnnnnnnnnnnnnnnnnnnnnnnnnnnnnnnnnnnnnnnnnnnnnnnnnnnnnnnnnnnnnnnnnnnnnnnnnnnnnnnnnnnnnnnnnnnnnnnnnnnnnnnnnnnnnnnnnnnnnnnnnnnnnnnnnnnnnnnnnnnnnnnnnnnnnnnnnnnnnnnnnnnnnnnnnnnnnnnnnnnnnnnnnnnnnnnnnnnnnnnnnnnnnnnnnnnnnnnnnnnnnnnnnnnnnnnnnnnnnnnnnn

SEQ ID NO: 6120 - DNA, 856 bp, Homo sapiens
  misc_feature 205, 219, 272, 289, 290, 294, 300, 311, 321, 331, 376, 393,402, 408, 417, 420, 425, 433, 439, 440, 441, 442, 443, 450,451, 464, 467, 468, 473, 475, 477, 487, 497, 498, 499, 500,504, 508, 509, 515, 516, 528, 530, 568, 589, 596, 597: n = A,T,C or G
  misc_feature 600, 605, 606, 607, 608, 609, 610, 611, 612, 613, 614, 616,617, 618, 619, 620, 621, 622, 623, 624, 625, 626, 627, 628,629, 630, 631, 632, 633, 634, 635, 636, 637, 638, 639, 640,641, 642, 643, 644, 645, 646, 647, 648, 649, 650, 651: n = A,T,C or G
  misc_feature 652, 653, 654, 655, 656, 657, 658, 659, 660, 661, 662, 663,664, 665, 666, 667, 668, 669, 670, 671, 672, 673, 674, 675,676, 677, 678, 679, 680, 681, 682, 683, 684, 685, 686, 687,688, 689, 690, 691, 692, 693, 694, 695, 696, 697, 698: n = A,T,C or G
  misc_feature 699, 700, 701, 702, 703, 704, 705, 706, 707, 708, 709, 710,711, 712, 713, 714, 715, 716, 717, 718, 719, 720, 721, 722,723, 724, 725, 726, 727, 728, 729, 730, 731, 732, 733, 734,735, 736, 737, 738, 739, 740, 741, 742, 743, 744, 745: n = A,T,C or G
  misc_feature 746, 747, 748, 749, 750, 751, 752, 753, 754, 755, 756, 757,758, 759, 760, 761, 762, 763, 764, 765, 766, 767, 768, 769,770, 771, 772, 773, 774, 775, 776, 777, 778, 779, 780, 781,782, 783, 784, 785, 786, 787, 788, 789, 790, 791, 792: n = A,T,C or G
  misc_feature 793, 794, 795, 796, 797, 798, 799, 800, 801, 802, 803, 804,805, 806, 807, 808, 809, 810, 811, 812, 813, 814, 815, 816,817, 818, 819, 820, 821, 822, 823, 824, 825, 826, 827, 828,829, 830, 831, 832, 833, 834, 835, 836, 837, 838, 839-856: n = A,T,C or G
gctactatagggcgaattggagctccaccgcggtggcggcccgcccgggcaggtacgcgggggtgtgtgtgcgtgcgtgtgtgtgtgtgtagctctcgctctttccctcagtctgtgcctcttgtgtgtgtgtgtgtgtgacagagagagagcgagagagagagcgcgagaggagagagagcgagaaagagagagagagagagcnagagagcgagctgngagctgtgctgccccctctgccctttgatccccacattagtgttaggggctcngacacacagagcgcggnnatanacaccnccgcaccggcnctcatttatntatacctccnatcacacacgcgagcataggacacacacacactcacacctattanatccgtttccattgaanaatattacnctcggngacaagccnggngcccnatcaaaanaaaaannnnnaaaaaanntcccccccccccnttnnaaaanangnggccccccgnggggggaaannnnaaanaaanntttttnncccccccccccncngggggggggggggccccccccttttgttctttttaaanggggaaaaaagggcccggggnaaaaaannggnaaaannnnnnnnnntnnnnnnnnnnnnnnnnnnnnnnnnnnnnnnnnnnnnnnnnnnnnnnnnnnnnnnnnnnnnnnnnnnnnnnnnnnnnnnnnnnnnnnnnnnnnnnnnnnnnnnnnnnnnnnnnnnnnnnnnnnnnnnnnnnnnnnnnnnnnnnnnnnnnnnnnnnnnnnnnnnnnnnnnnnnnnnnnnnnnnnnnnnnnnnnnnnnnnnnnnnnnnnnnnnnnnnnnnnnnnnnnnnnnnnnnnnnnnnnnn

SEQ ID NO: 6121 - DNA, 825 bp, Homo sapiens
  misc_feature 3, 4, 7, 34, 101, 122, 125, 132, 168, 311, 314, 503, 508,518, 529, 534, 537, 543, 544, 549, 552, 558, 565, 567, 569,575, 584, 586, 588, 589, 590, 592, 596, 597, 608, 609, 612,615, 618, 621, 622, 623, 630, 631, 635, 637, 638, 642: n = A,T,C or G
  misc_feature 645, 646, 647, 652, 653, 654, 655, 656, 657, 658, 659, 660,661, 662, 664, 665, 666, 667, 668, 669, 670, 671, 672, 673,674, 675, 676, 677, 678, 679, 680, 681, 682, 684, 687, 689,690, 691, 692, 693, 694, 695, 696, 697, 698, 699, 700: n = A,T,C or G
  misc_feature 701, 702, 703, 704, 705, 706, 707, 708, 709, 710, 712, 713,714, 715, 716, 717, 718, 719, 720, 721, 722, 723, 724, 725,726, 727, 728, 729, 730, 731, 732, 733, 734, 735, 736, 737,738, 739, 740, 741, 742, 743, 744, 745, 746, 747, 748: n = A,T,C or G
  misc_feature 749, 750, 751, 752, 753, 754, 755, 756, 757, 758, 759, 760,761, 762, 763, 764, 765, 766, 767, 768, 769, 770, 771, 772,773, 774, 775, 776, 777, 778, 779, 780, 781, 782, 783, 784,785, 786, 787, 788, 789, 790, 791, 792, 793, 794, 795: n = A,T,C or G
  misc_feature 796, 797, 798, 799, 800, 801, 802, 803, 804, 805, 806, 807,808, 809, 810, 811, 812, 813, 814, 815, 816, 817, 818, 819,820, 821, 822, 823, 824, 825: n = A,T,C or G
agnngangcgcgtaatacgactcactatagggcnaattggagctccaccgcggtggcggcccgctctagaactagtggatcccccgggctgcaggaattcnatatcaagcttatcgataccngtngacctcnagggggggcccggtacccagcttttgttccctttantgagggttaattgcgcgcttggcataatcatggtcatagctgttctctgacttggatattgctgctggttattcaaggcccaagggatctttagtcagcaggtgacgtattccgcaaggactgggtcctttccttcatggcancangttcccttctggcccagggtgtctctaaaaatggtttctgggagctaggaatccccactcatcaaagaggacttcaatgcaagacaaagtcctctttactcttctccctcctctccccaagaggaaggaagggtctcttttggaatcaggagctgcattccctggggttggggaaagggtagtacctcngccgntctaaactantggatcccccnggctncangaattnnatatnaancttatnataccgncnanctaaangggggcccngnannnancttnngttccctttannganggntanttnnnacttggnntaancnnggcntannnatttnnnnnnnnnnnannnnnnnnnnnnnnnnnnnanggngnnnnnnnnnnnnnnnnnnnnnntnnnnnnnnnnnnnnnnnnnnnnnnnnnnnnnnnnnnnnnnnnnnnnnnnnnnnnnnnnnnnnnnnnnnnnnnnnnnnnnnnnnnnnnnnnnnnnnnnnnnnnnnnnnnnnnnnn

SEQ ID NO: 6122 - DNA, 853 bp, Homo sapiens
  misc_feature 2, 3, 23, 34, 501, 505, 506, 507, 508, 509, 510, 511, 512,513, 514, 515, 516, 517, 518, 519, 520, 521, 522, 523, 524,525, 526, 527, 528, 529, 530, 531, 532, 533, 534, 535, 536,537, 538, 539, 540, 541, 542, 543, 544, 545, 546, 547: n = A,T,C or G
  misc_feature 548, 549, 550, 551, 552, 553, 554, 555, 556, 557, 558, 559,560, 561, 562, 563, 564, 565, 566, 567, 568, 569, 570, 571,572, 573, 574, 575, 576, 577, 578, 579, 580, 581, 582, 583,584, 585, 586, 587, 588, 589, 590, 591, 592, 593, 594: n = A,T,C or G
  misc_feature 595, 596, 597, 598, 599, 600, 601, 602, 603, 604, 605, 606,607, 608, 609, 610, 611, 612, 613, 614, 615, 616, 617, 618,619, 620, 621, 622, 623, 624, 625, 626, 627, 628, 629, 630,631, 632, 633, 634, 635, 636, 637, 638, 639, 640, 641: n = A,T,C or G
  misc_feature 642, 643, 644, 645, 646, 647, 648, 649, 650, 651, 652, 653,654, 655, 656, 657, 658, 659, 660, 661, 662, 663, 664, 665,666, 667, 668, 669, 670, 671, 672, 673, 674, 675, 676, 677,678, 679, 680, 681, 682, 683, 684, 685, 686, 687, 688: n = A,T,C or G
  misc_feature 689, 690, 691, 692, 693, 694, 695, 696, 697, 698, 699, 700,701, 702, 703, 704, 705, 706, 707, 708, 709, 710, 711, 712,713, 714, 715, 716, 717, 718, 719, 720, 721, 722, 723, 724,725, 726, 727, 728, 729, 730, 731, 732, 733, 734, 735: n = A,T,C or G
  misc_feature 736, 737, 738, 739, 740, 741, 742, 743, 744, 745, 746, 747,748, 749, 750, 751, 752, 753, 754, 755, 756, 757, 758, 759,760, 761, 762, 763, 764, 765, 766, 767, 768, 769, 770, 771,772, 773, 774, 775, 776, 777, 778, 779, 780, 781, 782-853: n = A,T,C or G
gnnggacgcgcgttatacgactnactatagggcnaattggagctccaccgcggtggcggcccgcccgggcaggtacgcggggacctcagagctgagctgggcatgagtagatgctcagtaagtggtgcacagggttggtccctatggtggaggccccctaacaccgcccaacccccctccatgttctcacagctccacgcactgagcacgggcatgaaggccatgatgtcagaattctgcacccagggagctgagatgtgccgcagggcctgtggcggacatggctactcaaagctgagtggcctgccatcactggtcaccaaattgtcggcctcctgtacctcggccgctctagaactagtggatcccccgggctgcaggaattcgatatcaagcttatcgataccgtcgacctcgagggggggcccggtacccagcttttgttccctttagtgagggttaattgcgcgcttggcgtaatcatggtcatagctgtttccntgannnnnnnnnnnnnnnnnnnnnnnnnnnnnnnnnnnnnnnnnnnnnnnnnnnnnnnnnnnnnnnnnnnnnnnnnnnnnnnnnnnnnnnnnnnnnnnnnnnnnnnnnnnnnnnnnnnnnnnnnnnnnnnnnnnnnnnnnnnnnnnnnnnnnnnnnnnnnnnnnnnnnnnnnnnnnnnnnnnnnnnnnnnnnnnnnnnnnnnnnnnnnnnnnnnnnnnnnnnnnnnnnnnnnnnnnnnnnnnnnnnnnnnnnnnnnnnnnnnnnnnnnnnnnnnnnnnnnnnnnnnnnnnnnnnnnnnnnnnnnnnnnnnnnnnnnnnnnnnnnnnnnnnnnnnnnnnnnnnnnnnnnnnnn

SEQ ID NO: 6123 - DNA, 874 bp, Homo sapiens
  misc_feature 13, 25, 441, 442, 443, 444, 445, 446, 447, 448, 449, 450,451, 452, 453, 454, 455, 456, 457, 458, 459, 460, 461, 462,463, 464, 465, 466, 467, 468, 469, 470, 471, 472, 473, 474,475, 476, 477, 478, 479, 480, 481, 482, 483, 484, 485: n = A,T,C or G
  misc_feature 486, 487, 488, 489, 490, 491, 492, 493, 494, 495, 496, 497,498, 499, 500, 501, 502, 503, 504, 505, 506, 507, 508, 509,510, 511, 512, 513, 514, 515, 516, 517, 518, 519, 520, 521,522, 523, 524, 525, 526, 527, 528, 529, 530, 531, 532: n = A,T,C or G
  misc_feature 533, 534, 535, 536, 537, 538, 539, 540, 541, 542, 543, 544,545, 546, 547, 548, 549, 550, 551, 552, 553, 554, 555, 556,557, 558, 559, 560, 561, 562, 563, 564, 565, 566, 567, 568,569, 570, 571, 572, 573, 574, 575, 576, 577, 578, 579: n = A,T,C or G
  misc_feature 580, 581, 582, 583, 584, 585, 586, 587, 588, 590, 591, 592,593, 594, 595, 596, 597, 598, 599, 600, 601, 602, 603, 604,605, 606, 607, 608, 609, 610, 611, 612, 613, 614, 615, 616,617, 618, 619, 620, 621, 622, 623, 624, 625, 626, 627: n = A,T,C or G
  misc_feature 628, 629, 630, 631, 632, 633, 634, 635, 636, 637, 638, 639,640, 641, 642, 643, 644, 645, 646, 647, 648, 649, 650, 651,652, 653, 654, 655, 656, 657, 658, 659, 660, 661, 662, 663,664, 665, 666, 667, 668, 669, 670, 671, 672, 673, 674: n = A,T,C or G
  misc_feature 675, 676, 677, 678, 679, 680, 681, 682, 683, 684, 685, 686,687, 688, 689, 690, 691, 692, 693, 694, 695, 696, 697, 698,699, 700, 701, 702, 703, 704, 705, 706, 707, 708, 709, 710,711, 712, 713, 714, 715, 716-747, 749-751, 754, 757-874: n = A,T,C or G
gacgcgcgttatncgactactatangggcgaattggagctccaccgcggtggcggccgaggtacgatctactggaattcctaatgggccaacagctgactcatcactgcctacaaactcagtctctggccagcagccacagcttgctctgaccagagtgcctagcgtctctcagcctggagtccgcctgcctgccctgggcagcctttggccaatggacccttttctgcaggccatgttccctgtagcacatcaagaacgctgggaagtacctgcccgggcggccgctctagaactagtggatcccccgggctgcaggaattcgatatcaagcttatcgataccgtcgacctcgagggggggcccggtacccagcttttgttccctttagtgagggttaattgcgcgcttggcgtaatcatggtcatagctgttcctggannnnnnnnnnnnnnnnnnnnnnnnnnnnnnnnnnnnnnnnnnnnnnnnnnnnnnnnnnnnnnnnnnnnnnnnnnnnnnnnnnnnnnnnnnnnnnnnnnnnnnnnnnnnnnnnnnnnnnnnnnnnnnnnnnnnnnnnnnnnnnnnnnnngnnnnnnnnnnnnnnnnnnnnnnnnnnnnnnnnnnnnnnnnnnnnnnnnnnnnnnnnnnnnnnnnnnnnnnnnnnnnnnnnnnnnnnnnnnnnnnnnnnnnnnnnnnnnnnnnnnnnnnnnnnnnnnnnnnnnnnnnnnnnnnnnnnnnnnnnnnnnnngnnnggnggnnnnnnnnnnnnnnnnnnnnnnnnnnnnnnnnnnnnnnnnnnnnnnnnnnnnnnnnnnnnnnnnnnnnnnnnnnnnnnnnnnnnnnnnnnnnnnnnnnnnnnnnnnnnnnnnnnnnnn

SEQ ID NO: 6124 - DNA, 863 bp, Homo sapiens
  misc_feature 9, 11, 13, 18, 21, 23, 83, 457, 505, 510, 526, 538, 559,569, 577, 583, 586, 595, 611, 614, 621, 623, 624, 627, 665,666, 701, 708, 735, 737, 738, 751, 788, 797, 800, 829, 847,861: n = A,T,C or G
gggtccgtntngncatanttntntctgttggagctccccgcggtggcggccgcctcccgtcgcttgctttttttggacttatnttgcccacttgtccgcttacactccgccgtcttcatggtgaagctcgcgaaggcaggtaaaaatcaaggtgaccccaagaaaatggctcctctccaaaggaggtagaagaagatagtgaagatgaggaaatgtcagaagatgaagaagatgatagcagtggagaagaggtcgtcatacctcagaagaaaggcaagaaggcttgcttgcaacctcagcaaagaaggtggtcgtttcccaacaaaaaaggttgcagttgcccaccaccaagaaagcagctgtcactccaggcaaaaaggcatcagcaacacctgccaagaagacagttacaccagccaaagcagttccacacctggcaagaagggagccacaccangcaaagcattggtagcaacttctggtaagaaaggtgctgccatcccanccaanggggcaaaaaatggcncaatcccacaangaagacagtgattaaaaagangattattacngttaggangattangangattaccangaccaagattatgatnaanatgaaantnnccncccgccgattaaaaccaccacttcttgcccttgcctcnnaggattaagaccattaggattaccaaaatttttanggttacnattacccattaaggaaaattacttttntnnaaaaaacttttgngacttccccccccccaagggaaaaaaaacttccaaantttttcttntgnaaacccaaaacctggcttggggttgaaanttaaaaaaaggttttttnggccccggtttccncc

SEQ ID NO: 6125 - DNA, 873 bp, Homo sapiens
  misc_feature 2, 3, 4, 10, 616, 622, 656, 693, 740, 741, 746, 766, 771,772, 785, 790, 809, 837, 849: n = A,T,C or G
gnnnagtggncgcgcgtatacgactactatagggcgaattggagctccccgcggtggcggccgcccgggcaggcgagggagagacgtagacgacatagggctgtttctgaagggagcagaaagtggttcctgcataagaacacttaggaggacaagcagctggagaccgtgggccccaaggtaaaagacatgtagtctctgccaacttcaccctccatgaggcttactgcctgcggttcctggtcctgtgtccggagtgtgaggagcctgtccccaaggaaaccacggaggagcactgcaagcttgagcaccagcaggttgggtgtacctcggccgctctagaactagtggatcccccgggctgcaggaattcgatatcaagcttatcgataccgtcgacctcgagggggggcccggtacccagcttttgttccctttagtgagggttaattgcgcgcttggcgtaatcatggtcatagctgtttcctgtgtgaaattgttatccgctcacaattccacacaacatacgagcccgggagcataaaagtgtaaagcctggggtgcctaatgagtgagctaactcacattaattgcgttgcgctcactgcccgctttncagtcnggaaacctgtcgtgccactgcattaatgaatcgnccacgcccgggagaggcggtttgcgtattgggcgctnttccctttctcgctcactgacttgcttgggcttcggtcgttcgcttnngcgangcggtttagcttacttaaangcggnnaataccggttttncacanaatcagggggattaacccnaggaaagaacatgtgaaccaaaaggccnaccaaaaggccnggaaccctaaaaaagggcccgttt

SEQ ID NO: 6126 - DNA, 878 bp, Homo sapiens
  misc_feature 2, 3, 4, 11, 13, 14, 749, 772, 783, 800, 811, 820, 833, 842,857: n = A,T,C or G
gnnnagtgggngnncgcgcgtaatacgactcactataggggcgaattggagctccaccgcggtggcggccgcccgggcaggtactgtggctgatttggcactcaaactacaatataaagtcattcctactcttctctcccctttctacaggcagagaagcctctccctgtatccaccaccaccactgatccatagggagttctgccaggccaccactgatattcccctaaagcccaagtgctcttcagccagcttttggtaaacgttgtcagtccggggactcacccttcagaacagtgggctcccctttggtccaaggcaggttcataaatgctgtccaagagcctaagcctggacttggggaccctaaaagcctgtttgttgctctaccccactctggacaagctggtacctcggccgctctagaactagtggatcccccgggctgcaggaattcgatatcaagcttatcgataccgtcgacctcgagggggggcccggtacccagcttttgttccctttagtgagggttaattgcgcgcttggcgtaatcatggtcatagctgtttcctgtgtgaaattgttatccgctcacaattccacacaacatacgaacccgggagcataaaagtgtaaagcctggggtgcctaaatgagtgagctaactcacattaattgcgttgcgctcactgcccgcttttcagtccgggaaacctgtcgtgccagctggattaatgaatcggccaacncccggggagaggcggttgcgtanttggggcgctntttcgcttcttggttanttgactgcttngcttggtcnttcgggttgcggngagccggtntaacttcactcaaanggcgggaataccggttttcct

SEQ ID NO: 6127 - DNA, 891 bp, Homo sapiens
  misc_feature 2, 3, 4, 8, 31, 303, 362, 409, 493, 496, 523, 528, 536, 538,553, 561, 564, 586, 589, 599, 603, 629, 630, 633, 634, 646,659, 666, 668, 677, 708, 724, 742, 751, 772, 791, 792, 798,803, 811, 816, 820, 821, 835, 838, 846, 859, 860: n = A,T,C or G
  misc_feature 863, 871, 875, 877, 880, 881, 887, 888, 889: n = A,T,C or G
tnnnatangaccgcgtaatacactactatanggcgaattggagctccacccgcggtggcggccgcccgggcaggtacgcggggccaggcggaagcccggctccgggccagcatccgagagcccggactggagagtcaacttttataacactgttactgggaatacttgacttactaagcttttactgaacacttaattttgggagtacctcggccgctctagaactagtggatcccccgggctgcaggaattcgatatcaagcttatcgataccgtcgactcgagggggggcccggtacccancttttgttccctttagtgagggttaattgcgcgcttggcgtaatcatgggcatagctgntttctgtgtgaaaatgttatcccctcacaattcacacaacatacganccgggagcataaaagtgtaaagcctggggtgcctaatgagtgagctaacttacattaattgcgttgcgctcactggccgctttncangtcggggaaacctgtcgtgccagctgnatttnatgaatcngncaaaacccggggganaggccggnttncgtattggggcgctttttcccnttnctcgcttaantgantcgctttgctcaggtcgttcgggttnnggnnagcggtattagnttactcaaaaggnggggatncngttattcanaaaaattagggggataacccaaggaaagaanattttgaaccaaaaangcccaccaaaagggccanggaaccgtnaaaaaggccgcgttgcttggngtttttccataaagtttcnncccccngaggngcatacanaaaantganncttaaattaaaggnggngaaacccncgggattttaaannccnggggtttncccngnaanncctttnnnct

SEQ ID NO: 6128 - DNA, 403 bp, Homo sapiens
  misc_feature 2, 12, 28, 306, 307, 308, 309, 310, 311, 312, 313, 314, 315,316, 317, 318, 319, 320, 321, 322, 323, 324, 325, 326, 327,328, 329, 330, 331, 332, 333, 334, 335, 336, 337, 338, 339,340, 341, 342, 343, 344, 345, 346, 347, 348, 349: n = A,T,C or G
  misc_feature 350, 351, 352, 353, 354, 355, 356, 357, 358, 359, 360, 361,362, 363, 364, 365, 366, 367, 368, 369, 370, 371, 372, 373,374, 375, 376, 377, 378, 379, 380, 381, 382, 383, 384, 385,386, 387, 388, 389, 390, 391, 392, 393, 394, 395, 396: n = A,T,C or G
  misc_feature 397, 398, 399, 400, 401, 402, 403: n = A,T,C or G
anccgcgtatangacttactatagggcnaattggagctccaccgcggtggcggccgcggctgagctcatcccggacgctcctggctgtgctgggtccgctacggcagctccatggggaccacaacaacagcccccgcgtacctcggccgctctagaactagtggatcccccgggctgcaggaattcgatatcaagcttatcgataccgtcgacctcgagggggggcccggtacccagcttttgttccctttagtgagggttaattgcgcgcttggcgtaatcatggtcatagtgtttttccctgannnnnnnnnnnnnnnnnnnnnnnnnnnnnnnnnnnnnnnnnnnnnnnnnnnnnnnnnnnnnnnnnnnnnnnnnnnnnnnnnnnnnnnnnnnnnnnnnn

SEQ ID NO: 6129 - DNA, 463 bp, Homo sapiens
  misc_feature 299, 336, 420, 426: n = A,T,C or G
ggcgaattggagctccaccgcggtggcggccgaggtacctgggcatgtcctgtgatggccccttcaaactggatgactaccactactgagaaccaggcctgcccttcacctaccagctgctgtccttgccctggccctgcctcccctaagagcaaatgacaccaactttgtgattgttttcagtgtcccccattgactccctggggctggtcacttaggttttggcctctactgcatccctcatactgttgcaagtgtggcagggggaattgaaaagcccccccccctcaagctctggncatgatgaaggtacctgcccggacctgcccgggcggncgctctagaactagtggatcccccgggctgcaggaattcgatatcaagcttatcgataccgtcgacctcgagggggggcccggnacccancttttgttccctttagtgagggttaattgcgcgcttg

SEQ ID NO: 6130 - DNA, 755 bp, Homo sapiens
  misc_feature 5, 6, 7, 13, 17, 23, 25, 26, 32, 35, 38, 40, 43, 48, 55,56, 57, 58, 59, 61, 64, 73, 76, 77, 78, 82, 84, 87, 93,95, 97, 99, 100, 103, 106, 109, 115, 120, 121, 331, 367,410, 413, 416, 426, 432, 443, 445, 474, 475, 489, 501, 507,509: n = A,T,C or G
  misc_feature 518, 526, 540, 550, 552, 553, 567, 574, 581, 585, 595, 596,598, 600, 616, 626, 630, 632, 646, 650, 654, 672, 673, 687,695, 704, 745, 754: n = A,T,C or G
aatannnccctcnttanaattanannacggtntgnttngnaancaccnccccccnnnnntntangtccccctnttnnnccananttnagttancntncnngcnctntantagccncgatnntgttacccatatacgactcactatagggcgaattggagctccaccgcggtggcggctcgggggccattgagactgccatggaagacttgaaaggtcacgtagctgagacttctggagagaccattcaaggcttctggctcttgacaaagatagaccactggaacaatgagaaggagagaattctactggtcacagacaagactctcttgnatctgcaaataccgaccttcatcaatgcctgaaggntgtgttgcaagcttgcaagcgggatttccctcatgcagccgcntgntgntattcgcatnctggcnctgggggcaangntttcacccttttctccttgggggatggtnnccctggggaccaanggaaggacaaangggagnanagggccttntaagggantcttaccttggggngggaaggtcncnngtaagggaagccangctgctncctttcntggncccccggctnngngnaacccccaatggggtncccaccttgnaaangntttcccctttaatnggcntaancttttttcaccttggagnncatttcccttaatngaaaaatnaaccaactnaggttggaagcaaaaactttcccctttggaaaaaatttttnggccaaagnt

SEQ ID NO: 6131 - DNA, 447 bp, Homo sapiens
  misc_feature 4: n = A,T,C or G
actnctatagggcgaattggagctccccgcggtggcggccgcccgggcaggtactggcaagctgacattattacagtggcctttcaatgttagccaaaatttttaaaacaaatttccttcccaatttttgtaattaatatttccatttataattattttttaaagcttttaaaatatagcaatttggtattgaaaaatagacagtgctcattgtattagttatccattgcggtataacaaattatcctaaaacacagtggcttaaaacaagcatgtattaactcataatttctgaggctcaggaatgctatagcatcttagttgagtatttctggcccaggatcttaagaagttgaaatcaagctctcagctggggtggcatcatctgaagtcttaactggggctggaggatccatttccaaggaagtctcactcacatggctgttg

SEQ ID NO: 6132 - DNA, 460 bp, Homo sapiens
  misc_feature 8, 448, 460: n = A,T,C or G
atagggcnaattggagctccaccgcggtggcggccgaggtaccactacactccagcctgggtgacagagtgagaccccatctcaaaaaaaaaaaaaatgaattatgtaaatgggtttacaagggttatctttcctttgcagacccagaagtccacattcccctcgagaatctacagcagtttcctgccttcaattcttatacctgctcctctgattctgctttgggtcccaccagcaccgagggccatggggccctctccatttctcctctcagcagaagtccaggttcccatgcaggtaaacaggtgaaatttaatgaattcacccatcagttagaccttatgcaaagctttggtgtctgagtttacaaccccggcccactcagcatggtggtggacttcaggggcataaccttactttggtagtcctggaggtaccctgcccgggncggccgctctan

SEQ ID NO: 6133 - DNA, 792 bp, Homo sapiens
  misc_feature 4, 5, 11, 17, 21, 32, 40, 42, 46, 51, 53, 63, 65, 72, 73,75, 76, 82, 84, 85, 90, 92, 101, 110, 116, 119, 123, 214,219, 239, 248, 268, 285, 330, 362, 371, 375, 377, 385, 389,391, 394, 398, 399, 403, 421, 426, 428, 429, 435, 439: n = A,T,C or G
  misc_feature 444, 453, 467, 470, 473, 478, 485, 487, 489, 490, 497, 499,503, 545, 547, 551, 552, 554, 575, 590, 621, 624, 634, 649,656, 671, 676, 679, 688, 692, 698, 714, 731, 744, 748, 752,755, 766, 776, 777, 782, 790, 791, 792: n = A,T,C or G
cccnncccccntctccncttnatttcaatctntatatcantnaatnctttnantatcttcctntnaatcttnntnnttattncnntcttnanttttttttnataatctanagtatnctnggtngcatatcgctcctatacgactcactatagggcgaattggagctccactcgcggtggcggccgaggtacttttttttttttttttttttttnttttnccaaataaaatttactgcancttttgtanaattttatttgtgctacaanacacgttgcataggaanctatttaaagcccctcgaggaaaaaaatatccatggtttaagggnggcaacctggtttttgtttccttcttttgggngaaaaaggntganangaatggtncttntnggngaannaaanttattgggcggttgcgantttgnannaaagcnccanattcngaaagggtntaattaattgggtntgnggnattgnattttgngncnnaaatttngnagcntgatcccttggggtctccttttggccaaggccaattaaaaanantatnncntcacactggttttttggcttntctttttttttattnccaagactcccccggcttggggtccctttcnaangttaatcccntggaaaaattaaaangattacngcctttatttaaccnaaaanccnttttttttnaagngggccnccaatgtttaaatggngggggaaagtttaattnaccactttttggnaatnttanttncccctttaaangggggaaaanngcttncaccccannn

SEQ ID NO: 6134 - DNA, 457 bp, Homo sapiens
taatacactactatagggcgaattggagctccccgcggtggcggccgaggtacattcatttaaactgcccaatgacacactgaggttgtattacagtatccctgtttgacagacgaggaaaatgaagctacaaatgattaaataaaatctgccaggctgggcggggtgcggtggcttacacctgtaatccaagcaccttgggaggccgaggcaggcggatcacaagtcaggagatcaagaccatcccggccaacacaatgaaaccccgtctgtacctgcccgggcggccgctctagaactagtggatcccccgggctgcaggaattcgatatcaagcttatcgataccgtcgacctcgagggggggcccggtacccagcttttgttccctttagtgagggttaattgccgcgcttggccgtaatcatggtcataagctgtttcctgtgtgaaattgg

SEQ ID NO: 6135 - DNA, 475 bp, Homo sapiens
  misc_feature 3, 174, 238, 305, 322, 344, 356, 358, 373, 390, 396, 398,404, 413, 421, 433, 446, 460, 473: n = A,T,C or G
tancactacttagggcgaattggagctccccgcggtggcggccgcccgggcaggtacttttttttttttttttttttttttactttttttctacagatggggtctcactatattgcccaggctattttggaactcctgggctcacatgatcgtcctgccttggcctcccaaagngctggacttacaggcacgagctgacatgcctggcctgatatgtcagttttcagtggttgtcagngtttctttgttttctcctctgtcctaggcacttgtcactaggaaagtgcctaatgactccatcaggngtggcatttattattgntgcaacagggaattgataaganaaaagaaggctntntgggggatgagttanccaagaagtggaaaaanacagcngntattangttgcttgncaaaatancttgctttactntctggcatgtttnactccaaggggatnaaaattatccaanaa

SEQ ID NO: 6136 - DNA, 473 bp, Homo sapiens
  misc_feature 42, 186, 196, 207, 215, 244, 246, 251, 267, 288, 313, 322,331, 334, 364, 368, 373, 380, 387, 391, 417, 418, 419, 430,441, 448, 451, 461, 463, 466, 471: n = A,T,C or G
ggcgaattggagctccaccgcggtggcggctcgaggtacctntgccgcctccccctaactctgtgctgcctgagcatgcagaacccttgaggggagagattctgacacaagtcagttagaaagggctaccaaccttagccagcctggccctgcaggagccacccctcactaggcctgtggcagctntagaactagnggaatcccccnggctgcangaattcgatatcaagcttatcgataccgncnacctngagggggggcccggtncccagcttttgttccctttantgagggttaattgcgcgcttggcgnaatcatggncatagctgnttnctgtgtgaaattgttatccgctcacaattnctcncaacntacgaanccgggancatnaaagtgtaaaagcctggggtgcctannngagtgagctanctcacattaanttggccnttncagctcactngnccnctttnct

SEQ ID NO: 6137 - DNA, 472 bp, Homo sapiens
  misc_feature 2, 7, 11, 295, 364, 411, 418, 419: n = A,T,C or G
tnatacnactnctatagggcgaattggagctccccgcggtggcggccgaggtactttttttttttttttttttttgtatactttctgagcttccctgagaaactcacttaggagacagtcttcccaattgtctgtcttttgtaacttttttgaaatgtctggccaacttttagtgacaaattggagtttcaacattccttgcccaaggggatcatccaaatcgaggcctgcatattacctcatttgctccctcagtctgtctaggaatctcataggcccttcatccttttcctgntggatatcaaatgctttagaaagatttggggttcagggtacctgcccgggcggccgctctagaactagnggatcccccgggctgcaggaattcgatatcaagcttatcgataccgncgacctnnagggggggcccggtacccagcttttgttccctttagtgagggttaattgcgcg

SEQ ID NO: 6138 - DNA, 614 bp, Homo sapiens
  misc_feature 2, 3, 4, 6, 17, 27, 28, 33, 356, 362, 395, 442, 461, 499,519, 555: n = A,T,C or G
gnnnancgcgtaatcgnctactattcnntatanggcgagattggagctccaccgcggtggcggccgcccgggcaggtacttttttttttttttttttttttgcttatccattcaccagttgacggacatttgaggtgtttccaaattttggctgtaaactgtttatattttgagcccatttcattttttgcttccaaagaggctggttgacctaaaacacactgcagtttttcctgaaaaatctgtgctggagtcatacggagtggtagattcagactctttttcttgggacctcatgaaattgctatcacgtttacagaacaagctggaaagccacaccaattgaaacagacgtnttccantctccaagtttatattgccaaccacacagcctnttggaacccaggccaccaaataaatagtaattcaaggcgcatatttnaactgtccaccacattagnagaggattctgatcttttaacaacactggccaccttanaagtgttgcagaagggaatnagtcgaaaaggactgctctggtttaaatatgaaagnggggggaagaacattcacattgatgaaggggggcaaaaaatggcaaaagctgcttgaat

SEQ ID NO: 6139 - DNA, 598 bp, Homo sapiens
  misc_feature 276, 279, 374, 407, 425, 445, 519: n = A,T,C or G
gaattggagctccaccgcggtggcggccgaggtacagtgtctccgtccgcggaaaaagaagcctctgaacccgcgccggcccgcagcccccgtgccttccggccgcccgggcaggtacacaagctgacaataatccttttctgtatgtgtgtgtttgtccgaaatggatgggaggcctccagccagtccttccattgctcactgaagggacgtccctgagccgtgcgctctccttttgcactcattcctggagaacggattccgctagacaccctncancatcgctgactttataaagcggaaaaacgggaaaacgtgactttgtaatagacaaacattgttttttttaatggggttccatgggggggggcgtncagccttttcttgtttgctgtgtgctgtccaanatgccctctttgggcgtncctgtttgttcctcttcccngtggttggtacctcgggccggcttcttagaaactaagtgggatcccccccggggcttgcagggaaatttcaaanaatccaaagctttaatccgatacccggtcggaacctcgaaggggggggggccccgggtaacccaagcttttttgttcct

SEQ ID NO: 6140 - DNA, 597 bp, Homo sapiens
  misc_feature 289, 296, 410, 419, 481, 506, 524, 551, 564: n = A,T,C or G
ggagctccccgcggtggcggccgcccgggcaggtacttcactgcggacttgacttcttgagcaagaaggctggcactgttcattaagagaatcacagagatgaatctcacaatgcaggaaaactaggtcataatgtccagcaaacatgaacatctgaactgagaaccggctttctgaggactgcccattctcctccacgtggatggtggaatcacgttgatttgagcagctgtttctgatgatgaaatacttcacaaggtcagccttgtcttcagtgggggtggcatancagtttnctcaacaccagggttaaaaccgggaggtggtccccttgttccaaagatggcacccacaatacagcaccgggactcaacagacaggttcaactgcatcccctttcgtaagggatntcgtgtagntctggtctttggaagaggggccattccctgaccaatgaaactcttccaattcccgtccacgnctggacgtttcaagggaaacttgtngaaaaaggaaaaggcccnccatggaagtgggaaaacctcagaagnaaccaacctttanattcaagcccctgcaccttactttaaacacact

SEQ ID NO: 6141 - DNA, 852 bp, Homo sapiens
  misc_feature 3, 4, 5, 15, 17, 20, 23, 24, 25, 26, 27, 31, 37, 39, 40,46, 50, 54, 59, 62, 64, 65, 68, 74, 81, 84, 86, 90, 94,101, 102, 103, 109, 116, 120, 128, 133, 145, 180, 187, 260,261, 280, 306, 322, 350, 353, 354, 355, 361, 382, 390, 398: n = A,T,C or G
  misc_feature 417, 426, 431, 437, 455, 461, 465, 467, 473, 476, 480, 483,487, 504, 514, 520, 522, 548, 553, 555, 556, 565, 602, 605,614, 621, 624, 628, 629, 637, 639, 647, 658, 661, 674, 675,688, 694, 704, 711, 716, 719, 726, 739, 742, 752, 753: n = A,T,C or G
  misc_feature 755, 767, 778, 781, 788, 789, 795, 796, 805, 806, 812, 814,817, 818, 831, 838, 843, 844, 846: n = A,T,C or G
ggnnnatattttggnanttntgnnnnntttntgatantnngggatnttcngaanttttnganannttngtaatntccgagnttngngttntttnttaaacnnnaagatntgggttncgtnaattatcntatanggcgaattggtntctccaccgcggtggcggccgaggtactttttttntcttttntttttttaagtgtgtggctgcggacacctttcaacactgccttcttggcctttaaagccttcgctttggcttnngctttaggatgagcaggancttccttcgcttttggtgccatcatnggtggtggagccaatnatggcccaataggaacagttccggtctncannnttccancgtgagcgacgcagaagaacngggtggantttctgcnattttccattctttagggntttcatctnatttngggacntgggattggggacatgtnggggtngccngnacccanctngaanggnattntagccttgaaaaacctntagggggggntggttnanccctcaacccctgggggaaaaggccnacaanannttgggtttnggggggggaattttttcccctttttccttaatcccanaanggggattgncccgttnaanaaannattgggcnancccttggnaaaaaactcanggnaacatcttccccnncccccaaaaattncttgtnggcttttttntccaaantgggntcnttaaggncaaaaatggggcnccncccagggganncntttattattccnttgcggccctnggngctttannatgggnnttcccaaanncccaangnggnngccccttggtttnttggggnttaanncnccaact

SEQ ID NO: 6142 - DNA, 587 bp, Homo sapiens
  misc_feature 101, 182, 262, 285, 308, 352, 361, 368, 371, 377, 384, 388,389, 403, 406, 409, 428, 460, 467, 477, 479, 495, 497, 499,504, 533, 540, 541, 552, 558, 559, 565, 570, 572, 574: n = A,T,C or G
ggagctccaccgcggtggcggccgcccgggcaggtacttttttttttttttttttttttttttggattaattatttgctgtttattttatatttattttanactatggaaatgatgttagacaaatagcaaattccagcgattttcttattcggggtcaaaatggttcataaagcagcaganacaactcacaacaccaacaacgcatttggcctaggaactactaacaaatactaccaaaaactcaccacaatacagtgggnggttcaagaagttttgcaaaggngacttcaaaaatgaggaacatcntttggcctgccatcaggaagtttgacaaaattgacccaattgangagcaatcnttggaangtngatcgncttcagntaanntgagaagctgccanaanaanctcaaacattggaccattntacggttcgtttggcatttgaagcaaattggnaaagttngaaaaagctnanataaaatggggtgccntnangaccntgaaggaaaaatttttttaaaaaattgtnatttttnnaagtggccatntttatnnctcccnccaancnanttaattgacccct

SEQ ID NO: 6143 - DNA, 605 bp, Homo sapiens
  misc_feature 252, 327, 331, 332, 334, 396, 413, 414, 419, 420, 426, 446,499, 514, 518, 544, 550, 564, 567, 577, 586, 597, 602, 604: n = A,T,C or G
tactatagggcgaattggagctccccgcggtggcggccgcccgggcaggtacaacctacagaaccgtcagccaattaaacctcttttctttataaattacccagttccggctgggcactgtggctcacgcctgtaatcccagcactttgggaggccgaggtggatggatcacgaggtcaggagttcaagatcagcctgggcaagatggtgaaaccccgtctctactaaaaatacaaaaaaaaaaaaacttancctgttgtggaggtgggcgcctgaaatcccagctacttgggaggctgaggcagagaatttgcttaaacctgggangcannangatgaagtgagccgagattgcaccactgcactccagcctgggtgacagagcaaaactccatnttcaaaaaaaaaaaaannagaanngaaaanggttccttcggccgctctanaactagtgggatccccccgggctgcaggaaattccaatatcaagcttattcgnataccgtccgacccncgangggggggggccccgggtacccaagcnttttgntttcccttttaagnggnaggggttaantttgccccnccttggggggntaatnant

SEQ ID NO: 6144 - DNA, 888 bp, Homo sapiens
  misc_feature 1, 2, 3, 9, 15, 16, 17, 20, 21, 30, 31, 33, 35, 39, 41, 44,49, 52, 53, 54, 55, 62, 64, 66, 68, 71, 80, 87, 91, 101,102, 103, 104, 105, 106, 107, 108, 109, 110, 111, 114, 115,119, 121, 130, 149, 156, 161, 283, 395, 416, 428, 452: n = A,T,C or G
  misc_feature 459, 476, 487, 499, 519, 525, 545, 568, 581, 590, 609, 618,625, 626, 629, 634, 636, 637, 641, 647, 649, 671, 678, 710,727, 743, 760, 779, 794, 807, 813, 832, 849, 877, 884, 887: n = A,T,C or G
nnnaatatnggatannntgnnggtaaaaanngngnaaantnccntttantgnnnnaaatggngnantnttngggaaaatnggggaantttnaaattttggnnnnnnnnnnnagnnaggngntcgccgtantactactcatatagggcgnaattggnacctncacccgcggtggcggcccgcccgggcaggtacaaaagtcgcggaacagccacccatcttcgagaacatgtccagctaccaagaagtctgacatcaaagtggtccctacctcctgctgctcanggaaacaggaataaggagtctaggacaaaaacaaagagcctggggtttttgagccaaaagcccaaaacaaatcactggaaagaaacgggtgttcacgggccagaagtctcanaacccaactttcatgggaaantgctggcttggnagaagggggggatgcctggaccanaacttgntttaaccaaggggaaanaaagttgggtnggggggccccangatttccaccaggttttggnggggtnaaccttgcttgccttggacnttgggaagccttgtttcaaagtnccattttgggagnattcttttnccaaatggaaaaaatgganaaaaccaanaaaaaannaanaaggnanntaanaaaaanancctaaaaaaaaccaaacccttngggcttnaagaagaagaaaaaaaattctttttttttctnggtggggcttgcccatngggcccattttcctcnaaccaaattcccaagangtggggccttggatttttnattggaaattccctntaaaggcccggancccccnaaaaacatttttggggggntgggagggggttattgnattgaaacaccttgttggcccttggccnaaagggnccnt

SEQ ID NO: 6145 - DNA, 555 bp, Homo sapiens
  misc_feature 520, 555: n = A,T,C or G
aattggagctccccgcggtggcggccgcccgggcaggtactctccctcttttcctagggatgtggcttcctgagagccaagttgtagtgactgtcatctctcttgtggatctagccacccagcaggtctaccaggctctgggctggtgctgggggttgtctacactgggtcctgtgatgtgaaccatctgcagatttctcagctatgggtacctcggccgctctagaactagtggatcccccgggctgcaggaattcgatatcaagcttatcgataccgtcgacctcgagggggggcccggtacccagctttttgttccctttagtgagggttaattgcgcgcttggcgtaatcatggtcatagctgtttcctgtgtgaaattgttatccgctcacaattccacacaacatacgagccgggagcataaagtgtaaagcctggggtgcctaatgaggtgagctaactcacattaattgcgttgcgctcactgcccgctttccaagtcgggaaaacctgtcntgcccagctgcattaatgaaatcggccaacgcgcn

SEQ ID NO: 6146 - DNA, 581 bp, Homo sapiens
  misc_feature 527, 551, 553, 581: n = A,T,C or G
tcactatagggcgaattggagctccccgcggtggcggccgcccgggcaggtaccagaggaggagatggatgatcagagccctgcacctgtttcctgcaccccctgcccactggttctatggccacaaggagttttacccagtaaaggagtttgaggtgtatcataagctgatggaaaaatacccatgtgctgttcccttgtgggttggaccctttacgatgttcttcagtgtccatgacccagactatgccaagattctcctgaaaagacaagatcccaaaagtgctgttagccacaaaatccttgaatcctgggttggtcgaggacttgtgaccctggatggttctaaatggaaaaagcaccgccagattgtgaaacctggcttcaacatcagcattctgaaaatattcatcacccatgatgtcttgagagtgttcggatgatgctgaacaaatggggagggaacacattgcccaaaactcacgtctggagcttctttcaacatgtcttccttgatgacccctggnacagcatcattgaagtgtgccttnancccacccaggggccagcaatccaagttn

SEQ ID NO: 6147 - DNA, 555 bp, Homo sapiens
  misc_feature 314, 398, 468, 552: n = A,T,C or G
ggagctccccgcggtggcggccgcccgggcaggtactttttgtggcttggtttctcgggaaacgtcatcttctcgggcgcagccatcttgccggcaccccccgcgtacccagggaacaaatgctactgggactccacacctacctaagaagcagctctacccagactccacatggctctctgttttggtctggagaccccagctggggtatctcctgagcccagggattcaaaggttcgtggcagaaatatgcatcccacgggactctcactcactcaccatttttcttgtagggggattcccctgggtcttgngccactcctgggtgaatggttgatctgtctcactcttctccgtgatccgaaggtcacactatgtcactgatgaatccttatgtntccacctggatgttccggttgaagaagctagtgtctcaccactcttttctgctatttgtgagagtgggcnacacactagctgcctctaagtcaaaccatctttggccccaccttcactcacttttttttcaagtgatcaaaagacccagtaaanggg

SEQ ID NO: 6148 - DNA, 872 bp, Homo sapiens
  misc_feature 8, 305, 306, 313, 314, 318, 325, 329, 331, 335, 339, 346,362, 364, 366, 367, 369, 377, 385, 388, 405, 406, 410, 422,427, 434, 438, 439, 443, 449, 452, 453, 456, 459, 460, 462,463, 464, 471, 479, 480, 485, 486, 488, 494, 501, 503: n = A,T,C or G
  misc_feature 504, 505, 511, 513, 518, 522, 523, 526, 528, 529, 530, 565,567, 572, 578, 588, 594, 601, 617, 624, 637, 638, 639, 648,661, 666, 667, 668, 673, 680, 684, 688, 719, 739, 747, 756,757, 787, 788, 792, 804, 810, 816, 820, 822, 830, 860: n = A,T,C or G
  misc_feature 866, 868, 871: n = A,T,C or G
agtcgctnctgacgcgcgtatacgactactatagggcgaattggagctccaccgcggtggcggccgaggtacgcgggtggctggatatggccccattgagcagctcccagactacaaccggatccgtagcggcatgttctggctgcgcttctaggcgggaagcctatgtaagcaagagggcagggccggggtttgtggtcccccccccaccacaaacacagcacttcggctcctctaacctgtgccacaggtgaccaccaataaaatcctctgctgagaaaaaaaaaaaaaaaaaaaaaaaaaannaaaaaannaaanaaaaaanaaananaaanaaanaaaaaanaaaaaaaaaaaaaaananannanaaaaaggnaaaaaaanaanaaaaaaaaaaaggcccnncccnggggggcccccnggganggtcccngggnntttngggggnccnnggnaanngnnnccccttncccccaannttttnnancccccngggccanannngggaancntttcnttcnnaanannnaaaaaatttaccgggggggggggggggcccctttnantcttncccttnggggggtttntttggnggattcncttgaccccaaaaagntttaggntttcggaaccctnnnttggccccnttttccccaaccnggggnnnaaaanagggaancccntttnaaaaaaaacaaaaaaaagggggggaaaaagnaaaaaaaaaaaaagggaagnaagggganggggggaannaagcctttttttgggggggaaaaccccttnnaaancttagggtgggncggggnaaattntttnanccccaaanccttttttgggggcccttttttattttccnggcttnanatnt

SEQ ID NO: 6149 - DNA, 853 bp, Homo sapiens
  misc_feature 488, 547, 585, 625, 654, 696, 730, 750, 775, 831, 844, 853: n = A,T,C or G
cgtaatacgactactatagggcgaattggagctccaccgcggtggcggccgcccgggcaggtacgcggggggacttacaagatggataggacctggtggcagctgtccttgaggaagccagagcctggagagacagatctcatgttatagcagagtacctcggccgcccgggcaggtacctgatgttccaggccccgatgcagttgttcacccaaacacagtgatggtcgaaacggtgcacacaccagttacacacactgcagtgcttggatcgagctggtttccttaaatcacaagtagagcacctcacgttctttggaaacatcacttcatcaaattcataaacatgaagaaataataattcatttgcttttgttataatgccaggattggttccacaagtcagggtgaaaaaaaacaggtttacacctagcagcagatagggcagaagaaggtaatgcaaggacaactccagctcctgacagtanccaaatacttccaggtgtacctcggccgctctagaactagtggatcccccgggctgcangaattcgatatcaagcttatcgatccgtcgacctcgangggggggccccggtacccaactttttgttcctttaatganggttaattgccccctggcgtaatcatggncatagctggttcctggggtggaaaatggtattcccttacaanttcacacaacataccagcccgggagccataaagngtaaaagcctggggtgcctnatgagtggacctaacttacatttantggcgttgggcctacttgcccgttttcaatcggggaaacctgcgtgcccacttgcnttaatgaatcggnccacccccn

SEQ ID NO: 6150 - DNA, 864 bp, Homo sapiens
  misc_feature 1, 5, 7, 10, 11, 14, 508, 556, 588, 625, 647, 649, 681, 687,690, 699, 704, 718, 750, 781, 787, 793, 821, 823, 827, 833,849: n = A,T,C or G
nacgncnctnntgngcgcgcgtatacgactactatagggcgaattggagctccaccgcggtggcggcccgaggtacgcggggttgagtgagcaagtgaagaccaatattcaacaggcagttgcagctgctccctggtggttacctgtgaaaggcgctaactggagacacccagaagggcctgactctactattctgcacaggccggatcatccagttctccatgtgtcctggaatgatgcggttgcctactgcacttgggcagggaagcggctgcccacggaagctgagtgggaatacagctgtcgaggaggcctgcataatagacttttcccctggggcaacaaactgcagcccaaaggccagcattatgccaacatttggcagggcgagtttccggtgaccaacactggtgaggatggcttcaaggaactgcgcctgttgatgccttccctcccaatggttatggcttatacaacatagtggggaacgcatgggaatggacttcanactggtggactgttcatcattctggtgaagaaacgcttaacccaaaangtccccttctgggaaagacccaatgaaaaaangtggatcctacatgtgccataagtcttattggtacangtatcgctttgcttgctcggancnagaacacacctgatagctctgcttcgaatctnggattnccnttgggcaanccgancaccttgcccattntggactgacaacccaaggaaagtctttcccanttccaaggaacaatcctggtttgacctacantgggcntttttnaaaactttgaacatccccttccaaaaantnccancctganggggttacatacctgnccaatgggcaaaggg

SEQ ID NO: 6151 - DNA, 849 bp, Homo sapiens
  misc_feature 607, 632, 704, 719, 723, 774, 788, 795, 805, 816, 823, 833,839, 842, 848: n = A,T,C or G
acgtcgactcctatagggcgaattggagctccccgcggtggcggctcgcccgggcaggtaccacatgcccgtaatcccagctacttggaagctgaggcaggagaatctcttgaacttggaaggcggaggttgcagtgaaccaaaatcacgccacagcactccagcctgggagacagagcaaggcttagttttaaaaaaaaaatcaaatattgtgtgattctgtttataggaaatattcagaattggcaagtccataaggacaaaaaccagattgacaggggctgagatgaaaaagagaatggggtatggggagtgacagcttgataggtatgggttttgttggggggagataatgaaaacatttggaactaggagaatcacctgacatcaggagttcaagaccactgaactcgaacctgggtgacagagtgagactccgtctcagaaaaaaagaaaatgtttggaactagatggtggtggttgtacctcggccgctctagaactagtggatcccccgggctgcaggaattcgatatcaagcttatcgatacccgtcgacctcgagggggggcccggtacccacttttggtccctttagtgagggttnattgcgcgcctggcgtaatcatggncatagctgtttcctgtgtgaaattgttattccgtccaatttcacacaacataccaacccggagcataaaatntaaaacctggggtgnctantgagtgactactcacatttattggggtgggctcactggccccttttcaatngggaaaccttcggncacttcntttattaatnggccacccccngggagangcggttgctnttggcnctnttcccnt

SEQ ID NO: 6152 - DNA, 869 bp, Homo sapiens
  misc_feature 23, 445, 608, 665, 678, 683, 712, 740, 778, 830, 855, 864: n = A,T,C or G
tagtcgctactatagggcgaatnggagctccccgcggtggcggccgcccgggcaggtacttttagtaagagacaggatttcgccatgttggtcaggctggtctcgaactcctaacctcgtgagccacctgcctcggcctcccaaagtgctgggattacaggcgtgagccactgcgcccggccagaaaccagatttctgaagcctggacaactaacgtctactttttcccacaacttctctcttttctaaatttctaaaaatcacccagcctcaccaacccaaacataaccaatgttaacactttaaaaattttcctgtcagtcttttattatcccaataaattttttattttgcaggattataatcaccctgtatatgcaaattcttattactgtggaataaacattttctctatcacaaaaaaaaaaaaaaaaaaaaaaaggtncctcggccgctctagaactagtggatcccccgggctgcaggaattcgatatcaagcttatcgataccgtcgacctcgagggggggcccggtacccagcttttgttccctttagtgagggttaattgcgcgcttggcgtaatcatggtcatagctggttcctgngtgaaattggtatccgctcacaatttcacacaacatacgagccgggagcataaaggngtaagcctggggngcctnatggaggggagctaactcacattaattgnggtgggctcactggccgcttttcagtcngggaaacctgtcgtgccagctggatttaatgaatcggncaacccccgggggagaggcgggttgcgtattggggcgccttttccctttctnggtttactgactcgttggggctcgncgttcgggntgggg

SEQ ID NO: 6153 - DNA, 974 bp, Homo sapiens
  misc_feature 5, 283, 311, 327, 338, 386, 408, 426, 429, 430, 431, 432,441, 444, 449, 459, 460, 465, 466, 467, 477, 482, 483, 486,493, 494, 496, 498, 501, 508, 513, 514, 527, 528, 539, 548,567, 571, 576, 583, 590, 597, 598, 610, 622, 625, 627: n = A,T,C or G
  misc_feature 636, 637, 647, 651, 652, 659, 661, 675, 679, 680, 685, 686,691, 697, 700, 702, 703, 704, 705, 709, 710, 712, 713, 714,717, 718, 721, 723, 731, 732, 734, 735, 736, 738, 740, 748,750, 751, 752, 758, 764, 770, 772, 778, 785, 788, 790: n = A,T,C or G
  misc_feature 795, 803, 807, 815, 821, 825, 832, 837, 839, 844, 846, 851,853, 865, 867, 871, 873, 874, 876, 883, 885, 887, 895, 903,906, 917, 918, 923, 928, 931, 938, 961, 963, 964, 965, 970: n = A,T,C or G
tggcnctactatagggcgaattggagctccccgcggtggcggccgccgggcaggtacgcgggaggctctgcttctccaaggaaaccgcctagtttactgttttgaaatcaatgcaagagtgattgcagctttatgttcatttgtttgtttgtttgtctgtttgtttcaagaacctggaaaaattccagaagaagagaagctgctgaccaattgtgctgccatttgatttttctaaccttgaatgctgccagtgtggagtgggtaatccaggcacagctgagtnatgatgtaatctctctgcagctgccggncctgatttggtacctnggccgctctanaactaagtggatcccccgggctgcaggaatttatatcaagcttatcangaccgacaacctcgaggggggncccagttacccagctttngtnnnntttagtganggntaatngagcgccttnnctcannnattggtcatnctagnntcntagaagnnanantgntgaaccncttannaatgttcactacnngagattactanccggggtanctttataggtgaaatatanagcngaggncgcccanattgtantcgaagnncacctcacattnaaatttctgttnctncntacgtaccnnctatttcaantacnnagtgaancntaacgaaccagtcnttcnntaatnnatttngccacntancnnnngttnntnnnaannatnangatatatnncnnntncngttcaccncnnnatgtantcagcnctcttntnttgctngttatgncantntgttngattaatnatangtaaggantccttnaaangtctttncttgntntcttncncatcntnttgctatatgtncnattntnntnaactaantnanctatagtnacatattntcnccttatgtaanntactnttttnttntttatcnattaatcttacatctctctcatntnnnaatcntctc

SEQ ID NO: 6154 - DNA, 960 bp, Homo sapiens
  misc_feature 4, 8, 11, 12, 16, 27, 35, 43, 68, 101, 103, 276, 308, 337,401, 442, 443, 454, 475, 481, 503, 515, 530, 537, 556, 558,559, 561, 563, 581, 594, 610, 621, 624, 625, 639, 646, 647,651, 655, 687, 694, 699, 701, 702, 703, 714, 716, 718: n = A,T,C or G
  misc_feature 721, 725, 726, 729, 732, 734, 739, 741, 742, 743, 744, 746,762, 763, 768, 786, 790, 796, 800, 805, 808, 809, 810, 811,813, 814, 815, 839, 841, 847, 851, 855, 859, 860, 862, 867,870, 872, 875, 878, 884, 895, 896, 908, 909, 913, 922: n = A,T,C or G
  misc_feature 926, 927, 930, 933, 934, 941, 943, 944, 947, 948, 949, 950,954, 957: n = A,T,C or G
attntttnaanntccngcgaattggantttcaccncggtggcngcccgaggtactggcagggctgtgngatttttcttctctaccagtaagtagcaaattntnaaattctgctgctcagactgaacagggcaacactgagactcagcctcagcctgtcctatggcagggctttactagggtggtatgttcatgtaattccagcgccttcacaatttaacgaaccaaatttactatacttcacttctaaaaacctagatgaaacatgaaaaagaagncatacagtataaattgcaacttcaggaaaagntcctgctttattattccaaataatttttnccatgtaaaataaatgtccaataggttcctggtatgtgggaagataatgtttgttaagagtcanaatgaagccttattgaccgagggcttggctatataaacagnngcaagttgagnaaaaagtttaatctccaaacntatttngacttggatggaaagtaaagangcagtaaccggncaccttgcgacattncagggangtctcattccccatcggangnncnangaggcccaacctggttangggggctcccatngggcggtccctgcgcngacgggggcantannaccagggaaaggtntccctgnnatgncttnggtggatgaccccaatacttgaccatgagggngggcgtntgggngnnntcatttcattntngntgngggnnatnccntngggtngnnnntngcattcataaccttcnnttggnacctcctggggggtttancctnttgggngccnttccntgnnnnannnaaattatattttaaccttagtatntngacccntctntttnccanngnttttncancncgngtntgcttnaacataattgnntcctcatgtggnnaatngagttaagngctnngtnatnnaatattngnnaannnnggtnctnccc

SEQ ID NO: 6155 - DNA, 833 bp, Homo sapiens
  misc_feature 2, 42, 48, 50, 54, 56, 57, 79, 81, 82, 85, 88, 92, 97, 107,110, 114, 122, 124, 131, 136, 141, 148, 173, 260, 459, 489,491, 503, 507, 530, 541, 543, 560, 581, 618, 623, 640, 658,660, 666, 668, 687, 727, 755, 759, 766, 796, 798, 799: n = A,T,C or G
  misc_feature 800, 801, 805, 809, 824, 827: n = A,T,C or G
gnctccttagggcgaattggagctccccgcggtggcggccgntccccncntggngnncgaggcacataaactaaaatcnannttnagnccanccacnccttgacatnagngtgnctcagccngnattcatnttgcngagantcaagtnttggtccataaaggatcattctatnttaatggctcatctttaaaagtcctaagagaaatatgtgacaggtagttactgtcagtagggatattttctaccttttttccctatngttgaagtgtcggccacaacagcttctgggcatgttcagcctcaaaatcaccacctaccaaaaagggcaaaactaaaaatccctataaaataaaaaagaaagttcccccaaatgtttagtgcatttgacaaaatattatgggtatttagcaaatgaataagaaaataaagaaaacagtgcaggaagaactatataatgntttaagatttttatattacagacctgcatntntgtacctgcccnggcnggccgctctagaactagtggatncccccggctgnangaattcgatatcaagcntatcgatcccgcgacctcganggggggccccggtcccaacttttggtcctttaatgangggtnaatgggcgcttgggggnaacatgggcatagctggntnctgggngnaaatggtttccctcacaanttcccacaaattccaaccggggccttaaagggtaaagccnggggggcctatgagggggcctactccanttantgggtgngcccactggccctttcaatcggggaaaccntnnnncccntggnttataatcgcccccnccnggggga

SEQ ID NO: 6156 - DNA, 891 bp, Homo sapiens
  misc_feature 121, 128, 151, 214, 221, 234, 419, 420, 423, 433, 450, 451,468, 469, 480, 496, 499, 528, 535, 563, 566, 578, 597, 604,608, 619, 620, 626, 627, 629, 640, 641, 649, 650, 663, 665,669, 672, 677, 680, 682, 688, 689, 697, 698, 701, 705: n = A,T,C or G
  misc_feature 707, 709, 719, 722, 723, 724, 726, 733, 741, 744, 759, 763,767, 769, 778, 780, 785, 786, 787, 797, 801, 808, 809, 811,816, 819, 820, 822, 832, 846, 849, 851, 859, 869, 874, 875,882, 886, 889: n = A,T,C or G
gtaatacgactcactatagggcgaattggagctccccgcggtggcggccgcccgggcaggtactttttttttttttttttttttttggggatttttttttttttttttttttttttttctntggggantaaatgttattttattttaaggngggagaaataatagcatgggccaatgctaagacatatgaaagcaatagtctggtagtgcctangacacantataatagtaagngtctgacacatagtagctattcaacaaaagtcatttaaaaatttaacttaaaaattcagtaatattttttcccctttctttctattatcccttctgccaaaatttgcccttcttatgtttcatttacacagtgtaaaagattaggtaggatgtgtctgaaaagtctctttgatactaggatgttnnaanagcacttcancccacttcccaatgatnngctttccaatcatttannggagtatgctntttcaacccttttttnttnttttgggcatgccaccgtattcatagggngaccaanccattctaattctgtctaagggctgtgncanttttaattactngagaaccctattgctgcangaaactncttnaggtcaaggcnnagcctnntntgggttgattnncccgaganntaggggccagtcntntctncanctttnggnanaaaagnnatttgggnntcntccnantngggggaaaangcnnnanaatgggnacttggtnccntcgggccgctttaanaaantaangnaaccccccngngttgnnnggaattccantttnaagcttnntngaaancgnntnacctttgagngggggccccggganccnanttttggtnccctttatgnagggnnaatttcncccntgncg

SEQ ID NO: 6157 - DNA, 899 bp, Homo sapiens
  misc_feature 2, 18, 38, 428, 551, 571, 580, 607, 610, 631, 645, 652, 670,674, 688, 703, 708, 725, 759, 763, 778, 779, 783, 815, 834,839, 854, 864, 866, 887, 899: n = A,T,C or G
tnatagttgccgcgtatnctactactatagggcgaatnggagctccccgcggtggcggcccgaggtactgccttctactctgccaggctccccggttacagaagtctatgctgtcgacaaagacacaggcatgaatgctgtcatagcttacagcatcatagggagaagaggtcctaggcctgagtccttcaggattgaccctaaaactggcaacattactttggaagaggcattgctgcagacagattatgggctccatcgcttactggtgaaagtgagtgatcatggttatcccgagcctctccactccacagtcatggtgaacctatttgtcaatgacactgtcagtaatgagagttacattgagagtcttttaagaaaagaaccagagattaatatagaggagaaagaaccacaaatctcaatanaaccgactcataggaaggtagaatctgtgtcttgtatgcccaccttagtagctctgtctgtaataaagcttggggttccatcacactggtcacagggatgggcatattccatctggttaaggnaaggggaaaaagcatcccangggaagatnaaaattttggaagtacctgcccgggcnggncgctcttagaactagtggatncccccgggctgcangaatttngatatcaaagccttattngatnccgccgacctccanggggggggcccggtncccancttttggttccctttanttgagggttaattgggcccttggcggtatcaatngggnaaaggttgttccctnngggnaaattggtatccggttacaaatttcacacaanattccaaacccgggggctnaaagngttaaagcccggggngccctattgngngggctacccacaattaattgngtttggcttacn

SEQ ID NO: 6158 - DNA, 921 bp, Homo sapiens
  misc_feature 2, 25, 67, 68, 72, 74, 81, 91, 95, 107, 116, 117, 166, 168,170, 211, 216, 218, 237, 243, 300, 317, 321, 322, 325, 327,335, 357, 363, 383, 396, 426, 433, 434, 438, 450, 457, 462,465, 482, 485, 486, 502, 503, 530, 546, 550, 564, 569: n = A,T,C or G
  misc_feature 575, 588, 597, 605, 607, 610, 622, 627, 632, 641, 642, 650,662, 674, 675, 676, 677, 689, 691, 692, 696, 700, 702, 709,710, 718, 721, 722, 725, 726, 731, 734, 738, 740, 746, 749,755, 756, 758, 759, 763, 764, 765, 766, 775, 776, 777: n = A,T,C or G
  misc_feature 781, 782, 785, 788, 791, 792, 795, 799, 802, 804, 805, 806,807, 810, 816, 817, 819, 833, 836, 847, 851, 853, 858, 866,873, 875, 877, 889, 890, 891, 895, 896, 902, 905, 906, 907,912, 915: n = A,T,C or G
tnatagcactactatagggcgaatnggagctccccgcggtggcggcccgcccgggcaggtacttgcnntggnanacttganagggcacgtntctnagacttctgganagaccattnnaggcttctggctcttgacaaagatagaccactggaacaatgagaaaganananttctactggtccagacaagactctcttgatctgcaaatacnacttnancatgctgagttgtgtgcanctgcancggattcctctgagcgctgtctatcgcatctgcctgggcaagttcacctttcctggnatgtccctggacaaganacanngananggccttangatctactgcgggagtccggangagcancccttctgttccgctggaanccatggtccctgnagttccttatgctacttatgactgaatcanccctctnnaatnaccagttggagnaaatccntgganatntgcaaaattgtttaggnctnnatgtaataaccttganncatactattcccggaatgccccaacanggaatttcaactgggntctngtaataagaaaagnacacnttgcgntttattgggatancaatttttntttcgggntnttnaatagggggctnacttnttttngccgggaanncctttaanggaaatttggcnaatccccttggnnnngggggggttatngnntttnggangngtttttnntttcttgnctnnctnnacttngtnggantngggtcnttnggctgnngnngaannnngatttgccnnnactnnagnggnggnnagncggnttntnnnnagnaatttnngntaactcctggatanaanaatttggggcnaatngntcccntatgggcngagaccntnanaaggctctattnnngggnntttttnctnnnagtgnccncgcccg

SEQ ID NO: 6159 - DNA, 928 bp, Homo sapiens
  misc_feature 2, 3, 260, 392, 393, 420, 430, 487, 560, 580, 623, 708, 727,833, 842, 845, 864, 893, 924, 928: n = A,T,C or G
anngcgctactatagggcgaattggagctccccgcggtggcggccgcccgggcaggtactatttgatcagaatactaaaaagattgccacattctgtttcttaagaacaaactgttgctctctgtatgcagatctagccaagagaaaacatatgtgacaaaaagactgttcttattaatttctaaagaacagatcttaaatttacaaaaaaaaaaaaaaaaacaagtacaggtaagccctggctgcctccacccactccnagggagaccaaaagccttcatacatctcaagttgggggacaaaaaagggggaagggggggcacgaaggctcatcattcaaaataaaacaaaataaaaaagtattaaggcgaagattaaaaaaattttgcatnngataattgacacagaaagcaatgctangcacctcccntgtgtggacttgggagaggactgggccattctccttaaagagaagtggggtggcttntaggatggcaagggacttcctgtaacaacgcatctcatatttggaatcccgcgtacctcggccgctctagaantagtggatcccccgggctgnaaggaattcgatatcaagcttatcgataccgtcgaccctcgangggggggcccggtacccacttttgttccctttagtgagggttaattgcgcgcttggcgtaatcatggtcatagcttggttcctgngtgaaaattggttatccgntcacaatttcacacaacataacgaacccggggaaccttaaagtgtaaagcccggggggccttattggtgagctactcacatttaattgcgttgccttacttgccgntttcaatcnggnaacctttcggccagctgcntaatgaatcggccaccccccggggagagncggttttgggttttgggccctttcccttccnggtn

SEQ ID NO: 6160 - DNA, 923 bp, Homo sapiens
  misc_feature 2, 3, 5, 6, 601, 741, 747, 762, 781, 810, 811, 815, 834,842, 847, 859, 876, 880, 896, 906, 917: n = A,T,C or G
tnntnncactactatagggcgaattggagctccccgcggtggcggccgggcgcgggggttaacgcctgtaatcccagcactttgggaggccaaggtgggaggatcacgaggtcaggagatcgagaccatcctggctaacacggtgaaaccccgtctctattaaaaatacaaaaaaaaaatttgcctggcgtggtggtgggcgcctgtagtcccagctactcgggaggctgaggcaggagaatggcgtgaacctgggaggcggggctagcagtgagctgagattgcgccaccgcactccagtctgggggacagagcgagactccgtctcaaaaacagacaaacaaataaacaaacaaaaattcctaaaatatcctatattgcacagggcagcccctccgaccccaacaaattatgtgctctaaaatgtcaacaagtctgaggctgagaaaccttgctccaggggaacacgggggcatggtagagacaagaacaagctattaggagagagagcatgcactcaccatgaccagtaggctgtctcaggtggaaagtaaggtcttagagaatgaagacagtatgggaggaagatgatggggctgangaaggcaagtgggagatctggctgtgactcctggttcaagggatccctctttagtagatccccaaatcaaatgctggtgtggtcaacttaatgttccagcttaacccagtttgcccttatgagaaccatgccaaagtccnaatgangcccaccatcctcangtgggaagtcggggtacangcttgccttcttggtaaatgcttgctggnncctngactttacttccattgggnccaatttnagcgnccaccccttttnttttactggcaaaaacntggntttctttggcctggangattctcttngctggcccaanatattt

SEQ ID NO: 6161 - DNA, 918 bp, Homo sapiens
  misc_feature 547, 573, 653, 660, 677, 708, 722, 734, 755, 766, 826, 839,863, 868, 873, 878, 882, 909, 910: n = A,T,C or G
tactatagggcgaattggagctccaccgcggtggcggcccgaggtacacttggaggaaggccaagcaggcgacttgaaagataagtgccccattgaccttttacttagagttttatatgttggcttacttctgggttcctacaacccttctctgattcttcccttgtggttggctgtccatgtgtgtgcagtggcctgctagtccttgggaggtgagcatgtgcagtgtgtttactggagttgtacctgcccgggcggccgctctagaactagtggatcccccgggctgcaggaattcgatatcaagcttatcgataccgtcgacctcgagggggggcccggtacccagcttttgttccctttagtgagggttaattgcgcgcttggcgtaatcatggtcatagctgtttcctgtgtgaaattgttatccgctcacaattccacacaacatacgagccgggagcataaagtgtaaagcctgggggtgcctaatgagtgagctaactcacattaattgcgttgcgctcactggccgctttccaagtcnggaaacctgtcgtgccagctgcattnatgaatcggccaaccccgcggggagaggcggtttgcgtattgggcgcctcttccgctttctcgcttcacttgactcctgngctcggnccgttccggctggcggngagccgggattaacctcacttaaaaggcggnaataccggttattncacaaaaatcanggggataaccgccaggaaaanaacatgtgagncaaaaaggcccgcaaaaggccaggaacccgtaaaaaagggccggttgctggggttttttncataagggtccgncccccggccgagcattaaaaaaantcganctcanataanaggngggaaacccccgggctttaaaaaaccnngcgtttcc

SEQ ID NO: 6162 - DNA, 984 bp, Homo sapiens
  misc_feature 1, 2, 5, 174, 178, 190, 203, 205, 208, 219, 237, 245, 247,248, 255, 261, 262, 264, 270, 287, 307, 311, 333, 335, 360,362, 364, 365, 368, 392, 395, 397, 419, 420, 421, 424, 429,430, 439, 455, 456, 462, 467, 486, 490, 495, 496, 502: n = A,T,C or G
  misc_feature 503, 504, 507, 511, 513, 519, 520, 521, 523, 529, 531, 532,536, 540, 553, 554, 558, 560, 562, 563, 568, 569, 570, 571,577, 590, 603, 614, 623, 628, 630, 642, 644, 658, 663, 664,666, 670, 671, 674, 676, 679, 686, 696, 697, 698, 699: n = A,T,C or G
  misc_feature 707, 709, 713, 719, 729, 730, 734, 737, 740, 741, 742, 744,747, 762, 765, 775, 777, 789, 790, 792, 794, 795, 796, 797,799, 800, 801, 805, 806, 812, 813, 814, 815, 818, 819, 820,821, 825, 826, 827, 828, 829, 834, 836, 840, 841, 842: n = A,T,C or G
  misc_feature 845, 850, 852, 855, 856, 858, 861, 863, 868, 875, 876, 877,878, 883, 887, 891, 896, 899, 902, 903, 909, 916, 919, 922,924, 929, 930, 931, 933, 938, 939, 940, 941, 946, 947, 948,949, 951, 954, 957, 958, 961, 963, 969, 972, 974, 980: n = A,T,C or G
  misc_feature 983: n = A,T,C or G
nngcnctactatagggcgaattggagctccccgcggtggcggccgaggtacgcgggaagataaaatttgaaatctggttaggctggtgttagggttctttgtttttggggtttggcagagatgtgtttaagtgctgtggccagaagcgggggggggggtttggtgaaaattttntgtnatgatgtctgtntggaaagcgccantncanacatacaattncaacatcccccgcaaacncgcatgcntnnacacacncacttnnancccatntctcctcccatatcacnaacactgcgctctaaaactnatgnatccccctgctgcaagaatttnanttcaaacttatcatccctcctcctntnannggngccccgtacccatcttttcttccnttnantgaagctcaaatttcctctctnnnccntaatnnatggtcccngccccttttcctccgnnaaaaanaccanttccctcccccctcccacncaanatttnnatcccnnnctncatnanatcccnnncnccatgntnntctnaccncgtacctaacttnnaatncntnnagttnnnncattantcaccccttctanattacaaaaaatnttattttttcnttttcattnaaaancntctccccccccncncctttccccctcancctanngntttnngancnctnttacctntaattccttnnnntccttatntntctnacctanctatatcacnncctncanatnnncnacnttttccctattttancantattttaaantnctttttttcccnnantnnnntnnntatnnttctcnnnnaannnncccnnnnnatttntntacnnntcnttatntnccnncnctncncttcnatttctnnnncttantttntccntctcncantannttactncttcccncantcntngattnnntntaccnnnntcccnnnntntcnatnntancnctcacnacntngttatnttng

SEQ ID NO: 6163 - DNA, 908 bp, Homo sapiens
  misc_feature 1, 2, 8, 670, 678, 703, 715, 717, 725, 742, 745, 755, 778,786, 811, 815, 818, 823, 824, 832, 851, 871, 874, 892, 896,906: n = A,T,C or G
nnatatcnctcactatagggcgaattggagctccccgcggtggcggccggcccatggaggctgatggggcccggcgagcagatgagaccgctactcacccggggtcctgatgaagaagctgttgtggatcttggcaaaactagctcaactgtgaacaccaagtttgaaaaagaagaactagaaagtcatagagctgtatatattggtgttcacgtcccgtttagtaaagagagtcgccggcgtcataggcatcgcggacacaaacatcaccaccgaaaaaaaaaaaaaaaaaaaaaaaaaggtcctcggccgctctagaactagtggatcccccgggctgcaggaattcgatatcaagcttatcgataccgtcgacctcgagggggggcccggtacccagcttttgttccctttagtgagggttaattgcgcgcttggcgtaatcatggtcatagctgtttcctgtgtgaaattgttatccgctcacaattccacacaacatacgagccgggagcataaagtgtaaagcctggggtgcctaatgagtgagctaactcacattaattgcgttgcgctcactgcccgctttccaatcgggaaacctgtcgtgccaactgcattaatgaatcggccaaccccccgggagaggcggtttgcgtattgggcgctnttcccttnctcgttcattactcgcttggctcgncgttcggctgcngngagcggtntaacttactcaaaggcnggnattccgggtnttcacaaaattagggggttaccnccggaaanaacttgtgagcaaaggcccccaaanggcnggnacccnnaaaggccnggtggtggggtttttcatngggtcccccccctgcaagcntcnaaaattgacctcaagtanaggngggaaacccnct

SEQ ID NO: 6164 - DNA, 924 bp, Homo sapiens
  misc_feature 2, 3, 5, 9, 12, 19, 21, 30, 32, 42, 45, 59, 638, 678, 699,724, 753, 791, 825, 827, 840, 864, 872, 875, 897, 904, 914: n = A,T,C or G
tnntncgcnctncttacgncnactgtagcncnaattggagcnccncccgcggtggcggncgaggtacatataaacacccctcacatgctagactaactgctgaactgcccatgcacaggggaagtgccacagattccagcagagatttcagtagctgcctgctgtgggagagagggaatttggaggtggagtcttgtcaagttagaggcgattcgataaacaccttggactttgctttgaaatcccagaagggctaccccttaggggcaaatactactccccagggctatggcattttccctaggactaagggcaaaacaaaaataaagcataaaattgtgcctacaccagatctacaggtgatttaactgtctactagaaaaaactgaattctgcagaagaaaacagaatccagagcctctacaaactatcaccttcaacatccagtataaaattaaaaaactactagatgtgagaagaaacaggaccctgtgacccttactgaaatgaaaactcagttaatagaaacaaattcacaggtgaacagtaactttaactatgaacaaatatgttaaaagaatttacatgaaaaaaatgggtgaaagggtaaagaggtgaggagttgcagtggagataangaagttgtgaaaaagaaccaaatgtaaatcttagaactgnaaaacacaaaacctgacctgnaatttcctgggtgagagaccaacanattgggcatacagaaggaagcatcagtgnacctgaagacaggtaaacagaaatcatccaactgagtntggagagggaaaaaagctggaattaaaaaagggncngagccctaatggnctgcaggacaaaaataagcttgtntaacatanggnggcagcaatacctgcccggggnggccgtnttaaactagnggatcccccg

SEQ ID NO: 6165 - DNA, 923 bp, Homo sapiens
  misc_feature 1, 2, 18, 31, 111, 135, 142, 154, 165, 170, 193, 218, 228,235, 245, 295, 319, 328, 351, 354, 418, 433, 490, 513, 541,543, 572, 582, 606, 618, 625, 630, 670, 673, 675, 684, 686,727, 746, 750, 755, 761, 774, 783, 784, 802, 804, 809: n = A,T,C or G
  misc_feature 833, 863, 891, 905, 912, 918: n = A,T,C or G
nnatatgcactccttatnccactcactatanggcgaattggagctccaccgcggtggcggccgcccgggcaggtactgctattataacaagtaatattttccagactggtntgagacagtcacccgtgaattcangtatttnatcatctatcancctttaaaatntttgntttgttactctaaaaaaaagttntattttggaggagaaaggtaaaatntttccagttnggtgttncacacatggntggttatactaagtaaagatcatcaattcaatatttgacatgtatattanccctgtaaatacctcatgtcccanatactaagncagacttccacctaagcctacangangacgcaaattctcaggattttcacactagattatttagaaaacaaacaaagatctgaattattntataatctagtgctnaagattctaaaagccgaaataacctctgcacatgcagaaaaagctggcttcatcaanagtctgcctggcacattaggacngaccctgtgccaattgctcaagcgggtnanacctggccatcctcctcaccagcttgggngagctggtangtttccttacctgagcttccagtnacgctgtggggnaatcttnagaangggttcccaaccattcttaatatccaaaccaataggcatnggntntttcccttngnaaaagaattaatttccattgagtctaagggggaaaaaaaantttttttttacaaaacatntggnttttncaaatnaaaagtttggganaacgggggnnttttcggcaatccttttnantgtgngctttttaagaagggtatttgggnattttacccggaccttcggccctttttaanctaggggttccccggcttgaagaattgnaaacaaactttcgnatccctnaacttnggggg

SEQ ID NO: 6166 - DNA, 916 bp, Homo sapiens
  misc_feature 485, 502, 559, 587, 588, 609, 619, 629, 632, 653, 655, 661,673, 675, 678, 682, 686, 695, 702, 719, 752, 756, 757, 758,772, 783, 785, 800, 808, 809, 822, 823, 825, 831, 833, 835,847, 860, 861, 863, 875, 887, 889, 894, 915: n = A,T,C or G
cgaattggagctccaccgcggtggcggccgaggtactcaacattggacttttctactcccaaagccagaccacactcccatagcatggtgctctgtagaagacaggcagtttaaaaaagacttcagaggccgggcacagtggctcactcctataatcccagcactttgggaggtgcggccatgacaggcttttgtctgccctgtgcctcagctcactcctcactctgttacccaggctggagtgcagtggcaccatctcggctcaccgcaacctccgcttccccggttcaagcgatgctcctgccttagtctcccaagcagctgggactacaggtgcccaccaccacgcctggctaatttttgttttttagtagacggggtttcaccacgttggccaggctggcctcgaactcctgagcgacagagtgagactttgtccgaaaaaaaaaaaaagtttaaacaggcaaaaaataaactatggcggngggggtgccgggtggtnagaaaaagttaaaggggcttgaaaagaaaactttccagggggtgataaaaggggtgnttgggttacattgagtatatttaccttnnccaaaaccacttcaaaactgngatattttanggcttaactnttntggctgggatattaaatttcnanggtttnaaaattcacaangnttntttntctntttaacttncttccancctcttgaccaaaaatntaaggaagtttaatgggtataagggggaaaacncctnnnttcttgaaaggggnggatcttgaantntaccctttttttttnccttttanntcttttaccttgnncnaggaantnanacttttttcccnttttttccatctnnangaatgggaagantcttttaagggntnttcanaaaatggccccaattttaaang

SEQ ID NO: 6167 - DNA, 877 bp, Homo sapiens
  misc_feature 3, 4, 7, 9, 470, 529, 575, 582, 587, 594, 631, 642, 643,645, 665, 677, 685, 688, 704, 707, 722, 729, 758, 768, 769,775, 785, 800, 802, 807, 818, 821, 822, 839, 844, 849, 854,860, 863, 871, 874: n = A,T,C or G
tgnnccntntacgactcactatagggcgaattggagctccccgcggtggcggccgaggtactgggaatgggaagttttctgaataagggtaacatggggcagaatttgtctattgaggtgcaacattatgtgcatttgcttaaagttttacttaaacaaactggtgctcaggttagttctcaaacattaattaagatgctgaagaaggtcactatacataacccgtggtttccacagacaggcagtcttgatgtagaaatttgggacagagtaggaccaggattaaaacgggctcaccaaaaaggtcttaaatttgatctttttgtttttttctgcttggagtttagtccgtgctgtcctcctgccattatcttcttcttattctgctagacagcaggaatcatattccaagtctaaaaatctgaaaaaatattttgtcccacccacagtacctgcccgggcggccgctntagaactagtggatcccccgggctgcaggaattcgatatcaagcttatcgatcccgtcnacctcgagggggggccccggtcccaactttttgttccctttaagtnagggttnaattngcgcgcnttggcggaaatcattggtcaatagctggtttccctgngtgaaaattgnntntcccgctcacaattcccacncaaacataccancccgggtngcnttaaaagtgttaaagnccnggggttggcctaaanaggtgangcttaaacttcaccttttaattggggttngggcttcacnngcccgncttttcagancggaaaaacttttcntncccanttgaatttaanganncctgccaacccccgggnagaangcggnttgcnaattgncgncttttccnttnccc

SEQ ID NO: 6168 - DNA, 871 bp, Homo sapiens
  misc_feature 425, 426, 474, 477, 478, 479, 487, 488, 489, 490, 495, 522,534, 547, 562, 563, 584, 588, 590, 596, 598, 610, 612, 614,617, 619, 639, 640, 643, 647, 657, 659, 670, 672, 681, 683,684, 690, 698, 700, 707, 709, 722, 723, 734, 745, 753: n = A,T,C or G
  misc_feature 754, 760, 764, 779, 784, 788, 789, 801, 803, 805, 812, 830,843, 853, 856, 857, 858, 865: n = A,T,C or G
tcctatagggcgaattggagctccccgcggtggcggccgaggtacgttaagcaagatttttgaagccattgcactgcttccctggcttcttctggtcctaactcctgaggctctcctctctcttctggttaaagacccctggatggcttcagagcaacagaaatctcggctcctggttgaagaggtgaagaaaagcccccgcgtacgagaagaaattaaatgtgacttcgaatttaaagcaaaacaccgaattgctcataaaccgcattccaaaccaaaaacttcagatatttttgaagcagatattgcaaatgatgtgaaatccaaggatttgctagctgataaagaactgtgggctcgacttgaaagaactagaaagacagggaagaattgctgggtgaacttggatagtaagcctgatactnngattgcaaatggagaaagatacgacatcttctggaagagggaaaaganttnnntttaatannnnaagtnccctgccccgggccggccggttctaanaacctagggggntcccccgggcctngaagggaattcgatnntcaaagccttattcgataccngtcnanccttcnanggggggggcccngntnccnanccttttgggtcccctttaannggngggnttaattggcncnccttgggcctnantcattgggnannagcttntttcctgngnggaaaantngttatcccccttnnaatttccccanaaacattcaanaccggggnnccttanaagngtaaaagccctgggntgccntatnngggggggcccancncncttttantggggttgggcccactgnccccttttccagngggaaaaacnttnnnggccacntgtttt

SEQ ID NO: 6169 - DNA, 911 bp, Homo sapiens
  misc_feature 1, 2, 3, 4, 663, 716, 730, 737, 765, 778, 786, 795, 806,808, 859, 872, 896, 900: n = A,T,C or G
nnnnacgcactactatagggcgaattggagctccccgcggtggcggccgaggtacatcattttgaggggaacatatatccccccggggaagtttcccagtgggatggaaattcgctgccaccggtatgggtggatgactgaagacttgatgcaggactggttggaagtggtgtggagacggaggacaggagcagtgcccaagcagcgagggatgctgatcttgaatggcttccggggccatgccacagattccgtgaagaactccatggaaagcatgaacactgacatggtgatcatcccagggggtctgacctcacagcttcaggtgctggatgtcgtggtctacaagccactgaatgacagtgtgcggcccagtacctgcccgggcggccgctctagaactagtggatcccccgggctgcaggaattcgatatcaagcttatcgataccgtcgacctcgagggggggcccggtacccagcttttgttccctttagtgagggttaattgcgcgcttggcgtaatcatggtcatagctgtttcctgtgtgaaattgttatccgctcacaattcacacaacatacgaaccgggagcataaagtgtaaagcctggggtgcctaatgagtgagctaactcacattaattgcgttgcgctcacttgncccttttcaatcgggaaacctttctgccagctgcattaatgaatcggccaacnccccgggagaggcngtttgcntattgggccctttttcgctttcttgttnattaactcctgcnctcggtcnttcggttgnggcgagcggtntnagcttactcaaaggcgggaatccggttttcacaaaatcaggggattacccnggaaaaacatttnaccaaaagcccccaaaaggcccgnaccntaaaaaggcct

SEQ ID NO: 6170 - DNA, 851 bp, Homo sapiens
  misc_feature 584, 586, 598, 600, 614, 642, 654, 658, 666, 669, 692, 697,706, 707, 708, 709, 711, 719, 721, 723, 724, 728, 735, 736,737, 740, 743, 756, 758, 761, 779, 785, 786, 787, 789, 793,801, 804, 812, 813, 815, 824, 826, 829, 830, 831, 836: n = A,T,C or G
  misc_feature 838, 839, 845: n = A,T,C or G
ggcgccgtatcgactcactatagggcgaattggagctccccgcggtggcggccgaggtactttgtttcgttttggttttagttttgcatttagagtgccttataattgatgcctattttaatagcatttctttttagcttttggttcgtatttccattcactgttcgtatctgttactttctattaaagcattatctgtttaccacatgtacaatgacagtaacagccgcgtggtgctgccaggactgcccttgggcatatcagtgacagcccaaatgtgggtggaggaaacctgtaatttccttcttaacatgtgtttgaaataccaagtgaataatactgttctggaaaaaaatgataaactagtggaaattaaagaaattaagggttttatataatagacaggccccacctctcaaaatatttttagaagtctttttgtaaactaatttcttttgatcactattttgcatcagtaaaatgatttttttaaaaccaataaatcatcaattattagaaaaaaaaaaaaaaaaagtacctgccccgggccggccctctagaactagtggatccccccgggctgnanggaattccgatntnaagcttttttgatnccgggggccctctaagggggggcccggnccccagcttttnggtncctttagnggngggttaatttgggccccttgggntaaanaggggggcnnnncngcccccgngntnnaaantgttatnnnggnganaatttcccccaanantcnaacccgggggcaaaaagntttaannncngggnggcctaanggngtgaactnncncccatttantnggnnngggcnannggcccnttttcc

SEQ ID NO: 6171 - DNA, 879 bp, Homo sapiens
  misc_feature 1, 640, 727, 730, 743, 783, 798, 800, 807, 818, 823, 830,834, 840, 842, 844, 861, 866: n = A,T,C or G
ngcgcactactatagggcgaattggagctccccgcggtggcggcccgcccgggcaggtaccactctttaccaaactgctaaaggaatcgaaaccttctccagaggtcaaatggtcaggaattcgagtaaggcacactctcaaatccttagtaaggccaaatatctttttaaattcagcatcactcttcagatgtaatgccttattactccttccttgagaatctttcttgtcatttcttccttgggcacctttatctgatgttgatgccatctcattatggatctttggttcttggtctctaaaaacacactgttgtgaagtaacagttgttgcatcaacagaggaacttattttctctatgctctggaggacacttccttttctagcataaatgacggctgttacttttctgggggcattgtgtcctgtacctcggccgctctagaactagtggatcccccgggctgcaggaattcgatatcaagcttatcgataccgtcgacctcgagggggggcccggtacccagcttttgttccctttagtgagggttaattgcgcgcctggcgtaatcatggtcatagcttgtttcctgggtgaaattggtatcccgctcacaattccacacaacatacgagccnggagcataaaatgtaaaagcctgggggtgcctaatgaggtgagcttactcacattaattgcgttgcgcctcactggccggttttcantcngggaaacctgtcntggccaacttgcattaatgaatcggccaaccccccggggngaggcgggttgcttntnggcgctnttccgttcctngttantgacttnctgncctcgncntncggttggggggagcggnttagntcactcaaagcgg

SEQ ID NO: 6172 - DNA, 862 bp, Homo sapiens
  misc_feature 1, 4, 5, 6, 7, 9, 10, 11, 12, 13, 469, 512, 541, 557, 577,579, 586, 604, 606, 611, 629, 630, 644, 684, 686, 692, 704,709, 711, 715, 717, 747, 759, 774, 775, 781, 791, 795, 808,810, 832, 834, 842: n = A,T,C or G
ntgnnnntnnnnncgtaatacgactactatagggcgaattggagctcaccgcggtggcggcccgaggtacgcgggggagagcgcggttaccctggcaatattggtcccgttggtgctgcaggtgcacctggtcctcatggccccgcgggtcctgctggcaaacatggaaaccgtggtgaaactggtccttctggtcctgttggtcctgctggtgctgttggcccaagaggtcctagtggcccacaaggcattcgtggcgataagggagagcccggtgaaaaggggcccagaggtcttcctggcttaaagggacacaatggattgcaaggtctgcctggtatcgctggtcaccatggtgatcaaggtgctcctggctccgtgggtcctgctggtcctaggggccctgttggtccttctggccctgctggaaaagatggtcgcactggacattctggtacctgcccgggcnggccgcttctagaactagtggatcccccggcttcaagaattcnatttaaacttattgatcccgtccaacttnaagggggggcccggtnccaactttttgttcctttantnaagggtnaattgcccccttggcgtnantaatnggcataacttttttcctnnggtgaaaattttantcccgttcaaaatttcccaaaaacaataccaaacccggancnttaaantgtaaaaacccnggggngncctnantaagtggaacttaactcaaatttatttggngttggggcctanttgcccctttttcanntcgggnaaaacttttntgcnacttgatttattnanttggccaaacccccgggaaaangngggttttntatttggggccctttcccct

SEQ ID NO: 6173 - DNA, 882 bp, Homo sapiens
  misc_feature 3, 4, 5, 6, 7, 8, 9, 10, 410, 506, 574, 586, 589, 597, 650,653, 675, 684, 706, 710, 737, 739, 741, 759, 776, 821, 822,824, 834, 842, 843, 854, 863, 881: n = A,T,C or G
gtnnnnnnnncgcgcgtaatacgactactataggggcgaattggagctccccgcggtggcggcccgaggtactggattcacagaagcatagagtttccaatataacacattctgctaagtcagaaacaactatgttttattttattttattttttattttggagacagggtcttgctctgccacacaggctggagtgcagtgacatgatcatggctcactgcaaccccgaacttccaggctcaaccaatcctctcacctcaacctcctgagctgccgggaccacaggcctgcatcaccatgcacacccaattttttttttaattttttgtaaagacatggtttccgttatgttgcccgggctggtctcaaactcctaggctcaagcaatctccctgcctcggcctcccanagagttgggatcacaaacatgagccccagagccagccatgccagaaataatgataaaagttgtccagcatgtttgcttatatttcagaaccattangcacctattctattgggcggatctggtggtttaacatacccgactggtaccctttttcatacacaggntttttattgacnttntaaaagtnaggaaccttgaaccatttcaacccaaagttcagttttccaaggaaagaaagcnatnttaatggtctttaaaataaagnctaattctnggatattcaaggcccttttganaaanaaatgggccaaggacatttcaataatntncntagttattcaatttaccncttacccttgggccaanaaaataataaattccttataaaacctgtttcccttttttccactnnanaaaaggtaanaattcctnngggattgttgnacctggccnggggggcggttttaaaant

SEQ ID NO: 6174 - DNA, 916 bp, Homo sapiens
  misc_feature 20, 22, 24, 359, 366, 385, 464, 466, 482, 529, 537, 539,552, 553, 554, 559, 576, 578, 581, 615, 635, 651, 654, 682,699, 701, 717, 723, 725, 726, 731, 735, 770, 777, 782, 786,797, 803, 804, 808, 809, 851, 852, 866, 881, 886, 888: n = A,T,C or G
  misc_feature 898, 900, 901, 902, 903, 907, 908, 912, 915: n = A,T,C or G
atcactactatagggcgaangntnactatagggcgaattggagctccaccgcggtggcggcccgaggtacgctaggtaatcttagttccttagtaagattaactccttgttacctctcatgtctgttgagcaccaaattgtaaaggcagctacaaatcccagactttcctaaccaaaaactggcttcaccacctgctactccttctagaaattggagaagacatcgtatttacatagggtggaccccaatacattgcgacatgatgctgcactggccatcatcgaagtgatcatgaatgaatcctcaccattctcaattcaggagtcaagacccaaacagaatgatctggttaacaaangcaaggncacaaggactgagccccancttgccaagaggcctgaaactttcatttctcttcttaacttttgacttggagacaaggtacctggcccgggccggccgntntagaactaggtggatncccccggcttgcaggaattcgatattaaagccttattcgatacccgncgacctcnangggggggccccgnnncccancttttggttccctttangnganggggtaaattgcgccccttggggggaaatcaatngggcataggtgggttcctgnggggaaaatggtattncgnttacaaattccccaacaaaaataccaancccgggagccttaaaangntaaaagcccggggggncctaangnnggggncctnacctccaattaatttgggtggggcctaacttggcncgttttnaaaangggnaaaactttttnggcccnntggnntaaatgaaatgggccaaacccccggggaggagggggtttggnnattgggggcttttnccttttttgttaaangaaancnttgcttgggngnnnngggnngggnaang

SEQ ID NO: 6175 - DNA, 887 bp, Homo sapiens
  misc_feature 5, 9, 12, 481, 522, 545, 592, 603, 605, 641, 651, 677, 682,700, 702, 713, 728, 729, 731, 737, 741, 748, 758, 776, 777,797, 812, 829, 833, 839, 840, 844, 857, 866, 868, 870, 871,881: n = A,T,C or G
acgcnctantcncgcgtatacgactcactataggggcgaattggagctccacccgcggtggcggcccgcccgggcaggtacgcggggagtgaaggtctgctggagcagagaaactgacactgacaagaagaacgagaatgagaaaccctgcgacgagtctgctgacagctgatataagtctgcaaaatcagctggaccaccaaacggcaattgagagctgcacaacctgcaattacctttattcaattaatgcaaaaacaaaaatggggagatgttacaggccgaaagaatgaaggtcgtgaccaactcagtataccactgaaggctatatgagcaaacagaaaactgttctcatgaaagcaggatgttggaaaactaacaactgtgtctgccgccagaagggttgctgagggcagtcatgccccaagcgcagtgttccttgtgattatctatagtaacatctgaagcctgttgtacctcngccgctctagaactagtggatcccccgggctgcaggaattngatatcaagcttatcgataccgncgcctcgagggggggcccggtacccaacttttgttccctttagtgangggtaattggncncttgggcgtaatcatggggcataagctgtttcctgngggaaaattngttttcccttacaattcccacaacantaccnaaccgggagcaataaagntnaagcctggggngcctaatggggtganncnacctcnaatnaaattgngttgggcctnactggccctttttcaaanngggaaaacttttcgggccantttatttaattaatnggccaacccccgggganaggnggtttnntttnggccctttttccntttcttgtnantnnacttgttggntttggg

SEQ ID NO: 6176 - DNA, 930 bp, Homo sapiens
  misc_feature 13, 28, 160, 174, 214, 305, 314, 332, 354, 376, 442, 443,447, 451, 463, 464, 466, 505, 506, 507, 513, 518, 520, 526,528, 531, 541, 543, 545, 553, 554, 580, 582, 591, 600, 604,609, 616, 637, 638, 639, 643, 648, 663, 666, 672, 675: n = A,T,C or G
  misc_feature 677, 679, 684, 697, 701, 709, 728, 729, 733, 743, 745, 759,761, 764, 768, 769, 776, 777, 786, 792, 800, 817, 823, 825,832, 833, 835, 837, 853, 857, 865, 867, 876, 877, 880, 881,882, 884, 885, 886, 887, 896, 897, 900, 905, 920, 922: n = A,T,C or G
  misc_feature 926: n = A,T,C or G
acgcgactactangcgcgtatacgactnctatagggcgaattggagctcccccgcggtggcggcccgcccgggcaggtacgcgggcaggctcaaaataaaggaatggagaaaaatatttcaagcaaatggaaaacagaaaaaaggtgttgcactcccagnttctgacaaaacanactctaccaataaagataaaaaaagagaaggacattacanaggtggtcctgacctttgataaatctcattattgcttgataccaacctgggctatttgtattgcccaaacgaataggataattttgctgangttgtggancttctcccttcacagagnccctgatctccgaaaatttggntgagatgtaaggttgattttgntgtacctcggcccgctctaagaactagtggatcccccgggctgcatgaattctatattcaagcttnntccnatanccgttgaccttnnangggggggccgggtgaccaagcttttgggtcctttaagtnnnggggtnaattncncccttngncgnaattaatggncnanagcttgtnncttgtgtggaaaatggttttcccttncnaaatttccncataaccantttnagccnggaaacnataaaagttaaaacccggggnnngccntaatngagtggggctttacnttnatttanttngngnttggncttaattggcccntttntcaaatgngggaaaactttttttgcanntttntttattaatncngcaaccccccgggngnagngggnntaatggnntttgggcgnttatcncttttttnatttacatgacctcganaccttngnttaaatnntngngccatgggttataatntttnataaaagngngagattccnnttnnncnnnnaattggggnnttncctangagaaaatatttgtnancaanagct

SEQ ID NO: 6177 - DNA, 911 bp, Homo sapiens
  misc_feature 587, 601, 622, 639, 645, 660, 678, 691, 694, 730, 753, 781,788, 815, 820, 849, 871, 872, 894, 898, 911: n = A,T,C or G
tggccctaatacgactcactatagggcgaattggagctccaccgcggtggcggcccgaggtacatgacaaaacaggccttttaatttacatcctcctttaattctcattaaaatcgcagggtttttgtttgaaagacagtcctttttttatttattttgaaaaaggaatgagttagggacccctttataactctcttggctcagactcgaaccccatggtaaagtcaccctttccgcatctatcttcaggagttgctgggacttgttactgtgtagctgcgtggggattctggtctgctcttggaccactggctggtatcctttgtgcgtttcttaagcagctcaaagatagaatgttgctggtctgctatgggttagtggagcataactcagccccaactggactccacgggtggctgaaccattagtaagttgctaggggtacctgcccgggccggccgctctaagaactaagtggatccccccgggctgcaagggaattccaatatcaaagcttatcggatacccgtcggaccctcgaaggggggggccccggtacccaaccttttggttcccttttagtggangggttaaattggcnccccttggccgtaaatcaatngggccataagctggttncctggngtgaaaattggttantccggttcacaaattccncaccaacattacnaancccggggacccttaaaggggtaaaagccctgggggngccctaattgagggggagcctanctcccaattaattggcggttgggcctcnctgcccnctttttccagtccgggaaaacctgtcnggccnccttgcatttaatgaattcggcccaaccncccggggaaaaggcgggtttgnnttatttggggccccttttccgnttcnttggttaactgan

SEQ ID NO: 6178 - DNA, 914 bp, Homo sapiens
  misc_feature 5, 433, 465, 469, 476, 505, 512, 523, 528, 532, 611, 625,653, 665, 673, 677, 682, 685, 694, 702, 723, 728, 732, 733,740, 751, 755, 763, 766, 781, 790, 793, 805, 810, 821, 826,831, 838, 839, 892, 895, 896: n = A,T,C or G
tatgncgctaatcgactcactatagggcgaattggagctccccgcggtggcggccgcccgggcaggtactctctctctctctctcacacacacacacacacacacacacacacacacacacacccaccaaacaacagtgtatccacaaatgaatgaatgaaagttttacttataacttcactgaaacacagcttttgcttattctagtttaggaaccatgagtgatattttgggaaaccttttatggatttaagaaatgatccctggctgggcgcggtggctcacgcctgtaatcccagcactttgggaggccaaggtgggtggatcaccgaggtcgggagatcgagaccatttctggctaacacggtgaaaccccgtctctttaaaaatgcaaaaaattaccagacatggtggggggcacctgtagtcccangctactttgggaaggttaaagcaagacaatgncgtnaaccccngggaaggcggagcctttgcagtgagcccnaaattancaaccacttgnacttncagnccttgggtggaaaagaaccgaagacttccccccccaaaaaaaaaaaaaaaaaaaaaaaaggtcctttgggccgttttanaaattagtgggatnccccgggctggaaggaatttcgattttnaagcttatttgnatacccgncaanccttnganggggggggncccggggnccccaacctttttgtttcccntttantggnnggggttnaatttgggccncctngggggaanaantggggcataagcccngtttcctcnggnggaaaattggtnttccncttaaaaattncccanaaaanataaaanncccgggggcctaaaaaggggaaaacccgggggggccttaattgggggggcccnctnnactttaattgggggggcg

SEQ ID NO: 6179 - DNA, 984 bp, Homo sapiens
  misc_feature 13, 20, 28, 33, 41, 80, 99, 108, 165, 176, 182, 192, 236,252, 257, 262, 267, 270, 325, 339, 341, 345, 360, 377, 383,387, 391, 392, 395, 396, 410, 414, 417, 419, 421, 435, 438,450, 456, 457, 461, 471, 475, 479, 488, 490, 491, 494: n = A,T,C or G
  misc_feature 497, 520, 524, 526, 536, 543, 547, 560, 563, 565, 572, 574,577, 583, 593, 600, 602, 607, 624, 627, 630, 638, 646, 647,660, 672, 676, 698, 705, 721, 724, 731, 736, 742, 745, 747,757, 758, 761, 767, 772, 773, 783, 787, 794, 801, 804: n = A,T,C or G
  misc_feature 805, 806, 813, 820, 822, 824, 830, 833, 840, 848, 852, 855,860, 872, 885, 889, 891, 895, 897, 901, 917, 920, 922, 927,929, 933, 940, 941, 951, 952, 956, 963, 967, 976: n = A,T,C or G
cgcactactatangcgtatncgactcantatanggcgaatnggagctccaccgcggtggcggcccgaggtacactgaacnacagcacagagaagtccanatgccgaangacaagaggggccaggccaggccgtgaaaagctttgtgcgctgaggtcagatttggncttgacactgnagacanaagaaatgtnctgtacctgcccgggcggcccgatctagaactagtggatccccngggctgcatgaattcnatatnaagtntattnatnccgtcgacctccagggggggcccggtcccagcttttgttccctttaatgagggtnatagcacgcttggntnaaancattgtcatagattngttcttgtttgaaattngtattngctnacannttnncaacaacattacgnggcnggntngnataaagtggtaaangcntgggtgtgcctnaatganntganccttacctancaantaanattgtgatnannttnttngcctcctttttccaagacctgtnaaancntgtgtttgancccaagntgtnatataattataanttntncaaactncnggngaaagntgtttttctntattggngnttttnttcgttttacttgtttnaantanaatagatntgatctgnntagatttgagttnttagagatgtgngttntatttatattaaaaggggggtnttatatnttatttctcctatatnttngggtggnttacntgtggnganangatcataatnngantatatntgccnncttcatatgngctnataacancttaatnaannngggcggngtggacngngnatattnttnatattanggtggttntgcnccntgttntgtggtgatttnataaaaaattcgntctntngaantnatgnggttgttgataatacnttntngtggntntttnaaaagannatgtgttgtnntatntgagatnatangggtgattnctgtgtgg

SEQ ID NO: 6180 - DNA, 941 bp, Homo sapiens
  misc_feature 1, 15, 19, 30, 31, 44, 257, 263, 297, 403, 438, 447, 451,458, 463, 472, 488, 490, 494, 497, 504, 506, 511, 513, 522,528, 592, 597, 598, 603, 620, 626, 636, 640, 646, 668, 675,681, 685, 686, 691, 692, 693, 702, 703, 712, 720, 728: n = A,T,C or G
  misc_feature 744, 747, 748, 752, 753, 754, 757, 760, 766, 768, 774, 781,782, 784, 786, 793, 796, 798, 806, 807, 816, 819, 828, 832,838, 839, 850, 853, 856, 859, 865, 866, 887, 891, 893, 900,903, 905, 911, 912, 913, 914, 920, 923, 928, 929: n = A,T,C or G
ngcgcactactatangcgngattcgactgnntatacggcgaatnggagctccaccgcggtggcggcccgagggtacaacagataagtcctcacaaactgttcccagccctaggctgacaggagagacgaacaggctgtccacctttcttctccatccaatgggatggatccatgttcattcccacttcacaccttggtcctgctgattagagagctcatcagaggggcctggaaaggctgagcaagtacctgccccnggcggncgctctagaactagtggatcccccgggctgcagngaattcgatatcaagcttatcgataccgtccgacctcaagggggggcccggtacccagcttttgttcctttaagtgagggttaattgcgccgcttgggccgtaatnatgggtcataagcttgttttcttgtgtgaaaaatngtttttcgnttcncaatttncacancaacataanaacccggggggcttanangggnaangcctggngngcccnantgggggacntaactnaacaattaaattgggggttggggctccttggcccgtttttcagggtcggaaaaacttgttgggnccacnntttgnatataattgaatcggcnaaaccnccgggggaangggngggttnggaatattgggggcctttttcngttttcntgattnaatnnattcnnntgcctttgnngctttaggntctggggnaagggganttaaatttaattaaanggnngttnnntanggntttttncnaaaaantgggggnnancnccggggnaananattttggnncaaaatggnccntaaaaaggngtanaaaccnnaaaaagggctnatnttnggngttttnntaaagggtacccccctttggnggantnttaaaantcntnttttannnnaggggnggnaaccnncggggatttaat

SEQ ID NO: 6181 - DNA, 873 bp, Homo sapiens
  misc_feature 3, 8, 14, 16, 103, 107, 317, 382, 387, 390, 455, 470, 472,526, 547, 610, 625, 635, 679, 681, 684, 689, 697, 705, 715,735, 764, 788, 790, 800, 803, 804, 816, 823, 827, 844, 863: n = A,T,C or G
agntatcnactacncncgtaatacgactactatagggcgaattggagctccaccgcggtggcggcccgaggtactttttttttttttttttttttttttgggnctgnttagcttttagtaagtcccgggaacgcctgtgctggtggtgacgatgtttgtgcaggcggtcgctccgatctgatccacgacgttcgtcgttctcccttcggtctagtttgaaggccatgtcatcggagaaggtgtcggaatcagagctgatatcatcatactccaccaaaggtttgataactgtgcccagggatgctgcttcgggggtnaccaaccccatgtctttggagtgtttggacttatgccgcttgtgcttcgataccaagcggtgacnctctntgntgttagagctgccgcctcccgatgacggctgcaaagttccagaagcttcttcactcccgtacttnttgcccccatgtctntntgaattgggcattccctttcccctgacctgaagaaaggaaaaaagtttcccagnacttcaaaaagcaaccccccnccgcgtacctgcccgggcggccgctttaaaaactagtggatcccccgggctgcagggaattcnatattcaagcttatngattccgtcnaccttgagggggggccccgggacccaactttttgttccctttangnganggttnaattgcgncccttggnggtaatcatnggcataagcttttttcctgngggaaaattgttattccccttacaatttncaaaacaaaataataacccgggancnataaaaattnaannccttggggtgcntaattgngggngcttaactcacattaanttgggttgccctaactggnccgcttttct

SEQ ID NO: 6182 - DNA, 859 bp, Homo sapiens
  misc_feature 134, 135, 138, 483, 528, 532, 576, 599, 624, 625, 631, 639,640, 653, 660, 676, 683, 698, 701, 710, 713, 715, 717, 718,727, 742, 749, 750, 758, 773, 774, 784, 794, 805, 813, 815,826, 845, 850: n = A,T,C or G
actactatagggcgaattggagctccccgcggtggcggcccgaggtacaggaggcatggctggtgaggcctcaggaaactcacaattacggtggaagggcaaaggggaagcaagcacatcttcacgtgacggcnnganagacagtgagtgaatggggaagtgccacacacttttaaaccgtcagatctcatgagaactcactcactgtcacaagaacagcccccgcgtacctgcccgggcggccgctctagaactagtggatcccccgggctgcaggaattcgatatcaagcttatcgataccgtcgacctcgagggggggcccggtacccagcttttgttccctttagtgagggttaattgcgcgcttggcgtaatcatggtcatagctgtttcctgtgtgaaattgttatccgctcacaattccacacaacatacgagcccgggagcataaagtgtaaaagcctggggtgcctaatgagtnagctaactcacattaattgcgttgcgctcactggccgcttttcangtcnggaaacctgtcctgccacttgcattaatgaaatcggcccacccncggggagaaggcggtttgcgtanttgggcgccttttccgctttccttnntttacntgactttnnttggctcgggtcnttccggnttcgggggaagccggnattaacnttacctcaaaagggnggnaaataccgnttntncnnaaaaattangggggttaaccccanggaaaannaacttttngagccaaaaggcccnnaaaaaggccnaggaaaccgnaaaaaagggcncgttgctngnggttttttccnaaggttcccccccttgacnaacantaaaaaaat

SEQ ID NO: 6183 - DNA, 901 bp, Homo sapiens
  misc_feature 2, 3, 4, 5, 8, 10, 11, 12, 13, 14, 15, 16, 624, 642, 658,704, 719, 741, 752, 767, 780, 799, 814, 844, 878: n = A,T,C or G
gnnnnagngnnnnnnnacactcactatagggcgaattggagctccccgcggtggcggccgaggtaccacattgcctggaaatccacttgtgcattaaccagagctttagcaatctgtgctgagttttgaaagtgcacattatcatctgctgttccgtggatgagaagatagtctacatttctgaaatattctgctcttgccatcacagttgaattcttatagtgctcaagattatcatcctttgttgggagacccatgaatctccctgtgtagacagaccgccgtaatattcccagctggagactggagtcactgctataccacatttgaaaagaccagttccagatgcaaggggccaagtgatgaaaccgtatcctccataggaccagccccatatggctattcttttttcatcaatgaaacccatttctatgaattttctgacagctgtaatctggtcttcaacttcataaacacccagctttcgatacactgcatagaggaagtttgtcaccttggaaaggctgttcctcgaccatccaccaaggcaatgaccatcccttccttacttgcaagataagatatcccaattaacagcaaatacagaccttacactctgactgnaggggcccacccataccntggatcaagtgccgtncatcatgaaagggtgggaaatgggggatccctggccaatgtttttnccaaaatttagaaanggacaaaaggttcatcttctantccccattggnaaccaccagtttggnggaatggattgancctcccaccgtgggccatnttcgggtttccaagnccgttgtttatttccccgtgccaaacaagngccttagtaccctgcccggccggccgcccgggcnggtcctttttttttttttttttt

SEQ ID NO: 6184 - DNA, 884 bp, Homo sapiens
  misc_feature 7, 8, 10, 54, 63, 405, 609, 654, 691, 701, 704, 745, 790,794, 801, 817, 826, 827, 862: n = A,T,C or G
ataggcnncntatacactactatagggcgaattggagctccacccgcggtggcngcccgcccnggcaggtacgcgggggaggaactgctcagttaggacccagacggaaccatggaagccccagcgcagcttctcttcctcctgctactctggctcccagataccactggagaaatagtgatgaccagtctccagccaccctgtctgtgtctccaggggaaagagccaccctctcctgcagggccagtcagagtgtgagcgacaacttagcctggtacctcggccgctctagaactagtggatcccccgggctgcaggaattcgatatcaagcttatcgataccgtcgacctcgagggggggcccggtacccagcttttgttccctttagtgagggttaattgcncgcttggccgtaatcatggtcatagctgtttcctgtgtgaaattgttatcccgctcacaattccacacaacataccgagccgggagcataaagtgtaaagcctggggtgcctaatgaagtgagctaactcacattaatttgcgttgcgctcactgcccgctttccaatcgggaaacctgtcgtgccagctgcattaatgaatcngccaaccccccggggagaggccgtttgcgtattggggccctcttnccctttctcgctcactgactcgcttgcgctcggtccntccggctgcngcnagccgtattaagctcactcaaaggcggtaataccggtattncacaagaatcagggggataccccaggaaaaacatgtgaaccaaanggcnagcaaangggcaaggacccgtanaaaggcccnnttgctggccttttttcataggctccccccccctgncagcattacaaaaatcgaccct

SEQ ID NO: 6185 - DNA, 896 bp, Homo sapiens
  misc_feature 3, 4, 7, 571, 572, 654, 662, 673, 684, 698, 700, 705, 717,723, 738, 748, 754, 761, 768, 785, 786, 797, 798, 800, 803,818, 830, 836, 840, 842, 844, 845, 864, 865, 877, 881, 882,890: n = A,T,C or G
gtnnagngcgccgtatcgactcactatagggcgaattggagctcccccgcggtggcggccgaggtactttttttttttttttttttggagacccatcttctttaaagaagtaaaatttgtaaaaagactaaagagaactgaatgactgggagaataagttactggagagaaaggatgatttcattcaaggctgctcttgctgtaaagtctaacaaggatgggacctgtttaccgttaaacacacacacaagcgtgcacgtgcacgcgcgcgcgcacacacacacacacacacacacacacacacacacacactcaaagaaaaacctagaaccagatggcttcactgaagaattctaccaaacatttaaaggagaattaataccaatcctcctgaaactattacaaaagttgaagaggaggaacatttctaaatttattctatgagaccaatattatcctaataccaaagccagacaaatacactacaagaaaactacagaacaataatttttcctggtgaatattgatgcaaaaatcctcaacaaaatctagcaaactgaattcaaacagnncctgcccgggcgggccgctctagaactaaggggatcccccgggctgcaggaatttcgatatcaagcttatcgataccggcgnccctcggngggggggcccnggacccaagcnttttgttccctttnantggangggttaattgcncccttnggcgtaatcatgggncatagctgtntcctgngtgaaanttgttancccggttaacaatttcnncacaaaattcnnanccnggagcattaagtgtnaagcctgggggngcctantggngngnncctacctcacatttattgnngtgggcctcctngccnnttccagtngggaat

SEQ ID NO: 6186 - DNA, 476 bp, Homo sapiens
  misc_feature 1, 2, 3, 4, 454: n = A,T,C or G
nnnnaggacccgaacgactactatagggcgaattggagctccccgcggtggcggccgcccgggcaggtacagctagtaaatcttgatgttcataggttcatcaaaaagctcttgatgtttcataggttattatttcaagaacagcctgtaaccttatgatacagttgagcatataaattggggtgtggtatccccattacctattttgtgcctaggtagctggcccatagtatttaatgattttttcaggaggccattgattatttttctagcctcctatgtctatgtcttttttgatatttatatttatttttgagatcattgctccttttagttcttttattctcattatagactggatatcctaagagttccccttgctttagaggaattaggaaagaaggatggcttgattgttcctaatacacatgctcttgtccatttagctggcaantttgctgatattgcctgtgctc

SEQ ID NO: 6187 - DNA, 858 bp, Homo sapiens
  misc_feature 3, 4, 647, 714, 727, 744, 750, 763, 767, 768, 769, 771, 773,782, 787, 791, 809, 813, 825, 827, 846, 847, 848, 855: n = A,T,C or G
agnnacgccgtaatacgactactatagggcgaattggagctccaccgcggtggcggccgcccgggcaggtacgcgggggcgaccggggttcggcgctcgggtgaggagctggtggcgtcggcaggttcgaggcgattcgagctccagctaggatgatcgaggttgtttgcaacgaccgtctggggaagaaggtccgcgttaaatgcaacacggatgataccatcggggaccttaagaagctgattgcagcccaaactggtacctcggccgaatgttgcaggctactctctgccgaccaggccgccgcccgtccctcgtgactacccccgcgtacctcggccgctctagaactagtggatcccccgggctgcaggaattcgatatcaagcttatcgataccgtcgacctcgagggggggcccggtacccagcttttgttccctttagtgagggttaattgcgcgcttggcgtaatcatggtcataagctgtttcctgtgtgaaattgttattcccctcacaattccacacaacatacgagcccgggagcataaaagtgtaaagcctggggtgcctaatgagtgagctaactcacattaattgcgtttgcgcttactgccccttttcaatcgggaaaacctgtctgccnacttcattaatgaatcggccaaaccccccggggaagaagccgttttcctatttgggcgcttttttcnctttctttggttnaacttgaaattctttgngcttcngtccgttttgggnttgnnngncnaagccggtnttaancttntaatttcaaaagggcggntaantacgggtttttncnacaaaaaattaagggggannnaccccangat

SEQ ID NO: 6188 - DNA, 1015 bp, Homo sapiens
  misc_feature 13, 171, 190, 192, 198, 207, 225, 229, 236, 293, 301, 302,343, 344, 360, 372, 374, 378, 404, 412, 420, 423, 439, 440,447, 449, 450, 454, 477, 478, 481, 482, 483, 505, 509, 528,549, 555, 558, 562, 570, 571, 579, 580, 583, 592, 604: n = A,T,C or G
  misc_feature 610, 615, 619, 622, 623, 625, 627, 628, 631, 634, 642, 647,653, 656, 659, 670, 671, 686, 691, 692, 693, 708, 712, 721,726, 729, 733, 739, 741, 743, 746, 747, 749, 758, 764, 771,779, 780, 795, 803, 811, 819, 820, 823, 827, 828, 832: n = A,T,C or G
  misc_feature 839, 841, 843, 847, 850, 854, 859, 861, 862, 873, 876, 884,885, 890, 902, 907, 908, 909, 918, 920, 921, 931, 943, 945,946, 947, 959, 965, 970, 976, 978, 987, 993, 1002, 1003,1011, 1014: n = A,T,C or G
gactacgactcantatagggcgaattggagctccaccgcggtggcggccgaggtactgagagcctgaggacatagagctgatgcagaggtggtcctcatggaccctcaccctccatctatttgtaacctattttaaacgtagagtaagacaccttgaatgttcttaaaggnaatgttatatgctgctttntnaaaaangatgtgcantaaaaaaaaaaaactgcngtantttctanaacttttaatgatttttaagttagacatttttaaccttttttcaaatatttaaaagncccccatnntttctgtataaacaagccaaacgtaaactgggggggggatnngcttatacaggggtgnaaaacacccacnancacntttacccccattgttctctagggggncttttttncaaagcgnagngaggcttcctttttannaaaaaananntttngttgttgttaagaaccgcccctnntannntttggaaaaaaaatccccaagnaaanttcaaatttttttttttcnaaattttttaaatggccatgncccccncgncatnattgggannacaaaatnnttnccctttttntttttggggggnggcccnccttnaaangcnngncnnccntancaaagggngggcnaaaagnaanatnttttttttccnnccttaaaaaccaaanaaccnnnggggggtgggaaatntttntttttttcnacccnttntccnaatttngngnatnntnaaaaaaagngggttnttccccnaaaacccnngggggtttttttgcncctccccnaaataaanaacttttnnttntttnntccnaaaaccntntntggnganaaanaaagngnncggggggaccnggncttttttnnccctncccaaagggccnggttnnnaaaaaaaananngggttttttncccctttggggncnnngtttccttttcnaggaangcccnattttncnaatttgggngggggnggggttttnnggcccttnaant

SEQ ID NO: 6189 - DNA, 909 bp, Homo sapiens
  misc_feature 1, 3, 5, 9, 15, 31, 42, 141, 162, 171, 230, 235, 240, 243,246, 248, 260, 278, 280, 285, 302, 318, 341, 347, 359, 374,382, 407, 413, 415, 416, 446, 455, 459, 463, 467, 475, 494,512, 526, 527, 528, 532, 535, 540, 543, 544, 545, 546: n = A,T,C or G
  misc_feature 551, 554, 561, 581, 582, 608, 614, 615, 619, 622, 629, 633,635, 642, 645, 650, 658, 669, 675, 679, 681, 682, 683, 692,693, 695, 697, 698, 699, 703, 721, 729, 730, 744, 758, 773,781, 786, 787, 800, 801, 802, 812, 814, 820, 822, 849: n = A,T,C or G
  misc_feature 850, 853, 864, 867, 870, 871, 882, 888, 896, 897, 904, 907,908: n = A,T,C or G
ntntnagtntagggngaattggagctccacngcggtggcggncgcccgggcaggtactaagttgaagtaaagctcaccctttacttccctacttgaaagttctactctgagccttgactcttatccacagtgaggcatgtngaaggttcctgctggtttatnctttttttnttttttttagacagagtctcactctgttgcccaggctggagtgcatctggcacgatctnggttnactgnaanctncncctcccgggttnatgccattttcattcctnancctcncaagtggctgggactgnaggcacccgccaccangcctggctaattttttgtatttntagtanagacaggatttnaccatgttacccagnatggtctngatctcctgacctcgggatccgcanaggcgngnntttccaaaatgctgggactacacgtgtganccaccactnccanacantccnccttcctnggccagttctaagaactanggggatccccccggggcntggagggaattcgnnnttcnaanctttnttnnnnacccntcnaacctcncaaggggggggggcccgggnncccccaacctttttggttcccctttnaattgnngggnttnaattttngggngnctttggncgnaaatnattggggnaattaggcttngtttcnctgntnnngaaaaattnntnannnccgnttaacaaatttccccaanaaaaattnncaaactccgggganccattaaaatgttnaaaagcctggggggngcccttantggannggagcccaactcnnnaatttaattngngtttgnancctcaaattggcccgctttttcaattnnggnaaaactggccnggnccnncttgattttanataaantggggcanncccccgnggnna

SEQ ID NO: 6190 - DNA, 873 bp, Homo sapiens
  misc_feature 462, 494, 540, 572, 599, 617, 626, 655, 662, 668, 687, 692,704, 706, 736, 754, 762, 766, 785, 799, 812, 821, 833, 841,846, 853, 871, 872: n = A,T,C or G
cgtaatacgactcactatagggcgaattggagctccaccgcggtggcggccgaggtaccaaaactaggtggcttaaaacaaccgaaatttttctcacagtttagaagctggaggtccaaaatcaaggtgttggctctgactgctctagggaattatccccgcttgctgcttctagtgtttgctagcaatccctgacatttcttggcttgtagatcactaaagtcacttagatttcctctacctgtgtgtcttcatattatttgctctctgtgtatgtttgtgtgtccaaaattctttttgtaaggacaccagtcatattggattagggcccatgggaatgacctcattttaattttaattttttttttgagatggagtctcactctctcgcccaggctggagtgcaagtggcacgatctcagctcactgcaacctccgcctcctgggttcaagcaattcttncaccttaaccacccgagtagctgggactacangtgcccggcaccacgcctagctaattttggggatttttagtaaaangtgagggttgccatgttgtgggcatgaacctnctggacttaagtgatctgccctacttnggcctccccaaaaggctngggattacngggctggagttacccttgaaccttttctnggccctnattttnaatttggattaccctttgnggaanaaccctgttttntnaaataaaagggcacaatttctggaggttanctttgggggattaaggangtttaaanaaantttttttttttgggggganccttgccccgggcngggcggtttttanaaactaatngggatccccccnggcttganggaanttcctanttcaaacccttttccgannt

SEQ ID NO: 6191 - DNA, 618 bp, Homo sapiens
  misc_feature 3, 466, 575, 579: n = A,T,C or G
cgnaatacgactactatagggcgaattggagctccaccgcggtggcggccgcccgggcaggtacgtgggcctgactcctcctcggtgcccagctcagtattggcaactaggagagtagtgagattgaacttggccttgaggaacagctgcctctagagttggatcagacaagggtgctgagagccgggactcacaaccaaaggagaaatgagcaatccgcggtctttggaagaggagaaatatgatatgtcaggtgcccgcctggccctaatactgtgtgtcaccaaagcccgggaaggttccgaagaagacctggatgctctggaacacatgtttcggcagctgagattcgaaagcaccatgaaaagagaccccactgccgagcaattccaggaagagctggaaaaattccagcaggccatcgattcccgggaagatcccgtcagttgtgccttcgtggtacctnggccgctctagaactagtggatcccccgggctgcaggaattcgatatcaagcttatcgataccgtcgacctcgagggggggcccggtacccagcttttgttccctttantganggttaattgcgcgcttggcgtaatcatggtcatagctgt

SEQ ID NO: 6192 - DNA, 660 bp, Homo sapiens
  misc_feature 6, 7, 11, 28, 38, 47, 63, 177, 266, 333, 401, 419, 444, 451,456, 508, 523, 531, 533, 535, 557, 565, 577, 578, 579, 583,594, 603, 605, 609, 612, 615, 616, 617, 619, 622, 630, 634,635, 641, 646, 648, 654, 657: n = A,T,C or G
gatgtnngacncgcgtaatacgactcantatactatanggcgaatcnggagctccaccgcggnggcggccgcccgggcaggtacgcggggtgctttaagaattaacgaaagcagtgtcaagacagtaaggattcaaaccatttgccaaaaatgagtctaagtgcatttactctcttnctggcattgattggtggtacctcggccgctctagaactagtggatcccccgggctgcaggaattcgatatcaagcttatcgataccgtngacctcgagggggggcccggtacccagcttttgttccctttagtgagggttaattgcgcgcttggcngtaatcatggtcatagctgtttcctgtgtgaaattgttatccgctcacaattccacacaacatacganccgggagcataaagtgtnaagcctggggtgcctaatgagtganctaactnacatnaattgcgttgcgctcactgcccgctttccagtcgggaaacctgtcgtgccangctgcattaatgaanggggccancncnccaggacaggccaggcttagtntcttgggnggaaacattctnnnaganaaattaaaacnctttgcccntncctncanccnnntnccncttttttntcgnngccggnttttnanctttanttnaat

SEQ ID NO: 6193 - DNA, 649 bp, Homo sapiens
  misc_feature 1, 4, 5, 6, 11, 19, 26, 537, 583, 607, 620, 622, 636, 642,648, 649: n = A,T,C or G
nagnnnggcgncgtcaccnatacgantactatagggcgaattggagctccaccgcggtggcggccgaggtacggcatcatcaccatgcgaggcctgacgacccctgagctccgggtatacccgcacaaaaccctctacgtccctaatcggaaggtgaattctatgtgctgggcctcactgaatcacttggattcccaccttctgctgtgcttcgtgggacttgcagatactccaagctgtgccgtgctgctcccagcgtcgctgttcataggtagcttcccaggaatgcgtcggcctggcatgctttgcagtttccagatccctgatgcctggtcctgtgcctggtccctgagcatccacgcgtatcactctttcagtacctgcccgggcggcccgctctagaactagtggatcccccgggctgcaggaattcgatatcaagcttatcgataccgtcgacctcgagggggggcccggtacccaagcttttgttccctttagtggagggttaattgcgccgcttggcgtaatcatggncataagctgtttcctgtgtggaaaatgggtatccgctttacaattncacacaaacaatacggagccgggnagcattaaaggtntnaaagccctgggggnggcctnaatgann

SEQ ID NO: 6194 - DNA, 631 bp, Homo sapiens
  misc_feature 4, 5, 6, 7, 625: n = A,T,C or G
aagnnnnccgcgtaatacgactcactatagggcgaattggagctccaccgcggtggcggccgaggtactttttttaatttttgtgtttttagtagagatggggttccaccatgttggccaggctggtctcaaactcctgacctcaggtgatctgtccgccttggcctcccaaagtgctgggattacaggtgtgagccaccacacctggctgagttcaactttttgtaagtagtatccacttaaggcatttgctaactcctaattgtgtgtgctagggctcagacacaaagtttttcactagccaaaattcaacactctcacagaataggagggacaaatattgtagtttatggtcttcaaaggaggagagagccatggtaatacaccctaggctttcaacttgatatctgagaaaaattttgttctgagagtaagagcaaaccaaaatagatcagcctcaacagttactagagtggtatgctaatattctatctgccgaaagaaaatggaattctctttggaggaagataacatcatccagagcttctgtaattttccataagtatagggtgcagcattcagtcaaaatttccaggcatgctaggagagagagttcgaattactnaacatc

SEQ ID NO: 6195 - DNA, 629 bp, Homo sapiens
  misc_feature 196, 199, 242, 355, 405, 428, 435, 454, 499, 527, 540, 544,550, 566, 575, 590, 591, 592, 597, 611, 624: n = A,T,C or G
cgcgactcactatagggcgaattggagctccaccgcggtggcggccgcccgggcaggtactgctcggaggttgggttctgctccgaggtcgccccaaccgaaatttttaatgcaggtttggtacctgaaatctctagatataatattaaaaaaacaaaacaaacaagtcagcattctcttacctgggagcattttntgnatattgaccttgctttgttgaaaaagttctgttaaccattctngatgttgtaatttagctaactgctgaagacaaagtaggaagagaggaaaatgggtgccactttctagtggttgagctagttctgaaatgctcaccagctctgaaatgatggcncgagctgcaaactgtgctaaataggatttcaccaaagggatgtcaacctncagtttgggacactggtccaatncattcangaaagcctgcatgaagttngtcacttgtggctatcccttcctgtttgagtaaactgatcaaagnacttgctttttctttattcctacccccnctattcttcgtgnacangatgantactttggcttaacanccccccccncacaccccctttacnnnccccnatttttttttttancccatttgacccncccct

SEQ ID NO: 6196 - DNA, 858 bp, Homo sapiens
  misc_feature 515, 522, 527, 531, 567, 569, 591, 604, 611, 620, 624, 628,635, 636, 641, 645, 646, 666, 668, 670, 696, 706, 709, 718,730, 739, 749, 756, 764, 775, 776, 777, 778, 783, 799, 805,812, 813, 818, 821, 823, 827, 828, 834, 837, 838, 848: n = A,T,C or G
  misc_feature 856: n = A,T,C or G
ggcgaattggagctccaccgcggtggcggccgaggtacagatggcttccaggaacaggctcaccaatgaatgaaggagaatgaatacaatgatcatgatgaaaaaagatttaaatttcttgctgatttggcataaaatgttgaaaccaacaaagacaacataaaactcagaacaggtccctgtgatgagagcatcaaagcctcgcgtggtcaccagtgtggcccatccaagaagcatgtaaggtcaggtcccacatgagaaaacttgacacagccatgccctgaactcttcctgctaccatatcaaagaaatttgattgaagtttgttttctctatagaatatggcattgcaaaatccttgttgtacctgcccgggcggccgctctagaactagtggatcccccgggctgcaggaattcgatatcaagcttatcgatcccgtcgacctcgagggggggcccggtacccagcttttgttccctttattgagggtttaattgcgcgcttggcgtaantcatggncatanctgnttcctgtggtgaaattgttaatccgcttacaaattncncaccaacataccaagcccgggnagcataaaaagtngttaaangcctggggntggncctnattgagnngagcntaanntaccatttaaattggcgttncncntcacttgggccgctttttcaggtcgngggaaaaccntgntcgatgccnagctggcatttnaatggaatnggccccaacnccccggngggaggangccgggttttnnnntattnggggcggcttttttcngctttncttggtnnaaatngantngctnnggcttnggnncgtttcgggntgcgggcnag

SEQ ID NO: 6197 - DNA, 904 bp, Homo sapiens
  misc_feature 39, 306, 319, 334, 352, 376, 428, 442, 443, 456, 467, 483,496, 507, 520, 532, 535, 549, 576, 582, 583, 589, 593, 597,607, 637, 642, 652, 665, 668, 674, 678, 682, 686, 701, 703,705, 712, 720, 721, 725, 727, 736, 739, 740, 747, 748: n = A,T,C or G
  misc_feature 757, 767, 773, 774, 781, 785, 797, 800, 809, 815, 820, 823,824, 830, 835, 844, 851, 852, 863, 873, 875, 878, 883, 889,893, 897, 902: n = A,T,C or G
ggcgaattggagctccaccgcggtggcggccgaggacangagttacctggttgccatggtgtgtgaggatccttttcacctgcgttgctgagagtccaggtttattcatcatgctgggggaggtcttgatccctcatccctgaggccaccacagtgaggcagggggacgcatctcctcatgagagatgatcagggacctcttcctggatgagaaaggcaatcgcggatgagcccccaagttgttagaaacaagagcttggagtcacaaggaaaacaagcacccaaatgccaaatgaaggatttctnagcaaagcaaaanttacttctgcagaangggtgctggtcacacttncggccgctctagaactagtggatnccccgggctgcaggaattcgatatcaagcttaatcgatacccgtcgacctcnagggggggcccggnncccaccttttttnttcccttttantgagggttaaatttgnccccgcttggccntaaattcaatnggttcataagctnttttccctgtgntgnaaatttgtttattncgcttcaacaaatttcccccaccaaanaatacnnagcccngggngccntaaaaagtgntaaaagccctggggggtggccctaaatgangtgancctaaacctncacatttaaattngcngttggnggcntcanttgncccgctttttccaantncngggaaancctttttnngccnanctggtattnaanntgaaatnngcccacccnccggggggangaaggnngggtttncggnatttgggccccnttnttcgctttncttcgnattanttnnaatttnttggnctttgggcngttcggnntgggggcggancgggttttananttntcttnaaaggnggtnaatncgggnat

SEQ ID NO: 6198 - DNA, 892 bp, Homo sapiens
  misc_feature 70, 125, 332, 400, 406, 476, 491, 492, 498, 515, 517, 523,529, 538, 572, 581, 590, 598, 602, 619, 620, 628, 641, 652,655, 664, 665, 666, 672, 681, 683, 685, 687, 689, 691, 698,717, 727, 736, 739, 741, 744, 750, 759, 769, 776, 778: n = A,T,C or G
  misc_feature 782, 788, 793, 796, 816, 830, 836, 840, 842, 844, 854, 855,858, 879, 890, 892: n = A,T,C or G
ggcgaattggagctccaccgcggtggcggccgcccgggcaggtacttttttttttttttttttttttttnggagagacggggtttcaccatcttggccagactggtcttgaactcttgacctcgngatccaccctcctcggcctcccaaagtgctgggattacaggcgtgagccacataacagcagttctcaccaagcatctgacagccgaaaaactgaaagcattagagaatgctacaggacaggctttggcttagtagtgagttctgagttcaagctgaggctctgcacttattagctagaactttgcttaatctctcacaggtctcctntaaatgattaaatggcgtaacggaggtaaagcggattagcacaattcctggcaaaacagtaagcactnaattgntactactgaattgccaggttcacaggcaccaaccaaccgactctttcatcttcctgggttccctttgggngccaacttttctcgnngagggncccaacagggatacctngngggggnaaatgntgtcccaanaagataatccccagtcccttgacacccaaagaanaaaagggcncccaacccntaaaaatngggngaaccttttaaaagccnntttccgangggcgggcaaaanttacccccgtnatngcttcccgnnnagaaanaaaataaancnancntncngggaaanaaaaaagcttagttggaanggattctttnaaccccccnggntnggnaaaacnccaaaaggntttgttttanggctggncncttnaacccncaaancantttaaaaaagccccaaagcnttggaaggggggtncctttngggncngnttttaaaaanntanggggatccccccggggcctgnaaggaattttnan

SEQ ID NO: 6199 - DNA, 814 bp, Homo sapiens
  misc_feature 459, 728, 754, 785, 814: n = A,T,C or G
gcgtaatacgactcactatagggcgaattggagctccaccgcggtggcggccgcccgggcaggtactggccacgactgcatgcccgcgcccgccaggtgatacctccgtcggtgacccaggggctctgcgacacaaggagtctgcatgtctaagtgctagacatgctcagctttgtggatacgcggactttgttgctgcttgcagtaaccttatgcctagcaacatgccaatgtaagtgccttcagcttgtttgggggagactgggtagagaggttagatgggagggcaccctgccctgaaaaggaaaacctgtaacctgaattccaggtacctcggccgctctagaactagtggatcccccgggctgcaagaattcgatatcaagcttatcgataccgtcgacctcgagggggggcccggtacccagcttttgttccctttagtgagggttaattgcncgcttggcgtaatcatggtcatagctgtttcctgtgtgaaattgttatccgctcacaattccacacaacatacgagccgggagcataaagtgtaaagcctggggtgcctaatgagtgagctaactcacattaattgcgttgcgctcacttgccccgctttccaattcgggaaacctgtcgtgccagcttgcatttaatgaaatccggccaaccgcgccgggggaagaggccggttttgcgtaattggggcgcttttttccgctttcttngcttacttgaactcggttgcgccttngttcggttccggcttggcgggcgaagccggntattcaatcttcacttcaaaagggcgggn

SEQ ID NO: 6200 - DNA, 805 bp, Homo sapiens
  misc_feature 494, 636, 646, 673, 675, 721, 741, 747, 761, 792, 803: n = A,T,C or G
gtaatacgactcactatagggcgaattggagctccaccgcggtggcggccgcccgggcaggtacatcatttccagagcaggcactggcagcgagatagggttggaggagaagtagcagccgggacttccggatggcaaacttctctgtgggtagagatttcccagcaatcttgagcttcaggcctggcacagctcgaaataattccacttcgtcgtccccgaacggcttgtggtcctccttcccaaacatgctgaggtaggcggccttcatgtaaatgtaggtggcctttttaagtcagatcatgtcagttccttctggaaatctggttatattccatcacactcaggagacatctcctacaatttccttgacacctgcagcactccagccacacgacggcctcaccccgcgtacctcggccgctctagaactagtggatcccccgggctgcaggaattcgatatcaagcttatcgatacccgtcgacctcganggggggcccggtacccagcttttgttccctttagtgagggttaattgcgcgcttggcgtaatcatggtcatagctggtttcctgtggtgaaaattggtatccgcttacaaattccacacaacattacgagccggggaagccntaaaagtgtnaaagcctggggggtgcctaattgaggngngctaactcacattaaattgcgtttgcgctcactggccgcttttcangtcggggaaaacctggcctngccccncttgcatttaatgnaatcggcccaacccccccggggagaaggccngtttggcgttntt

SEQ ID NO: 6201 - DNA, 811 bp, Homo sapiens
  misc_feature 53, 60, 86, 89, 105, 142, 176, 218, 243, 249, 262, 265, 424,434, 461, 499, 513, 533, 563, 584, 595, 598, 621, 646, 665,669, 670, 676, 689, 690, 691, 698, 699, 736, 743, 750, 758,767, 772, 775, 777, 780, 785, 788, 801, 804: n = A,T,C or G
gtaatacgactcactatagggcgaattggagctccaccgcggtggcggccgangtacagncatcaaatcaatattgtggctactgntgnggaggaagggacaggngcggaggccaatgccactcagaatatctgcatttctncacaaatgggatcaatgacctttgaagacaccancaatttttaccatccaaatttccccttcagtgggaagataanagttaggggccatgatgactccttnctcaanaaccatctagtgnttntggtgatttatggcacaaatggaaccttcaaccagaccctggttactgataacaatggcctatctccctttaccttggagacatccggttggaatgggacagacgtttctctggagggaaagtttcaaatggaagacttattatataatccggaacaantgccacgttnctaccaaaattgcctacctgcacctgngacccttctacagcacaacccgcagcttccttggcatncaccggctaaacgnccccttgaaatgtggccagncccaagaagtgctggtggattattacatcnacccggccgctctagaactantggatcccccngcntgcagggaatttcgattatcaancttatcgataccgtccaacctctangggggggccccggtacccnaagnntttttngttccccttttannngaggggnnaaatttgcccgcctttggccgttaaattcatgggggncaataancttgttntcctggtnttgaaaaanttggnaantnccntttancanattttccccacanccnttccgac

SEQ ID NO: 6202 - DNA, 817 bp, Homo sapiens
  misc_feature 70, 88, 96, 108, 275, 294, 315, 385, 398, 401, 419, 472,475, 509, 520, 535, 539, 550, 569, 577, 586, 591, 592, 595,597, 612, 618, 625, 645, 653, 657, 658, 664, 677, 685, 696,705, 715, 722, 724, 727, 731, 739, 766, 781, 782, 795: n = A,T,C or G
  misc_feature 796: n = A,T,C or G
gactcactatagggcgaattggagctccaccgcggtggcggccgcccgggcaggtacttttttttttttntttttttttttttaaggnagagaatngtttggtttggngagaatatttttatgggctaagattaagttgttcacaaaaacctgtcaaattttaattacccaaagtggtaacatcaaaacttcatttacttgcttattccaaaagggagttgaatatatttcacttactcaacagcagtttttccagtagatctagtaaagactgntatagcacctgggcgcggnggctcacacctgtaatcccancactttgggaggcccgaagcaggcagatcacttgaggtcaggagtttgagaccagcctgcccaatatggngaaaccctgcctntantaaaaacacaaaaattanccgggcatggtggcaagcgcctgcagtcccagctactcaggaggctgaggcanganaattgcctgaaccttcgaaaggcatatgttgccntgagcccaatnatttgtgcactgcantccnacctgggggtngacaaacctgaaaaatctnttcttccnaagacctanatttnnatnanttcaaaaatgattgntttttnagattanggaagccccatcaccctttnggaatatnttcnncctttnctaaccaaaccanaaattttnggagttttggnttcaaaatncttttcactngaaaaancnggngggntacaaatntccgggcctttaaattttttgcccaanggactttttaaggcnnccttttaaaaggnncctttggggccgttttttaaa

SEQ ID NO: 6203 - DNA, 879 bp, Homo sapiens
  misc_feature 114, 289, 297, 302, 310, 344, 352, 385, 388, 445, 483, 484,503, 513, 522, 530, 539, 544, 550, 553, 569, 572, 580, 582,588, 590, 592, 602, 603, 606, 607, 608, 610, 624, 626, 632,638, 641, 646, 647, 650, 651, 655, 659, 664, 677, 687: n = A,T,C or G
  misc_feature 689, 690, 693, 699, 700, 703, 711, 720, 725, 726, 739, 740,743, 744, 749, 753, 758, 771, 775, 781, 787, 790, 791, 792,793, 794, 795, 797, 799, 802, 804, 809, 814, 816, 821, 822,824, 825, 826, 827, 830, 835, 847, 849, 850, 867, 870: n = A,T,C or G
  misc_feature 871, 875, 877, 879: n = A,T,C or G
gtaatacgactcactatagggcgaattggagctccaccgcggtggcggccgcccgggcaggtactttttttttttttttttttttgtttttgctttacctgagtatgtgcttanaaatcaggagaggaaggggaggaggtgggagagagtgtgcaggggagggctgacgcttaaatgccttgggaagtcttctgttccaccagacaaattctttctacgagttccttccagagctcagtatcaccagaggatgcagtcagagggcaaggagaccggaaggggttctggngtgtctgngaaanttggctgnagggtctaaatgaaattgagctttgggccaaaanaattttcntaaaactaaaaacagaccaaaccccaaacctgnttntgagatctcacttgatgccctgtgattccctattacttttggcttgccaggaagctnggagctcaatttggtacctcggccgctctaaaactagnnggatcccccgggcttgganggaaatttcnatttcaaancctttatncgatacccngtccnacctcnaanggggggggcccccggntancccccaancntttttngntnccctttttannggnnnanggggtttaaatttngncccccnttgggncgntaaannaanngggncaanaagcntggtttccctggnggggaaaaangnnttnttcccnnttncaaaattnccaaaaaanaaaannacaaaccccgggnnccnntaaantttnaaaancccttgggggggncccnctaaanggaggnggnnnnnnancnccncntttanttggngntgtgnncnnnnttnccccnttttttcaattngnnaaaaaactttttgtggnccnntttntntn

SEQ ID NO: 6204 - DNA, 788 bp, Homo sapiens
  misc_feature 640, 719, 725, 730: n = A,T,C or G
cgtaatacgactcactatagggcgaattggagctccaccgcggtggcggccgcccgggcaggtaccacatatcccgtttgatttctatttgtgtgaaatggccctcccctgggtcaagccaacacctgatgcaacttccttcagtgaggccttcctgaagagcaatcaggacccagctcctgattctgctgagcaggcctcttacttttccctggtgacaaaaataaacaatgtgattggcaatctgtggctccagggacatctgaagtgcaaattgaagaagttggataggtgggatcctataaaaagagaatggtcactacaggccacagtgcagctgccccgctggtaatacacaagattctgccaaggctggaagctgttgctgccctgggaaacaaagtcgggggaagcctgagagcacaggatccttctgaagttttgaccatgcctaccatgctgacgaaactggcttggaaatcagttcttctgatgctacagtgaagactgtcattacaacagtgccacccagtcttccaaaactggacccagaactccgtttggatatcaaggtattgcaggggtgcctttagcagccatttcggcatgcccgcttggttcaagggaaaatggctctcangttcacaagttaaagttatcatcagactactgaaggactttgaggggtttcgtttttcctggctttgagcccccttcanaccctnggatncctaggcctactaaagtcatttattcttgggataacccccaacagacaggccttttgc

SEQ ID NO: 6205 - DNA, 852 bp, Homo sapiens
  misc_feature 455, 592, 603, 651, 664, 693, 715, 749, 754, 767, 771, 777,805, 810, 818, 840, 841, 851: n = A,T,C or G
ctactatagggcgaattggagctccaccgcggtggcggccgcccgggcaggtacgcgggggtgatcaaagagggagacacagacacagagagacaaaggcaaggaggactgtctgggagccacgcgggcgatacagtttccgaggcacgccgcgtcccgcctagcctgttgaacagtgcggatttgcgaggcgcgccctggagctgctagagatccggaagcacagccccgaggtgtgcgaagccaccaaacatcccagttaccagtgtccttgaattgatagtggcttctgtttgtcagtctcatataagaactacagctcatcaggaggagatcgcaagcagggtaagagacaccaacaccatgttctgcacgaagctcaaggatctcaagatcacaggagagtgtcctttctccttactggcaccaggtcaagttcctaaccgagtcttcanaggaggcagcaggaagctcagagagcttgcaaagcaaccgtgcccatctgtcaagacattcctgagaagaacatacaagaaagtctttcttaaagaaaaaccagtccggagccgagtctatctttacactttggcangaaagtatttncaaactgattttcccagagttttgaacggctgaattgttacacttcanaaaaacaattggncaaagccccaaaattaaaaagaaaaggcngggaaaatctttgggaaaaganaaagacttttgaaaaaaaccatttgccagaagcnaagcnagtttgcaagcanggangttccnagtgggaagggttattaaaagaaatctnttggntggaaganggttttttaaaaatttgtttcnnaagggaagant

SEQ ID NO: 6206 - DNA, 863 bp, Homo sapiens
  misc_feature 302, 475, 601, 602, 654, 656, 663, 679, 680, 696, 709, 710,723, 729, 739, 749, 783, 789, 796, 802, 812, 822, 824, 826,842, 857, 863: n = A,T,C or G
cgactactatagggcgaattggagctccaccgcggtggcggccgacaccaattgggtgttcggcggagggaccaagctgaccgtcctaggtcagcccaaggctgccccctcggtcactctgttcccgccctcctctgaggagcttcaagccaacaaggccacactggtgtgtctcataagtgacttctacccgggagccgtgacagtggcctggaaggcagatagcagccccgtcaaggcgggagtggagaccaccacaccctccaaacaaagcaacaacaagtacctgcccgggcggccgnccgggcaggtacgtgggcctgtctgcaaaccagtgtgccgtgccagccaaggacagggtggactgcggctacccccatgtcacccccaaggagtgcaacaaccggggctgctgctttgactccaggatccctggagtgccttggtgtttcaagcccctgcaggaagcagaatncaccttctgaggcaccttccagctgcccccggccgctctagaactagtggatcccccgggctgcaggaattcgatatcaagcttatcgataccgtccgacctcgaaggggggggcccggtacccanntttttgttccccttttagtgaggggtttaaatttgcgccgcttggcgttaantnaatgggncaatagcttgggtttnncttggtggtggaaaantgggttattccgnntaacaaatttccncacaancattaccgangcccggggangcaataaaagtggtaaaagccctggggggtgccntcaatngagtggngcttancttaacattnaatttgcggntngngcttcaattgccccgntttttaagtcggggnaaaccn

SEQ ID NO: 6207 - DNA, 851 bp, Homo sapiens
  misc_feature 631, 641, 664, 682, 691, 698, 714, 747, 758, 764, 774, 775,789, 792, 796, 800, 805, 813, 815, 819, 820, 844: n = A,T,C or G
gggcgaattggagctccaccgcggtggcggccgcccgggcaggtaccatatcagtggagagctgcagcaaggtggcccctagagccacgcaccagcctgcacattgcctctccatacggcagccctttatttggaaacttcctaaatcactttgctgtgtgtgtttacacgggtgggttttgctttacttgccctgagagcacacgggagtgcagcacacaccccaacccacatcaactgccattaaagaaaagaaatttcagcccagaatttcatgtccagcaaaattaagcatcataagtgaaggagaaataagatccttttcagacaagcaagtgctgagggaatttggtatcaccagatctaccttacgagagctcctgaaggaagcactaaatatggaaagaaaagatcatcacctgctactacaaaaacacactgaagtacctcggccgctctagaactagtggatcccccgggctgcaggaattcgatatcaagcttatcgataccgtcgacctcgagggggggcccggtacccagcttttgtccctttagtgaggggttaattgcgcgctttggcgtaatcatggtcatagctgtttcctggtgtggaaattggttatcccgntcacaatttnccacaccaaacataccgagcccngggagcataaaaagtgtnaaaggcctnggggggngccttaatggaggtgngcctaaccttcacatttaatttggccgttggcngctccacttgncccgcnttttccaggnngggggaaaccctgnccntggnccancttgnatttaatngnaatnnggccaacggcccccgggggagganggcggtt

SEQ ID NO: 6208 - DNA, 831 bp, Homo sapiens
  misc_feature 511, 571, 620, 642, 674, 691, 705, 732, 734, 741, 759, 767,791, 792, 822: n = A,T,C or G
ctactatagggcgaattggagctccaccgcggtggcggccgaggtaccaaaaagactctcaaaaaccaatactcccacgggcaagggaatagccaagtttgttgcggtttccaatgaatgacatcagccctgtgtaggtctcaatcaaaatgggttcagttaacaccatcagtttctttcctcttccagatccagttgaattcttgtgggcattctggatagctggaacaagcttagacatgaacccagacaacttgcaaatttcaaggaatttctcactggtgtatttcataggatgctcagtgaaagtagcataaggaacttcagtggaccatgggttccggcgggacagaagagactgctcctccggactcccccagtagatcctaaggccttctccttgtctcttgtccagggacatcccagggaaggcgaacttgcccaggcagatgcgatagacagcgctcagaggaatccgctgcagctgcacacaactcagcatgatgaagtngtatttgcagatcaagagagtcttgtctgtgaccagtagaattctctccttctcattggntccagtggtctatctttgtcaaagagccagaagcctttgaatgggtctntccaagaagttttcagctacgntgacctttcaaagtctttccatggcagtctcnaatggccccccggccgntctaagaacttagntggatccccccgggctgcaggaattcnantatcaangcttattcgatacccggngaccttgnagggggggggccccggggccccanncttttgttcccttttaatggaggggttaanttgcgcgcc

SEQ ID NO: 6209 - DNA, 835 bp, Homo sapiens
  misc_feature 92, 592, 615, 618, 624, 627, 641, 686, 699, 717, 721, 738,741, 761, 764, 776, 791, 805, 807, 832, 834: n = A,T,C or G
ctactatagggcgaattggagctccaccgcggtggcggccgaggtactggggtggggggatacacaatgatgtcacacacaggaaatatcanagggggacttggcacttcacaaggctggctcctcttccataggctcaccagcagttctgctgtcttcctgagcaaagggctgttccacatccactgttagggaggccagggcagaaacggtctctgtctcctcttgcaactgagcaccagccagagcacagccccttggcacagccaccatccttactgacttccaatacttgctttgaatttcaatgatcttctgtaaagaaataacagcattcatattcgggctttggtggagaatatcttctgcaagtggctccagctcatttcctagaagggcatttacacagggcttctgatgcatcacagatggctgtgagatcatgtcctccttctagagccaacaccacacgtccatcagccaatgtcatcaattgcttcgtcaaatgaccaaaacattttgcccgtcactttgtacctgcccgggcggcccgctctagaactagtgggatcccccgggctgcagggaattngatatcaagcttatcgataccgnccnacctcnaangggggggcccggtncccagcttttggtccctttagtgagggttaattgcgcccttggcngtaatcaatgggncatagctgtttcccttgngtgnaaaattgttatcccggntcncaaattccacaccaacaatnccnaagccccgggangcattaaaagtggtnaaagccttgggggntngccctaatgaagtgaacttaacctnant

SEQ ID NO: 6210 - DNA, 830 bp, Homo sapiens
  misc_feature 609, 801: n = A,T,C or G
gcgcgtaatacgactcactatagggcgaattggagctccaccgcggtggcggccgcccgggcaggtaccaaatgtgattttagctccattcagggcccaggggtaaccagcagtgccaccaaacctgtcagcaggtaaagaaacttctaccatcccaaagtgcaggttacaggaaaggggtcactccttaatgacgacctgggcctgctgcataaggcccatcttatgcagcatgtgggctgtcccatcttccccactctcagtgactatgtaactgtgtcagggtgagttggtgcagtcttttgtcttatcacgtgcctccatctcctggaggcagggtgcccaaggagggcagggaggggttcttgtgctcctttaagggataagcagttcataaacaactatgggcctctgtttattatgagagttagtctgcaaattagggcctggcaattagaatcggtctgcatcaatgagctcatactctgttcctggggaacaatgtagaataaacatctgaccaagtaaagacccagagatgccactaggtggccctaggtggaagccccaaacatgttccagggagtctgtccactaattttgcagganagaaggggtgagatttgttaactttgctcttcagttctggagataaagtgcttacttctacgcaggggtaaatctagaaacaaatgtgagtgaagcccctaaaagtggatccttaaatagggtgctaaagacttaaaaagaatgattttttttttgagacagagtcttgctcctgtcgcccaaaactggganttgcaaatggcatgaatctcaagcttact

SEQ ID NO: 6211 - DNA, 849 bp, Homo sapiens
  misc_feature 7, 10, 576, 624, 670, 727, 769, 776, 839, 848: n = A,T,C or G
gtactanctntagggcgaattggagctccaccgcggtggcggccgaggtacagcctgggctccagagtcagcctctacactcaccagactatggcggattcatcattatactgggaagcaacagcctgggccccagagttggtcatccgtccatgcacagatgaggagaggtctcaggaagctttggcgtggtctgggaccttacctctttgtgtaatgagttgtttggtgtccccgcgtacctgcccgggcggccgctctagaactagtggatcccccgggctgcaggaattcgatatcaagcttatcgataccgtcgacctcgagggggggcccggtacccagcttttgttccctttagtgagggttaattgcgcgcttggcgtaatcatggtcatagctgtttcctgtgtgaaattgttatccgctcacaattccacacaacatacgagccgggagcataaagtgtaaagcctggggtgcctaatgagtgagctaactcacattaattgcgttgcgctcactgcccgctttccagtcgggaaacctgtcgtgccagcttgcattaatgaatcngccaacgcgcggggagaggcggtttgcgtattgggccgctctttcgcnttcctcgctcactgactcgctgcgcttcggtcgtttccggcttgcnggcgaaccggtatcagcttcacttaaaagggcgggtaataccgggttattccccagnaatcaaggggggataaccgcaaggaaaagaaacattgttganccaaaanggccagccaaaaaggcccaggaaacccgtaaaaaaaggcccccgtttgcttggccgttttttncataaggcna

SEQ ID NO: 6212 - DNA, 887 bp, Homo sapiens
  misc_feature 71, 111, 179, 235, 244, 311, 405, 503, 509, 530, 543, 559,561, 574, 585, 594, 595, 647, 671, 689, 699, 700, 703, 705,708, 713, 717, 725, 736, 738, 757, 787, 801, 805, 821, 823,830, 831, 834, 839, 841, 851, 860, 863, 866, 870, 872: n = A,T,C or G
  misc_feature 874, 880: n = A,T,C or G
ggcgaattggagctccaccgcggtggcggccgcccgggcaggtactttttttttttttttttttttttttngagacggagtctcgctgtgtcgcccaggctggaatgcagnggcgagatctcggatcttggctcactgcaacctctgcctcccgggttcaagcgattctcctgcctcancctcccgagtagctgggactacaggcatgtgccaccaggcccggctaattttttgnatttttagnagaaacggggtttcaccatgttagccaggatggtcttgatctcctgacctcgtgatccacccacctnggcctcccaaagtgctggggctacaggtgtgagccactgaacctggccagttgaaactatttttaagaaagaaaaagcaagtccataactccanaacatggagacaagatgctgcttagtatactgcattaaaaaaaaaagttaaaaccttcttatatttaaaaatattttttaaatttattttaaattatncactgnggaaatttcacctttttttgntgggccttttctntgaaatttttaaccananggcatagcatttnattataacctncccattacnngaaacagtttaatttacctcccccccaaaaattcctttggtacccttgggcncgggttctaaaactaggtgggatnccccccgggggccttggngggaaatttnngantnttnaagcntttnttcgattnccggccgaccntncgagggggggggccccggnaccccaagccttttgggttcccctttttantgggggggtaaaanttgngccccttggcgttaantnatgggcnntancttgntncctggggggnaaaatggtnatnccnctcncnantccccnccaacat

SEQ ID NO: 6213 - DNA, 863 bp, Homo sapiens
  misc_feature 1, 225, 652, 685, 730, 731, 770, 784, 814, 845, 850, 859,861: n = A,T,C or G
nactcactatagggcgaattggagctccaccgcggtggcggccgaggtactctacgttgttaccacaggcgatgacagctccatgtgtgttattgcccctgaagaccttccagagacaaaatgtggaggtggaagacagtgatactgatgaccctgaccctgtgtggatctaggctaacatgtgtttttgtgtcttagttttcaacaaaaaagtttaaaaagttnaaatactaagtttataaagttaaaaagttaccccgctgtacctgcccgggcggccgctctagaactagtggatcccccgggctgcaggaattcgatatcaagcttatcgataccgtcgacctcgagggggggcccggtacccagcttttgttccctttagtgagggttaattgcgcgcttggcgtaatcatggtcatagctgtttcctgtgtgaaattgttatccgctccaattccacacaacatacgagccgggagcataaagtgtaaagcctggggtgcctaatgagtgagctaactcacattaattgcgttgcgctcactgcccgctttccagtcgggaaacctgtcgtgccagctgcattaatgaaatcggccaacgcgcgggggagaggcggtttgcgtatttggggccgctcttccgcttnctcgctcacttgacttcgctgcgctcgggtccnttcggcttgccgggcgaaccggtatcagcttcactcaaaggcggnnaataccggttattccacagaaatcagggggataaccgcnaggaaaagaacatntggagccaaaaaggccagcaaaaaaggccnaggaaacccgtaaaaaaagggccggttttgnttggnggttttttncnag

SEQ ID NO: 6214 - DNA, 853 bp, Homo sapiens
  misc_feature 639, 645, 663, 665, 705, 711, 713, 718, 729, 730, 741, 770,783, 800, 802, 803, 812, 813, 839: n = A,T,C or G
tatagggcgaattggagctccaccgcggtggcggccgaggtactgacttgagacaagctctaactttttaaacattagttcacacgcgtttattcacttcattatgttcattaagctttcatcttagaataccagtttcaccatttgggagctgtttgtaatatgtgcaaccttataaatagtgttttccaaactgtgtcccaggactgcaaatctttaatgtgaaatgtctttttataatctcttcctttaaaaaaaaccaataaaataaaatgccacatgcaaactcaagtgtgtcaccagattttacttcattggcgctcgccagcccgccaggctggcaataaagtgcctccagccacctctggcaggtctcctcacccacagcccctgactggtcaccactatagtcgtatgaggggccaggacaatcgcttgggataaactcccatctcagcactgaataaaaaacattctgtgtcacaatatcctagttttggggctttaaaaacgtctaggtgttcctcacatgccttgtctataataaagaaaagcaagcagtagttgggtattggtagcttttgaaacaaaagccctactggtcttctaattttggatattttaattaaagaatatctngacagnacctgcccgggcggccgntntaaaaatagtgggatccccccgggctgcaggaattcgatnttcaangnctttntcgatacccgnngaaccttctangggggggggcccgggacccaagctttttngttccctttagtngaggggggtaaatttgngnnccttggggnnaaatcaatgggacatagctgggtttnctggggtgaaaatt

SEQ ID NO: 6215 - DNA, 881 bp, Homo sapiens
  misc_feature 1, 459, 479, 556, 609, 633, 672, 696, 704, 718, 725, 757,786, 802, 805, 806, 818, 826, 842, 853, 859, 865, 880: n = A,T,C or G
ntaatacgactcactatagggcgaattggagctccccgcggtggcggccgaggtacttagcagcagtcttcctgtctggaaaggaaacattgctcagattggagatactggccattttatagacttcaaagcaacttaggccactgaactgtcaggcgggaaaacaggatgtcttccatttggaagcccctttgcttctaagaagttccagagaccatcccaggcccacagagttataaggattcatctgggcactgaagacatttgggacctcagtgaagtttctccgaggccagatggtcacattgattttctggaatcattttgaataaaaatgagcgaggtggtgaacacaatgcaaggctctccacgtacctgcccgggcggccgctctagaactagtggatcccccgggctgcaggaattcgatatcaagcttatcgatacccgtcgacctcnaaggggggcccggtacccancttttgttccctttaatgaagggttaattgcgcgcttggcgtaatcatggtcatagctgtttcctgtgtgaaattgntattccgctcacaattccccacaacattcgagcccggggagcataaaagtgtnaaaccctggggtgcccttaatgangtggagcctaacctcacatttaatttgcgtttgcgcctnacttgccccgctttttccagttcngggaaaancttttcgtgcccancttgcanttaattgaaatcggcccaacccccccgggganaagggcggttttgcgttattttggggcgnctttttccctttcctntgnnttaattgactcncttgggcntcggtccgtttcgggnttggggggganccggtnttaacnttaccttcaaaaggng

SEQ ID NO: 6216 - DNA, 917 bp, Homo sapiens
  misc_feature 2, 3, 4, 6, 380, 509, 520, 627, 661, 725, 731, 738, 751,752, 756, 762, 767, 776, 793, 801, 817, 822, 823, 827, 869,884, 888, 890, 895, 904, 907, 909: n = A,T,C or G
gnnngncgccgtaatacgactcactatagggcgaattggagctccaccgcggtggcggccgaggtaccacctgctgtatccttccccacctcatcacccccaaagccatttagtgccaaatgctacagtaaaaacccaatgcatttacataaaataatgcctaactgcatatttacattttttagaaaaaaaatcccattaagctcttctagaaagttatggcaggaaaggtaaggaccaaggctatgagcaagccatatgtggaaacttaaagtagatgagcactgagtttctccatagttggaaaaaagccacactgagcccactcttcctgtgaggcaagatgagaccttccttttataccctgttgagaatctcangtggacaacgtgactgcatgagtgttgaaaggcaagcttgccggcttagttatcaccttgcagaggtagctatgcactacacagccacactgcccaaagcgcgctactaagaacactggtcctacaaanggctccttgtnagaaaacttttaggaatcacaagtatttagaaaatctatccactatcatttttcttcctagagatcccgcaatgcacattatcacatgggaattttcagaaagtttnttttattaaaagaaaatgctttaacttttttttnaacctaaaagttttccatatcaaccctggaacctttgggaatcttctttacttttttttaaggnggaccncattttnattagaaacaatnntttntggaanaaaangcctccttntattgggcttttggaanaaaaaatnttttgccggaaaaccnaaaannattnatttaattttttttactttaaaaaaaaatttaagttaacctngttggggatcaaagngttngngcaanaaccaaaanaananccaaaggg

SEQ ID NO: 6217 - DNA, 907 bp, Homo sapiens
  misc_feature 118, 141, 148, 154, 165, 212, 234, 254, 257, 264, 276, 283,301, 320, 324, 337, 383, 395, 457, 469, 483, 501, 503, 504,512, 529, 541, 555, 570, 575, 580, 585, 587, 597, 611, 615,631, 640, 655, 656, 657, 667, 691, 701, 703, 705, 709: n = A,T,C or G
  misc_feature 725, 727, 729, 737, 740, 742, 743, 750, 773, 774, 778, 781,785, 791, 797, 804, 805, 810, 812, 814, 819, 835, 858, 868,871, 874, 881, 884, 887, 903: n = A,T,C or G
gactcactatagggcgaattggagctccccgcggtggcggccgaggtacgcggggacaccaaatcaaccataggtccaagaacaattgtctctggacggcagctatgcgactcaccgngctgtgtgctgtgtgcctgctgnctggcancctggncctgccgctgnctcaggaggcgggaggcatgagtgagctacagtgggaacaggctcangactatctcaagagattttatntctatgactcagaaacaaanaangccaacngtttataagccnaactcanggagatgcaaaaattctntggcctacctataactggnatgntaaactcccgcgncatagaaataatgcagaagcccatatgtggagtgccagatgttgcncaatactcactntttccaaatagcccaaaatggacttccaaagtggtcacctacaggatcgttcatataccttnagacttacccgnatattacaagaggntcgattttgtggtaaaangnntttaaaanatgttggggcaaaaggngatcccccttgnatttttaaggaaantttggtatggggggnaactngctgnacatnantgatttgggntttggcggccgaangagnctcatgggggaccttnctaccccantttttgatggggccnnnggaaaacacncctgggcttcattgcccttttgcngctttggggncnanggtnttcgggaaggaagaangngncacctttngantnnaaggatnaaacgcctggaccgggttggggnngccnaancttnaggggnttaaantttcctnntttgntngnaaacnttttgaacctttgggncaatttttttggggttttggganaattcctctngtnccntaatggnggnggntgtttttccacccttntggg

SEQ ID NO: 6218 - DNA, 942 bp, Homo sapiens
  misc_feature 2, 3, 4, 5, 7, 200, 232, 268, 306, 405, 534, 542, 543, 561,571, 577, 581, 602, 613, 618, 622, 626, 650, 661, 662, 672,674, 676, 691, 710, 711, 717, 719, 727, 729, 730, 753, 762,786, 790, 793, 799, 800, 804, 809, 835, 840, 847, 849: n = A,T,C or G
  misc_feature 850, 851, 878, 879, 880, 884, 885, 886, 894, 905, 921, 925,930, 934, 939: n = A,T,C or G
gnnnnanccgcgtaatacgactcactatagggcgaattggagctccaccgcggtggcggccgcccgggcaggtactactcgattgtcaacgtcaaggagtcgcaggtcgcctggttctaggaataatgggggaagtatgtaggagttgaagattagtccgccgtagtcggtgtacttttttttttttttttttttttggncagtgttggtaggagtttgttacaaaagtgantccatgggcctgtggaatgtgaggggagtgggtccnctccaccagatgccagcaccggggccagtgcagctcanagccctgtggtggactacagggcctgcacagacggtcactcaaagaaagatgtccctgtgccctactccttggcgatggcaaagggcttctccaccctngatcttgccgcaagtctgcgaatgatcacatttctttaggggtttatccccggctggtctgtcttggtgctctccacctttccgcaccacctttattgccctttagaactttgccaaacaccaccccgngtaccttnngccgctctaaaaactaantggatccccncggctncagnaattttattttcaaagccttntcgatacccgntcgancctnaaanggggggggcccccggtacccaaanctttttttttnncccttttatntngnggggtttaattttcnccccctttggccgtttatnnctgggncnattaaccntnnttttccctttggtgaaaaatttnttaattccncctccacaaattttcccaacaaanattncanaacccnngganccatnaaaagtgtaaaaaccccttgggggtnccctnaaatganannnagcctaacttcccaattaaatttgggnnngggnnntaaattanccccttttccnaattccgggaaaaaantttnttttncaanttttnttt

SEQ ID NO: 6219 - DNA, 873 bp, Homo sapiens
  misc_feature 644, 696, 697, 743, 747, 768, 773, 781, 788, 791, 814, 818,856, 859, 865, 871, 872: n = A,T,C or G
cgtaatacgactcactatagggcgaattggagctccaccgcggtggcggccgcccgggcaggtacaccagaagctcattcagagctgggtcagcattcagattcacaaggaagcatttatcatccccaactttgattcccgaagactgaagagatattccaagactctcaagctgtttctgtcgttcctgtgcaatctcctccgttttccttaatttctcctcccaggtcacagtcatttcctggattagcttctcagattcttccagccggtcctttagctctggagatttcattgcctctgctttggtcagctgctcccggagtttctcaacttcttcccggagatcccggataattcgggcattagggtcctcattcaccacagcgtggtttacaatgtgctcggctcgatctgcataccgcagagttgagagggtttcatcataagttatcagctgcaggactcacaagtagccaccatggcggtcttgctgttacccccgaagctgtctttgagcagcccaagtgagaactgagtcaccgatatgggaacaaaatttattcttggttttgccagcactctgatcttggaaagaagctgaaaataaccagaccgagggttggtgaaggacttggtaatgntggctcccctttcttcaacctggtccccctgctgggccctggtcttcgttgnntcgttcactggccagcttaaaatccaaccaaggcttgagttttggncccnctttttttttccaaaatgttnccaanaaccccgngttaccnttngggccggttttaaaaaactaagnggantccccccgggctggcaggaaattcgatttcaagccttnttngattanccggcnng

SEQ ID NO: 6220 - DNA, 874 bp, Homo sapiens
  misc_feature 2, 3, 4, 5, 6, 7, 10, 134, 334, 385, 494, 498, 502, 523,538, 548, 570, 581, 587, 624, 647, 655, 670, 693, 695, 701,702, 704, 716, 720, 734, 738, 743, 748, 751, 840, 845, 855,866, 868: n = A,T,C or G
gnnnnnnccncgtaatacgactcactatagggcgaattggagctccaccgcggtggcggccgaggtactttttttttttttttttttttttggagcacaagataggaactgcagagatacctgcagggcaaganaatttggtgcccacctgagacatgatgacacggcccctcctgtccctccgccaacacgaacaccaacttgttcacatccccagtgactgtgccatgcggagaaggtagaggcaaaagctgagcactagaaccaaaaaagctgagtttgactggaccacgttccttctgcatcccaacaacaactcacacataatagcttnttgacaccaggtgaagtctctaaccttaatatcctcatttgcgaaatgganaaattgacaccacctgagcagggatggcataaggagcagagataatgaggaattcctgccacaaggttaggagatataaatgggagggtgtttctgttttgatgtaaanagtnttanaacttaaggaaaaatcaatantcaaaagataaaacngaaaactctnctatatattttggaaagttaanaaacatacctntaaatnacccatgagtcaaaaaaagaaatttttattccaaccnggaaacttttcgagttctatganaatatgtnttatataacatgccngattttggctgaaccagtgggangnaaatcnnanacttaagtgaangganggccaaattttttntgcncctgnaacantcnccttaaacttgaaaaaagaaaaaaagggacccccaaagaaagttttaagaaaagaaaaatattaaatttttaaagcctgcttcctaatnaaaanaaataaaatntaatttaaaanangggcct

SEQ ID NO: 6221 - DNA, 879 bp, Homo sapiens
  misc_feature 2, 3, 4, 5, 7, 516, 585, 602, 623, 700, 737, 740, 743, 776,779, 792, 797, 828, 843, 853, 870, 874: n = A,T,C or G
gnnnngnccgcgtaatacgactcactatagggcgaattggagctccccgcggtggcggccgcccgggcaggtactatatttgcatatctcacaggttttattatattgcatttctatttccatcttttttcccacaatttttaaattttcattttaattttctttttgagatgggttttactctgtcacccaggctggagtgtagtagcacaatcttggctcactgcaacctctgccttccaggctaaagcgatctttttatttcagcctcccgagtggctaagactataggtgtgcaccaccacatttagcttttttaatatgtattttttgtagagatggggtttgccatgttgcccaggctagtctcaaactcctgacctcaggggatccacctgcctcagcctcccaaagtgctgggattgcaagctgtgagccaccacccctggccggccatcttaattacttcatttacaccgtgactgttcaggaagtatgtttggttaaattctttgnaaaatttatagtttctgaaatttctcttgatattggatttgtagttttattctcctgcgatctaagtanggtagtgatataattgngatttatgggggtacctcggncgctctaaaactagtgggatcccccgggctgcaggaattcgatatcaagctttatcgatacccggtcgaccctcgangggggggccccggtacccaacttttggttccctttangtngangggtaaatttgcgcgccttgggcggtaatcatnggncaataactggttncctgnggggaaaattggtatcccgtttaacaaattncacacaaaattaccnacccggggancattaaaaggggaaaancccnggggg

SEQ ID NO: 6222 - DNA, 931 bp, Homo sapiens
  misc_feature 12, 22, 24, 41, 209, 253, 315, 324, 326, 332, 419, 424, 425,445, 469, 480, 503, 515, 528, 535, 548, 556, 575, 576, 585,604, 605, 610, 627, 642, 660, 664, 680, 693, 697, 699, 718,726, 760, 769, 772, 779, 786, 795, 796, 799, 800: n = A,T,C or G
  misc_feature 805, 811, 818, 823, 826, 852, 856, 858, 882, 885, 887, 891,894, 895, 898, 905, 919, 923, 924, 926, 927, 930: n = A,T,C or G
gtaatacgactnactatagagncnaattggagctccaccgnggtggcggccgaggtaccctccttctgttgtgctacccacgaggaaatgtgctcttcgctagtgcagaaaacatttagaattatccagtaatgagcccagcaggatggatgaagcttggggaactcctaagagcttattgaattacagagaaattccagttgtcaaancattatatagaggaaaagttatagggtgttacttatcagcaggnagcctgcatttggagagaattttcttttctcttaataaaacatggaccaattgcagaaaggncttaaaaangnaaaaantaaagtacctgcccgggcggccgctctagaactaagtggatcccccgggctgcaggaattcgatatcaagcttatcgatacccgtcnacctnnagggggggcccggtacccancttttgttccctttagtgaggggnttaattgcccncttggcgtaaataatggtcatanctgttttcctgnggtgaaaatgttnttcccgnttcacaaattttncacacaanataccgaagccccgggganncaataaaangtgtaaaagccctgggggnngcctnatgaagtgaagctaacntcacaattaaatttngcgttgcgcttcactggncccnctttccaagtccgggnaaacctggtccgngccnancttgcatttaattgaaaantggccaancccccccggggagaaagccgttttgcagaatttngggcgcctnttncgctttncttcgcntcacttgannttnngttgnggcttnggttcgntttcnggnttgcggccaagccgggtatttcaacntcancntcaaaagggggggaattccggttnttncncaanaanntangggggantaccccaggaaaanaacnntnnttnc

SEQ ID NO: 6223 - DNA, 824 bp, Homo sapiens
  misc_feature 705, 788, 810, 813: n = A,T,C or G
tagggagtcgaccccgcgtccgtgctctaatgccttccatttggcttttctcatcataatatccctcatctccacacgttagggaaccagtgagggaattctggcagctgataaatacgtttattccaattatacattctggaactgtggaaatgaccacaggataggtttggagacccactgttccaactgtaagccatactggaactaaaactccactgatcaccttacctccaaaagcccttaccctgattggaggccacagtgatgttttctgtgttctggaatcagtatgaattcagagccagtgtcaagaagtcctcagaatgtctgattgtttcccttttttcaatgcacagttaccttggtaaaatgctggaggtccctttgggtgaggatttggacaaaaattaacagtataaattttcagtattgtacccaggtccttctttaaggacttccctttcatttagaggtctgcaagctggctcaagtctggaaattgattgaaaggccatgatctctggtatcctttgagttagacttttgttcacttgaactgggagttttctgcttacacagatcaagtaagaatgccagtagggttctcatctgtttcacttttagcaacattatggtttattagctagcatcattaggtctgaatgagtcagaatattttaactggtcctttgcctctactgnttattttgctaactatccccaccttgccttaagggggtgagtactggccccctgggccctgctccccaaaaataaaaattacnttcccttagatgtaagcttttnccntcccccccccc

SEQ ID NO: 6224 - DNA, 1383 bp, Homo sapiens
  misc_feature 16, 25, 53, 73, 75, 91, 95, 111, 128, 133, 135, 171, 218,251, 259, 265, 268, 318, 333, 350, 353, 358, 408, 415, 419,431, 459, 463, 464, 468, 470, 473, 475, 477, 482, 488, 498,515, 519, 523, 530, 532, 549, 563, 572, 582, 585, 596: n = A,T,C or G
  misc_feature 599, 602, 608, 612, 620, 624, 628, 653, 661, 664, 669, 670,675, 679, 682, 687, 690, 691, 697, 705, 710, 718, 719, 727,728, 735, 741, 753, 755, 763, 788, 813, 817, 826, 850, 861,872, 873, 877, 885, 886, 913, 919, 935, 942, 947, 957: n = A,T,C or G
  misc_feature 974, 976, 981, 985, 990, 991, 993, 995, 1000, 1002, 1006,1007, 1009, 1031, 1033, 1036, 1042, 1049, 1059, 1073, 1074,1078, 1087, 1088, 1098, 1103, 1104, 1109, 1110, 1115, 1118,1126, 1134, 1145, 1159, 1163, 1164, 1169, 1172, 1175: n = A,T,C or G
  misc_feature 1181, 1199, 1202, 1211, 1212, 1214, 1232, 1242, 1244, 1248,1249, 1265, 1271, 1272, 1281, 1282, 1286, 1287, 1292, 1305,1321, 1324, 1331, 1333, 1334, 1336, 1348, 1356, 1360, 1365,1366, 1368, 1370, 1378, 1380, 1381: n = A,T,C or G
ggcctgccggccgggnaccgcccanattgggtcttttacaaaaggggtgttancatttcggccggggcaagcntnggggaaaccgccttgnggcncgccgcccaggggccncttgtagggggacttcngccgngnccccccaagattgggccggccggggcccgcttaagnacttaggttccttaggaagaaaaaaaaaaccttccccaccacccttnccccctggaaacctggaaaaaccattaaaaaantggaaaangccaanttnggttgggttggttaaactttgggttttaatttggcaagcttttataaatngggtttacccaaaanttaaaagccaatttagncantccancaaaaattttcaacaaaaattaaaaagccaatttttttttttcaactggncatttcntaantttggggggggntttgggccccaaaacccttcaattaaantggnnaatncnttnantncaatngggccntggggaaatncccccccggggggttancccnggangccttcngnaaaattaaaaatttccnttttttttcccggnttttccttnggggttttanaanttgggaaattnccnggnttgggngccnttcggggnccgntttnccggcttttctcggggcaaaaagcnccggtttnttnaaagnnttaanactnttnaaaanggnngggggntaaaattnaccgngggttttnnttcccccnnaaaaaanttcaangggggggaaatnancccccccngggggaaaaaaaaaaaaccttttgntagaagcccaaaaaaagggggcccnccgncaaaaaaanggggccccagggaaaaaccccggntaaaaaaaaangggcccccccnntttnttttgggnnccgttttttttcccatataaggggccntcccgncccccccccctttggngcggggngggcntttttacaanaaaaaaaatttcgcgcncnccttnaaanttccnnananggggngngggnngnaaaacccccccccccggggggntnttntttaangaataancccccggggnggtgttttcccccnnttgnggaaaaagnncccccttttnggggnngcgcnnttttntcngttttttncaaaaacnttttggccggnttttacccgggggnaaanncccgnggnccncccctntttttttcccctttttgnggnaaaaaactnngnggggcctttttttttatnaaaaagtccncncccnntgggggggggtttttntaacanntctcggggnntaannggggngtttctccctctncaaaaaaatttggggnttnttgtgtncnncnaaaaaaaccccnctttttanaacnccccnnancntgttgggncnntt

SEQ ID NO: 6225 - DNA, 909 bp, Homo sapiens
  misc_feature 2, 3, 4, 8, 10, 13, 14, 16, 17, 619, 637, 681, 690, 720,740, 741, 744, 752, 783, 809, 840, 867, 879, 888, 889, 890,904: n = A,T,C or G
gnnnatangnttnntnnaatacgactcactatagggcgaattgggccctctagatgcatgctcgagcggccgccagtgtgatggatatctgcagaattcggcttagcgtggtcgcggccgaggtactggaggagctgaaagaaaaacacccaaggctgggcgtggtggcacacgcctgtaatcccagcactttgggaggccgaggcaggtggatcacctgaggtcgggagttggagaccagcttgaccaacatggagaaaccccgtctctactaaaaatacaaaattggccgggcgtggtggcgcatgcctgtaatcccagctactcgggagggtgaggcaggataattgcttgaccctgggaggtggaggttatggtgagctaagatcgtgccattgcactccagccttggcaacaagagcgaaactccgtctcaaaaaaaaaaataaaacaacacccagatagatacacatactccttcagacttacagacctaagctgcatttatggggtagtgatgaggtttaagaacatataccatattttgttaaaattccccagatgattctttggtttgaaccgacttttttataaaattttaaagaatgtaccttgcccngggcgggccgcttcgaanccccaattccaagcacacttggcgggccgttacttaatgggatnccgagctcnggtaccaaagcttgggcgttaattcatggncaataagcttgtttccttgnngtngaaatttnttaattccgttcacaaatttcccaacaaaantaccgaagccgggaagcattaaaagngttaaaagccctgggggtggcctaaatgagntgagcctaaacttcacatttaattggngtttggcggctnaattggccnnnttttcaatcggggnaaacc

SEQ ID NO: 6226 - DNA, 886 bp, Homo sapiens
  misc_feature 2, 3, 4, 9, 10, 11, 15, 302, 335, 339, 341, 345, 347, 359,366, 368, 418, 430, 432, 465, 498, 513, 520, 537, 598, 610,612, 623, 628, 633, 645, 647, 651, 685, 699, 700, 711, 716,737, 752, 774, 780, 783, 791, 806, 829, 839, 844, 849: n = A,T,C or G
  misc_feature 877: n = A,T,C or G
gnnnagttnnncttntatagggagtcgacccacgcgtccgcattattgggtaaatacccaaaggaatattaattgttctaccataaagacacatgcatgcatatgttcattgaagcactatcccgcaatagtaaagacatggaatcagcctaaatgcccatcaacagtaaactggattaagtaaatgtgatgtatatacaccatgaattactacacagccttaaaagggaacaaggatcatgtcctttgcagcaacatggatggagctggaggccattatcctaagtgaacgaacactaacnccacattttggggagtgggagctaaacattgantttncntgancncaaggaaaagancaggacncnctggagtctacttaagggtggaggatgaaaggaaggaaaggatcaaaacnctacctattggntnctttgcttattacctgggtgacaaaataatctntaccccaaacccccgtgacttaccatttacttntgtaaacaaactgtnttttgtncccctggaacctaaaantaaaaaggttaaaaattaaaaagttaaaaaaaaaaaaaaaaaaaaggggcgggcccgtttnacttagtttaananaaaaaaacttncaaanacttncccttgaccctngnaacnttaaaatggaatgccatttggtggtgggtaaccntgggttatttggcnnctttattaaanggttnccaattaaagccaattccttnccaaattttccaaanaaaggcatttttttcaccgggnttctanatnggggggtnggcccaacctcaatnaattggttttttttaactcctcnggcctccccngggtncccgngcttcgaatttaaattcctttttccccnccccccccc

SEQ ID NO: 6227 - DNA, 841 bp, Homo sapiens
  misc_feature 2, 3, 4, 7, 8, 9, 10, 11, 524, 535, 591, 631, 644, 665, 702,759, 769, 839: n = A,T,C or G
gnnnagnnnnnctcctatagggagtcgactcaagctgacaaagggtaaacaaaaataagaaagccagaaactcactgatacgtcagacaatatgcagcagtgtaacatacatgtaatcaatatctcaaaaaggaagggtgggggaattataggtgaataaagaatggtacactcattcctgagggcaccgaggagggaggatagctttagattcctaagggagggtattatccattcatgaaggtccaacccccatgaacaaacacctcccagtgagccccacctgcaacattggggataaaattttaacatgagattggaaggggcaagcattcaaaccatagcaagagttaaatttcctttttaaaaaaaaaatcactgatatgattccatttcgccatagataaaagctagtatttcagcctaccattgagtgtatttatagctcaccaaaagggcactctgtctcgggaatacagctttgcctagaggtatcctattgcagtcaaagaaagagcaatganggatagaaaangttagtgatggagaccccagcgctgcattttgcacaaacaatgtaaaaactttacngattggttctgctacttactacagtttacattcctctcangtgggagaattgntgcgttttttcttaagataanaaaagcaattcagataatctgaaatcttccccagaanggataagaagcccagcagaaactttttaggtaggaagtcaatcctttcactgtctgnggctccatanaaaccaattgtctggactgggagtcatatgaagtacagaccacagccagacctttggaaccttcattagngg

SEQ ID NO: 6228 - DNA, 948 bp, Homo sapiens
  misc_feature 312, 396, 455, 456, 472, 507, 531, 556, 567, 572, 591, 592,628, 631, 640, 641, 643, 647, 653, 693, 700, 705, 709, 713,729, 739, 752, 760, 762, 766, 777, 783, 785, 793, 795, 812,824, 832, 836, 840, 844, 865, 871, 873, 886, 897, 911: n = A,T,C or G
  misc_feature 913, 916, 917, 921, 936, 938, 942, 944, 945: n = A,T,C or G
gactactatagggcgaattgggccctctagatgcatgctcgagcggccgccagtgtgatggatatctgcagaattcggcttagcgtggtcgcggccgaggtacctgggccaccaaacacagctggactcaatatatggggaaggtaagtgtcctcagtttttggagagagattaccctcttccaaaagagtgcttgattctggtagtccaagccgtctccgtctggtggcaccccaatttcccctgcctagacccacctcctttcctcagcccccttcgcctgccgccccgcgtacctgcccgggcggccgntcgaagcccgaattccagcacactggcggcccgttactagtggatccgagctcggtaccaagcttggcgtaatcatggtcatanctgtttcctgtgttgaaaatttgtttatccgcttacaatttccacaccaacataccganncccgggaagccattanaaagtggtaaaagccttggggggtgccctaaatgnagtggagcctaaccttcacatttnaatttggcgttggcgcttaacttgnccccgcttttnccaantccggggaaaacctggtcnngcccaacttgcatttaaatggaattcggccccaacnccnccgggggannangcgngttttnccttatttggggcgcttctttccgcttttctttggttcanttggacntccgnttgngctncgggtccttttcgggnttgccgggcnaagccggggattnaagctttnantttnaaaggggcggnaaaatncnggtttttncnacaaaaaatcaaggggnattaaacccccngggaaaanaacnattnttanccaaaaagggccagccaaaanggccangnaacccttaaaaangccccggttgnttgggggttttttncnttnnggcnccgccccccctggangngaantnnaat

SEQ ID NO: 6229 - DNA, 935 bp, Homo sapiens
  misc_feature 2, 3, 5, 13, 20, 26, 33, 87, 555, 561, 563, 568, 589, 598,603, 648, 649, 650, 652, 665, 671, 673, 674, 675, 680, 681,686, 687, 688, 693, 694, 695, 696, 702, 705, 709, 710, 712,735, 736, 739, 746, 757, 758, 759, 760, 783, 790, 792: n = A,T,C or G
  misc_feature 793, 797, 799, 802, 803, 807, 808, 814, 816, 817, 818, 831,833, 838, 878, 879, 890, 899, 901, 906, 925, 926: n = A,T,C or G
gnncngctttgantcctttngggagncgacccnttcgtccggtcatttacttaaattattttggttgtttttccctttttttccttnttttcccaccccctccccctccatgtgaagatttgggtgcttaacatatcatttttttccctgccggaattttagcattgatatgaaccatggacaagtatattctgctgccacaaagactgtaaagtgcttcatttcaacagctgaggaaggtgtcttgctgcaggtaactaatgaagaagtggtcaaccacagagtcttcaagaaataagaaattctgtaccatctgaaagtagttcttgttggtgccttcatttaaaaagcactctttaaaataaaagggaaatgttttctgataaaacaaacatttaagttgaggttcttgatataaaacaattacaaaatgagtgttgtttgtaaaacagtaaccatcaaattggctagagagataaaatgtatcatggtttttaaattaaggttttgtgaggtagacaggaattaccaatttctatttttaaaatattaaanggcccncnaaaanccccccccttttccccccccncccaaaggntcccntttcccccccttttccccccccccccccccttccccccccttttnnntnccccttccatttncccccntnnngcccnnaaaannnccccnnnngggggnccncctnnanaccctgaaaaaaaaaaaaaaaannaantcccaanttgtttccccnnnntaaccccggaaaaaataaaaaantaaaacnanngggngnccnngaanncccccngnnnttccccaattttncncaaanaaaaccattttttttccctggccttctaaattgggggttnngccaaaacttnttaaagggntnttttnttatgggggggggtccccnngccccccct

SEQ ID NO: 6230 - DNA, 603 bp, Homo sapiens
  misc_feature 120, 243, 266, 374, 563, 575, 578, 597: n = A,T,C or G
tacgactactatagggcgaattgggccctctagatgcatgctcgagcggccgccagtgtgatggatatctgcagaattcggcttagcgtggtcgcggccgaggtacctagcagaacacanatttaaacatttccatatttagatgaagaaaacagggcaaaactaactaattttctcaaattaaattactggcaaaataaaggtggtgggaaccgttaaggtacctgcccgggcggctgctcnagccctatagtgagtcgtattanagccgaattccagcacactggcggccgttactagtggatccgagctcggtaccaagcttggcgtaatcatggtcatagctgtttcctgtgtgaaattgttatccgctnacaattccacacaacatacgagccggaagcataaagtgtaaagcctggggtgcctaatgagtgagctaactcacattaattgcgttgcgctcctgcccgcttttcagtcgggaaacctgtcgtgccaactgcattaatgaattcggccaacgccccggggaaaagccgtttgcgtattgggcgctcttncgctttcttcgnttnaaatgactcgctgcgctcngtcttt

SEQ ID NO: 6231 - DNA, 917 bp, Homo sapiens
  misc_feature 463, 470, 474, 475, 477, 499, 500, 504, 512, 515, 516, 520,540, 541, 542, 550, 554, 560, 584, 586, 595, 596, 607, 620,621, 632, 643, 652, 659, 660, 662, 665, 667, 673, 680, 690,692, 698, 700, 708, 711, 715, 719, 725, 734, 746, 747: n = A,T,C or G
  misc_feature 748, 752, 754, 755, 756, 757, 759, 762, 769, 771, 785, 786,787, 803, 809, 838, 850, 862, 866, 871, 873, 874, 875, 887,888, 908: n = A,T,C or G
gtcgctcaagctaaaggggaatctccgtggacaaggacactggtactttgggctttagccatattcatttttttgaaaccaccaattatataatacttaaataatttatatcattgaacttgtgattcttttcaaatcacactgaaggttcagccgtactcctttcatgtttggtttaatactgttgtatggatgaaaaacctaaaagggatgatagtgtttattttttaatttatttggtactgtaaaacaccttttcagaatgagtaaatgctgcatatgcattttggagttgttaatatgtgaaagatattacagattcagcaaagaaaggaaatttgtgcttccttgttgaatgttaaattattttactttgcattttataaagagtcaaattaaaaactgagccatttgaactggcaataaaatccaaaccaattagtggtctcaatttcaaaggaanaaaaaanaaannanaaccccttaatatatcaaagtnngggntccctggnaannaagnaaaaaaggggggggggcccnnntaaaaaantttngtcttnaaaaaaaaaaaaaacctttccaanancttccccgnnggaacccttgnaacctttaaaaannaaaggcccccntgggggggggnggaaaactngggtttnntnggngnctttanaaggggngaacaaaaanangggccngngccccggnccnaatntttncccaanaaaaagccntttttttttttnnngggncnnnnanggnggggggntngtcccccctccccnnnttttttttttttttgngggggnccccccccccccccccctccccctttttncccccccccccnttttttttgtgnttgnccggnannntgtttttttttnnccctcccctccccggggccncccccccct

SEQ ID NO: 6232 - DNA, 859 bp, Homo sapiens
  misc_feature 287, 291, 470, 477, 493, 605, 619, 621, 627, 630, 641, 685,690, 699, 705, 751, 759, 776, 779, 781, 796, 799, 804, 813,825, 828, 832, 848, 849, 857: n = A,T,C or G
gggagtcgaccccgcgtccgcaagcgtgagcttccgcgcctggcctgtgacctcattttaacttggttacctctgtaaagagcttgtctcagataaggtcacatctgagatactgggggtcaggattctacatgtgagtctgggaagacactgttcaccccttaacatccctgttctccagggtcttcagatatagttttgggtgcaaggaaaggcagctaagtaccaagttaattatgagaaggaccagttttgaggatttcaggaaaaaaaaaaaaaaaaaaaanaaangtgcggccgctagactagtctagagaaaaaacctcccacacctccccctgaacctgaaacataaaatgaatgcaattgttgttgttaacttgtttattgcagcttataatggttacaaataaagcaatagcatcacaaatttcacaaataaagcatttttttcactgcattctaattgngggttgnccaaactcatcaatgnatcttatcatgtctggatccccgggtcccgagctcgaattaattccttttccggttcctcgctcactgactcgctgcctcggtcgttccgctgcgggcagcggtattcagcntcacttcaaaggcngnaaatancgnttattccccanaatcagggggataaccccagggaaagaaacatgtgaaccaaaanggccnaccaaaaanggccangaaccccgtaaaaaaggccccgttgcttggccgttttttcccaaanggcttccnccccccctggccgagcnttnancaaaaaaattgaccnccncaagntcaaaaggngggggaaacccnccngggnctttttaaagataccnngccgtttnct

SEQ ID NO: 6233 - DNA, 843 bp, Homo sapiens
  misc_feature 2, 3, 4, 7, 8, 9, 453, 604, 610, 612, 613, 614, 615, 616,617, 755, 822, 838: n = A,T,C or G
gnnnagnnnatacttagggagtcgaccccgcgtccggagaggtccttgttctgctttagactttggcttaagagaatgtgtggctggttttattttctatccagaccacccaaactttcttcatatcaggaagaagcttttttgctttcttattattgatgttttcacttgagtagtacttttaatttctttctagaacagttttgttgcacaactcaggtgtttggtgcaagaggcttacctttcagcctatctcaacttttgaagttcctctctcagtaagcctaaacatttgtaacatttcattgaaagtgagagacatggccaggcatggtggctcatgcttgtaattccagcactttgggaggctgaagcaggcggattatgaggtcaggagtttgagaccagcctgaccaatatggtggaaccccatctctactaaaaataaattanctgggcgtggtggtgcgcaactgtaatcccagctactcaggaggctgagacaggagaatcgcttgaacccgggaggcaaaggttgcagtgagcagaaaattgcgccactgtactccaacctgggggacagagtgagactccatctcaaaanaaaaanannnnnnaagtgcgggccgctagactagtctagaaaaaaaaaccttccacaccttcccctgaacctgaaacataaaatgaatgccattggtggtggtaacctggttattgcagcttataatgggtaccaattaagcaatacctcncaaatttcacaaaataaagcattttttttcactgcattctaattgggggttggccaacccatcaatntattcttatcatggcntggaa

SEQ ID NO: 6234 - DNA, 857 bp, Homo sapiens
  misc_feature 2, 3, 4, 6, 8, 14, 35, 613, 618, 663, 697, 702, 713, 715,730, 778, 781, 804, 807, 818, 830, 832, 835, 849, 850, 857: n = A,T,C or G
gnnntngnttaccntttggagctttatcagcagtntgaaaacagactactatggtaaattggtaccagcagtggggtactgctgaaaagatacccgaaaatgtggaagcaactttggaactgggtagcaggcaggggctgcaacagtttggagggctcagaaaaagacaggaaaatgtgggaaagtttggaactccccatagacttgttgaatgactttatccaaaatgctgatagtgatatggaccataaagtccaggctgagatggtctcagatggaaatgaggaacttgttgggaacagtagcaaaaggtgactcttgttatgttttagcaaagacactaagcatttttcccctgccctagagatttgtggaactttgaacttggagagatgatttagggtatctggtgaaataaatttctaagcagcaaagcattcaagaggtgacttgggtgctgttaaaggcattcatttttataacagaagcagcataaagctttggaaaatttgcagcctgacaatgtgatagaaaagaaaatcccagcagggcatggtggctcatgcctgtaatcccacactttgggaagctgaaggtgagcccatcacctganggcangagttcaagaacagccctggcccacatgggaaaaacccccgtctnttctaaaaaaaaaaaaaaaaaaaaaagtgccggncgttnaactaatctananaaaaaaaacttccanaactttcccttggaccttgaaacataaaaatgaatgcaattggttgtngtnaccttgttttttggcaccttatnaangggttccaaantaaagccatttncnttnccaatttcccaaannaaagccn

SEQ ID NO: 6235 - DNA, 914 bp, Homo sapiens
  misc_feature 2, 7, 8, 9, 10, 11, 630, 633, 635, 638, 694, 698, 701, 708,710, 727, 741, 750, 752, 762, 777, 792, 808, 817, 822, 843,845, 848, 855, 857, 861, 864, 869, 870, 894, 899, 905: n = A,T,C or G
gnatagnnnnnccgcgtaatacgactcactatagggcgaattggagctccaccgcggtggcggccgaggtacccgcaccacagtctccgaggtcacgtagaagtcttgctcttgggtgcctttgtggttgaagcttgtctcccacttagctttaaagaagatgtaattcaccatgatcacgaccgcattgctatcgaggttcttaagcaagtccacaatcttgcccttcgtttgctttgccacataatcattgatctgcttcatggcccctgcagagtccctaaagttggtagggaaagtgtctgccaggtacctgcccgggcggccgaggtacgcggggtctcgctctctgtgttccaatcgcccggtgcggtggtgcagggtctcgggctagtcatggcgtccccgtcttcggaagactgcagactaaaccagtcattactttgtttcaagaagcgttctgctaatctaacactttttatttttctagaatcactgggcgttatccttcttgcaagttgggcattttgggggcaaaggtgagcctggagaattacttttctcttttaaatgagaaggccaccaatgccccctttcgtgctcatttgctactggacctgcccgggcggncgntntanaaactagtgggatcccccgggcttgcaggaatttcgatattaaaccttatcaatanccgntcnaccctcnanggggggggccccggttnccaagttttggttnccctttaantnggaggggttnaaattggcccccctnggcggtaaatcaatngggccataaacttgtntttcctggngttgnaaaattttttattcccccttnanaanttccccnanaaanaantacgnncccggggagcataaagggttaaangcccngggggnggccctaat

SEQ ID NO: 6236 - DNA, 872 bp, Homo sapiens
  misc_feature 2, 3, 4, 9, 10, 25, 91, 227, 248, 252, 278, 293, 295, 351,418, 464, 480, 499, 505, 514, 578, 580, 585, 602, 606, 608,616, 617, 618, 620, 654, 668, 673, 688, 694, 701, 705, 718,720, 723, 730, 732, 738, 752, 781, 784, 788, 792, 793: n = A,T,C or G
  misc_feature 804, 806, 814, 823, 829, 835, 850, 851, 854, 858, 867, 868,869, 871, 872: n = A,T,C or G
gnnnatagnntatacttttggagtngacatagcggtcaccgcttttgctcacgccaccaatcaagtccgaggcgttctgggtttgtgccanatattttgccgcagtactggttgcacctttggttgagagcgcaaacacagaggaaccgctcggctgacgactggtaaaggcgtcggcatggatagagacaaacaggtcagcacgctgtttctgggcttttgctacncgcacttgcaatggaatgaanatgncttcattgcgcgtcatgtacaccttnatattgccctctttntngatcagagagcgcaaacggcgagctatttgcaataccacatctttttcgcgcgttntgtatttccccaccgcaccggagtcttcgccaccgtggccagggtcaagcataatgacaattggacnatcgaaccctgctttacccggttgtggaccactttgcgctggcggnacctgcttttcgaggncgcctttgttgtaatcctncaacancgccagcancgggtcctgcatatcctgtgcattggccggatagaggttcattaccagacgctttttaaacccngngaccngcgcaagggcaaacagntgcngntttacgtnnngntttaatttaaaaaacataccgtccggtttgcggngtcaaaattgcccngaacncgcgccgacttggangaaacnggttcgncttnaacgaaattttgngnccncccattncncttggnattacccggtttcncgggttaacatcttgggaaaaacccccancanaacntttnnggggtactttnancgcgaaantggttatantttcanataaangaatttggatttccnnggntacncccggttgnnngnn

SEQ ID NO: 6237 - DNA, 635 bp, Homo sapiens
  misc_feature 112, 150, 358, 378, 389, 399, 400, 430, 431, 449, 461, 464,482, 493, 513, 516, 527, 531, 532, 533, 537, 548, 549, 567,570, 575, 595, 598, 602, 604, 614, 625, 627, 630: n = A,T,C or G
gggcgaattggagctccccgcggtggcggccgcccgggcaggtacagatggggttttggtgtggatgtcctttctgtttgttagttttccttctaacagtcaggatcctcanctgcacgtctgttggagtttgctggaggtccactccanaccctgtttgcctgggtatcaccagtggaggctgcagaagagcggatattggtgaacagcaaatgttgctgcctgatcattcctgtggaagttttgtctcagaggagtaccgcggcatgccctatctcaacaagctcaactaccgtcggacggaccatgaggatccacgggttaaaaagacagctttccagatttagccatggccaangccaaggcccaactcagctngaggagagcantgggcccatnntattgcctttggagaaccttcgggcatgtnnaagaggcaaccaccccangggcaatcccanttntcggtttctacccaaaantgaggggggantccgatatgacctacaaacnacnagtcccccttnaaannnatgnttgaccccttnntggaggctgggaacctgnaanacctntctgggcattgggggggccnaangccncntgggaaattnaagggccctgntnttntcaag

SEQ ID NO: 6238 - DNA, 663 bp, Homo sapiens
  misc_feature 3, 4, 8, 13, 104, 137, 139, 141, 145, 152, 164, 244, 250,252, 285, 312, 318, 325, 333, 338, 345, 357, 362, 368, 371,378, 391, 403, 404, 405, 410, 416, 434, 443, 448, 455, 461,463, 489, 500, 510, 512, 513, 521, 527, 541, 545, 548: n = A,T,C or G
  misc_feature 550, 552, 560, 562, 563, 565, 566, 573, 574, 596, 597, 599,604, 613, 614, 618, 621, 624, 625, 626, 628, 629, 640, 642,643, 644, 645, 651, 652, 655, 658: n = A,T,C or G
ttnnttantacantcgtaatacgactcactatagggcgaattggagctccaccgcggtggcggccgcccgggcaggtacttttttttttttttttttttttttnggttttttttttttttttttttttttttttttnananaggnaggaagnttattaattatnttattttgtaaatatatattatgtatttaatttgatttaatcacattacataggttgaatttgggggttgcttttaaagngttganantttagtgtttatttttgtaatccaacaactttntccaaaaatgcaaaaaatttttttggntggccnggagganaacctttnactgntgataantccattgactgnaacancccagnaancgtgctncaggtaccttggngctttaaaactnnngggancccccnggcttcctgaattccatntcaagcttnttganaccgtcnaccttnanggggggcccgggtacccaaattttgnttccctttaangagggttaantnncccccccnttgggngtaaataaatgggncaanaancntnttttcccntnngnngaaaaannggataaaacccctttaaaaaanntncccanaaaaaaaannaaanaanccnnngnngcccttataangnnnntaaaannccnttngggtg

SEQ ID NO: 6239 - DNA, 631 bp, Homo sapiens
  misc_feature 356, 427, 477, 495, 504, 548, 564, 573, 579, 583, 601, 611,612, 619, 626, 627, 628, 630, 631: n = A,T,C or G
actactatagggcgaattggagctccaccgcggtggcggccgcccgggcaggtacgtcatacacataatctgtagcagtggcggtttaagtgaatctcctttgtgcttaaacaacgtatctttagttagctggtgggagtgggcttaactaggagcctgcatatctagccacattccagtgcttcagaggagcgcctttcttcttgagcacagtgtttatagataagagagcaggttgtgctcagagcatgggaacataatggcgataagaaggctttcctcctcagagtcctcttgtggctttccacaacttactgtcccatgtttttatggccagtttatgcaggcaccctgtnagcctttttcccaacatgccccccttttttcttttttaaaactgccattgctattaagacttgttcctggnggctggtctctctccagaggcatcttccgcatcttgcaggacaccatggnaatttaccgcaatcatangctaccatnaaggttactccaggggtaagtgggtttttggttgtggtttttcnaggttttttctttttngcaaagggngggggnccanccctctttggattctggnccccccaagnnttgggtngggcctnnncnn

SEQ ID NO: 6240 - DNA, 699 bp, Homo sapiens
  misc_feature 238, 284, 285, 286, 287, 290, 291, 299, 300, 301, 302, 306,308, 310, 312, 315, 317, 318, 319, 323, 326, 328, 331, 333,338, 339, 340, 343, 345, 351, 357, 358, 359, 360, 361, 363,366, 368, 370, 372, 373, 374, 377, 384, 388, 390, 392: n = A,T,C or G
  misc_feature 393, 399, 403, 418, 419, 422, 431, 432, 433, 434, 435, 440,441, 442, 443, 444, 445, 447, 456, 462, 463, 464, 465, 466,467, 468, 472, 473, 485, 487, 488, 494, 497, 499, 500, 503,508, 510, 514, 516, 522, 526, 527, 528, 530, 535, 543: n = A,T,C or G
  misc_feature 545, 549, 551, 552, 554, 563, 565, 567, 570, 574, 582, 583,585, 589, 590, 593, 598, 601, 603, 604, 606, 607, 608, 611,615, 617, 618, 620, 624, 625, 626, 627, 632, 635, 639, 641,644, 647, 649, 650, 651, 665, 666, 667, 669, 670, 672: n = A,T,C or G
  misc_feature 680, 681, 684, 685, 686, 689: n = A,T,C or G
gactcactatagggcgaattggagctccaccgcggtggcggccgcccgggcaggtacaaaaattagccgggcgtgatggcaggcgccggtaatcccagctactcaggatgctgaggcaggagatttgcttgaacctgggaggcggaggttgcagtgagccgagattgcaccattgcactccagtctgggcgacaagagtgagactttgtctcaaaaaaaaaaaaaaaaaaaaaaaaanggactctgcgttgttaccactgcttcccgcgtactctgcgttgatnnnnaannaaaaagannnntaangnangnaanannnaaanaananaananaaaannnttnangaaacntctagnnnnncntantngngnnngcntctctantccnancnnatttanaccnccctttttagttatnntantggaaaatnnnnnttctnnnnnnanatttattantaggcnnnnnnnttannacttcattgaantnnaaaacngantnnatntcccntntcananttttanaaannnancaatnacctatancncagnanncnaatacattngnantancccncattgggnntntctnnaantgggntgnanncnnnatnaaantnntnatannnnttggnggnctananaantantnnntctctcatcccccnnntnncnttctcccnnccnnngcnccccccccct

SEQ ID NO: 6241 - DNA, 822 bp, Homo sapiens
  misc_feature 5, 8, 10, 11, 17, 22, 24, 25, 27, 28, 30, 37, 41, 43, 46,48, 49, 51, 53, 54, 57, 59, 60, 65, 67, 69, 70, 71, 72,73, 75, 76, 78, 80, 81, 85, 101, 111, 254, 373, 394, 402,403, 419, 465, 505, 523, 548, 556, 564, 576, 582, 587, 593: n = A,T,C or G
  misc_feature 596, 597, 635, 645, 648, 656, 660, 675, 683, 686, 697, 704,706, 709, 714, 716, 724, 727, 730, 760, 761, 763, 771, 773,774, 786, 790, 793, 800, 809, 814, 821, 822: n = A,T,C or G
actanttntnngctaanttatnanntnnanttttganaatnanatntnnantnnttnanntactnantnnnnntnntncnngggnttagttttcgtatacnactcactatngggcgaattggagctccaccgcggtggcggccgaggtaccaacagcacccaggcaaagcccccaaactcatgatttgtgaggtcagtaagcggccctcaggggtttctaatcgcttctctggctccaagtctggcaacacggnctccctgacaatctctgggctccaggctgaggacgaggctgattattactgctgctcatatggagataatagcactttgggtgttcggcggagggaccaagctgaccgtcctaggtcancccaaggctgcccccttcggncactctgnntcccaccctcctctgnagggagcttcaagccaaacaagggccacacctgggtgtggtctcantaaagtgacttctacccccggggagcccgtggacaagtgngcctgggaaggcagtatnagcaagccccggtcataggccgggnaagttggnggacccanccaaaacccttntcaaancaaanggcagncannctaagttacccttgcccgggccgggcccggcttctaangaaactaagnggnattccccncccnggggcttgcacaggnaatttacnaanatttcaaagcntttattngnatnccccntncgaaaccnttnggngggggggggggggccccccgggtacccccnnancatttttngnntcccctttttanagtngangggggtnttaaatatnggccnccccctnn

SEQ ID NO: 6242 - DNA, 619 bp, Homo sapiens
  misc_feature 342, 378, 485, 488, 564, 582, 614: n = A,T,C or G
cgtaatacgactcactatagggcgaattggagctccaccgcggtggcggccgcccgggcaggtacgcgggaaggcctgaaagagagaggtatgttttctctcctccagagtctctgtggtgttgacacagcagagagaggagggggaggggcctcgtcttgcagaatcaccttcaatcactgctactgtctgggccattactgccagtctggccggtgtctcccacagtggatggctttgcctccagcggtggaccagtgtgtacctcggccgctctagaactagtggatcccccgggctgcaggaattccgatatcaagcttatcgataccgtcgacctcnagggggggcccggtacccagcttttgttccctttantgagggttaattgcgcccttggcgtaatcatggtcatagcttgtttcctgtgtgaaattgttatccgctcacaatttccacacaacataccgagcccgggagcattnaantgtaaaagcctggggtgcctaatgaagtgagctaactcacatttaattgcgttgcgctcactgcccgcttttccantccgggaaacctgtcgtnccagctgcatttaatgaaatcggccaaccccncgggg

SEQ ID NO: 6243 - DNA, 1010 bp, Homo sapiens
  misc_feature 57, 98, 105, 187, 245, 251, 282, 318, 336, 338, 345, 384,398, 403, 456, 459, 463, 470, 474, 481, 482, 484, 496, 522,523, 527, 532, 536, 537, 560, 563, 566, 574, 578, 595, 610,617, 622, 623, 625, 626, 644, 653, 654, 664, 675, 682: n = A,T,C or G
  misc_feature 686, 687, 706, 717, 718, 729, 736, 739, 748, 751, 755, 766,771, 773, 775, 778, 780, 789, 792, 794, 801, 803, 814, 816,820, 826, 834, 839, 842, 845, 853, 859, 864, 877, 878, 879,880, 884, 885, 886, 888, 891, 905, 909, 911, 913, 917: n = A,T,C or G
  misc_feature 925, 928, 929, 931, 934, 937, 948, 952, 958, 961, 963, 967,969, 980, 986, 997, 1000, 1001, 1002, 1004, 1008, 1009: n = A,T,C or G
gactcactatagggcgaattggagctccccgcggtggcggccgcccgggcaggtacncggggggtgagggaggagaatcgcttgaacctgagaggtanaggttgnggtgagctgacatcatgccactgcacaatgcctgggtaacagtaagactttgtctcaaaaaaaaaaaaaaatagaatttacnaaatatagaatatgtaaaacgatgtcaacttttatctttgttttttaaagaaaggcancaaacncatttaaagagcataaaccaaaagatataanaacccatggccttataaaagtcatttaaccacactnacccctgggcactgattntncatccanagtatgggagtggtgaaaatctgcttgctaggcttggtntgaggtgctaaatnaagtngagggcaggggggagccctttcttccagggccccgacacatttttcaagtgtnccntggngtttagngggntgaacanntnagaattggaaantgtggggttgactgcacccactttgnncttnttttnttgnntttgtcttaaatttttggtgcangtnaanacagtganggtnattagttttgtattgantgcatggaaaaaaanaatttgntagtnntnntggtgtttgaattttttnctttatttnncctgcccctncccttttttcnaaaaagnaaannttccttttatttttaaccntttgttaactnnataagggaatnaaatgtnttncaccttaanacnttgncaaccccaacnccaantngnttntntcaaaaagnaancnaccattntnccctgtgtgtntnattnaataangttgggtnccaancanaantgggattntttttnaatcnttgcccatgcccnnnnatannncncgnttacattttaaatnaacntnantttntttttttntgnnanagnggnaaacattattnatantttganccntnattntngccctgattgnctgggnccgttttaccnaannncnatgnnc

SEQ ID NO: 6244 - DNA, 986 bp, Homo sapiens
  misc_feature 379, 428, 446, 458, 479, 482, 493, 496, 503, 522, 540, 545,563, 564, 587, 610, 611, 634, 671, 673, 693, 703, 706, 714,715, 723, 740, 753, 755, 757, 775, 778, 790, 791, 794, 811,817, 822, 849, 852, 857, 862, 868, 871, 876, 880, 885: n = A,T,C or G
  misc_feature 887, 889, 903, 915, 919, 925, 932, 938, 952, 954, 968, 976,986: n = A,T,C or G
ggcgaattggagctccccgcggtggcggccgcccgggcaggtacaaaagatgttggagtccagtaagcccatacctaaattaactgtaaagcttcaaggactttttgtttatttttatatactagttttcttctgtgacaagttgattttatctccaagacttaaggccattccctggctctttgcacgaattcttatatggccggtaacagcagcatctggtccctggtgaattggcttctcaatgctgacatttgcaagtgcatcttcaccaaatatgaaacgagcataaaggttggctgccataaaagcccagtaaccagaaaagggccttttctggagtcaggcatttcatattgggtttgactttaaatatttncctgtaaagtagtcatttaaaatcaacccatgtttgggtgttaactggncactttttgtttccccanttcaaaatttcnggccccacatcttgaacgggnaantcttgcatcangtngcaaagnttgccaggcttgggaatanaagtcccatggaatggtncgatngtgggaatattcacttgnngaaacccacacaaattttcttgntccactttggcttggctcccagnnggaccattcaataaaacttattntttacccaaaaaaatttaatttcccattttttcttgntngatgcttacttttggaccgnttagcctttnaantaatttgnngaagttcntgaggggagccaagaantcaaaagggagancngnttttttccacaaggtttnaanatcccccctaannggnagcttagttcttaatgnggcaanttctngcaaaggtattcacctgggtttgggtntanaaaanaagtnaccttnggncgctnttanaactnananggatcccccccggncttggagggaantccnaatttnaaccttntcgaanccgtctgacctttnanggggggggcccggngtccccanttttttttcn

SEQ ID NO: 6245 - DNA, 928 bp, Homo sapiens
  misc_feature 2, 3, 4, 6, 347, 405, 422, 534, 673, 718, 722, 770, 779,807, 809, 813, 823, 824, 828, 838, 839, 850, 863, 868, 881,918, 921, 924, 925: n = A,T,C or G
gnnngnccgcgtaatacgactcactatagggcgaattggagctccaccgcggtggcggccgcccgggcaggtacacatttagccacagggcctaataaaaagcttaataggaatggtttccctttctattcaggttcaacttaggaaataaatagtgattataatgatattttcatagaaacaaaaacccagttgaggctttacttaactggtatttttttttttgcaccttattttatgaagacacagatttggtttcagaaattcagctactgagctccaactactagggcaggtgaccaccttgaatgtcaggtgaggggagaaattgctccagggtccatcancagaagagctcatttaattaaccacaaactcaatgcaggacactggcacttaatgatntgggacccgcgtacctnggccgctctagaactagtggatcccccgggcctgcagggaattcgatatcaagcttatcgataccgtcgacctcgagggggggcccggtacccagcttttgttccctttagngagggttaattgcgcgcttgggcgtaatcatggtcatagctgtttcctgtgtgaaattgttatccgctcacaattccacacaacattaccagccgggagcataaagtgtaaagcctgggggtgccctaatgagttgagnctaactcacattaattgcgtttgcgctcactggcccgcttttcanttcngggaaaacctgtcgttgcccagcttgcattaatgaattcggcccaacnccccggganaaggcggtttggcggtatttggggcgcntntttnccgctttctnncctnaattaaatcnntatgcctcggncctttcggcttgncgggngaaccggtattancttaccttcaaaaggcgggaaataccggttttcccanaantannggg

SEQ ID NO: 6246 - DNA, 889 bp, Homo sapiens
  misc_feature 1, 634, 701, 704, 725, 742, 750, 757, 760, 765, 782, 795,830, 834, 840, 841, 843, 856, 857, 859, 877, 889: n = A,T,C or G
ngacgcgcgtaatacgactcactatagggcgaattggagctccaccgcggtggcggccgcccgggcaggtaccaagctggggtagtaagtagtagagactgagccagagctcaagccacaagtgagtgtgactgtccctccaggggacactgagaacgatggctcctgggtcaccacagtctgagaatccactcctgatccataagcaaggagtccgaggagaagcatcatccaggccatggtggggacactcatgaaggctaagtgttctcaggcttcccagctggggtttgttttcctcagggccttttcccccgcgtacctcggccgctctagaactagtggatcccccgggctgcaggaattcgatatcaagcttatcgataccgtcgacctcgagggggggcccggtacccagcttttgttccctttagtgagggttaattgcgcgcttggcgtaatcatggtcatagctgttttcctgtgtgaaattgttatccgctcacaattccacacaacatacgagccgggagcataaagtgtaaagcctggggtgcctaatgagtgagctaactcacattaattgcgttgcgctcactgcccgcttttcagtcgggaaacctgtcgtgccacntgcattaatgaatcggccaaaccccccggggagaggcggtttgcttatttgggcgctttttcgcttnctngcttcacttgaatttgcttgngcctcggtcctttcggnttgcggcnagcggtnttnaaacnttaattcaaaaggcggnaattcccggtttnttcacaaaaaattaagggggataaccccgggaaanaaanattttnnancaaaaaagggccnncnaaaaaggcccggaaaccnttaaaaaaggcn

SEQ ID NO: 6247 - DNA, 872 bp, Homo sapiens
  misc_feature 653, 688, 714, 723, 758, 759, 760, 770, 782, 785, 789, 799,802, 805, 820, 826, 833, 838, 848, 849, 853, 854, 855, 859,863, 864, 867, 871: n = A,T,C or G
gactactatagggcgaattggagctccaccgcggtggcggccgaggtacgcggtcagcagctacctgagcctgacgcccgagcagtggaagtcccacagaagctacagctgccaggtcacgcatgaagggagcaccgtggagaagacagtggccctcgagcggccgcccgggcaggtacgcggggttctccctgacttgggacatggcctgtcggattatcctgcccccagagaaggagcttgccatgcccggggaggacctgaagttcaacctaatcttgcggcagccaatgatcttagagaaaggccagcgtttcaccctgcgagatggcaaccggactattggcaccggtctagtcaccaacacgctggccatgactgaggaggagaagaatatcaaatggggttgagtgtgcagatctctgctcagcttcccttgcgtttaaggcctgccctagccagggcttccctcctgcttccagtacctcggccgcttctagaactagtggatcccccgggctgcaggaattcgatatcaagcttatcgataccgtcgacctcgagggggggcccggtcccagcttttgttccctttagtgaggggttaattgcgcgcttggcgtaaatcatgggtcattagcttgtttcctgtntgaaaattgttatccgctcacaatttccccacaanaatacgacccgggagccttaaaatgntaaaagccnggggggggccttaattgagggggggcttacctcannntttaattggngtttggggcttnacntggnccgctttttnaanttnggggaaaacctgttnttgccncccttgnttttnattaaaaatnnggcnnncccnccgnnggnggang

SEQ ID NO: 6248 - DNA, 881 bp, Homo sapiens
  misc_feature 492, 526, 534, 540, 552, 556, 571, 589, 606, 620, 643, 660,665, 669, 672, 677, 690, 695, 699, 701, 705, 714, 715, 721,723, 741, 742, 743, 748, 756, 764, 769, 772, 774, 779, 786,789, 792, 793, 798, 807, 812, 825, 831, 837, 849, 857: n = A,T,C or G
  misc_feature 864, 866, 867, 869, 871, 873, 878, 879, 880, 881: n = A,T,C or G
ctatagggcgaattggagctccaccgcggtggcggccgcccgggcaggtacgcggggacaccaaacaactcattacacaaagaggtaaggtcccagaccacgccaaagcttcctgagacctctcctcatctgtgcatggacggatgaccaactctggggcccaggctgttgcttcccagtataatgatgaatccgccatagtctggtgagtgtagaggctgactctggagcccaggctgtacctcggccgctctagaactagtggatcccccgggctgcaggaattcgatatcaagcttatcgataccgtcgacctcgagggggggcccggtacccagcttttgttccctttagtgagggttaattgcgcgcttggcgtaatcatggtcatagctgtttcctgtgtgaaattgttatccgctcacaattccacacaacatacgagccggggagcataaagtgtaaagcctggggtgcctaatgagtgagctnactcacattaatttgccgttgggctcactgcccnctttccantcgggnaacctgttcgtngccngctgcattaatgaantcggccaaccgcgcgggngaggaggcggtttgcgnaatttgggcgcttnttccgcttttctttgctcacttnacttcgcttgcggctcnggtcntttncgnctgcngccgaggcggtanttcancttnanttanaaaggcggnnaatttncngtttttccccagaaatcnnnggggnttaacgcnaggaaaanaaacnttngnagccnaaaaggnccnacnnaaaangccctgganacccnttaaaaaaggccngttttntctgcntttttttccatntgggttcnccccccntnncnangnatttnnnn

SEQ ID NO: 6249 - DNA, 886 bp, Homo sapiens
  misc_feature 275, 575, 659, 740, 774, 777, 794, 836, 850, 851, 859, 861,873, 884: n = A,T,C or G
gcgtaatacgactcactatagggcgaattggagctccaccgcggtggcggccgcgggcaggtacagaattttggtctgtaaattccacaaaagcaaaccgagttggctgagtctcatcacctgccatccgcacaaacttcacttctccaacttgtttaaaaaattcaagtagttgatcagctgtcgttgtctgggaattcagatttccaacataaaccgttctcctaatttcatctattttggaaggatccacgtttcccataagtggtggctgnggtatctctccaagtgttgcaatgttggggtctagtgctgctgctggtatagctcccaaactgctaagtgaaacaccaagagtagtcaaaggatttggggtcggtattggaagcaatcctgcaccaggcatcatacttgtcatggttggagcaggagccaataaagagagggctttggattcctctgggattttacctgcagaggcaagttccaaacattacaaaaagcagaaacaccacacaaactttcactatgattttacaattacccttgcagttaaaaaataataataataaatnaaatctatctatcagatctgtataaaagaaataaataaagaacttaagtctttccttttatcctgctctactagggaaaaaatnaaagtgagccaaaacctttcaaaatatttaacaattctcattaatgggaaatattatttttaaaaaatttgaataattgtngacaaattatttttaacacctttttgagcctatnggntcaacctgtacccttcnggcccgcttttagaactaagtgggatccccccgggcctgcanggaatttcaatttnnaaagcttntncgattacccgcngaccctcggangg

SEQ ID NO: 6250 - DNA, 914 bp, Homo sapiens
  misc_feature 64, 81, 104, 148, 166, 168, 334, 389, 394, 423, 426, 451,461, 506, 517, 526, 528, 533, 538, 541, 542, 543, 547, 554,555, 563, 579, 585, 591, 599, 630, 632, 633, 642, 650, 663,717, 720, 726, 728, 729, 732, 733, 739, 743, 759, 769: n = A,T,C or G
  misc_feature 788, 791, 797, 810, 811, 816, 825, 831, 840, 843, 849, 850,855, 859, 864, 869, 874, 876, 889, 892, 896, 903, 906, 910,911: n = A,T,C or G
ctatagggcgaattggagctccaccgcggtggcggccgaggtgcgcgggtgtgctgatgattgntgtggtgtgagaacaangaaaaaacagagagttttccctncacacagcccaaaatactatcttaaaaaaattttgaagacaggntaaccaaaggttctggcngncatccatgtccaaaacaaaccaaatgtgttgcccgtaaaacatttgctcttgaaaagtagtcccttagccaggcgcggtggctcacacctgcaatcccagcatttggaaggccgaggcaggtggatcatcaggtcaggagatcaagaccatcctggctaacgcagnaaaatcccatctctactaaaaatacaaaaagactagccaggcgtggtgacacacncctgnagtcccagctactcgggaggctgacgcanganaatcacttgaaccctggaagtggangttgcaagtnagcggcgatcgtgccaccgcactccagcctggcaacagagccgangacttcgtctnaaaaaaaanancgcancttantannncctncccgggnngggcccgnttctaagaactaagtnggattncccccngggcttgnaaggaaattccaattttcaaaggcttaattngnntacccgttnggaccttnggagggggggggncccggttccccaaactttttggtttccccttttaagtgagggggtaaattgccnccncttggncnntannttcatnggtnatgggctggtttcctngggtgaaaanttgtttattccgctccccnatnttccgnccctaaaatatcnnagccnggggagccnttaaanggttaaaanccntggggnnggccnaaangagtnggggnctaancnctccttttaattnccntttnggccttnaantggnnccg

SEQ ID NO: 6251 - DNA, 854 bp, Homo sapiens
  misc_feature 612, 613, 618, 619, 620, 621, 623, 626, 637, 692, 696, 709,717, 737, 787, 789, 799, 810, 813, 824, 829, 839, 851: n = A,T,C or G
gactcactatagggcgaattggagctccccgcggtggcggccgaggtaccaaatgctagtgaggatgtggagcaacaggaactttcattcattgatggtgggaatgcaaaatggaacagccactttggaatacaatttcttataaaacgaaacatactcttttaaaaataaatatactcttatcctacgatccagcaatctcaatttccatggtatttattcaaaggagttgaaatttatatccacacaaaaatccacacatggatgtttgtggcagatttattcataattctaagaagtagaagcaaccaagatgtctttctgtaagtgtcttaatccattcaacctgatataccaatgacaaaactcatagatttgctggcatttaaacaacataaatttattgctcacagtcctggaggctggaagtccaagatcaagtcatggcacattctgcatctggtgagggcacttcctggttcatagatggctcctttttgctgcatctaagtgcacgaatctctttcatgaggttccaccctcatgacctcatcacctccccaaaactccaacctggggcaacagagcaagcctttgtctcgaaaaaaaaannaaagnnnncnaanggtcctgcccnggcggccgctcgatgcccatttgatgcctgcttaatcccaaaaaagagccctgcncatnccactttgctcanggggaggncgtttccctaaggcaagctngaaaaaaataggggaaaaactggttttttttttttttttttgggggggcntntgtttttttnaacccaaaaanaantttttccttanttaanaaaaatgccncttttttttttnaaa

SEQ ID NO: 6252 - DNA, 850 bp, Homo sapiens
  misc_feature 663, 730, 745, 758, 772, 773, 774, 794, 796, 813, 814, 821,827, 828, 835, 847, 850: n = A,T,C or G
gtaatacgactcactatagggcgaattggagctccaccgcggtggcggccgccgggcaggtactgtccaactggatgctgccctggtggctgaaggcacacttcatgatgctgtccagggtcatcagggagacatgttgaaagagctccagacgtgagttttgggcaatgtgttcctcccatttgttcagcatcatccgaacactctcagacatcatggtgatgaatattttcagaatgctgatgttgaagccaggtttcacaatctggcggtgctttttccatttagaaccatccagggtcacaagtcctcgaccaacccaggattcaaggattttgtggctaacagcacttttgggatcttgtcttttcaggagaatcttggcatagtctgggtcatggacactgaagaacatcgtaaagggtccaacccacaagggaacagcacatgggtatttttccatcagcttatgatacacctcaaactcctttactgggtaaaactccttgtggccatagaaccagtggggcagggggtgcaggaaacaggtacagggctctgatcatccatctcctcctctggtacctcggccgctctagaactagtggatcccccgggctgcaggaattcgatatcaagcttatcgataccgtcgacctcganggggggcccggtcccagcttttgttccctttagtgagggttaaatgcgcccttggcgtaatcatggncatactggttcctgngtgaaaatttttncccttccaatttcnnnccaaatttcagcccgggggncnttaaagggtaaaaaccnnggggggnccttannggggggnccctcccccccnttn

SEQ ID NO: 6253 - DNA, 882 bp, Homo sapiens
  misc_feature 3, 25, 66, 211, 221, 253, 297, 375, 379, 402, 404, 416, 460,520, 529, 542, 557, 558, 595, 618, 632, 637, 660, 661, 667,668, 672, 676, 681, 689, 697, 699, 716, 724, 750, 757, 769,775, 788, 797, 801, 825, 827, 846, 849, 859, 867: n = A,T,C or G
  misc_feature 868, 879: n = A,T,C or G
ggnccgcgtaatacgactactatanggcgaatcggagctccccgcggtggcggcccgaggtaccanaagggctcccgctctcctctgcccaagaagtgagcggttcctctgccaggacggggggaaggaggccaaccttgtaggcttcgtcaatgttggcattcacacagtgctggatcatctcctttaccagcagtgggtggggctcgtnacagacctgnccaaagggaaaggaaaggcggtcaggggctanaagggacaatgtgagcggggaggccccaacagaccgactttcangcaatttattgggtaaaacttctcaacctgttgttttcatcaaattcttcacaaccaggatgagtttggggaatgctncttntaccatcaaagaaaaagtgcttncngcaccaataaanataaattttcccaaccttaagacagtttgaaccaagaagaccanccaagggccctgtgaaaggatgcctcactttgggggacagcttttaaaagtcacaagtcnattttgtcnttaaaatcacttngggggggtcaatttnncccaaaaccccttggaaattcacttttaaaaccccgngtaccctgccccgggcgggccgnttttaaaactaggnggaanccccccgggctggagggaatttnnaatttnnaagncttnttgantcccggtngcccttcnangggggggggcccggtancccaaccntttggttcccttttttggaagggttnaattggnccctttgggggnaaaaangggtcaaaaattngttccttgngggnaaattgttttccccttccaaattncncccaacttaccaacccggnaancataaaaggntaaacccnngggggcccaantaa

SEQ ID NO: 6254 - DNA, 484 bp, Homo sapiens
  misc_feature 4, 387, 435: n = A,T,C or G
gccnatcactacttagggcgaattggagctccccgcggtggcggccgcccgggcaggtacaaggctaagcattttaactttatactggaaaaaaaatcaaacaaaggggagggataaaggacttagtcatctttgcactggaaaacaaaatatgtaattaaattcccatagctgcatgtaacattgaattcttccaggttaaaaaaaaaaagttaaatccctgtgatattaatgggaatgacatttttgaggtcttgagaatgggcacaaaagtgggaaatgaatttcagtatgggcaaagacactgaggatgatgttgattagataattcactccgtaatgatcatgctgtgtgctagtaagtataaccctggaaagatcttgagnatgcttcccagcctgttcacagatcccctgggccagaacactccttanggaaaaacagtcaggctacatattaggcagcaacaccgaagggtctttg

SEQ ID NO: 6255 - DNA, 884 bp, Homo sapiens
  misc_feature 1, 4, 5, 7, 9, 13, 20, 21, 27, 29, 39, 40, 53, 55, 57, 66,68, 72, 74, 81, 90, 132, 144, 148, 153, 155, 163, 167, 171,180, 185, 206, 238, 241, 263, 278, 284, 288, 375, 436, 522,525, 526, 527, 528, 529, 530, 531, 532, 533, 534, 535: n = A,T,C or G
  misc_feature 536, 537, 538, 539, 540, 541, 542, 543, 544, 545, 546, 547,548, 549, 550, 551, 552, 553, 554, 555, 556, 557, 558, 559,560, 561, 562, 563, 564, 565, 566, 567, 568, 569, 570, 571,572, 573, 574, 575, 576, 577, 578, 579, 580, 581, 582: n = A,T,C or G
  misc_feature 583, 584, 585, 586, 587, 588, 589, 590, 591, 592, 593, 594,595, 596, 597, 598, 599, 600, 601, 602, 603, 604, 605, 606,607, 608, 609, 610, 611, 612, 613, 614, 615, 616, 617, 618,619, 620, 621, 622, 623, 624, 625, 626, 627, 628, 629: n = A,T,C or G
  misc_feature 630, 631, 632, 633, 634, 635, 636, 637, 638, 639, 640, 641,642, 643, 644, 645, 646, 647, 648, 649, 650, 651, 652, 653,654, 655, 656, 657, 658, 659, 660, 661, 662, 663, 664, 665,666, 667, 668, 669, 670, 671, 672, 673, 674, 675, 676: n = A,T,C or G
  misc_feature 677, 678, 679, 680, 681, 682, 683, 684, 685, 686, 687, 688,689, 690, 691, 692, 693, 694, 695, 696, 697, 698, 699, 700,701, 702, 703, 704, 705, 706, 707, 708, 709, 710, 711, 712,713, 714, 715, 716, 717, 718, 719, 720, 721, 722, 723: n = A,T,C or G
  misc_feature 724, 725, 726, 727, 728, 729, 730, 731, 732, 733, 734, 735,736, 737, 738, 739, 740, 741, 742, 743, 744, 745, 746, 747,748, 749, 750, 751, 752, 753, 754, 755, 756, 757, 758, 759,760, 761, 762, 763, 764, 765, 766, 767, 768, 769, 770-884: n = A,T,C or G
nccnntntngacntagtatnngactantntgaggctctnnttggagctccccncngnggcggccgngntctngntcacttngaataaccngacatgtgcgtcaatcggtgtctatagcctcacaccaactanaaccaacccagntctnaaaananggaatgtnaaantgtnatgttcaantttanattcagtgcctggaatctttncttcacaattgaaatgaaatgtgctgaaggangtnaatccatgcattaatctaaagntgacaaaggaaatantatatnatangcaacaccacagactcaagacggacataattggattttttttgccatggcctggaaagaaaggtacctgcccgggcggccgctctanaactagtggatcccccgggctgcaggaattcgatatcaagcttatcgataccgtcgacctngagggggggcccggtacccagcttttgttccctttagtgaggggttaattgcgcccttggcgtaatcatggtcatagctgttcttngannnnnnnnnnnnnnnnnnnnnnnnnnnnnnnnnnnnnnnnnnnnnnnnnnnnnnnnnnnnnnnnnnnnnnnnnnnnnnnnnnnnnnnnnnnnnnnnnnnnnnnnnnnnnnnnnnnnnnnnnnnnnnnnnnnnnnnnnnnnnnnnnnnnnnnnnnnnnnnnnnnnnnnnnnnnnnnnnnnnnnnnnnnnnnnnnnnnnnnnnnnnnnnnnnnnnnnnnnnnnnnnnnnnnnnnnnnnnnnnnnnnnnnnnnnnnnnnnnnnnnnnnnnnnnnnnnnnnnnnnnnnnnnnnnnnnnnnnnnnnnnnnnnnnnnnnnnnnnnnnnnnnnnnnnnnnnnnnnnnnnnnnnnnnnnnnnnnnnnn

SEQ ID NO: 6256 - DNA, 783 bp, Homo sapiens
  misc_feature 4, 15, 70, 86, 101, 133, 427, 471, 478, 535, 567, 593, 638,640, 641, 644, 645, 646, 648, 649, 652, 653, 654, 655, 656,657, 658, 659, 660, 661, 662, 663, 664, 665, 666, 667, 668,669, 670, 671, 672, 673, 674, 675, 676, 677, 678, 679: n = A,T,C or G
  misc_feature 680, 681, 682, 683, 684, 685, 686, 687, 688, 689, 690, 691,692, 693, 694, 695, 696, 697, 698, 699, 700, 701, 702, 703,704, 705, 706, 707, 708, 709, 710, 711, 712, 713, 714, 715,716, 717, 718, 719, 720, 721, 722, 723, 724, 725, 726: n = A,T,C or G
  misc_feature 727, 728, 729, 730, 731, 732, 733, 734, 735, 736, 737, 738,739, 740, 741, 742, 743, 744, 745, 746, 747, 748, 749, 750,751, 752, 753, 754, 755, 756, 757, 758, 759, 760, 761, 762,763, 764, 765, 766, 767, 768, 769, 770, 771, 772, 773: n = A,T,C or G
  misc_feature 774, 775, 776, 777, 778, 779, 780, 781, 782, 783: n = A,T,C or G
agcngtatggactanttgttcctgattggagctccccgcggtggcggccgaggtgggaggaatgcttgancccccagtctgggcantatagtgagaccccntctctgcaaaaaaagaagttccagaggcccanacttgctactggtgcccagggggctgtggggcagcttgggcattgagccctcatgctgtgggatctgatgctgtctctaggtagatagtgttggaaattgaattggaggacacccaactggtgtccgctgcagaactgattgcttgcctggtggtggggagaaatccttacatattttttggagtcacagaagtcttctgtgttgattgttgtaagtgtgaaagcagaggaaaaacaatggtttgggttttttcaaaacaactttcatgacacatacgagaatgtaaattccanaagggccaaggccatgtctgttttacctactctttttcccccancttctantacctgcccgggcggcccgctctaaaactagtggatcccccgggctgcaggaattcnatatcaagcttatcgatacccgtcgacctcanggggggcccggtacccacttttgttncctttaatgagggttaattgcccccttggcgtaatcatggcatanannttnnncnnggnnnnnnnnnnnnnnnnnnnnnnnnnnnnnnnnnnnnnnnnnnnnnnnnnnnnnnnnnnnnnnnnnnnnnnnnnnnnnnnnnnnnnnnnnnnnnnnnnnnnnnnnnnnnnnnnnnnnnnnnnnnnnnnnnnnn

SEQ ID NO: 6257 - DNA, 801 bp, Homo sapiens
  misc_feature 3, 4, 14, 24, 25, 267, 268, 283, 284, 289, 290, 292, 293,302, 303, 306, 307, 315, 318, 321, 322, 328, 332, 334, 337,347, 350, 351, 352, 354, 355, 356, 368, 370, 371, 372, 373,374, 375, 376, 377, 378, 379, 383, 384, 387, 393, 405: n = A,T,C or G
  misc_feature 407, 414, 419, 422, 432, 436, 437, 438, 439, 447, 461, 467,469, 473, 474, 478, 479, 486, 487, 488, 489, 495, 503, 504,505, 522, 523, 524, 525, 526, 534, 535, 536, 539, 549, 561,567, 569, 570, 573, 578, 579, 583, 584, 592, 621, 622: n = A,T,C or G
  misc_feature 636, 637, 642, 643, 655, 676, 677, 680, 686, 687, 688, 689,690, 691, 692, 695, 698, 699, 700, 701, 702, 703, 704, 705,706, 707, 708, 709, 710, 711, 712, 713, 714, 715, 716, 717,718, 719, 720, 721, 722, 723, 724, 725, 726, 727, 728: n = A,T,C or G
  misc_feature 729, 730, 731, 732, 733, 734, 735, 736, 737, 738, 739, 740,741, 742, 743, 744, 745, 746, 747, 748, 749, 750, 751, 752,753, 754, 755, 756, 757, 758, 759, 760, 761, 762, 763, 764,765, 766, 767, 768, 769, 770, 771, 772, 773, 774, 775: n = A,T,C or G
  misc_feature 776, 777, 778, 779, 780, 781, 782, 783, 784, 785, 786, 787,788, 789, 790, 791, 792, 793, 794, 795, 796, 797, 798, 799,800, 801: n = A,T,C or G
tgnngatgcgcgtnatggacatanntgttggctgattggagctccccgcggtggcggccgggggccattgagactgccatggaagacttgaaaggtcacgtagctgagacttctggagagaccattcaaggcttctggctcttgacaaaaacggatccattaagccagcaccaaggagaacatcttgacactttatggaatttcaaaaagtatgatatgatggcaataaagtggctcttcagccaaaaaaaaaaaaaaaaaaaaagnnccccccccccccccnnggggnntnnggggccccnnaannaaaaaaanccnttnncccccngggntnttnaaaaaaaacnttnnngnnntttgggaaaaantnnnnnnnnnngaannccnattttnaaaaaaaaaaancnaaaaggntttgnccntttttttttngggnnnncccccccntttaaaaaaaaaancccccngntttnntggnnttggggnnnnaaattncccccccnnnaaaaaaaaaaaaaaaannnnncccccccnnnccnttaaaaaaangggggccccccncggggngnnaanttttnnaaanntttttttnccccccccccccgggggggggggcccccnncccctttttttttnnctttnnggggggggttantccccccccggggaaaaaaannggnaaaaannnnnnnccnggnnnnnnnnnnnnnnnnnnnnnnnnnnnnnnnnnnnnnnnnnnnnnnnnnnnnnnnnnnnnnnnnnnnnnnnnnnnnnnnnnnnnnnnnnnnnnnnnnnnnnnnn

SEQ ID NO: 6258 - DNA, 800 bp, Homo sapiens
  misc_feature 2, 3, 12, 18, 25, 30, 551, 568, 576, 648, 684, 685, 686,687, 689, 694, 695, 696, 697, 698, 699, 700, 701, 702, 703,704, 705, 706, 707, 708, 709, 710, 711, 712, 713, 714, 715,716, 717, 718, 719, 720, 721, 722, 723, 724, 725, 726: n = A,T,C or G
  misc_feature 727, 728, 729, 730, 731, 732, 733, 734, 735, 736, 737, 738,739, 740, 741, 742, 743, 744, 745, 746, 747, 748, 749, 750,751, 752, 753, 754, 755, 756, 757, 758, 759, 760, 761, 762,763, 764, 765, 766, 767, 768, 769, 770, 771, 772, 773: n = A,T,C or G
  misc_feature 774, 775, 776, 777, 778, 779, 780, 781, 782, 783, 784, 785,786, 787, 788, 789, 790, 791, 792, 793, 794, 795, 796, 797,798, 799, 800: n = A,T,C or G
gnntgacgcgcnttaatngacatantatgngggctgattggagctccccgcggtggcggccgaggtacattttgaactcccaattcccacccacagagcttggtgctagctctgcacacggtagatataagcaagaacttaggccgaagtgaattgaatgacccattcttaccagataattctgttcttgcaggggtatttcggatctgggttctgcctcaaggctgacggaatcaatacattcagcaagtgtatcctcagtcacgtctccattgagagggggctccagggcgttggcatcctgaggctgcacagggggcccaatggcggcagcccctgcaccctgcacagctgcattttcatgcccctcccctctggggtcagctggtgttggctcatgtgaaactgcagctgaatcacaatgcacttctgcatcctcaggtaaagaatcactattaggcatctcaataacttctgctttgtctccagtggctaaaggtgtcaccagcatcatcaagacattttagtatcgcttaggcggccgctctaanaactagtggatcccccnggctgcangaattcgatttaagcttatcgatccgtcgactcaaggggggcccggtacccaacttttgttcctttagtganggttaattgccccttggcgtaaacatggcataaaannnntnttcgnnnnnnnnnnnnnnnnnnnnnnnnnnnnnnnnnnnnnnnnnnnnnnnnnnnnnnnnnnnnnnnnnnnnnnnnnnnnnnnnnnnnnnnnnnnnnnnnnnnnnnnnnnn

SEQ ID NO: 6259 - DNA, 819 bp, Homo sapiens
  misc_feature 7, 539, 557, 572, 612, 621, 628, 629, 630, 646, 662, 674,676, 677, 678, 687, 698, 712, 715, 730, 739, 746, 752, 766,767, 769, 773, 778, 779, 780, 781, 782, 783, 784, 785, 786,787, 788, 789, 793, 794, 795, 796, 797, 798, 799, 800: n = A,T,C or G
  misc_feature 801, 803, 804, 805, 806, 807, 808, 809, 810, 811, 812, 813,814, 815, 816, 817, 818: n = A,T,C or G
agccgcnttatggacatagttgttggctgattggagctccccgcggtggcggccgaggtacaggtcttgcctaaaatcaagaagagagcaggagaactgagaaactcctccccttcccccaccagaagccttgtgtctagtaacaggtaacaacagccatctactgttggagaaagaacaaaagcatggaaaggatggagcagggaaagagggaaaaaacaacaaccactctccagcactccaggtcttaacattaagcacaaaataggagcagcctagcccaccaccggagggatttcaagtctgttgcacactgaaaataaccatggctacaacaaaacccaattcaccgcaaatgctgactaaattgactaatagccccatgctaatagcttgatggaaggatagatattcccactttgaacatttgcttcagtgtctacttttcttctatacaacatacctggcatttaatttaaaaaaaacacacatttaaaaatgttaaaagacctatgtgaaaagataaaatagcagaaccngacccagaggtgactcanaagttggaacgactngagactactagagactcaaaaaaaaaaaaaaaaaaaaaanttcctggcnggggggnnntttaaaaaattggggngccccccggggggggnggaatttttttnannntttttttanccccccccccncggggggggggccnggnccccccctttttttnctttttagnggggggnaaatcncccccgggggaaannangggnaaaannnnnnnnnnnnccgnnnnnnnnnannnnnnnnnnnnnnnnc

SEQ ID NO: 6260 - DNA, 844 bp, Homo sapiens
  misc_feature 2, 3, 4, 16, 17, 19, 21, 27, 33, 45, 69, 99, 103, 122, 177,181, 190, 193, 200, 206, 242, 244, 245, 247, 248, 249, 250,254, 266, 272, 278, 283, 285, 287, 290, 292, 293, 307, 309,322, 323, 325, 339, 343, 362, 370, 372, 376, 380, 388: n = A,T,C or G
  misc_feature 391, 394, 395, 396, 397, 398, 402, 404, 418, 426, 429, 430,435, 436, 437, 442, 444, 445, 447, 448, 456, 458, 459, 460,461, 478, 482, 501, 506, 507, 511, 534, 535, 548, 557, 617,621, 622, 623, 630, 631, 632, 654, 671, 690, 693, 697: n = A,T,C or G
  misc_feature 714, 719, 720, 723, 724, 726, 729, 732, 733, 735, 736, 738,744, 750, 753, 758, 759, 771, 782, 789, 791, 792, 798, 799,801, 803, 809, 812, 832, 839, 841, 842: n = A,T,C or G
gnnnaaacgcaataanngncntatttnttcctnattggaagctcnaccgcggtggcggcccgcccgggnaggtactttttttttttttttttttttttngggnattttttttgggttttttnttttttttttttttttttttttttttttttttttttttttttttttttttttttntttnttttaattnganaggcccnaaaagnaaaaaaaaaaaaaaaaaaaaaaaaaaaaaaaaaaancnnannnnaaanaaaaaaaaaaanaaattntttttnataananancanannaaaaaaaaaaagangngggccccccccanncnaaaaaaaaaaaaanaagntaaccccccccaccccacncaaaaatntnattnaaanaaaaagancanttnnnnngggngnggggagggaaattntttttttnttnncaaannntcccncnncnnaaaaaaanannnnaataaaaaataaaacanttantgaaaagggggggggggancattnntttntaaaaaaaaaaaaaaataatttnnataaaaaaaaaanccccccccnaaaaaaaaaaaaaaaaaaaaacaccccccccgagaaaaaaaaaaataaaattaattaatntttnnncccccgnnnggggggggggggggggaacaanaaaaatatttttttttnataaaaaaaaaagaaaaanacncccnccaccaaaaaaaaaaanaaaannatnnantantannannanaaaatnaaaaanatnataannaataataataanaaataaacatnaataaanannaataannananataaanaanaataataaaaaaatataatnaaaattnannaa

SEQ ID NO: 6261 - DNA, 726 bp, Homo sapiens
  misc_feature 2, 3, 9, 16, 557, 613, 616, 621, 635, 679, 683, 691, 699,706, 712: n = A,T,C or G
gnncgtatngacatanttgttggctgattggagctccaccgcggtggcggccgaggtacacactgaaaccactgtcagattaagaaacttccacaacttgtctcagttcttcaaacaatggagcaagttccttttctaggctgacaattagtcctgtattggcactgctgctggctatgaaactcaccaccaaaggtaaacgattaaattgaaccacctggtaggtgttatagtaacagatgatacttttatttttggaaagtccaagtttgcttccttggtctgttgcaagggcaaaagtggataagaaaccaggtcgcaaagcatgctctggagcattgtcatttgccactttaataacaggtacctgcccgggcggccgcccgggcaggtacttcactggaaatatgggcgccgaggtggccttcaactggatcattgttcacatggaagagccagattttgctgagcccgctgaccatgcctggttatggaggggcaagcttctgctggagcctctgtttttggtgcttctggactggataaccaacctccanaggaaatcgtacctatcatcaccttcatgggatttcagcgaaatcaggctattcangcnctacnagcaacgaataatnacctggaaagagcactggattggatctttaaccccctgagtttnaaanaagacagngattttgngattganatgganaataatgccaatgc

SEQ ID NO: 6262 - DNA, 869 bp, Homo sapiens
  misc_feature 11, 18, 22, 423, 424, 427, 428, 429, 430, 431, 432, 433,434, 435, 436, 437, 438, 439, 440, 441, 442, 443, 444, 445,446, 447, 448, 449, 450, 451, 452, 453, 454, 455, 456, 457,458, 459, 460, 461, 462, 463, 464, 465, 466, 467, 468: n = A,T,C or G
  misc_feature 469, 470, 471, 472, 473, 474, 475, 476, 477, 478, 479, 480,481, 482, 483, 484, 485, 486, 487, 488, 489, 490, 492, 493,494, 495, 496, 497, 498, 499, 500, 501, 502, 503, 504, 505,506, 507, 508, 509, 510, 511, 512, 513, 514, 515, 516: n = A,T,C or G
  misc_feature 517, 518, 519, 520, 521, 522, 523, 524, 525, 526, 527, 528,529, 530, 531, 532, 533, 534, 535, 536, 537, 538, 539, 540,541, 542, 543, 544, 545, 546, 547, 548, 549, 550, 551, 552,553, 554, 555, 556, 557, 558, 559, 560, 561, 562, 563: n = A,T,C or G
  misc_feature 564, 565, 566, 567, 568, 569, 570, 571, 572, 573, 574, 575,576, 577, 578, 579, 580, 581, 582, 583, 584, 585, 586, 587,588, 589, 590, 591, 592, 593, 594, 595, 596, 597, 598, 599,600, 601, 602, 603, 604, 605, 606, 607, 608, 610, 611: n = A,T,C or G
  misc_feature 613, 614, 615, 616, 617, 618, 619, 620, 621, 622, 623, 624,625, 626, 627, 628, 629, 630, 631, 632, 633, 634, 635, 636,637, 638, 639, 640, 641, 642, 643, 644, 645, 646, 647, 648,649, 650, 651, 652, 653, 654, 655, 656, 657, 658, 659: n = A,T,C or G
  misc_feature 661, 662, 663, 664, 665, 666, 667, 668, 669, 670, 671, 672,673, 674, 675, 676, 677, 678, 679, 680-694, 696-720, 722-723,725-727, 729-756, 758-763, 765-767, 770-800, 802-834, 836-868: n = A,T,C or G
agtcgcgtatngacttantatntggctgattggagctccccgcggtggcggccgcccgggcaggtatgcgggggaaaatgctctgtgcagaagaagagcagagtaggacgtgctgggtgaccgcgattagattgcttaagagaagtatatcagagaattccctggtagcaatggacttctcaggccagaaaagcagagttatagaaaatcccactgaagccctttcagttgcggttgaagaaggactcgcttggagggtacctcggccgctctagaactagtggatcccccgggctgcaggaattcgatatcaagcttatcgataccgtcgacctcgagggggggcccggtacccagcttttgttccctttagtgagggttaattgcgcgcttggcgtaatcatggtcatagctgttcctgannaannnnnnnnnnnnnnnnnnnnnnnnnnnnnnnnnnnnnnnnnnnnnnnnnnnnnnnnnnnnnnnntnnnnnnnnnnnnnnnnnnnnnnnnnnnnnnnnnnnnnnnnnnnnnnnnnnnnnnnnnnnnnnnnnnnnnnnnnnnnnnnnnnnnnnnnnnnnnnnnnnnnnnnnnnnnnnnnnnnnngnnannnnnnnnnnnnnnnnnnnnnnnnnnnnnnnnnnnnnnnnnnnnnnngnnnnnnnnnnnnnnnnnnnnnnnnnnnnnnnnnngnnnnnnnnnnnnnnnnnnnnnnnnntnngnnngnnnnnnnnnnnnnnnnnnnnnnnnnnnngnnnnnntnnnggnnnnnnnnnnnnnnnnnnnnnnnnnnnnnnngnnnnnnnnnnnnnnnnnnnnnnnnnnnnnnnnngnnnnnnnnnnnnnnnnnnnnnnnnnnnnnnnnng

SEQ ID NO: 6263 - DNA, 898 bp, Homo sapiens
  misc_feature 1, 2, 3, 4, 11, 17, 45, 58, 463, 464, 465, 466, 472, 473,474, 475, 476, 477, 481, 482, 486, 493, 498, 499, 504, 505,506, 519, 520, 521, 526, 532, 533, 537, 540, 547, 548, 559,560, 561, 582, 590, 595, 596, 598, 616, 619, 620, 636: n = A,T,C or G
  misc_feature 637, 638, 639, 640, 641, 643, 647, 648, 649, 650, 651, 652,653, 654, 655, 656, 657, 658, 659, 660, 661, 662, 663, 664,665, 666, 667, 668, 669, 670, 671, 672, 673, 674, 675, 676,677, 678, 679, 680, 681, 682, 683, 684, 685, 686, 687: n = A,T,C or G
  misc_feature 688, 689, 690, 691, 692, 693, 694, 695, 696, 697, 698, 699,700, 701, 702, 703, 704, 705, 706, 707, 708, 709, 710, 711,712, 713, 714, 715, 716, 717, 718, 719, 720, 721, 722, 723,724, 725, 726, 727, 728, 729, 730, 731, 732, 733, 734: n = A,T,C or G
  misc_feature 735, 736, 737, 738, 739, 740, 741, 742, 743, 744, 745, 746,747, 748, 749, 750, 751, 752, 753, 754, 755, 756, 757, 758,759, 760, 761, 762, 763, 764, 765, 766, 767, 768, 769, 770,771, 772, 773, 774, 775, 776, 777, 778, 779, 780, 781: n = A,T,C or G
  misc_feature 782, 783, 784, 785, 786, 787, 788, 789, 790, 791, 792, 793,794, 795, 796, 797, 798, 799, 800, 801, 802, 803, 804, 805,806, 807, 808, 809, 810, 811, 812, 813, 814, 815, 816, 817,818, 819, 820, 821, 822, 823, 824, 825, 826, 827, 828: n = A,T,C or G
  misc_feature 829, 830, 831, 832, 833, 834, 835, 836, 837, 838, 839, 840,841, 842, 843, 844, 845, 846, 847, 848, 849, 850, 851, 852,853, 854, 855, 856, 857, 858, 859, 860, 861, 862, 863, 864,865, 866, 867, 868, 869, 870, 871, 872, 873, 874, 875-898: n = A,T,C or G
nnnncgactanttgtgngctgattggagctccccgcggtggcggnccgaggtactttngctctctgtctttgccaatatttacttttgatctttgtttttgcctttatttgcttttgctctgtttaaaacaggctattcagaaaggcaataaggaagctgcaagaatacatgctgaaaatgcaatccaccagaaaaatcaagcaattgatttcttaagaatgagtgctagagttggtgccgtggcagtcagaggtcaaaatgcagtaacaatgggcaggacttctgccttgatggacaaattcaaacaccagtttgaaacactggatattcaaacacaacaaatggaagataaaatgagtagctctacaaccctaataacaccacaacacctaacatgtggttagtcaaatgaaaagagaacttgttattactactttggatgctaatatggaaaaaaaaaannnnaaaaannnnnncccnncccnggggggnccttnnaaaannnggggccccccggnnnggggnaatttnntttnaanttttttnnccccccccccnnnggggggggcccggcccccccntttttccnttttnngnggggttaattgccccctnggnnaaaaaaggggaaaaannnnnntnccgnnnnnnnnnnnnnnnnnnnnnnnnnnnnnnnnnnnnnnnnnnnnnnnnnnnnnnnnnnnnnnnnnnnnnnnnnnnnnnnnnnnnnnnnnnnnnnnnnnnnnnnnnnnnnnnnnnnnnnnnnnnnnnnnnnnnnnnnnnnnnnnnnnnnnnnnnnnnnnnnnnnnnnnnnnnnnnnnnnnnnnnnnnnnnnnnnnnnnnnnnnnnnnnnnnnnnnnnnnnnnnnnnnnnnnnnnnnnnnnnnnnnnnnnnnnn

SEQ ID NO: 6264 - DNA, 994 bp, Homo sapiens
  misc_feature 8, 9, 10, 12, 14, 18, 19, 20, 21, 22, 23, 24, 25, 26, 27,28, 29, 30, 31, 32, 33, 34, 35, 38, 43, 48, 52, 65, 151,468, 475, 476, 477, 478, 479, 480, 481, 482, 483, 484, 485,486, 487, 488, 489, 490, 491, 492, 493, 494, 495, 496, 497: n = A,T,C or G
  misc_feature 498, 499, 500, 501, 502, 503, 504, 505, 506, 507, 508, 509,510, 511, 512, 513, 514, 515, 516, 517, 518, 519, 520, 521,522, 523, 524, 525, 526, 527, 528, 529, 530, 531, 532, 533,534, 535, 536, 537, 538, 539, 540, 541, 542, 543, 544: n = A,T,C or G
  misc_feature 545, 546, 547, 548, 549, 550, 551, 552, 553, 554, 555, 556,557, 558, 559, 560, 561, 562, 563, 564, 565, 566, 567, 568,569, 570, 571, 572, 573, 574, 575, 576, 577, 578, 579, 580,581, 582, 583, 584, 585, 586, 587, 588, 589, 590, 591: n = A,T,C or G
  misc_feature 592, 593, 594, 595, 596, 597, 598, 599, 600, 601, 602, 603,604, 605, 606, 607, 608, 609, 610, 611, 612, 613, 614, 615,616, 617, 618, 619, 620, 621, 622, 623, 624, 625, 626, 627,628, 629, 630, 631, 632, 633, 634, 635, 636, 637, 638: n = A,T,C or G
  misc_feature 639, 640, 641, 642, 643, 644, 645, 646, 647, 648, 649, 650,651, 652, 653, 654, 655, 656, 657, 658, 659, 660, 661, 662,663, 664, 665, 666, 667, 668, 669, 670, 671, 672, 673, 674,675, 676, 677, 678, 679, 680, 681, 682, 683, 684, 685: n = A,T,C or G
  misc_feature 686, 687, 688, 689, 690, 691, 692, 693, 694, 695, 696, 697,698, 699, 700, 701, 702, 703, 704, 705, 706, 707, 708, 709,710, 711, 712, 713, 714, 715, 716, 717, 718, 719, 720, 721,722, 723, 724, 725, 726, 727, 728, 729-743, 746-994: n = A,T,C or G
cacgtggnnntnantttnnnnnnnnnnnnnnnnnngangcgcntattngacntactatatggctnattggagctccaccgcggtggcggcccgcccgggcggcgggatccactgtcccggcagaggaaaaaatgccagcttgtgggacaanggagtgcaggcccgacaaccctcggcaggcccgaaggatgtggcgatctacacagaaagattcacctgggctccaaagttggcccttgttccagtattggttatgaatcttcttgttcatcgcttctgtatttatgttgcacattttggggcaaagtacctcggcccgctctagaactagtggatccccgggctgcaggaattcgatatcaagcttatcgataccgtcgacctcgagggggggcccggtacccagcttttgttccctttagtgaggggttaattgcgcgcttggcgtaatcatggtcatagctgttncctgggnnnnnnnnnnnnnnnnnnnnnnnnnnnnnnnnnnnnnnnnnnnnnnnnnnnnnnnnnnnnnnnnnnnnnnnnnnnnnnnnnnnnnnnnnnnnnnnnnnnnnnnnnnnnnnnnnnnnnnnnnnnnnnnnnnnnnnnnnnnnnnnnnnnnnnnnnnnnnnnnnnnnnnnnnnnnnnnnnnnnnnnnnnnnnnnnnnnnnnnnnnnnnnnnnnnnnnnnnnnnnnnnnnnnnnnnnnnnnnnnnnnnnnnnnnnnnnnnnnnnnnnnnnnnnggnnnnnnnnnnnnnnnnnnnnnnnnnnnnnnnnnnnnnnnnnnnnnnnnnnnnnnnnnnnnnnnnnnnnnnnnnnnnnnnnnnnnnnnnnnnnnnnnnnnnnnnnnnnnnnnnnnnnnnnnnnnnnnnnnnnnnnnnnnnnnnnnnnnnnnnnnnnnnnnnnnnnnnnnnnnnnnnnnnnnnnnnnnnnnnnnnnnnnnnnnnnnnnnnnnnnnnnnnnnnnnnnnnnnnnnnnnnnnnnnnnnnnnnnn

SEQ ID NO: 6265 - DNA, 896 bp, Homo sapiens
  misc_feature 5, 9, 12, 15, 21, 172, 276, 379, 427, 492, 517, 529, 629,630, 650, 688, 710, 712, 713, 714, 715, 716, 717, 718, 724,726, 727, 728, 729, 730, 731, 732, 733, 734, 735, 736, 737,738, 739, 740, 741, 742, 743, 744, 745, 746, 747, 748: n = A,T,C or G
  misc_feature 749, 750, 751, 752, 753, 754, 755, 756, 757, 758, 759, 760,761, 762, 763, 764, 765, 766, 767, 768, 769, 770, 771, 772,773, 774, 775, 776, 777, 778, 779, 780, 781, 782, 783, 784,785, 786, 787, 788, 789, 790, 791, 792, 793, 794, 795: n = A,T,C or G
  misc_feature 796, 797, 798, 799, 800, 801, 802, 803, 804, 805, 806, 807,808, 809, 810, 811, 812, 813, 814, 815, 816, 817, 818, 819,820, 821, 822, 823, 824, 825, 826, 827, 828, 829, 830, 831,832, 833, 834, 835, 836, 837, 838, 839, 840, 841, 842: n = A,T,C or G
  misc_feature 843, 844, 845, 846, 847, 848, 849, 850, 851, 852, 853, 854,855, 856, 857, 858, 859, 860, 861, 862, 863, 864, 865, 866,867, 868, 869, 870, 871, 872, 873, 874, 875, 876, 877, 878,879, 880, 881, 882, 883, 884, 885, 886, 887, 888, 889: n = A,T,C or G
  misc_feature 890, 891, 892, 893, 894, 895, 896: n = A,T,C or G
tagtngacntanttntggctnattggagctcccccgcggtggcggccgaggtacgcggggagtgtttggggaggtcaacgggctatgctggcttgacagggctgggctcttcagaacagaagcatggatctcggaatccctgacctgctggacgcgtggctggagcccccanaggatatctttcacagggatccgtcctggagcttggactccacttgcccccctccagagggttccgttgccctgtcaaccctgtcctgaccgatgaaggagaanctctctgggcaggaagggtttccctgccctttacctgcccttaccaaggcagagaaagggtcctcaagaaggcaggaggaaaatccgtacaagcatcacttangaagtcgcggcggaagaaggatacctgcccgggcggccgtcgaatctntaacatggatcagcgcctccttaaataatctgcagaatccatattgaagtaaaagttggccttantagctttacaaccggcaaatactgnaaaccatcggangcaaacagcttaaagtcttcgtatatcgtacctcggcccttttaaactagtggatccccccggcctgcaggaattcgatatcaagcttatcgataccgtnnacctcaaggggggcccggtncccaacttttgttccctttaattgagggttaattgccncttgcgtaatcattgggcatancnnnnnnntttcgngnnnnnnnnnnnnnnnnnnnnnnnnnnnnnnnnnnnnnnnnnnnnnnnnnnnnnnnnnnnnnnnnnnnnnnnnnnnnnnnnnnnnnnnnnnnnnnnnnnnnnnnnnnnnnnnnnnnnnnnnnnnnnnnnnnnnnnnnnnnnnnnnnnnnnnnnnnnnnnnnnnnnnnnnnnn

SEQ ID NO: 6266 - DNA, 910 bp, Homo sapiens
  misc_feature 2, 5, 9, 12, 20, 47, 50, 54, 58, 62, 82, 85, 88, 90, 95,125, 126, 129, 131, 136, 141, 144, 145, 146, 152, 170, 173,175, 182, 186, 187, 188, 189, 197, 202, 215, 246, 363, 375,556, 557, 566, 567, 571, 572, 589, 590, 594, 595, 597: n = A,T,C or G
  misc_feature 598, 599, 600, 601, 602, 608, 609, 610, 623, 644, 650, 652,655, 659, 660, 661, 667, 668, 669, 670, 671, 672, 673, 674,680, 681, 685, 690, 691, 695, 696, 699, 700, 701, 702, 703,704, 705, 706, 707, 709, 712, 713, 714, 715, 716, 717: n = A,T,C or G
  misc_feature 718, 719, 720, 721, 722, 723, 724, 725, 726, 727, 728, 729,730, 731, 732, 733, 734, 735, 736, 737, 738, 739, 740, 741,742, 743, 744, 745, 746, 747, 748, 749, 750, 751, 752, 753,754, 755, 756, 757, 758, 759, 760, 761, 762, 763, 764: n = A,T,C or G
  misc_feature 765, 766, 767, 768, 769, 770, 771, 772, 773, 774, 775, 776,777, 778, 779, 780, 781, 782, 783, 784, 785, 786, 787, 788,789, 790, 791, 792, 793, 794, 795, 796, 797, 798, 799, 800,801, 802, 803, 804, 805, 806, 807, 808, 809, 810, 811: n = A,T,C or G
  misc_feature 812, 813, 814, 815, 816, 817, 818, 819, 820, 821, 822, 823,824, 825, 826, 827, 828, 829, 830, 831, 832, 833, 834, 835,836, 837, 838, 839, 840, 841, 842, 843, 844, 845, 846, 847,848, 849, 850, 851, 852, 853, 854, 855, 856, 857, 858: n = A,T,C or G
  misc_feature 859, 860, 861, 862, 863, 864, 865, 866, 867, 868, 869, 870,871, 872, 873, 874, 875, 876, 877, 878, 879, 880, 881, 882,883, 884, 885, 886, 887, 888, 889, 890, 891, 892, 893, 894,895, 896, 897, 898, 899, 900, 901, 902, 903, 904, 905-910: n = A,T,C or G
tngtngacntanttggggcngatggagctccccgcggtggcggcgtnctngaantagngcanacaccggctgctggaataangcnttngncttgncctgcccgacgaccttgagggggggcccgnnccncntgttntgtgnccnnngggacnggtgaactgcccccttgngcncntatggtnttannnntcacttgnacaanatgagcgactcantatcttttatcaaaccattgatcacctgcangctatggtatatttttgcagctgtgtagagctatgtggcatgagaatgtggacttataaattgctgatccaataaatagacattatgggcaacagtgtcttatcagctagtggtgtnctaaggtttcanggaacagttgtctgaccttactatccaacgaggagtaactgattcacttctcagaggtatattaacctaatttggacatcacagaatgcctgaaaaataattcttcagtgcattaaacagtcccctggatctattaaagtaagcaaaaaaaaaaaaaaaaaaaaaaaaaaccccccggccnnttaaaaaanngggnnccccccggggggggggnntttnntnnnnnntttttnnnccccccccccccngggggggggccccgccccccntttttntnccntttnnngggggnnnnnnnncccccnngggnaaaanngggnnaannnnnnnnntncgnnnnnnnnnnnnnnnnnnnnnnnnnnnnnnnnnnnnnnnnnnnnnnnnnnnnnnnnnnnnnnnnnnnnnnnnnnnnnnnnnnnnnnnnnnnnnnnnnnnnnnnnnnnnnnnnnnnnnnnnnnnnnnnnnnnnnnnnnnnnnnnnnnnnnnnnnnnnnnnnnnnnnnnnnnnnnnnnnnnnnnnnnnnnnnnnnnnnnnn

SEQ ID NO: 6267 - DNA, 910 bp, Homo sapiens
  misc_feature 1, 12, 13, 17, 27, 30, 33, 38, 53, 55, 297, 333, 369, 378,379, 380, 384, 386, 389, 413, 418, 419, 430, 431, 437, 439,440, 441, 443, 451, 452, 462, 463, 465, 484, 487, 489, 491,493, 499, 501, 515, 527, 529, 534, 537, 548, 550, 555: n = A,T,C or G
  misc_feature 560, 564, 565, 566, 572, 573, 576, 577, 579, 580, 582, 588,589, 590, 591, 600, 602, 616, 620, 622, 625, 626, 627, 630,631, 636, 644, 650, 652, 664, 669, 673, 674, 677, 678, 680,681, 682, 685, 696, 697, 699, 710, 722, 725, 726, 730: n = A,T,C or G
  misc_feature 731, 732, 733, 734, 738, 739, 740, 741, 746, 747, 748, 749,750, 751, 752, 753, 756, 757, 758, 759, 760, 761, 766, 767,768, 774, 778, 779, 784, 788, 789, 790, 791, 792, 803, 809,810, 811, 812, 813, 817, 818, 819, 820, 821, 823, 824: n = A,T,C or G
  misc_feature 829, 830, 834, 837, 838, 843, 844, 845, 846, 847, 848, 849,850, 851, 852, 853, 854, 855, 856, 857, 858, 859, 860, 861,862, 866, 874, 875, 876, 884, 885, 887, 893, 894, 896, 897,898, 899, 910: n = A,T,C or G
nagtcgacatanntgtngctgatgganctngangcgcntatggacatagttgntngctgattggagctccaccgcggtggcggcccgaggtaccccagtcgtatcctctgtccgcatgtgtggccaggcctgacaaacacctgcagatggctgctgccccaacctggacctgcccaggaggttggagcagaaagggctctccctggggtggtgttctcctctagggtattgggatgcatgttcttgcactgccagcaaaagggggtgtgtctggggggccaccacctatgggacacnggggtcgaagggcctgtacctgcccgggcggccgangtacttttttttttttttttttttttttaaaaaatnttggggccnnngggntnttnttaaaaccactttggggggggganaaccnntcctttttttnnaaaaantnnntnaaccgggnnttttaaaaanngngggggggggggggggcacnatntnanancccccngntttagggggggggnttttctaatttnanaaaanttnttttttaaaanangggtnttttnattnnngaaaannttnntnncnccccgnnnnaaaaaaaananacccccccccaaanaaangnggnnngannggggncccccaangggggntncaaaaaaacccnggggncttnntgnntnnnccnaaaaaattttnngnaaaaaaaattnttttcccccccnaanntttnnnnnaaannnnttttnnnnnnnnttnnnnnnggggnnncccccnaaannggggnaaannnnnaaaaaaccccntttttnnnnnaaannnnntnnttttnngggnaannggggnnnnnnnnnnnnnnnnnnnncccngggggggnnnaaaaaaannanaccccnngnnnnaaaaaaaaaan

SEQ ID NO: 6268 - DNA, 830 bp, Homo sapiens
  misc_feature 2, 3, 4, 11, 17, 567, 568, 569, 570, 571, 572, 573, 574,575, 576, 577, 578, 579, 580, 581, 582, 583, 584, 585, 586,587, 588, 589, 590, 591, 592, 593, 594, 595, 596, 597, 598,599, 600, 601, 602, 603, 604, 605, 606, 607, 608, 609: n = A,T,C or G
  misc_feature 610, 611, 612, 613, 614, 615, 616, 617, 618, 619, 620, 621,622, 623, 624, 625, 626, 627, 628, 629, 630, 631, 632, 633,634, 635, 636, 637, 638, 639, 640, 641, 642, 643, 644, 645,646, 647, 648, 649, 650, 651, 652, 653, 654, 655, 656: n = A,T,C or G
  misc_feature 657, 658, 659, 660, 661, 662, 663, 664, 665, 666, 667, 668,669, 670, 671, 672, 673, 674, 675, 676, 677, 678, 679, 680,681, 682, 683, 684, 685, 686, 687, 688, 689, 690, 691, 692,693, 694, 695, 696, 697, 698, 699, 700, 701, 702, 703: n = A,T,C or G
  misc_feature 704, 705, 706, 707, 708, 709, 710, 711, 712, 713, 714, 715,716, 717, 718, 719, 720, 721, 722, 723, 724, 725, 726, 727,728, 729, 730, 731, 732, 733, 734, 735, 736, 737, 738, 739,740, 741, 742, 743, 744, 745, 746, 747, 748, 749, 750: n = A,T,C or G
  misc_feature 751, 752, 753, 754, 755, 756, 757, 758, 759, 760, 761, 762,763, 764, 765, 766, 767, 768, 769, 770, 771, 772, 773, 774,775, 776, 777, 778, 779, 780, 781, 782, 783, 784, 785, 786,787, 788, 789, 790, 791, 792, 793, 794, 795, 796, 797: n = A,T,C or G
  misc_feature 798, 799, 800, 801, 802, 803, 804, 805, 806, 807, 808, 809,810, 811, 812, 813, 814, 815, 816, 817, 818, 819, 820, 821,822, 823, 824, 825, 826, 827, 828, 829: n = A,T,C or G
tnnngacatanttgtgngctgattggagctccaccgcggtggcggccgcccgggcaggtaccaccccaacataaggcaagcagaaaatctgctgtcaccactacggctgatcctcttttgcaagtgccacctcccggctggaggccaaccagcacagtccatttcaacatctgcaagcacaaaaagcacagcacttaggaagaagaaaacatttgcatgacctcagctatcatcattgcctgagtcattctggctaaccaggagatcttgagtctcttcacttgcccaataccttactgttacagctggtatttgacaaagccaacacactaaggctctttctaaccaaggaaatctcagtatctacatcttcccgcccacccccatcagagctggtgtggtacctcggccgctctagaactagtggatcccccgggctgcaggaattcgatatcaagcttatcgataccgtcgacctcgagggggggcccggtacccagcttttgttccctttagtgagggttaattgcgcgcttggcgtaatcatggtcatagctggtcctggannnnnnnnnnnnnnnnnnnnnnnnnnnnnnnnnnnnnnnnnnnnnnnnnnnnnnnnnnnnnnnnnnnnnnnnnnnnnnnnnnnnnnnnnnnnnnnnnnnnnnnnnnnnnnnnnnnnnnnnnnnnnnnnnnnnnnnnnnnnnnnnnnnnnnnnnnnnnnnnnnnnnnnnnnnnnnnnnnnnnnnnnnnnnnnnnnnnnnnnnnnnnnnnnnnnnnnnnnnnnnnnnnnnnnnnnnnnnnnnnnnnnnnnnnnnnnnnnnnnnnng

SEQ ID NO: 6269 - DNA, 955 bp, Homo sapiens
  misc_feature 2, 13, 15, 16, 23, 26, 29, 30, 33, 42, 48, 54, 58, 391, 488,494, 495, 496, 497, 498, 499, 500, 501, 502, 503, 504, 505,506, 508, 509, 510, 511, 512, 513, 514, 515, 516, 517, 518,519, 520, 521, 522, 523, 524, 525, 526, 527, 528: n = A,T,C or G
  misc_feature 529, 530, 531, 532, 533, 534, 535, 536, 537, 538, 539, 540,541, 542, 543, 544, 545, 546, 547, 548, 549, 550, 551, 554,555, 556, 557, 558, 559, 560, 561, 562, 563, 564, 565, 566,567, 568, 569, 570, 571, 572, 573, 574, 575, 576, 577: n = A,T,C or G
  misc_feature 578, 579, 580, 581, 582, 583, 584, 585, 586, 587, 588, 589,590, 591, 592, 593, 594, 595, 596, 597, 598, 599, 600, 601,602, 603, 604, 605, 606, 607, 608, 609, 610, 611, 612, 613,614, 615, 616, 617, 618, 619, 620, 621, 622, 623, 624: n = A,T,C or G
  misc_feature 625, 626, 627, 628, 629, 630, 631, 632, 633, 634, 635, 636,637, 638, 639, 640, 641, 642, 643, 644, 645, 646, 647, 648,649, 650, 651, 652, 653, 654, 655, 656, 657, 658, 659, 660,661, 662, 663, 664, 665, 666, 667, 668, 669, 670, 671: n = A,T,C or G
  misc_feature 672, 673, 674, 675, 676, 677, 678, 679, 680, 681, 682, 683,684, 685, 686, 687, 688, 689, 690, 691, 692, 693, 694, 695,696, 697, 698, 699, 700, 701, 702, 703, 704, 705, 706, 707,708, 709, 710, 711, 712, 713, 714, 715, 716, 717, 718: n = A,T,C or G
  misc_feature 719, 720, 721, 722, 723, 724, 725, 726, 727, 728, 729, 730,731, 732, 733, 734, 735, 736, 737, 738, 739, 740, 741, 742,743, 744, 745, 746, 747, 748, 749, 750, 751, 752, 753, 754,755, 756, 757, 758, 759, 760, 761, 762, 763, 764, 765-955: n = A,T,C or G
antcgacatagtntnntctgatnganctnngangcgcttatngactantatatngctnattggagctccaccgcggtggcggccgaggtacgcggggtgtgtgccatcatcgagcgtgtgcagcgctcctggaggagaagggcactacccgaggaggtctgccgcatctacctgctgcgcatcctgcacacctactacaagtttgattacaaggcccatcagcgacagctgaccccgcctgaggctcctcaaagtctgagcaaagaccaggcaaaaaatgagggcgaggactcggctgtgttgatggaaagacttgtgcaagtacctgcccgggcggccgtctagaactagtggatccccgggctgcaggaattcgatatcaagcttatcnataccgtcacctcgagggggggcccggtacccagcttttgttccctttaatgagggttaattgcgccccttggcgtaatcatggtcatagctgtttnctggannnnnnnnnnnnngnnnnnnnnnnnnnnnnnnnnnnnnnnnnnnnnnnnnnnnnnnnntgnnnnnnnnnnnnnnnnnnnnnnnnnnnnnnnnnnnnnnnnnnnnnnnnnnnnnnnnnnnnnnnnnnnnnnnnnnnnnnnnnnnnnnnnnnnnnnnnnnnnnnnnnnnnnnnnnnnnnnnnnnnnnnnnnnnnnnnnnnnnnnnnnnnnnnnnnnnnnnnnnnnnnnnnnnnnnnnnnnnnnnnnnnnnnnnnnnnnnnnnnnnnnnnnnnnnnnnnnnnnnnnnnnnnnnnnnnnnnnnnnnnnnnnnnnnnnnnnnnnnnnnnnnnnnnnnnnnnnnnnnnnnnnnnnnnnnnnnnnnnnnnnnnnnnnnnnnnnnnnnnnnnnnnnnnnnnnnnnnnnnnnnnnnnnnnnnnnnnnnnnnnnnnnnnnnnnnnnnnnnnnnnnnnnnnnnnnnnnnnnnn

SEQ ID NO: 6270 - DNA, 933 bp, Homo sapiens
  misc_feature 2, 5, 8, 9, 10, 13, 14, 15, 17, 18, 19, 20, 21, 22, 23, 24,25, 26, 27, 28, 29, 30, 31, 32, 33, 34, 37, 42, 47, 54,57, 60, 64, 263, 278, 320, 395, 411, 481, 484, 525, 541,559, 579, 583, 621, 626, 627, 629, 630, 631, 632, 633, 634: n = A,T,C or G
  misc_feature 635, 636, 637, 638, 639, 640, 641, 642, 643, 644, 645, 646,647, 648, 649, 650, 651, 652, 653, 654, 655, 656, 657, 658,659, 660, 661, 662, 663, 664, 665, 666, 667, 668, 669, 670,671, 672, 673, 674, 675, 676, 677, 678, 679, 680, 681: n = A,T,C or G
  misc_feature 682, 683, 684, 685, 686, 687, 688, 689, 690, 691, 692, 693,694, 695, 696, 697, 698, 699, 700, 701, 702, 703, 704, 705,706, 707, 708, 709, 710, 711, 712, 713, 714, 715, 716, 717,718, 719, 720, 721, 722, 723, 724, 725, 726, 727, 728: n = A,T,C or G
  misc_feature 729, 730, 731, 732, 733, 734, 735, 736, 737, 738, 739, 740,741, 742, 743, 744, 745, 746, 747, 748, 749, 750, 751, 752,753, 754, 755, 756, 757, 758, 759, 760, 761, 762, 763, 764,765, 766, 767, 768, 769, 770, 771, 772, 773, 774, 775: n = A,T,C or G
  misc_feature 776, 777, 778, 779, 780, 781, 782, 783, 784, 785, 786, 787,788, 789, 790, 791, 792, 793, 794, 795, 796, 797, 798, 799,800, 801, 802, 803, 804, 805, 806, 807, 808, 809, 810, 811,812, 813, 814, 815, 816, 817, 818, 819, 820, 821, 822: n = A,T,C or G
  misc_feature 823, 824, 825, 826, 827, 828, 829, 830, 831, 832, 833, 834,835, 836, 837, 838, 839, 840, 841, 842, 843, 844, 845, 846,847, 848, 849, 850, 851, 852, 853, 854, 855, 856, 857, 858,859, 860, 861, 862, 863, 864, 865, 866, 867, 868, 869-933: n = A,T,C or G
cngtnggnnntannntnnnnnnnnnnnnnnnnnngangcgcnttatngacatantanatngctnattggagctccacccgcggtggcggccgaggtacttcctgcttgcctcatgaaaagtggtcctctggaaggcccaggtgaaagctcgtggtagtgttctcctcaatgatgtaggtataggactgttgcctttggaaccttttccacgtcttcacaggaatgttggtcctagaaattcacaccccccatgaaagtagaanctcacaagttcacanaacaaaaggtctcaaaagacaaaatgtgattcttgccacctntttattctcttgtgtcttgccatcacccgactgcggaggtctaaatcctggccaaccagagtgagaatcatgaantcattgtctgaggctncaacagcttgtgtaaatgtgatcaccagccaccttccaacctgtcatgcccttgtaccttgccgggcggncgntctaaactagtgggatcccccggctgcaggaattcgatatnaacttatcgatccgcnactcaaggggggcccggncccaacttttgttcctttantganggttaattgccccttggcgtaatcatggtcatagctgnttctnngnnnnnnnnnnnnnnnnnnnnnnnnnnnnnnnnnnnnnnnnnnnnnnnnnnnnnnnnnnnnnnnnnnnnnnnnnnnnnnnnnnnnnnnnnnnnnnnnnnnnnnnnnnnnnnnnnnnnnnnnnnnnnnnnnnnnnnnnnnnnnnnnnnnnnnnnnnnnnnnnnnnnnnnnnnnnnnnnnnnnnnnnnnnnnnnnnnnnnnnnnnnnnnnnnnnnnnnnnnnnnnnnnnnnnnnnnnnnnnnnnnnnnnnnnnnnnnnnnnnnnnnnnnnnnnnnnnnnnnnnnnnnnnnnnnnnnnnnnnnnnnnnn

SEQ ID NO: 6271 - DNA, 915 bp, Homo sapiens
  misc_feature 1, 3, 7, 13, 32, 40, 53, 58, 59, 72, 79, 609, 615, 616, 626,627, 628, 629, 630, 631, 632, 633, 634, 635, 636, 637, 638,639, 640, 641, 642, 643, 644, 645, 646, 647, 648, 649, 650,651, 652, 653, 654, 655, 656, 657, 658, 659, 660: n = A,T,C or G
  misc_feature 661, 662, 663, 664, 665, 666, 667, 668, 669, 670, 671, 672,673, 674, 675, 676, 677, 678, 679, 680, 681, 682, 683, 684,685, 686, 687, 688, 689, 690, 691, 692, 693, 694, 695, 696,697, 698, 699, 700, 701, 702, 703, 704, 705, 706, 707: n = A,T,C or G
  misc_feature 708, 709, 710, 711, 712, 713, 714, 715, 716, 717, 718, 719,720, 721, 722, 723, 724, 725, 726, 727, 728, 729, 730, 731,732, 733, 734, 735, 736, 737, 738, 739, 740, 741, 742, 743,744, 745, 746, 747, 748, 749, 750, 751, 752, 753, 754: n = A,T,C or G
  misc_feature 755, 756, 757, 758, 759, 760, 761, 762, 763, 764, 765, 766,767, 768, 769, 770, 771, 772, 773, 774, 775, 776, 777, 778,779, 780, 781, 782, 783, 784, 785, 786, 787, 788, 789, 790,791, 792, 793, 794, 795, 796, 797, 798, 799, 800, 801: n = A,T,C or G
  misc_feature 802, 803, 804, 805, 806, 807, 808, 809, 810, 811, 812, 813,814, 815, 816, 817, 818, 819, 820, 821, 822, 823, 824, 825,826, 827, 828, 829, 830, 831, 832, 833, 834, 835, 836, 837,838, 839, 840, 841, 842, 843, 844, 845, 846, 847, 848: n = A,T,C or G
  misc_feature 849, 850, 851, 852, 853, 854, 855, 856, 857, 858, 859, 860,861, 862, 863, 864, 865, 866, 867, 868, 869, 870, 871, 872,873, 874, 875, 876, 877, 878, 879, 880, 881, 882, 883, 884,885, 886, 887, 888, 889, 890, 891, 892, 893, 894, 895-914: n = A,T,C or G
nantggncatagntgtggctgattggagctcnacgcgctnatggactagtatntgccnnatcgtatctatcnggtgtgntgcctcacaagtgcgatctggtcctccaggttcctgttttgcaggcggagctgccgggcctctgcttgcaggggtctcagagcctccttcatttcctggatctcacctgggttctctgcagagctttggtcccagcttctttcctctctaggagccgcaggaactgaggctcatactcctcctccaggtcctggcggctctctgccatgagattttcaaactgggcagagagtcgccggctttcctggagaaagtgcccatccctctggcttggaggggcttctagttgttgccgcagctgctccttctgcttctgataggcatcccggagcagggccagttcctctgagagctgggttgcccttgtccccgcgtacctgcccgggcggccgctctagaactagtggatcccccgggctgcaggaattcgatatcaagcttatcgataccgtcgacctcgagggggggcccggtacccagcttttgttccctttaatgagggttaattgcgcgcttggcgtaatcatggncataanntgtttccggnnnnnnnnnnnnnnnnnnnnnnnnnnnnnnnnnnnnnnnnnnnnnnnnnnnnnnnnnnnnnnnnnnnnnnnnnnnnnnnnnnnnnnnnnnnnnnnnnnnnnnnnnnnnnnnnnnnnnnnnnnnnnnnnnnnnnnnnnnnnnnnnnnnnnnnnnnnnnnnnnnnnnnnnnnnnnnnnnnnnnnnnnnnnnnnnnnnnnnnnnnnnnnnnnnnnnnnnnnnnnnnnnnnnnnnnnnnnnnnnnnnnnnnnnnnnnnnnnnnnnnnnnnnnnnnnnnnnnnnnnnnnnnnnng

SEQ ID NO: 6272 - DNA, 978 bp, Homo sapiens
  misc_feature 1, 3, 12, 16, 17, 21, 51, 57, 61, 261, 290, 347, 396, 442,461, 491, 492, 493, 494, 495, 496, 497, 498, 499, 500, 501,502, 503, 504, 505, 506, 507, 508, 509, 510, 511, 512, 513,514, 515, 516, 517, 518, 519, 520, 521, 522, 523, 524: n = A,T,C or G
  misc_feature 525, 526, 527, 528, 529, 530, 531, 532, 533, 534, 535, 536,537, 538, 539, 540, 541, 542, 543, 544, 545, 546, 547, 548,549, 550, 551, 552, 553, 554, 555, 556, 557, 558, 559, 560,561, 562, 563, 564, 565, 566, 567, 568, 569, 570, 571: n = A,T,C or G
  misc_feature 572, 573, 574, 575, 576, 577, 578, 579, 580, 581, 582, 583,584, 585, 586, 587, 588, 589, 590, 591, 592, 593, 594, 595,596, 597, 598, 599, 600, 601, 602, 603, 604, 605, 606, 607,608, 609, 610, 611, 612, 613, 614, 615, 616, 617, 618: n = A,T,C or G
  misc_feature 619, 620, 621, 622, 623, 624, 625, 626, 627, 628, 629, 630,631, 632, 633, 634, 635, 636, 637, 638, 639, 640, 641, 642,643, 644, 645, 646, 647, 648, 649, 650, 651, 652, 653, 654,655, 656, 657, 658, 659, 660, 661, 662, 663, 664, 665: n = A,T,C or G
  misc_feature 666, 667, 668, 669, 670, 671, 672, 673, 674, 675, 676, 677,678, 679, 680, 681, 682, 683, 684, 685, 686, 687, 688, 689,690, 691, 692, 693, 694, 695, 696, 697, 698, 699, 700, 701,702, 703, 704, 705, 706, 707, 708, 709, 710, 711, 712: n = A,T,C or G
  misc_feature 713, 714, 715, 716, 717, 718, 719, 720, 721, 722, 723, 724,725, 726, 727, 728, 729, 730, 731, 732, 733, 734, 735, 736,737, 738, 739, 740, 741, 742, 743, 744, 745, 746, 747, 748,749, 750, 751, 752, 753, 754, 755, 756, 757, 758, 759-978: n = A,T,C or G
nantcgacatanttgnngctnattggagctccgacgcgcttatcgacatantatatngctnattggagctccaccgcggtggcggccgcccgggcaggtacgcggggagagccctggggaggaactgctcagttaggacccagagggaaccatggaaccccagctcagcttctcttcctcctgctactctggctccaagataccaccgaaaaattgtgttgacacaatctcaccaccctgtctttgtctcagggggaaaanaccaccctttcttgtagggccaagtcaanagtgttagcacctacttagccttggtacctcggccgtctagactagtggatcccccnggctgcaggaaattcgatatcaaagcttatcgataccgtcgacctcgangggggggcccggtacccaaccttttgttccctttaagtgaagggtnaattgcgccccttggcgtnaatcaattggtcataagcttgtttcctggnnnnnnnnnnnnnnnnnnnnnnnnnnnnnnnnnnnnnnnnnnnnnnnnnnnnnnnnnnnnnnnnnnnnnnnnnnnnnnnnnnnnnnnnnnnnnnnnnnnnnnnnnnnnnnnnnnnnnnnnnnnnnnnnnnnnnnnnnnnnnnnnnnnnnnnnnnnnnnnnnnnnnnnnnnnnnnnnnnnnnnnnnnnnnnnnnnnnnnnnnnnnnnnnnnnnnnnnnnnnnnnnnnnnnnnnnnnnnnnnnnnnnnnnnnnnnnnnnnnnnnnnnnnnnnnnnnnnnnnnnnnnnnnnnnnnnnnnnnnnnnnnnnnnnnnnnnnnnnnnnnnnnnnnnnnnnnnnnnnnnnnnnnnnnnnnnnnnnnnnnnnnnnnnnnnnnnnnnnnnnnnnnnnnnnnnnnnnnnnnnnnnnnnnnnnnnnnnnnnnnnnnnnnnnnnnnnnnnnnnnnnnnnnnnnnnnnnnnnnnnnnnnnnnnnnnnnnnnnnnnnnnnnnn

SEQ ID NO: 6273 - DNA, 847 bp, Homo sapiens
  misc_feature 4, 11, 16, 411, 419, 425, 434, 444, 450, 452, 474, 484, 493,497, 501, 516, 517, 520, 524, 536, 540, 546, 550, 554, 561,571, 574, 583, 596, 609, 611, 621, 639, 657, 669, 682, 726,743, 744, 753, 759, 762, 763, 785, 795, 818, 827: n = A,T,C or G
  misc_feature 847: n = A,T,C or G
gtgncatagtntgttngctgattggagctcccccgcggtggcggcccgcccgggcaggtacccggccaggatttttttgttaacatttaagatttctactaaattgttgcttttttatgtggcgtggtgattgtgtggtcccagcgctttgggaggccaaggcaggtggatcacttgagctcaggagtttgagaccagcctggccaacatggtgaaatcccatctctactaaacgttcaaaaattagctgggcatggtggtgcacacctgtagtcccagctactcggaagcctgaggcatgagaatcgtttgaacctgggaggcggaggctgccgtgagctgagattgtgccactgcactccagcctaggtgacagacggagactccatctcaaaaaaaaaagagagagantttgtccngtgttncctggcttnggaaataaanaaggananagagagggagggggggaaaganataaagaganagagagaangagngtgngagaaagagagaccnnganaccntgagttttgaangaangaaaangaangaangaaaagnggccgggccncantggcccacncctgcattcccancccttgggagttntnaaaggcaganaaaaaattgctccatggnaatttcccaacctttggnaaaaaattagcnctttcggccccangggttaaaaaaccaaattttttttaattttttgccaaattcagnttaaatttcgggatccnncccaggaanttccanggnnaacaacccccccagggttttanggtttcacanttttcaaaaattcttactttttnaaaagtttntggggggaaaaaattgaccn

SEQ ID NO: 6274 - DNA, 855 bp, Homo sapiens
  misc_feature 4, 9, 537, 575, 582, 603, 682, 722, 727, 774, 785, 805, 810,841: n = A,T,C or G
tagntgttngctgattggagctccccgcggtggcggcccgaggtacattagaaaacaggacttaggccaaacaaacaatactggatactgaatacaaaacagtatgatttatattaaaggtttccaaaggttgcctgcaaaggagaatattactactagtcagcaggaaaaaaatgcattcagaacccaagcagaaaccgccaaatgtaattaggttaagaaaagttacccttgggcagtgtattagttttctattgctgtgtgacaaattaccccaaatttagcagtttaaaaaacaatacccatagcagttctgtagctcatgagtctggcacagtgtggctggattctctgctcagggtcttaaaggctgaaataagggttggcaggacaacattccttcatggaggctctggggaagaatctgcttctaagttcattcaggttgttggcggaattcagttctttgctggctctcagctggaggcccctctctcacctcaaggctgcctgcattccttcttatgtggtcccctncagcttcaaaccaccttcctgctctttctcatgccttnatatctnttttccgtcctcctgttttangggcatatgaattagcttcaagccccccagatttattttaaaggttggattggtgccaatagaacataaattgcaggantaccttgccccgggcgggccgcccgggccaggttccagtnttgtnttatgattttttcacaccttcttgaaatttttaccaattcaaaaatncccaaagcttntttgaagttttttgattaancccanaaatacacttcccccaccttaaacctggttnaaaaaaaaaaaaaa

SEQ ID NO: 6275 - DNA, 833 bp, Homo sapiens
  misc_feature 7, 9, 391, 398, 403, 408, 417, 457, 504, 546, 560, 609, 612,635, 646, 650, 659, 695, 704, 718, 722, 761, 771, 772, 780,786, 793, 796, 808, 832: n = A,T,C or G
agttgtntnctgattggagctccccgcggtggcggccgcccgggcaggtaccatggaaaaaattgcaatgaaacaatataccagcaatattaaaaaaaggaaagaaaattattgaatactaccttcgccatttagaaggaggcataacctttgtgccccattggactccaccttccatcacgccctcttcagagacatcttcgtcatcctgcaagaaacaagcagcgtccatggctgttgtcatcccagatgctgtcctcaaggaggggctgagtggcgatgccctcagcagccccagtgcacctgagcccgtggtgggcatccctgataacaaattagatgctgactacatcaagagatacctgggcgatttgactccgctgcaggaganctgtctnattanacttnacgggtggntctaggagacccccaagggtgaaattccaaaagatgaacntattcttcaattcctatgtgcatgggattttaatattgacaaagccngagagatcatttgtcaatctttggcgtggaggaagcaccccnggtagactacattnttgctcctgggccggtccacaagttcctttaaaattactacaccggganggntggggttattaccaccaaaaatnggggggccctntacntctcagctngggcagatggcacccaagctttgtgaaaaccctctnggaggaaanccttcttaaaaacntttnttcctaaattaaaaaaaggggttaggggatcccaaaaanaaacaaaaanntttgggtnggcctnttaactnatngacctgcctggngggacttggaaaggggtgaaccant

SEQ ID NO: 6276 - DNA, 828 bp, Homo sapiens
  misc_feature 6, 9, 16, 420, 498, 518, 520, 591, 630, 641, 643, 659, 661,671, 674, 676, 679, 680, 681, 682, 683, 684, 685, 686, 687,688, 689, 690, 691, 692, 693, 694, 695, 696, 697, 698, 699,700, 701, 702, 703, 704, 705, 706, 707, 708, 709, 710: n = A,T,C or G
  misc_feature 711, 712, 713, 714, 715, 716, 717, 718, 719, 720, 721, 722,723, 724, 725, 726, 727, 728, 729, 730, 731, 732, 733, 734,735, 736, 737, 738, 739, 740, 741, 742, 743, 744, 745, 746,747, 748, 749, 750, 751, 752, 753, 754, 755, 756, 757: n = A,T,C or G
  misc_feature 758, 759, 760, 761, 762, 763, 764, 765, 766, 767, 768, 769,770, 771, 772, 773, 774, 775, 776, 777, 778, 779, 780, 781,782, 783, 784, 785, 786, 787, 788, 789, 790, 791, 792, 793,794, 795, 796, 797, 798, 799, 800, 801, 802, 803, 804: n = A,T,C or G
  misc_feature 805, 806, 807, 808, 809, 810, 811, 812, 813, 814, 815, 816,817, 818, 819, 820, 821, 822, 823, 824, 825, 826, 827: n = A,T,C or G
ggactnatngacatanttggggctgattggagctccccgcggtggcggccgcccgggcaggtacgcgggggcagagaagtttccgggactgtccccacgacagtccggtttgtagattccctgatctgcaattcttcccgttccttcatggatttgaaggctctcctttcttccttgaatgactttgcatccctctcgtttgctgagagttgggacaatgttggattactggtggaaccaagcccaccacatactgtaaatacactcttcctgaccaatgacctgactgaggaagtgatggaggaggtgctgcaaaagaaggcagacctcattctctcctaccatccgcctatcttccgacccatgaagcgcataacctggaacacatggaaggagcgcctggtgatccgggctctgganaacaaaagtcggtatctactctcctcatacagcctatgatgctgcgccccaaggcgttcaacaactggttggctaaanggcttggagcttgtaccttngnccgctctaaaactagtggatccccggctgcaggaattcgatatcaagcttatcgataccgtcgacctcgangggggggccccggtcccaacttttgttcccttttatganggttaattgcncnctttggcgtaatcatngncataacttgnttncnggnnnnnnnnnnnnnnnnnnnnnnnnnnnnnnnnnnnnnnnnnnnnnnnnnnnnnnnnnnnnnnnnnnnnnnnnnnnnnnnnnnnnnnnnnnnnnnnnnnnnnnnnnnnnnnnnnnnnnnnnnnnnnnnnnnnnnnnnnnnnnnnnnnnnnc

SEQ ID NO: 6277 - DNA, 813 bp, Homo sapiens
  misc_feature 1, 2, 8, 14, 17, 46, 57, 63, 68, 74, 91, 95, 101, 123, 128,140, 153, 159, 164, 165, 173, 195, 198, 210, 217, 227, 230,231, 233, 240, 250, 251, 253, 254, 265, 269, 278, 280, 282,284, 285, 287, 290, 293, 296, 299, 306, 312, 316, 322: n = A,T,C or G
  misc_feature 323, 326, 328, 343, 352, 359, 449, 454, 510, 586, 591, 602,603, 604, 605, 606, 607, 608, 609, 610, 611, 612, 613, 614,615, 616, 617, 618, 619, 620, 621, 622, 623, 624, 625, 626,627, 628, 629, 630, 631, 632, 633, 634, 635, 636, 637: n = A,T,C or G
  misc_feature 638, 639, 640, 641, 642, 643, 644, 645, 646, 647, 648, 649,650, 651, 652, 653, 654, 655, 656, 657, 658, 659, 660, 661,662, 663, 664, 665, 666, 667, 668, 669, 670, 671, 672, 673,674, 675, 676, 677, 678, 679, 680, 681, 682, 683, 684: n = A,T,C or G
  misc_feature 685, 686, 687, 688, 689, 690, 691, 692, 693, 694, 695, 696,697, 698, 699, 700, 701, 702, 703, 704, 705, 706, 707, 708,709, 710, 711, 712, 713, 714, 715, 716, 717, 718, 719, 720,721, 722, 723, 724, 725, 726, 727, 728, 729, 730, 731: n = A,T,C or G
  misc_feature 732, 733, 734, 735, 736, 737, 738, 739, 740, 741, 742, 743,744, 745, 746, 747, 748, 749, 750, 751, 752, 753, 754, 755,756, 757, 758, 759, 760, 761, 762, 763, 764, 765, 766, 767,768, 769, 770, 771, 772, 773, 774, 775, 776, 777, 778: n = A,T,C or G
  misc_feature 779, 780, 781, 782, 783, 784, 785, 786, 787, 788, 789, 790,791, 792, 793, 794, 795, 796, 797, 798, 799, 800, 801, 802,803, 804, 805, 806, 807, 808, 809, 810, 811, 812: n = A,T,C or G
nngactanttgtgngcngattggagctccccgcggtggcggccgangtacatattgnccatcngctcnaaaatnatgaactcctgggtctnatantgggcnaacagggaaaaaagttgggacntgctncctgtacccacntggttgccttgcnggtccnttctnngactgagntctggacttgagagcctcttgnacnatggcttttcanacaactnttgtataccnctnncnctggaanatccatctcnncnntgtcttttctnactnacatggggncncncnngnccncanganaanacacctntcaaangtgncaaatnnggnangggacttaatacttntcatgcctngaggacncctgtctactcagtttttttttggtggggcggggggcggtgatagggtctcgctctgtcaccagactggagtacctgcccgggcggccgntctanaactagtggatcccccgggctgcaggaattcgatatcaagcttatcgataccgtcnacctcgagggggggcccggtacccaacttttgttccctttaatgagggttaattgcgcccttggcgtaatcatggncatanctgttcctggnnnnnnnnnnnnnnnnnnnnnnnnnnnnnnnnnnnnnnnnnnnnnnnnnnnnnnnnnnnnnnnnnnnnnnnnnnnnnnnnnnnnnnnnnnnnnnnnnnnnnnnnnnnnnnnnnnnnnnnnnnnnnnnnnnnnnnnnnnnnnnnnnnnnnnnnnnnnnnnnnnnnnnnnnnnnnnnnnnnnnnnnnnnnnnnnnnnnnnnnnnnnnnnnnnng

SEQ ID NO: 6278 - DNA, 828 bp, Homo sapiens
  misc_feature 3, 13, 20, 22, 24, 25, 571, 625, 663, 692, 700, 718, 764,765, 766, 767, 768, 769, 770, 771, 772, 774, 775, 776, 777,778, 779, 780, 781, 782, 783, 784, 785, 786, 787, 788, 789,790, 791, 792, 793, 794, 795, 796, 797, 798, 799, 800: n = A,T,C or G
  misc_feature 801, 802, 803, 804, 805, 806, 807, 808, 809, 810, 811, 812,813, 814, 815, 816, 817, 818, 819, 820, 821, 822, 823, 824,825, 826, 827, 828: n = A,T,C or G
cgncgcgttattngacttantntnnggctgattggagctccaccgcggtggcggcccgaggtacgagaaatactgtggtagacagtagtagctccccaaagatgtccacatcctaatcttttggacttgtgcttatgttaccttgcattgaagaagagtctttgcagatgtgaccaaattaaggaactcgaaatggatagattagcctgcattatccaggtggcccaatgcaattgaagagttcttaaaagagttagagaaggagaagggaagatgaaagcagggagtcagaggatgtgatttagattttaaaatgctattctgctggctttgaagatggggaagggggtcataagccaatgaatgcaaccagcttctagaagcaaaaatggaaaggaaacggattttcccctagaacctccagaaggaatgcatgtctgttgacagcttgattttggcctagtaaaaccaattttaaacttctgaattctggaatagtaaagaaaagaaatttctgttgttttaagccactaagtttatggtaacttacaagaacatcaacaggaaagtnttacaaatggtagctaaagattttgtccgtgatcattagcttctgtacctcggnccgtctaaaactagtggatccccggctgcaggaattcnattcaagcttatcgatcccgcccacctcnaggggggnccggtccccacttttgtncctttaatgagggttaattgccccctggcgtaatcatgggcatacnnnnnnnnngnnnnnnnnnnnnnnnnnnnnnnnnnnnnnnnnnnnnnnnnnnnnnnnnnnnnnnn

SEQ ID NO: 6279 - DNA, 884 bp, Homo sapiens
  misc_feature 2, 7, 10, 17, 18, 23, 33, 39, 50, 161, 169, 261, 295, 307,313, 337, 360, 398, 401, 404, 442, 445, 448, 453, 454, 455,460, 463, 466, 488, 497, 515, 545, 553, 554, 561, 571, 574,577, 594, 595, 597, 599, 600, 611, 628, 634, 656, 659: n = A,T,C or G
  misc_feature 670, 671, 686, 687, 688, 694, 695, 698, 700, 702, 708, 709,710, 715, 716, 717, 721, 722, 736, 737, 744, 745, 747, 755,756, 757, 758, 762, 766, 768, 770, 776, 777, 779, 785, 788,789, 790, 791, 792, 793, 794, 795, 796, 797, 798, 800: n = A,T,C or G
  misc_feature 801, 802, 803, 804, 805, 806, 807, 808, 809, 810, 811, 812,813, 814, 815, 816, 817, 818, 819, 820, 821, 822, 823, 824,825, 826, 827, 828, 829, 830, 831, 832, 833, 834, 835, 836,837, 838, 839, 840, 841, 842, 843, 844, 845, 846, 847: n = A,T,C or G
  misc_feature 848, 849, 850, 851, 852, 853, 854, 855, 856, 857, 858, 859,860, 861, 862, 863, 864, 865, 866, 867, 868, 869, 870, 871,872, 873, 874, 875, 876, 877, 878, 879, 880, 881, 882, 883,884: n = A,T,C or G
angctanttnggcccannttaangactactatngggctnattggagctcnccgcggtggcggccgaggtacgcgggatcgcactgattacactcacaacaccctaggctcactaaacattctactacttactctcactgcccaagaactatcaaactcctnaccaacanctaaatatgactagctgacacaatagcttttatagtaaagatacctctttaccggactccacttatgactccctaaagcccatgtccaaccnccatcgctgggtcaataatacctgcccgggcggncgtctaaactantggatnccccggctgcaggaattcgatctnaagcttatcgataccgtcacctngagggggggcccggtacccagcttttgttccctttagnganggntaattgcgcgcttggcgtaatcatggtcatagctgttnctngangcaannnccacnacncanggctggtgttggatccaccacncaagcgcangcgctacttgggctcctnaatcacacccttgctgaggtctgtcatttngggatatnntactttntttggtccanctngtnctgagcccaaagtatanntnannaattttgccantttgggtgttgactccnattttnataatctcccgcgtacctcggncgntctagaactannggatcccccggctgnnngaattnnatntnancttatnnntcccnnnactnnagggggggcccggnnccacttnngnccctttannnnggtnaatngncncttgcnnancatggnatnnnnnnnnnnngnnnnnnnnnnnnnnnnnnnnnnnnnnnnnnnnnnnnnnnnnnnnnnnnnnnnnnnnnnnnnnnnnnnnnnnnnnnnnnnnnnnnn

SEQ ID NO: 6280 - DNA, 967 bp, Homo sapiens
  misc_feature 3, 10, 13, 24, 25, 29, 32, 352, 353, 354, 355, 356, 357,358, 359, 360, 361, 362, 363, 364, 365, 366, 367, 368, 369,370, 371, 372, 373, 374, 375, 376, 377, 378, 379, 380, 381,382, 383, 384, 385, 386, 387, 388, 389, 390, 391, 392: n = A,T,C or G
  misc_feature 393, 394, 395, 396, 397, 398, 399, 400, 401, 402, 403, 404,405, 406, 409, 411, 412, 413, 414, 415, 416, 417, 418, 419,420, 421, 422, 423, 424, 425, 426, 427, 428, 429, 430, 431,432, 433, 434, 435, 436, 437, 438, 439, 440, 441, 442: n = A,T,C or G
  misc_feature 443, 444, 445, 446, 447, 448, 449, 450, 451, 452, 453, 454,455, 456, 457, 458, 459, 460, 461, 462, 463, 464, 465, 466,467, 468, 469, 470, 471, 472, 473, 474, 475, 476, 477, 478,479, 480, 481, 482, 483, 484, 485, 486, 487, 488, 489: n = A,T,C or G
  misc_feature 490, 491, 492, 493, 494, 495, 496, 497, 498, 499, 500, 501,502, 503, 504, 505, 506, 507, 508, 509, 510, 511, 512, 513,514, 515, 516, 517, 518, 519, 520, 521, 522, 523, 524, 525,526, 527, 528, 529, 530, 531, 532, 533, 534, 535, 536: n = A,T,C or G
  misc_feature 537, 538, 539, 540, 541, 542, 543, 544, 545, 546, 547, 548,549, 550, 551, 552, 554, 555, 556, 557, 558, 559, 560, 561,562, 563, 564, 565, 566, 567, 568, 569, 570, 571, 572, 573,574, 575, 576, 577, 578, 579, 580, 581, 582, 583, 584: n = A,T,C or G
  misc_feature 585, 586, 587, 588, 589, 590, 591, 592, 593, 594, 595, 596,597, 598, 599, 600, 601, 602, 603, 604, 605, 606, 607, 608,609, 610, 611, 612, 613, 614, 615, 616, 617, 618, 619, 620,621, 622, 623, 625, 626, 627, 628, 629, 630, 631, 632-967: n = A,T,C or G
canggactanttngacgcgcttanngacntantatatggctaattggagctccacccgcggtggcggcccgcccgggcaggtacgcgggtgatgtggctctggaaggcgtgagccacttcttccgcgaactggcccgaggagaagcgcgagggctacgagcgtctcctgaagatgcaaaaccagcgtggcggcccgctctagaactagtggatcccccgggctgcaggaattcgatatcaagcttatcgataccgtcgacctcgagggggggcccggtacccagcttttgttccctttagtgagggttaattgcgcgcttggcgtaatcatggtcatagctgtttccttgannnnnnnnnnnnnnnnnnnnnnnnnnnnnnnnnnnnnnnnnnnnnnnnnnnnnnnaanannnnnnnnnnnnnnnnnnnnnnnnnnnnnnnnnnnnnnnnnnnnnnnnnnnnnnnnnnnnnnnnnnnnnnnnnnnnnnnnnnnnnnnnnnnnnnnnnnnnnnnnnnnnnnnnnnnnnnnnnnnnnnnnnnnnnnnnnnnnnnannnnnnnnnnnnnnnnnnnnnnnnnnnnnnnnnnnnnnnnnnnnnnnnnnnnnnnnnnnnnnnnnnnnnngnnnnnnnnnnnnnnnnnnnnnnnnnnnnnnnnnnnnnnnnnnnnnnnnnnnnnnnnnnnnnnnnnnnnnnnnnnnnnnnnnnnnnnnnnnnnnnnnnnnnnnnnnnnnnnnnnnnnnnnnnnnnnnnnnnnnnnnnnnnnnnnnnnnnnnnnnnnnnnnnnnnnnnnnnnnnnnnnnnnnnnnnnnnnnnnnnnnnnnnnnnnnnnnnnnnnnnnnnnnnnnnnnnnnnnnnnnnnnnnnnnnnnnnnnnnnnnnnnnnnnnnnnnnnnnnnnnnnnnnnnnnnnnnnnnnnnnnnnnnnnnnnnnnnnnnnnnnnnnnnnnnnnnnnnnnnnnnnnnnnnnn

SEQ ID NO: 6281 - DNA, 905 bp, Homo sapiens
  misc_feature 8, 23, 24, 28, 41, 274, 380, 424, 425, 426, 427, 429, 430,431, 432, 433, 434, 435, 436, 437, 440, 441, 442, 443, 444,445, 447, 448, 449, 450, 451, 461, 462, 463, 464, 469, 470,473, 474, 475, 476, 477, 478, 483, 484, 485, 486, 487: n = A,T,C or G
  misc_feature 489, 492, 493, 496, 497, 498, 499, 500, 502, 504, 506, 507,508, 509, 510, 511, 513, 514, 515, 517, 519, 520, 521, 523,524, 525, 526, 527, 528, 529, 530, 531, 532, 533, 534, 535,536, 537, 538, 539, 540, 541, 542, 543, 544, 545, 546: n = A,T,C or G
  misc_feature 547, 548, 549, 550, 551, 552, 553, 554, 555, 556, 557, 558,559, 560, 561, 562, 563, 564, 565, 566, 567, 568, 569, 570,571, 572, 573, 574, 575, 576, 577, 578, 579, 580, 581, 582,583, 584, 585, 586, 587, 588, 589, 590, 591, 592, 593: n = A,T,C or G
  misc_feature 594, 595, 596, 597, 598, 599, 600, 601, 602, 603, 604, 605,606, 607, 608, 609, 610, 611, 612, 613, 614, 615, 616, 617,618, 619, 620, 621, 622, 623, 624, 625, 626, 627, 628, 629,630, 631, 632, 633, 634, 635, 636, 637, 638, 639, 640: n = A,T,C or G
  misc_feature 641, 642, 643, 644, 645, 646, 647, 648, 649, 650, 651, 652,653, 654, 655, 656, 657, 658, 659, 660, 661, 662, 663, 664,665, 666, 667, 668, 669, 670, 671, 672, 673, 674, 675, 676,677, 678, 679, 680, 681, 682, 683, 684, 685, 686, 687: n = A,T,C or G
  misc_feature 688, 689, 690, 691, 692, 693, 694, 695, 696, 697, 698, 699,700, 701, 702, 703, 704, 705, 706, 707, 708, 709, 710, 711,712, 713, 714, 715, 716, 717, 718, 719, 720, 721, 722, 723,724, 725, 726, 727, 728, 729, 730, 731, 732, 733, 734-905: n = A,T,C or G
agcactanttggacccgcatatnngacntactatagggctnattggagctccaccgcggtggcggcccgaggtacagtgcatattggcggcgcacgcctcattacgattcgcctgcttgcttctcctgtcaatcgtttctttggaaggcagtggattttctcttgcgtctctgcttcttcagttcgacttatcgaattctcgatctcaccatatcgggttttgcaaacatggttgcggaggaaaaagcgaagcgaggcgcacgaatacctgccnggcggccgtctaaactagtggatccccggctgcaggaattcgatataagcttatcgatccgtcgacctcaaggggggccggacccacttttgttccctttaatganggttaattgccccttgcgtaatcatggcatagctgttcctggannnncnnnnnnnnnccnnnnnncnnnnnggggggcccnnnncccannttnnnnnnccttnnnnnanggnnaannnnncncntnnnnnnannntngnnntnnnnnnnnnnnnnnnnnnnnnnnnnnnnnnnnnnnnnnnnnnnnnnnnnnnnnnnnnnnnnnnnnnnnnnnnnnnnnnnnnnnnnnnnnnnnnnnnnnnnnnnnnnnnnnnnnnnnnnnnnnnnnnnnnnnnnnnnnnnnnnnnnnnnnnnnnnnnnnnnnnnnnnnnnnnnnnnnnnnnnnnnnnnnnnnnnnnnnnnnnnnnnnnnnnnnnnnnnnnnnnnnnnnnnnnnnnnnnnnnnnnnnnnnnnnnnnnnnnnnnnnnnnnnnnnnnnnnnnnnnnnnnnnnnnnnnnnnnnnnnnnnnnnnnnnnnnnnnnnnnnnnnnnnnnnnnnnnnnnnnnnnnnnnnnnnnnnnnnnnnnnnnnnnnnnnnnnnnnnnnnn

SEQ ID NO: 6282 - DNA, 908 bp, Homo sapiens
  misc_feature 9, 15, 34, 125, 290, 301, 308, 313, 336, 343, 350, 352, 358,368, 420, 459, 522, 530, 533, 541, 542, 547, 553, 566, 567,570, 573, 575, 578, 584, 586, 596, 615, 618, 620, 637, 642,656, 659, 669, 672, 679, 706, 718, 719, 730, 731: n = A,T,C or G
  misc_feature 749, 763, 772, 774, 776, 778, 780, 788, 795, 809, 812, 823,831, 832, 847, 849, 851, 860, 863, 869, 880, 884, 891, 893,894, 903, 905, 908: n = A,T,C or G
gcgcatagntgtgtnctgattggagctcccccgnggtggcggccgaggtacattgcaagtgcttgtcacctacacagtatttagtaaatacattgtgatgtgagaatcggagaagggagaagatncgaaggaaagaagggaataacctgactgtgggtattttaagtctagcagtaatcccactctactgaatcatactctgatttctaaagttttattagttcaacgaactttgtaaatattatatttatgtgggactgtattctctccaccccgaccaccaagaaatnaggttggcttngtgtttnctatnttagacttctggaggagaaggancacgganaataaanangaatcngaagggctanagggatataatgtcaagaggagagtattggttctagactgattatgatatanctcctggagagcccttgtgtgccttattctgactgtctntaatcctagctctgcctccatttatttggggctttctccatgttccaaccaggtacctgcccnggcaggcntcntggcaggnnccaanaagacngtggaaaaccaannctnccncnggnaacggnantcccagttanttgcggctttcactgaatnacntnaaacctttgttcgtttnaaatnaaaatggggttcanttnacaccatcanttnttttctntttcaaatcaaatgaatcttgtgggcnttttggattgcnnggaccagcttnncttaacccaacaactggnaattttcaggaatnctcactggngntntntnggtgcccnggaaagnccctaaggaacttnagnggacctggttncaaccggnnaaaaaaaaatgcttntncngcttccccngtnaatccnaaggcttttcnttgnttttttncnngggcaatcnanggn

SEQ ID NO: 6283 - DNA, 942 bp, Homo sapiens
  misc_feature 3, 10, 11, 12, 13, 14, 16, 21, 25, 29, 32, 34, 35, 36, 38,272, 367, 410, 443, 490, 493, 506, 522, 524, 527, 534, 573,589, 594, 604, 607, 616, 617, 620, 621, 625, 634, 641, 652,682, 685, 690, 693, 696, 703, 706, 711, 713, 717, 722: n = A,T,C or G
  misc_feature 726, 734, 748, 754, 756, 758, 759, 762, 766, 773, 774, 775,776, 777, 779, 781, 783, 784, 786, 787, 790, 794, 796, 797,798, 799, 800, 803, 804, 806, 807, 813, 814, 815, 828, 834,837, 838, 840, 841, 845, 852, 857, 858, 860, 861, 862: n = A,T,C or G
  misc_feature 863, 864, 865, 866, 871, 872, 874, 880, 883, 886, 887, 888,890, 891, 892, 893, 902, 903, 904, 905, 906, 909, 918, 919,923, 925, 935, 940, 942: n = A,T,C or G
cangcgctannnnnanccgcntatngacntantnnntngctgattggagctccccgcggtggcggccgcccgggcaggtacagaaaagcagaacatgacaaagccattagaaataccaagcatgtctcctggagggtaagaggacagtgagcccttgaagcaagttggggggattgggaatgattttacaggatggtcagagttcgaaagatgggtaggaattcaacaggagtgagaggtagagcacaagcttagctgaaagaacagcatanagaaaagacaagttattggttacttgaagaaaaattagtgaaaagcctcaatgcctagctaggcagctttatacctaatttcagtgggtgatgangactactaaaggtactgagtagggaagtgacatcatgatactntaatgactaggctggggcagtgggatttcagtncagttagcaaaatcaataatttggaccacttttgaggaaaaacaaangcntctaaaagaaaanaaccttaatttcaggncnttnttttaanttgaaaatggtcttgaattttggtgggggggtgtgtgtnttttttgttttttgtntaaanaaaaaaaaanatnaaaagaacnntgnnttanaaaaaaaanaggaaanaaaacaatttngggttttggccaataaccttaataaaattnctnaaaanganacnaaagctntanctttnangaanttttncttngggggggngggggggggatgancttttnancnnttnaacnttttttnnnnntntncnntnnccngggntnnnnnccnngnntggggnnnaaataaaaatccntttttnttnntnncccnttttggnaattnncnnnnnnnggggnngntttttnaanttnnngnnnncaaaaaagnnnnnccntttaaaatnngaancnccggctgganatttnan

SEQ ID NO: 6284 - DNA, 392 bp, Homo sapiens
  misc_feature 5, 9, 27: n = A,T,C or G
ccgcntatngacatactatgttggctnattggagctccaccgcggtggcggccgcccgggcaggtacaagtaagtattggttcccctgagttctgtgagccactctagcaaattaatcaaacccaaagaggggattgtgggaactccaactggaaactagttggttagaagttctggaggctgggacttgcaacttggggaggggagagggtggtcttgtgggactgagccctttacttgtcggatctgatgttatctctgagtagatggtgttggaactgaattggaagacatctagctggtgtccactgcttaatatgtggggagaaacccacacacatttggtcacaattgtcaagtcttcttaatgaacctaatcacaaaataagaac

SEQ ID NO: 6285 - DNA, 409 bp, Homo sapiens
  misc_feature 4, 9, 14, 16, 31: n = A,T,C or G
gaanacgcntaatngncatactatggggctnattggagctccaccgcggtggcggccgcccgggcaggacgcggggacctcagagctgagctgggcatgagtagatgctcagtaagtggtgcacagggttggtccctatggtggaggccccctaacaccgcccaacccccctccatgttctcacagctccacgcactgagcacgggcatgaaggccatgatgtcagaattctgcacccagggagctgagatgtgccgcagggcctgtggcggacatggctactcaaagctgagtggcctgccatcactggtcaccaaattgtcggcctcctgtacctcggccgctctagaactagtggatcccccgggctgcaggaattcgatatcaagcttatcgataccgtcgacct

SEQ ID NO: 6286 - DNA, 892 bp, Homo sapiens
  misc_feature 2, 3, 4, 5, 6, 7, 8, 9, 10, 11, 12, 13, 16, 649, 664, 671,675, 710, 711, 712, 713, 714, 715, 716, 717, 719, 721, 722,723, 724, 725, 726, 727, 728, 729, 730, 731, 732, 733, 734,735, 736, 737, 738, 739, 740, 741, 742, 743, 744, 745: n = A,T,C or G
  misc_feature 746, 747, 748, 749, 750, 751, 752, 753, 754, 755, 756, 757,758, 759, 760, 761, 762, 763, 764, 765, 766, 767, 768, 769,770, 771, 772, 773, 774, 775, 776, 777, 778, 779, 780, 781,782, 783, 784, 785, 786, 787, 788, 789, 790, 791, 792: n = A,T,C or G
  misc_feature 793, 794, 795, 796, 797, 798, 799, 800, 801, 802, 803, 804,805, 806, 807, 808, 809, 810, 811, 812, 813, 814, 815, 816,817, 818, 819, 820, 821, 822, 823, 824, 825, 826, 827, 828,829, 830, 831, 832, 833, 834, 835, 836, 837, 838, 839: n = A,T,C or G
  misc_feature 840, 841, 842, 843, 844, 845, 846, 847, 848, 849, 850, 851,852, 853, 854, 855, 856, 857, 858, 859, 860, 861, 862, 863,864, 865, 866, 867, 868, 869, 870, 871, 872, 873, 874, 875,876, 877, 878, 879, 880, 881, 882, 883, 884, 885, 886: n = A,T,C or G
  misc_feature 887, 888, 889, 890, 891, 892: n = A,T,C or G
gnnnnnnnnnnnnacnccgtatacgactactatagggcgaattggagctccccgcggtggcggcccgaggtaccgtgttatgcaaattaagcacttttcttctaaattcacatgaacttttagagacgtagactatgttattgaagtaactcatcctaagtgtctgtagtgattggagatattcttgcttatcaaattgaagtatttataagtgagtgacgtgatgtctgagatctatcttaaagtaatccagtagggcaaagataacttgagattggccagttcttgataatttttgaagtaggctgatgagtacgcgggtagccacctcattttacagagttgaaactgaggctcagagactgaaagttaagcctgaggttgcagtcaataagaggcagagctggaactgaaacctacctgtgtctgaccaccagttcgtgttctgacggcaggctagtctgcatcacagagtgtggagtagatggtgcatgcctgctaggatgggctaggtatcactgtaggtaaaaaacagccccaaactatggaaatgtacctgcccgggcggccgctctaaactagtggatcccccgggctgcaggaattcgatatcaaacttatcgatccgtcgacctcgagggggggcccngtcccacctttggtncctttantganggttaattgcgcgcttgcgtaatcatggtcatacnnnnnnnncngnnnnnnnnnnnnnnnnnnnnnnnnnnnnnnnnnnnnnnnnnnnnnnnnnnnnnnnnnnnnnnnnnnnnnnnnnnnnnnnnnnnnnnnnnnnnnnnnnnnnnnnnnnnnnnnnnnnnnnnnnnnnnnnnnnnnnnnnnnnnnnnnnnnnnnnnnnnnnnnnnnnnnnnnnnnn

SEQ ID NO: 6287 - DNA, 889 bp, Homo sapiens
  misc_feature 7, 18, 23, 27, 507, 599, 728, 729, 748, 749, 798, 799, 814,815, 816, 822, 841, 842, 845, 855, 866, 867, 870, 881, 884,886: n = A,T,C or G
gccgtancgactactatngggcnaatnggagctccccgcggtggcggccgaggtacgcggggaaaagagttggttacagattcattctgtgtctcatggcgctgtgctctcttccctagagaggatctagacttttcatctgtttacacgggaagaagtagttcagtttatggtctcatttctcatataaactgtgaaaattctccacggcttcacatgctagttcagaagatattgatgccttgagaataaagcatctggttgtaactccagcagttttatatttaaagtatacctaatataattgtcaaccacattactttagaaaacataaacaaaagatagttacacatatttatttaaaaaatggtgaccgggtgcggtggctcacgcctgtaatgccggcacgttgggaggccgtgactgacagatcactaggtgaggagatcgagaccatcctgactaacacagtgaagccctgtctctactaagaatgcgaaaaattancccggacgtggtggcacccatttctaataatttctcaagcgatgctgctgctggtggtccttggagcttgctctgagttgcaaaaaggagangcctttgatgggaaaaattggaagaaaagcagttgggatagaagggcaagacttacagggtcaagaaaatgcattatattgcttttatttctgggtatgcttttaccccgagaagaagaaggaaagatnnccgaaattttgatttaaanncttccttaccaaaaaaaaggagggtgacaaaaaaaaaaaaaaaaaaaannccccccggggggagnnnccgggnttaatttggcccccccccnnttnggggggggcnccccaaccccnnaanaaacccccccnagngngcc

SEQ ID NO: 6288 - DNA, 876 bp, Homo sapiens
  misc_feature 19, 28, 66, 297, 298, 299, 300, 302, 303, 304, 305, 306,311, 312, 313, 314, 315, 316, 323, 324, 325, 327, 328, 330,332, 339, 340, 349, 350, 351, 352, 353, 354, 362, 365, 366,367, 368, 369, 370, 371, 374, 375, 376, 377, 378, 381: n = A,T,C or G
  misc_feature 382, 383, 385, 387, 388, 389, 391, 393, 394, 397, 399, 400,401, 404, 406, 407, 408, 415, 420, 422, 423, 425, 429, 432,433, 434, 436, 437, 439, 440, 444, 445, 448, 451, 454, 455,457, 458, 461, 462, 463, 468, 469, 470, 471, 477, 478: n = A,T,C or G
  misc_feature 479, 480, 483, 484, 488, 489, 490, 491, 494, 498, 499, 502,503, 511, 512, 514, 515, 520, 524, 529, 533, 534, 536, 541,552, 554, 559, 565, 570, 572, 576, 577, 578, 581, 584, 585,586, 587, 590, 594, 595, 597, 598, 604, 607, 611, 614: n = A,T,C or G
  misc_feature 616, 624, 626, 630, 631, 632, 636, 637, 638, 639, 640, 643,647, 648, 650, 653, 654, 655, 657, 658, 659, 660, 662, 663,666, 667, 668, 672, 675, 678, 679, 680, 681, 682, 683, 684,686, 687, 688, 689, 690, 691, 693, 695, 697, 699, 700: n = A,T,C or G
  misc_feature 702, 703, 704, 705, 706, 707, 708, 709, 710, 711, 712, 713,714, 717, 718, 719, 720, 721, 722, 723, 724, 725, 730, 731,732, 733, 734, 735, 736, 737, 740, 742, 743, 744, 745, 746,747, 748, 749, 750, 751, 752, 754, 756, 757, 758, 759: n = A,T,C or G
  misc_feature 760, 762, 763, 764, 765, 766, 767, 769, 770, 771, 772, 779,782, 784, 785, 788, 789, 790, 791, 794, 795, 796, 797, 798,799, 800, 803, 804, 805, 806, 810, 811, 812, 814, 815, 816,817, 821, 822, 824-832, 834-849, 851-876: n = A,T,C or G
ggccgtatcgactactatngggcgaatnggagctccccgcggtggcggccgtagcccttgctgtanatggcagcccgagacgcccacgatgagcaggggcacgccatagcccgatcagcccgcgtacctgcccgggcggccgctctagaactagtggatcccccgggctgcaggaattcgatatcaagcttatcgataccgtcgacctcgagggggggcccggtacccagcttttgttccctttagtgagggttaattgcgcgcttggcgtaatcatggtcatagctgttcctggannnnannnnnaaccnnnnnnaaccctnnngnnanancggctgnnctgtgtgcnnnnnngctgcttnctnnnnnnntcnnnnnaannntncnnncngnnacntnnnctntnnnggctttnttgcnannanggangtnnnannanngccnntgntcncanncnngcnnnccttnnnnctgccnnnnttnnactnnnnaanggcnnaanngatttacnnannccaanttgnggatnccanncnaattntggaagggatnanccttntaaaangaaananctcnnnggnctnnnnaangaanncnnttaaanccngganaantngggggggngncggnnncccnnnnnggncttnnanggnnngnnnntnnccnnngggngcnttnnnnnnnannnnnngncntncnngnnnnnnnnnnnnnaannnnnnnnnccccnnnnnnnngantnnnnnnnnnnntntnnnnncnnnnnncnnnnggggggnccngnnccnnnnttnnnnnnnttnnnnaggnnnannnncccnngnnnnnnnnngnnnnnnnnnnnnnnnngnnnnnnnnnnnnnnnnnnnnnnnnnn

SEQ ID NO: 6289 - DNA, 899 bp, Homo sapiens
  misc_feature 2, 26, 30, 35, 315, 316, 317, 318, 320, 321, 322, 323, 324,325, 326, 327, 328, 332, 333, 334, 335, 338, 339, 340, 341,346, 347, 348, 349, 350, 352, 353, 354, 360, 361, 366, 367,368, 369, 374, 375, 376, 377, 383, 384, 386, 387, 388: n = A,T,C or G
  misc_feature 389, 390, 391, 392, 393, 394, 395, 396, 397, 400, 401, 402,403, 404, 405, 406, 407, 408, 409, 410, 411, 412, 413, 415,416, 418, 419, 422, 423, 424, 426, 429, 430, 431, 432, 434,435, 436, 437, 438, 439, 440, 441, 442, 443, 444, 446: n = A,T,C or G
  misc_feature 447, 448, 449, 450, 452, 453, 454, 455, 457, 458, 459, 460,461, 462, 463, 464, 465, 466, 467, 468, 469, 470, 471, 472,473, 474, 475, 476, 477, 478, 479, 480, 481, 482, 483, 484,485, 486, 487, 488, 489, 490, 491, 492, 493, 494, 495: n = A,T,C or G
  misc_feature 496, 497, 498, 499, 500, 501, 502, 503, 504, 505, 506, 507,508, 509, 510, 511, 512, 513, 514, 515, 516, 517, 518, 519,520, 521, 522, 523, 524, 525, 526, 527, 528, 529, 530, 531,532, 533, 534, 535, 536, 537, 538, 539, 540, 541, 542: n = A,T,C or G
  misc_feature 543, 544, 545, 546, 547, 548, 549, 550, 551, 552, 553, 554,555, 556, 557, 558, 559, 560, 561, 562, 563, 564, 565, 566,567, 568, 569, 570, 571, 572, 573, 574, 575, 576, 577, 578,579, 580, 581, 582, 583, 584, 585, 586, 587, 588, 589: n = A,T,C or G
  misc_feature 590, 591, 592, 593, 594, 595, 596, 597, 598, 599, 600, 601,602, 603, 604, 605, 606, 607, 608, 609, 610, 611, 612, 613,614, 615, 616, 617, 618, 619, 620, 621, 622, 623, 624, 625,626, 627, 628, 629, 630, 631, 632, 633, 634, 635, 636-899: n = A,T,C or G
anccgtatcgactacttcgggctaancganttacnccaattggagctccccgcggtggcggccgagagtctcccatggtgactgtggtgggagatggaaccatgctggatgtggagggtttgttctacctaggaggcctgccctcccagtacctcggccgctctagaactagtggatcccccgggctgcaggaattcgatatcaagcttatcgataccgtcgacctcgagggggggcccggtacccagcttttgttccctttagtgagggttaattgcgcgcttggcgtaatcatggtcatagcttgttctggannnnannnnnnnnntccnnnnctnnnngaatnnnnntnnncttatnnatccnnnnacctnnnngggggnncnnnnnnnnnnnnttnnnnnnnnnnnnnngnntnnttnnncnctnnnntnnnnnnnnnnntnnnnntnnnngnnnnnnnnnnnnnnnnnnnnnnnnnnnnnnnnnnnnnnnnnnnnnnnnnnnnnnnnnnnnnnnnnnnnnnnnnnnnnnnnnnnnnnnnnnnnnnnnnnnnnnnnnnnnnnnnnnnnnnnnnnnnnnnnnnnnnnnnnnnnnnnnnnnnnnnnnnnnnnnnnnnnnnnnnnnnnnnnnnnnnnnnnnnnnnnnnnnnnnnnnnnnnnnnnnnnnnnnnnnnnnnnnnnnnnnnnnnnnnnnnnnnnnnnnnnnnnnnnnnnnnnnnnnnnnnnnnnnnnnnnnnnnnnnnnnnnnnnnnnnnnnnnnnnnnnnnnnnnnnnnnnnnnnnnnnnnnnnnnnnnnnnnnnnnnnnnnnnnnnnnnnnnnnnnnnnnnnnnnnnnnnnnnnnnnnnnnnnnnnnnnnnnnnnnnnnnnnnnnnnnnnnnnnnnnnnnnnnnnnnnnn

SEQ ID NO: 6290 - DNA, 709 bp, Homo sapiens
  misc_feature 2, 12, 29, 64, 255, 263, 276, 349, 351, 389, 397, 406, 414,444, 472, 491, 502, 509, 526, 572, 619, 620, 622, 623, 624,625, 626, 627, 628, 629, 630, 631, 632, 633, 634, 635, 636,637, 638, 639, 640, 641, 642, 643, 644, 645, 646, 647: n = A,T,C or G
  misc_feature 648, 649, 650, 651, 652, 653, 654, 655, 656, 657, 658, 659,660, 661, 662, 663, 664, 665, 666, 667, 668, 669, 670, 671,672, 673, 674, 675, 676, 677, 678, 679, 680, 681, 682, 683,684, 685, 686, 687, 688, 689, 690, 691, 692, 693, 694: n = A,T,C or G
  misc_feature 695, 696, 697, 698, 699, 700, 701, 702, 703, 704, 705, 706,707, 708, 709: n = A,T,C or G
cnactccggtanacgactactatagggcnaattggagctccaccgcggtggcggccgaggtacncgggatagttttttcccattaaattctcaaggaacacttggatctttaagcacggaacataatcatgatgttaaaaacagagaaaataaggctttataaagttaatgattatcatcagtatgaatttaaggtttgttttaatttcaagatttgattttttatacgtgtaattctattatctacccaagcanatctgtantggttccaattanacttctcaaacagcaaatttatcctgattttatttgaaaagcctcttggattgatagtatagtagctcaggcntnggaaactttctgcaaactgttttgggtttgcaggccanatggtctntgtggcagntactcagntctgcaatttcagtgtgaaagaagccatanacagtacctgcccgggcggccgctctanaactagtggatcccccggnctgcaggaatncgatatnaagcttatcgataccgncaacctcgagggggggcccggtacccagcttttgttccctttagtnagggttaattgcgcgcttggccgtaatcatggtcatagctttttccnngnnnnnnnnnnnnnnnnnnnnnnnnnnnnnnnnnnnnnnnnnnnnnnnnnnnnnnnnnnnnnnnnnnnnnnnnnnnnnnnnnnnnnnnn

SEQ ID NO: 6291 - DNA, 841 bp, Homo sapiens
  misc_feature 2, 6, 9, 10, 12, 93, 109, 116, 118, 123, 134, 137, 139, 152,173, 199, 223, 341, 350, 354, 362, 423, 568, 600, 603, 631,660, 675, 677, 688, 697, 711, 720, 745, 773, 801, 820, 838: n = A,T,C or G
gntagnttnntngagcgcgcgtaatacgactcactatagggcgaattggagctccaccgcggtggcggccgcccgggcaggtaccaccccttnttgatgattaatttantgacctngnttaanctcatctgccnaangnacgcccttggcanttgctactggacctgcactantcatgcagcctgtgtcagccaatcanctgaaggaaagataaattatcctntgttcaggagaagtgttcttccactgaacctgaaccaggaagaatatgccataactgtgtcagcaggcatcttataacaactagagggggcaccatccttgggatgaagttaatgctntgaatgatnacangagaaaantacttaagtcctgaatgatactgctgttcagcctgaggtctgtcctaattttctatttatngttacataagaaatccatgtccttatataccaatttgacccaggtcttccagcaactggaaagtaaaagcatttaattggtctatcattcatatagacaccaactaaacctgattttcttcccttgaataagcaaagaaactaanttaaaaaaaaaacaaaaacgcccgcgtacctnggncgctctagaactagtgggatcccccggnctggaaggaattccatatcaagcttattnataccgtcgaccttnangggggggcccngttcccacntttgttccctttantgagggttnattgcgcgcctggcggaaatcatgntcatagcttgtttctgtgtgaaattgtnttcgggttacaatttcacacaaaatacnagcccgggagcattaaatntaaaagccctggggtgcntat

SEQ ID NO: 6292 - DNA, 880 bp, Homo sapiens
  misc_feature 5, 6, 8, 9, 28, 31, 35, 38, 54, 75, 505, 519, 572, 649, 673,695, 718, 725, 770, 798, 813, 825, 835, 848, 871, 873, 878: n = A,T,C or G
gaagnngnncgcgtaatacgactcactntanggcnaangggaattggagctccncggcggccgcccgggcaggtnccgcgggggataacatggacgttaatatcgccccactccgcgcctgggacgatttcttcccgggttccgatcgctttgcccggccgctctagaactagtggatcccccgggctgcaggaattcgatatcaagcttatcgataccgtcgacctcgagggggggcccggtacccagcttttgttccctttagtgagggttaattgcgcgcttggcgtaatcatggtcatagctgtttcctgtgtgaaattgttatccgctcacaattccacacaacatacgagccgggagcataaagtgtaaagcctggggtgcctaatgagtgagctaactcacattaattgcgttgcgctcactgcccgctttccagtcgggaaacctgtcatgccagctgcattaatgaatcggccaaccgccggggagaggcggtttncgtattgggcgctntttcgctttctcgcttactgacttcggttgcgctccggtcgtttcggcttgcnggcgagccggtattagcttcacttcaaaaggcgggtaaataccggttattccacaagaaattcaggggggataaacncccagggaaaagaacattgttgangccaaaaaggccaagcaaaaangggccaggaaacccgtaaaaaanggccccngttggcttggcgttttttccataaggcttcccccccccttgacgnagcatttacaaaaaatcgacgccttaangttcagaaggggggnggaaaccccggnccgggacttntaaaagatacccnagggcggttttccccctgggaancntcccntt

SEQ ID NO: 6293 - DNA, 823 bp, Homo sapiens
  misc_feature 592, 634, 653, 724, 738, 778, 784, 788, 821: n = A,T,C or G
gcgtaatacgactcactatagggcgaattggagctccaccgcggtggcggccgaggtacgcgggggtgggtccaggaggcagaactctgggtgtctcaccatggcctggatccctctacttctccccctcctcactctctgcacaggctctgaggcctcctatgagctgatacagccaccctcggtgtcagtgtccccaggacagacggccaggatcacctgctctggagatgcattgccaaaccaatatgttttttggtacctgcccgggcggccgaggtacctgggctatgagtatgtcactgccatccggaatctacgggaaggcacatgcccagaagccccaacagatgaatgcaagcctgtgaagtggtgtgcgctgagccaccacgagaggctcaagtgtgatgagtggagtgttaacagtgtagggaaaatagagtgtgtatcaagcagagaccaccgaagactgcatcgccaagatcatgaatggagaagctgatgccatgagcttggatggagggtttgtctacatagcgggcaagtgtgggtctggtgcctgtcttggcagaaaactacaataagagcgatnattgggagggatccaccaagagggcagggtattttgctgtancagtggtgaaagaaatcanctttcttgacctcacctggggacaattctgaaagggcaagaaagttcttgccataccggagtttgggcaanaacccgttggcttnggaacattccccattgggccttgcttttacaaattaagancaaccncccngagaatttgattaaattttttaagggaagggtngg

SEQ ID NO: 6294 - DNA, 820 bp, Homo sapiens
  misc_feature 83, 645, 661, 682, 709, 729, 750, 766, 771, 772, 778, 785,790, 791, 796, 797, 801, 808, 811, 819: n = A,T,C or G
ctatagggcgaattggagctccaccgcggtggcggccgcccgggcaggtactacgcttccccttccgtgataaccaaaccccnacaaaccactccaaatactaaaaataaaataaaataaagtatggggttcctagggaactgactttgccaggacatacttttcgttggggcggaatgcaccgaaaatcattggtaggaaaaataattttttttttgaggaaaaatttggaaacctttttcccaaagggcccgcaagatcctaaaaaaagcaagaggccgcgcagaaaccgaggatccccctcacaggcgacacccagcgcgacctccgctagggtcctgacaaagaatgtccacttcccgcggccgctctagaactagtggatcccccgggctgcaggaattcgatatcaagcttatcgataccgtcgacctcgagggggggcccggtacccagcttttgttccctttagtgagggttaattgcgcgcttggcgtaatcatggtcatagctgtttccttgtgtgaaattgttatccgctcacaatttccacacaacataccgagccgggagcataaagtgtaaagcctggggtgccttaatgagtgaagctaactcacattaaattgcgttgcgctcactggnccgcttttccaagtcnggaaaccttgtcggtgcccanctgcatttaatggaaatcggcccaacnccccgggggaggaggccggntttgcgtatttggggcgcttntttccgctttccttgnttaanntgactncgcttgngcctnngggcnnttcngggttgnggngggaggcng

SEQ ID NO: 6295 - DNA, 1205 bp, Homo sapiens
  misc_feature 1, 2, 6, 19, 20, 29, 31, 32, 33, 34, 35, 36, 39, 41, 43,48, 49, 50, 52, 55, 58, 61, 63, 64, 65, 68, 72, 75, 82,83, 84, 90, 91, 92, 93, 191, 201, 213, 215, 251, 275, 302,392, 422, 430, 544, 545, 551, 565, 578, 582, 593, 638, 641: n = A,T,C or G
  misc_feature 647, 661, 672, 680, 686, 693, 703, 714, 732, 745, 751, 754,755, 756, 759, 767, 770, 777, 809, 812, 818, 819, 820, 821,825, 827, 831, 839, 845, 851, 856, 860, 868, 879, 883, 889,890, 898, 928, 930, 940, 945, 950, 953, 955, 959, 962: n = A,T,C or G
  misc_feature 966, 973, 979, 982, 983, 1005, 1018, 1021, 1023, 1024, 1028,1029, 1031, 1040, 1041, 1044, 1052, 1054, 1059, 1064, 1070,1072, 1079, 1086, 1093, 1094, 1095, 1096, 1105, 1117, 1122,1135, 1136, 1137, 1138, 1144, 1145, 1152, 1153, 1156: n = A,T,C or G
  misc_feature 1162, 1163, 1173, 1175, 1178, 1188, 1195, 1199, 1204: n = A,T,C or G
nnctancctattataattnngctcttctncnnnnnnttngnanaaaannnanttnctntangnnnctnctcnatntgtaggnnnatattnnnnctcgctttacgatcactatagggcgaattggagctccaccgcggtggcggccgaggtacttttttttttttttttaattgcaactgcttttttgccgngcctctcttncctacccaaaantnatgagttctgaacaagacaagactgtcatattgtanagactttggtatgtgataccatanaatactgattggatagccatcctagtnacttaccaatactgactagaagttaactcttaattctaagctatcttaaaatgcatatatatacttcttgcatggaagagcaaaacaaanttcaagttgtcaatgccttgataatttcanatgccacncgtatagcaaaagggtggaacaatgttttttcaacccttttaaacttttttttaccggttggtattggaagacccagcttacttcctttaaataatttttattcaaatggggannttaaanaaagtttataaaanaattttttgcaanaatnttaattcaaantttttgggggttttttggtaacccttgcacccggggacggggccnggnttcttnagaaaaactaaggnggggaattccnccccgggngccttngcaaggnaaaattttcnaattatttcanaagcctttattttcggantaacccggttctnaacccnttnnngangggggggnggncccccgnggttacccccaagcctttttttgtttcccccnttntaagannnnaagngnggtntaaatttngccggnccgctntgggnccgntaaattcnattggggccantaangcctgnntttacctnggggtggaaaaattgggctatttccccttntnacaaattttnccacncaaantantnacgnaancccngggggangcatanaanntggtaaaagcccctgggggggnggcccttaaaatnagngnngaanncnttaaccccnnatntaatttgncntttgntgccnacacantngccccgnttttctnaaaattnnnnaaaaccctntctgggcccccncttgnatttaaattgaannnnggccanncccctcnnggntagaannaagggttttntncantttggggggnttaattnctcnatttnc

SEQ ID NO: 6296 - DNA, 804 bp, Homo sapiens
  misc_feature 451, 628, 641, 688, 714, 728, 771, 781, 799, 803: n = A,T,C or G
actatagggcgaattggagctccccgcggtggcggccgtgtgggtgagttggctgccggtgagttgggtgccggtggagtcgtgttggtcctcagaatccccgcgtagccgctgcctcctcctaccctcgccatgtttcttacccggcctgagtacctcggccgcccgggcaggtactgttttgaggagaaggatcagctatccagcgactgtgagcatgaacaagagccaagcctagagacataatcatcttgaccctctgagttacaggattcggcttattttcttcttcttctaaaactcgggcaaaatggctgagctgccaaattggacgaccctcgcggctttcccgagaaagctctaataccaaggacacacaagctgggaagaaagtcatgaacacgaagtagttggcaagaactgacatgcagccaaagcagcacataatttnaagctgacgtacctcggccgctctagaactagtggatcccccgggctgcaggaattcgatatcaagcttatcgataccgtcgaccttcgagggggggcccggtacccagcttttgttccctttagtgagggttaatttgcgcgcttggcgtaatcatgggcatagctgtttccttgnggtgaaaattggnttattccgttcacaattccacacaaacattaccgagcccgggagccntaaaagtggtaaaaggcctgggggtngccctaattgagtngagcttaacttcacatttaatttggcgtttggggcttacttgnccggtttttncaattcggggaaaacctntcgnt

SEQ ID NO: 6297 - DNA, 899 bp, Homo sapiens
  misc_feature 236, 354, 410, 480, 539, 562, 576, 597, 619, 625, 628, 657,675, 677, 686, 688, 691, 695, 702, 717, 719, 730, 731, 738,766, 776, 783, 799, 802, 809, 811, 813, 818, 819, 820, 821,826, 830, 836, 847, 857, 862, 863, 868, 877, 878, 879: n = A,T,C or G
  misc_feature 885, 886, 889: n = A,T,C or G
ctatagggcgaattggagctccaccgcggtggcggccgaggtactcctcatactagggctggtggcggctatgggatgaggctcctctgcctttggaaaggagaggaagagtgggaaggactgcatcttgtggtttgacagtcagctcagcagtagtacctgcccgggcggccgctctagaactagtggatcccccgggctgcaggaattcgatatcaagcttatcgataccgtcnacctcgagggggggcccggtacccagcttttgttccctttagtgagggttaattgcgcgcttggcgtaatcatggtcatagctgtttcctgtgtgaaattgttatccgctcacaattncacacaacatacgagccgggagcataaagtgtaaagcctggggtgcctaatgagtnagctaactcacattaattgcgttgcgctcactgcccgctttccaatcgggaaacctgtcgtgccagctgnattaatgaatcggccaacgcgcgggggagaggcggtttgcgtatttgggccgctctttncgctttctcgctcactgactcgnttgcgctcggtccnttcggctgaagccgagcggtntcaagctcactcaaaggcgggnaatacnggntattccacaagaatcaaggggattaaccncagggaaaaagaacaatntngatcccaananggncagncaaaaanggccaaggaaccccntnaaaaaaggccnnggtttgnttggcgtttttttcattaaggcttccgnccccccctgnccgagcntttacaaaaaaattcnganccttaangntnaaaannnnggggnaaancccccnggggccttttnaaaaaaaccnagggnnttttncccttgaannntccctnnggngctttctgtt

SEQ ID NO: 6298 - DNA, 805 bp, Homo sapiens
  misc_feature 651, 695, 722, 750, 754, 756, 779, 802: n = A,T,C or G
gtaatacgactcactatagggcgaattggagctccaccgcggtggcggccgcccgggcaggtaccaaaaagactctcaaaaaccaatactcccacgggcaggggaatagccaagtttgttgcggtttccaatgaatgacatcagccctgtgtaggtctcaatcaaaatgggttcagttaacaccatcagtttctttcctcttccagatccagttgaattcttgtgggcattctggatagctggaacaagcttagacatgaacccagacaacttgcaaatttcaaggaatttctcaccggtgtatttcataggatgctcagtgaaagtagcataaggaacttcagtggaccatgggttccagcgggacagaagagactgctcctccggactcccccagtagatcctaaggccttctccttgtctcttgtccagggacatcccagggaaggtgaacttgcccaggcagatgcgataggcagcgctcagaggaatccgctgcagctgcacacaactcagcatgatgaagtcgtatttgcagatcaagagagtcttgtctgtgaccagtagaattctctccttctcattggttccagtggtctatctttgtcaagagccagaagccttgaatgggtctcttccagaagtcttcangctacgtgacctttcaagtctttcatggcaagtcttcaatgggncccccggcccgaggtacagtccacttnccacgggcagcttttagtgtgggcattntaanantgccctgttaagcatgtgttggncaggcttagggccatggggagangca

SEQ ID NO: 6299 - DNA, 903 bp, Homo sapiens
  misc_feature 687, 692, 722, 747, 774, 777, 789, 814, 820, 829, 843, 850,851, 854, 858, 865, 873, 880, 881, 883: n = A,T,C or G
ctactatagggcgaattggagctccaccgcggtggcggccgaggtacggcatcatcaccatgtgaggcctgacgacccctaagctccgggtatacccgcacaaaaccctctacgtccctaatcggaaggtgaattctatgtgctgggcctcactgaatcacttggattcccaccttctgctgtgcttcgtgggacttgcagatactccaagctgtgccgtgctgctcccagcgtcgctgttcataggtagcttcccaggaatgcgtcggcctggcatgctttgcagtttccagatccctgatgcccggtcctgtgcctggtccctgagcatccacgcgtatcactctttcagtacctgcccgggcggccgctctagaactagtggatcccccgggctgcaggaattcgatatcaagcttatcgataccgtcgacctcgagggggggcccggtacccagcttttgttccctttagtgagggttaatttgcgcgcttggcgtaatcatggtcatagctgttttccttgtgtgaaaattgttatccgctcacaattccacacaacatacgaagccgggagcataaagtggtaaaagccctggggggtgccttaatgagtgagctaacttaacattaaattgcgttgcgcttaacttgccccgcttttcaagtccgggaaaacctgtcgtngccangcttgcatttaatgaaatcggcccaacccnccggggagaaggccggtttgcgtanttgggcgcttttttcgctttcctttgnttnaatgaatttggnttgcgctcggtcggtttcggcttgngggcgnagcgggttnttaaacttcacttnaaagggnnggntaanaccgggntttttccnaaaaaanncngggggttaaaccccgggaat

SEQ ID NO: 6300 - DNA, 899 bp, Homo sapiens
  misc_feature 475, 548, 577, 597, 624, 657, 676, 684, 714, 741, 762, 770,774, 796, 821, 833, 839, 844, 849, 851, 863, 876, 883: n = A,T,C or G
cgaattggagctccaccgcggtggcggccgaggtacaggaagcagcagaaaggccctcggagctcactgggtccccaagcagcccattcctgcctggcaacacaaagatccatccggagggcggccagaggagcagggggtaaaactctacagggagaaggaattctctagctgaactttgtaaccatttgaacagggcaagaagcctcctggccagaactcaggggagggcgcgaatctggcctgcagacttcacaggcagggggaggaactaaagcccttttctctgggggctgggagatggatagcattcagcaaattttcaagccattctcaccctccgctaaaaactgactctgttacgggggcatagtgagagtgagaccaagcccttcagtttgccgtggggagctgggtgaggccaagtgactgtcagctttctccgacttccctgacaacctgcatgactcaacangaggcaagccttaatcctcctggtacctgcccgggccgggcgctctagaactagtggatcccccgggctgcangaattcgatatcaagcttatcgataccgncgacctcgagggggggcccngtacccacttttggttcctttagtgangggttaaattgcgcccttggcgtaaatcatggncaatagcttgttttctgtntgaaaatngttaattccgctcacaaatttccacacaanatacgaacccggggagcataaaagtgntaaagcctgggggtgccttantgagtgangctnacttacaattaattgcgttggngcttacttggccgcttttccaatcnggaaacctgtcnggccancttgnaattnangaatttgcccanccccccggggganaggcggntttgcgttttgggccg

SEQ ID NO: 6301 - DNA, 901 bp, Homo sapiens
  misc_feature 2, 3, 4, 5, 6, 7, 14, 22, 218, 400, 458, 519, 531, 549, 605,608, 615, 616, 617, 620, 635, 638, 642, 654, 660, 663, 671,680, 690, 698, 706, 726, 727, 759, 777, 795, 821, 826, 832,836, 853, 877, 882: n = A,T,C or G
gnnnnnntccctantacgactnctatagggcgaattggagctccccgcggtggcggccgcccgggcaggtacctggctttaacttcatatcatcaaaagaggcactgaagaactaagaaaatcagtcttgaatcaccagtgtcacccctccctaatccccttgcagctacaatgtggtgctgagaacatttccgtgtgctggggagaggggagtgcancaatggtgaggtattgaactcagtgctgccctgttatagcagaaagtaaaaccaaaccaaactcagctgatgcccacccacagagggagcatttaaactagtcttactacagtcacacagttctagtgatgatagccaaagacaggcttgtgtcaccacatcccaagcttcaggtggctcanaacaaagaaagagagaccctgtttgtttgggagaaagtaaggaaatagaacaagagtntctgccaggtaatccaaagaactcttacagattttgtccaagactatcaaggcagtatctntactagtctgcnagaaccacagcattggtnggcttttgccccctaaagtagatacagtttaaaaatcacaacacctcgagtttttntgnaaaattnnnggnaaggtcttggccaanaanaatngggtccctcggnccgttntanaactaatnggatccccngggctggganggaaattngatttttnaagccttattggataccctnnaacctccaaggggggggcccggtacccaaccnttttggttccctttaagnggagggttaaattgcgcnccttggcgtaaattaatgggcataanctggnttcctngggngaaaattggtattcccntcacaaattcccaacaaaattacnaaccngggggctttaaaggtaaat

SEQ ID NO: 6302 - DNA, 861 bp, Homo sapiens
  misc_feature 2, 3, 5, 7, 461, 553, 571, 607, 609, 627, 630, 641, 665,682, 685, 700, 711, 715, 721, 760, 771, 801, 836, 846, 848,853, 856: n = A,T,C or G
gnncntntcgactactatagggcgaattggagctccacccgcggtggcggccgaggtacacctcagtcctacaaccaagaacctacccatagaactgaagcaggaagctgtgtccatgctcctgacatgagaaagtcttgccaatggggaaagacaggggaaaacagagactagctcaagtcacagggtgagtgtgagcaacttacccagggaggacgtaagtgccaggttctccagagtcacatcacggtacctgcccgggcggccgctctagaactagtggatcccccgggctgcaggaattcgatatcaagcttatcgataccgtcgacctcgagggggggcccggtacccagcttttgttccctttagtgagggttaattgcgcgcttggcgtaatcatggtcatagctgtttcctgtgtgaaattgttatccgctcacaattccacacaacatacnagccgggagcataaagtgtaaagcctggggtgcctaatgagtgagctaactcacattaattgcgttgcgctcactgcccgctttccaagtcnggaaacctgtcgtgccanctgcattaatgaatcggccaaccccggggagaggcngnttgcgtattgggcgcctnttncgctttcttgntcactgacttggttggcttggtcnttcggctgcggcgagcnggnttaactcaactaaangcggtattccngttntcccanaatcaggggataacccaaggaaaaacttgtgagccaaanggccaccaaanggcccggaaccttaaaaggcccgtttggtngcgtttttccataggctccccccccctgacaagcntaaaaaaatngnccctnaantcaat

SEQ ID NO: 6303 - DNA, 888 bp, Homo sapiens
  misc_feature 1, 6, 7, 8, 10, 12, 13, 580, 604, 655, 696, 699, 715, 730,737, 756, 761, 766, 768, 779, 789, 799, 812, 824, 834, 850,866, 885, 887: n = A,T,C or G
ncgggnnncntnnacgactcactatagggcgaattggagctccccgcggtggcggcccgaggtacagaagttaaacaacaagagagataatcttgaaagtggcaaaagtgacttatctcacttaaaagagtctcaataaggctgacagctgatttctcttcagagaccatggaggttagaagacagtgcatgacatattcaaagtgctgaaggaaaggctatcaagcaaaagttctatctgcagaaaaactcctccaatttttaaggagaaattaaggcatttccagataaacataacctgagagaattttccactagtaagacctgttctacaagaaataccaatggaagtccttcaggctgaaataaaagggtattagatcacaattcaaatccacatgaagaaataacactaataaggtaactgcataggtaaatataaaagacagtataactgtatttttgtttgtaacattttttcttctgtctgatttaaaatcaatgacattaaagcaataaccgataaaactatgtgtttggctaatagtgtattcagaagtaatttgtgtaacaatacacnagaagagggtagagaacaaagctntttagaagcaagattttatattctattgaaattacttggtattaaattctncttcattggttataaattgggaataattttaatcccagggnttnagaaaaccacttaaangccttactaattagnaataacnaggggattaaatgattccnttatnaaatncncgatttttttnaaagaaggcnattttttagngaggccaaaaggncccttttgaaanccattccaantgggagacataaatcnccctttgaggaattantttatgtaaatgtttaaantnc

SEQ ID NO: 6304 - DNA, 915 bp, Homo sapiens
  misc_feature 7, 8, 228, 534, 576, 589, 619, 620, 625, 667, 691, 702, 718,726, 748, 767, 788, 798, 800, 810, 827, 861, 864, 865, 866,869, 872, 883, 887, 894, 898, 906, 908, 912, 914: n = A,T,C or G
agtttanncctatttactactatagggcgaattggagctccccgcggtggcggcccgaggtacgcggggggcgccattttgtctcggcagcggtggccgtagctccatcgcattttatgtttctggcgagaagggaacggagttttcatcaggtagattggtttttgtgcggccgctctagaactagtggatcccccgggctgcaggaattcgatatcaagcttatcnataccgtcgacctcgagggggggcccggtacccagcttttgttccctttagtgagggttaattgcgcgcttggcgtaatcatggtcatagctgtttcctgtgtgaaattgttatccgctcacaattccacacaacatacgagccgggagcataaagtgtaaagcctggggtgcctaatgagtgagctaactcacattaattgcgttgcgctcactgcccgctttcaagtcgggaaacctgtcgtgccagctgcattaatgaatcggccaaccccgcggggagaggcggtttgcgtattgggcgctntttcgctttcttcgcttaactgacttcgcttgcctcggtcgnttcggctgcggcnaagccggtattagcttaactcaaaggcggnnatacnggttatttcacaagaaatcaaggggattaaccccaggaaaanaaccatgttagccaaaaaggccanccaaaagggcnaggaacccttaaaaangcccccgnttgcttggcctttttttcatanggcttccccccccttgacnagctttacaaaaaaattgacnctttaaattnanagggtgggcnaaaccccgaccggactntaaagaataccagcggtttccccctgggaagttnctnnngcnctnttcttgttccnaccnttgccgnttancggatacntntccncnt

SEQ ID NO: 6305 - DNA, 887 bp, Homo sapiens
  misc_feature 3, 4, 660, 683, 719, 764, 765, 799, 810, 812, 817: n = A,T,C or G
ggnngcgcgtaatacgactcactatagggcgaattggagctccccgcggtggcggcccgaggtaccaggctgtagatttgataagctagatgcagtagaccgaaaccatccaaaacctgtttagcttcttcctccattggagtttattgggacaaacaggagagccagccattgtctccagtacgcgggtattcaatttaaatgttgctaaccttcctttcccactggctctgtataaaaaacttctggaccaaaagccatcattggaagatttaaaagaactcagtcctcggttggggaagagtttgcaagaagttctagatgatgctgctgatgacattggagatgcgctctgcatacgcttttctatacactgggaccaaaatgatgttgacttaattccaaatgggatctccatacctgtggaccaaaccaacaagagagactatgtttctaaagtatattgattacattttcaaccgtctctgtaaaagcagtttatgaggaatttcagagaggattttatagagtctgtgagaaggagatcttagacatttctaccctgaagaactaatgacagcaatcattggaaatactgattatgactggaaacagtttgaacagaattcaaagtttgagccaggatccaaaaattacatnctactatacagttggtttggaangctttcacaaactaaccttggatgaaaagaaaaaantcctttttttcttacaggacgtggataggctgcatgccagaagcnntccagaaaatggaaatagtttttccttgtcctgnaactttcagtngnaaganatcacccaacatcaataacctggcataaaattctctccctccctaaggattctcaatgggaaagaatggg

SEQ ID NO: 6306 - DNA, 902 bp, Homo sapiens
  misc_feature 4, 6, 7, 413, 423, 565, 632, 635, 645, 653, 654, 662, 673,691, 727, 728, 729, 734, 743, 745, 763, 769, 776, 780, 798,803, 809, 819, 827, 835, 846, 847, 850, 855, 862, 865, 868,884, 893, 901: n = A,T,C or G
tagngnncgcgtaatacgactactatagggcgaattggagctccaccgcggtggcggccgcccgggcaggtacttttttttttttttttttttttttgagacagagtttcgcactgattcacccaggctggagtgcagtggtgcgatctcggcttactatagtgtctgcctcccaggttcaagcaattctcctgtctcagcctcccaagtagctgggactacaggctgcaccaccacacccggctaattttgtatatttagtagatatagggttttgccatgttgtccaggctggtctcgaactcctgacctcaggtgatccagctgcctcagccacccaaagcactaggattataggcacacaccaccatgccctgcccaggctggtctttgattcctggacttaagtaatntgatagcctnggcctctcaaagtggtggaattacaggcatgagccactgcatccaacctattcggcttctcttgtcttacccttggtgctaagcctgcccagctaaggccagggcacttaaaaatgctcggggtttcaagttaaagttgganatttacccatgtcagaaaacccaagtcaagggggtacctcgggccggctctaaaaataagtgggatnccnccggctgcanggaattcnnatatcaangcttattcgantaccggccgaccctcgangggggggccccgggacccaacctttgttccctttannnagggntaaatggcncncttggcggaaatcatggncaaaancttgttncctngggaaattggttattccntttanaaaatncaaacaaaanacgaaccnggaggcanaaaagggaaannccnggggngcctaanggnggngccaacctcaattaantggggttgncctaatgnc

SEQ ID NO: 6307 - DNA, 888 bp, Homo sapiens
  misc_feature 4, 535, 575, 602, 611, 618, 632, 648, 654, 660, 665, 673,681, 682, 700, 703, 704, 708, 723, 727, 733, 734, 740, 750,758, 760, 771, 775, 778, 781, 783, 786, 793, 802, 805, 823,824, 839, 843, 856, 864, 867, 868, 876, 877, 882: n = A,T,C or G
acgnatcactactatagggcgaattggagctccccgcggtggcgggacccaagggtgtgccaccacacctggctaattttttaaacattttgtagggatcttcccttcctggcctccccaggcgcttggaatacaggtgtgagccatcgcacccgggcagaagttcttagtttcaatgaagtcaattcatcagtcttttcctttgtgcttggtatattttgtattacatttgaaaagattttactccaaggtcataaattattctcttaagttatcttttagaagttttattattttgcctttcacttttagatctacattctatctgattgatttgtgtgtgtggtgtgaggtagagtcaagattcattttttttaagtatgaagatccaactgaccctgcaacatttatgcaaacattatctgtcctattccaattgcatggcagtattgcttttgtcataaaatcaactgactgaatatgccgtggtctgttttctagtacctcggccgctctagaactagtggatcccccngggctgcaggaattcgatatcaaagcttatcgatacccgngaccttgagggggggccccggacccancttttgttncctttangggaggggtaaatncgccccttggcgtaancaaggncataancctgnttcctgtngtgaaaanngttatccggtcacaattnccnncaanataaccaacccgggngccntaaaanngtaaancctggggtgncttaatgngngagctaactcncatnaantgngntgnggctcanttggcccgnttncaagtcgggaaacctggnngccactgcattaatnaacngcaaacccggggnaagggggntgnnaaatggcnncttcnttctcc

SEQ ID NO: 6308 - DNA, 849 bp, Homo sapiens
  misc_feature 328, 504, 513, 540, 541, 546, 547, 556, 557, 562, 566, 568,571, 574, 576, 588, 590, 592, 605, 608, 611, 616, 617, 618,620, 621, 624, 625, 626, 628, 629, 639, 640, 644, 648, 649,654, 659, 661, 663, 670, 672, 676, 677, 678, 679, 685: n = A,T,C or G
  misc_feature 686, 687, 688, 690, 691, 693, 695, 696, 699, 701, 702, 703,704, 706, 707, 708, 709, 711, 712, 714, 715, 716, 717, 718,719, 720, 722, 723, 725, 726, 727, 728, 729, 731, 732, 733,734, 735, 738, 739, 740, 741, 742, 743, 744, 745, 746: n = A,T,C or G
  misc_feature 747, 748, 750, 751, 753, 754, 755, 756, 758, 759, 760, 762,763, 764, 765, 766, 767, 768, 769, 770, 771, 772, 774, 777,778, 779, 781, 782, 783, 784, 786, 787, 788, 790, 791, 793,794, 795, 796, 797, 798, 801, 802, 804, 805, 806, 807: n = A,T,C or G
  misc_feature 808, 809, 810, 812, 813, 814, 815, 816, 817, 818, 819, 820,821, 822, 823, 824, 825, 826, 827, 828, 829, 830, 831, 832,834, 835, 836, 837, 840, 841, 842, 843, 844, 845, 846, 848: n = A,T,C or G
ggctaatacgactactatagggcgaattggagctccacccgcggtggcggccgaggtacgcggggtcccaagatggcgtcgaagataggttcgagacggtggatgttgcagctgatcatgcagaagcccgacatcccagtgccttacctgtatttcgacatgggggcagccgtgctgtgcgctagtttcatgtcctttggcgtgaagcggcgctggttcgcgctgggggccgcactccaattggccattagcacctacgccgcctacatcgggggctacgtccactacggggactggctgaaggtccgtatgtacctgcccgggcggncgttaaacatgtgtcactgggcaggcggtgcctctaatactggtgatgctagaagtgatgtttttggtaaacaggcggggtaaagatttgcccagtttccttttacttttttttaacctttccttatgagcatgccctgtgttgggttgacaagtgagggtaataatgacctggtnggtttgatngtaaatattgggctggttaattgtcannttaanngtttttaanntgacnccangnttnatncngaaggagaatgntntnatgttacttaatnctnaanatttnnntnnttnnnannggggggaaannaatngggnncaaantgggntntngaaggangnttannnntaatgnnnngnnantnnatnannnntnnnngnnannnnnnntnnannnnntnnnnnatnnnnnnnnnnntnnannnntnnnannnnnnnnnnntnaannntnnnnannntnnannnnnnaannannnnnnntnnnnnnnnnnnnnnnnnnnnntnnnnttnnnnnnnanc

SEQ ID NO: 6309 - DNA, 825 bp, Homo sapiens
  misc_feature 11, 166, 235, 390, 524, 531, 555, 563, 565, 584, 600, 614,618, 625, 641, 652, 696, 697, 700, 704, 718, 719, 722, 723,731, 743, 754, 756, 762, 768, 781, 787, 801, 807, 809, 812,813, 814, 823: n = A,T,C or G
gtcgtatcgantaccgtaatacgactactatagggcgaattggagctccaccgcggtggcggccgcccgggcaggtaccacggtttgtcggtttgtcgctggccctgagtcgctcctagggatggggtgagtgaaattgatgtggagtggcccactcttgccgcanacctctgggagcctacctgtgggagaccccatgattctcatgaacatctgagctggcaggaagaacttnctggagagttgacagagatggaactctagcctgcatggagcccagagggtttgttgtgggaacagttgcagtggagcatggctgtggatatccataacaccatactcctctaggcagctctagcctttgttggctgccaaacctggacaataaangggctggcttgcttgtggaatgggaccagtctgatctgaggacctccccaactgcccgttgctggcctctgttagggtcccttcctgcctgctgtccttggccgctctagaactatggatcccccgggcttgangaaatcnatatcaaaccttatcgatcccgtncacccttnanggggggccccggaaccaanctttttgttcctttantgaagggtaattgncccncttggcntaataatgggcataantgttttcctgntgttgaaaattgttattccctttacaaattccccacaaaatacnnaanccgngaacataaaagtgnnaanncctggggngccttaatgaanggagcttaacncncaattnattttngtttggcttactngccccnttttcaatttgggnaaaaantnttnnnccaactttntt

SEQ ID NO: 6310 - DNA, 830 bp, Homo sapiens
  misc_feature 49, 498, 529, 548, 565, 608, 638, 640, 661, 707, 734, 748,752, 758, 759, 760, 770, 773, 776, 777, 786, 791, 814: n = A,T,C or G
gcgtatacactactatagggcgaattggagctccaccgcggtggcggcncgaggtacgcggggggagcaagcaggaagtgaactgagggccaccctgggaggaagccgactaggcgaattcacttactgaccggcctgggctgctctgagacatggaggaagccagaaggtggctcgaaaattctggtggaagaacgtgaagatgattgtccttatctgcgtgattgtttttatcatcatcctcttcattgtgctctttaccactggtgccttctcttaagtaacagggaacctctcccacctgcccttctcttcagggacaaccctccataaatgtgtgccaagagggtctctttcctgtcttcctctacagagaatgctgctcggtcctcctacccctcttcccgaggccctgctgccatgttgtatgccccagaaggtacctgcccgggcggccgctctagaactaagtggatcccccgggctgcaggaatttcnatatcaagcttatcgatcccgtcgacccttnagggggggcccggtcccanctttttgttccctttanagagggggtaaattgcgccccttggccgtaatcatggtcatanctgtttcctgtgggaaaattgttattccgntnacaatttccacaacaaacatncgaacccgggagccataaagtgtaaagcctgggggtgcctaatgangtgagcttaactaccattaaattgcgntggggcctaactgncccnttttcnnntcggggaaanctnttnngccaaactngattnaattgaaatcggccaaccccccngggagaaggcggtttt

SEQ ID NO: 6311 - DNA, 894 bp, Homo sapiens
  misc_feature 463, 483, 489, 496, 574, 601, 605, 620, 635, 646, 667, 679,693, 696, 699, 715, 718, 719, 731, 738, 742, 746, 763, 764,775, 784, 786, 789, 790, 791, 795, 796, 808, 809, 814, 816,820, 829, 832, 835, 841, 850, 858, 869, 882, 884, 889: n = A,T,C or G
  misc_feature 890: n = A,T,C or G
ctactatagggcgaattggagctccccgcggtggcggcccgccgggcaggtacaccggcatgatcatagctcactgcagcctcaaattcccggcttcaagtgatcctctcaactcggcatcccaaagtgctggaattacaggtgtgagtcatcatgcctggtgggtgtctatttataaaaagcactaaacttaaagatttaaaggtgagagcctgtattaggccattctcatggtgctataaagaactgcccaagactgagtaatttataaaggaaagaggtttaattgactcacaattccacatggctggggaagcctcaggaaactttcaatcatggtggaaggggaagcaaacatgtccttctgcacaaggtgggcagaagagagaagtacctcggccgctctagaactagtggatcccccgggctgcaggaattcgatatcaagcttatcgatccgtcnacctcgagggggggccccgnacccancttttgntccccttaagtgaggggttaaattgcgcccttggcgtaatcatggcatagctggttcctggggtgaaaattggtattncctccaaattcccacaaacataccgancccnggagccataaaagtntaaaacctggggtgnctaaatgagtngagcttactcacattaattgngtttgcgcttantggccccttttcantcnggnaaacctttcgggccanctnnattaatgaaatnggcaacncccngggngaggggggttgcgtatnnggcgctcattnccctttctngntannnaacnnctggcctcgggnngtttngntggngggagcggnttnaantaactnaaagggggnataccgtnattccaaaaanaggggattacccngnaaaanntttt

SEQ ID NO: 6312 - DNA, 916 bp, Homo sapiens
  misc_feature 2, 3, 4, 5, 6, 323, 340, 391, 452, 454, 459, 462, 537, 549,562, 605, 619, 623, 661, 675, 682, 698, 700, 705, 709, 712,718, 719, 723, 729, 746, 764, 767, 773, 777, 781, 790, 793,797, 800, 807, 809, 811, 822, 829, 836, 838, 849, 852: n = A,T,C or G
  misc_feature 853, 861, 872, 873, 887, 899, 901, 904, 908, 913, 914: n = A,T,C or G
gnnnnnacgactactatagggcgaattggagctccaccgcggtggcggccgaggtacgcggggtcattattaccctcactgtcaacccaacacaggcatgctcataaggaaaggttaaaaaaaagtaaaaggaactcggcaaatcttaccccgcctgtttaccaaaaacatcacctctagcataccagtattagaggcacccgcctgcccagtgacacatgtttaacggccgaggtacacgtctctgtctgggcctcggccagggtgccgagggccagcatggacaccaggaccagggcgcagatcaccttgttctccatggnggccattgccttctctntgcttcaaaggcgaccccgagtcaaggatcccgcgtacctgcccgggcggnccgctctagaactagtggatccccgggctgcaagaattcgatatcaagcttatcgatccgncnacctnganggggggcccgtacccaacttttggttcctttagtgaggggtaaattgcgcccctgggcgtaaatatgggcataanctggtttcttgngtgaaaatgttantccctttacaaatttcccacaacataacaaaccgggggcatanaaaggaaaagcctngggnggcttatgagtggactaactcaccatttaattgggttnggctcacttgcccnttttcanacggggaaaactgtgntngcccncttncanttaaannaatnggcccnccccccgggggaagggngggtttgcgtaattgggnccnttttcntttnttgngttacttgnatntctntgncttgggngntntggttgggggnagacggnattaaantnaaataaaaggnggnnaaatcggnttttcaaaaannaaggggatacccangaaaaaaatttntnccnaaangccannaa

SEQ ID NO: 6313 - DNA, 1088 bp, Homo sapiens
  misc_feature 1, 4, 5, 10, 15, 17, 18, 30, 31, 33, 37, 40, 45, 46, 48,49, 51, 52, 59, 66, 67, 68, 71, 74, 76, 80, 82, 83, 84,89, 90, 93, 94, 95, 96, 102, 104, 107, 109, 110, 113, 116,119, 120, 164, 199, 211, 251, 338, 419, 427, 435, 441, 444: n = A,T,C or G
  misc_feature 458, 461, 465, 483, 502, 503, 505, 506, 508, 515, 517, 546,549, 552, 555, 562, 563, 572, 578, 580, 583, 587, 590, 608,609, 610, 611, 622, 623, 625, 634, 650, 651, 652, 655, 656,658, 667, 669, 670, 676, 677, 679, 680, 683, 686, 694: n = A,T,C or G
  misc_feature 696, 699, 701, 702, 706, 712, 713, 716, 723, 731, 732, 733,735, 742, 743, 745, 753, 757, 758, 759, 761, 773, 776, 778,783, 786, 787, 791, 792, 799, 800, 807, 812, 815, 817, 818,819, 828, 830, 833, 837, 850, 854, 859, 863, 865, 872: n = A,T,C or G
  misc_feature 873, 876, 877, 880, 884, 886, 887, 888, 893, 895, 904, 905,913, 914, 916, 917, 920, 922, 924, 929, 931, 933, 959, 960,968, 971, 973, 975, 979, 987, 989, 991, 992, 993, 1001,1004, 1010, 1021, 1027, 1032, 1036, 1038, 1046, 1052, 1061: n = A,T,C or G
  misc_feature 1063, 1065, 1074, 1082, 1086, 1087, 1088: n = A,T,C or G
naanntcgtnacgancnntacattgacgannangatngtntcatnntnntnnttatatnctataannnganatnangatntnnngtttnntannnnaggcgngntgntnnganatnatnncatatagggcgaatggactccacgcggtggcggccgcggctganctcatcccggacgctcctggctgtgctgggtccgntacggcaagctncatggggaccacaacaacagcccccgcgtacctcggccgntctagaactagtggatcccccgggctgcaggaattcgatatcaagcttatcgataccgtcgacctcgagggggggcccggtacccancttttgttcctttagtgagggttaattgcgcgcttggcgttaatcaatggtcaatagctgttttcctggtgtgaaatttgntattccgnttcacaantttccncancaacattacttagncgnggancataaaagtggtaaaagnctggggggggccataatgnngnngngctaacntnaacattaaattggcgttgcacctcactgnccngcnatntacaatnngggaaaaancttgtntntcncagnctncatttaaagaattcgtcnnnncccgccgtggnnanggcggtttngtgtattgggtcccannnttnngnttcatgtgntnnattganntnngantanacttggtncnttngnntgcngatganncgntatttangtttaatnnnanggggggnnanatcctgtnattnnncngaaaatcatggngangnaacgncanngaannaaacatnnttgatgncatantgncnnntcaaaaggncncangaanccgttaaaaaagnccangattngatngngattatnnttnnaantatnannntcccncntgacaaganntactaaanntnntgntncnatacntnangtgtgatatcacctgtggtgcttganntgatgtgntgncntnttcncatggagntncnnngatcgctnatnttgtangaccctgtcangatacnagatnactntngtcgtgcnttattncactcgggnangncgggggcgntattttgnttgnnn

SEQ ID NO: 6314 - DNA, 844 bp, Homo sapiens
  misc_feature 2, 3, 16, 31, 33, 131, 141, 172, 177, 178, 188, 198, 200,201, 208, 246, 259, 290, 292, 297, 298, 302, 304, 311, 312,316, 319, 323, 326, 332, 333, 334, 338, 347, 352, 355, 359,362, 364, 372, 383, 385, 386, 389, 399, 428, 430, 434: n = A,T,C or G
  misc_feature 435, 440, 443, 446, 448, 450, 451, 459, 521, 534, 544, 558,563, 569, 580, 592, 614, 621, 632, 661, 670, 677, 681, 684,686, 690, 703, 724, 725, 739, 741, 748, 758, 760, 767, 770,774, 776, 780, 788, 793, 795, 800, 803, 804, 805, 808: n = A,T,C or G
  misc_feature 819, 821, 823, 833, 837, 841: n = A,T,C or G
anntatcactacttanggcgaatcggagctncncgcggagctccaccgcggtggcggccgaggtacttttttttttttttttttttttttaagaatcgatctcttttaatttttaagccaattttgagtantcaaagtcanagcagtcaatctgtgttgtgagccgaggcanaactnntgaagcgtgnctcgagtgtncnnggtcgangtggcacctaacctatggcactaatcactggctggggnactgcccccgctnggatgcacgcaagaacctcgcgaactgtatnanaattnnactnantttgtgnncggnctncaantgnttttannnaaangcccccgantgccncangtantgnanaaaatgancatggagcctnanntgnaccccgaggngcccgtgccccaaaaaaccacgattctcngntacnnggcgngcnaangnannacgttcanatacccaccaccagtagcactagtattgccactgccacagagggcatggagacacaaacgtncccggttgcctcngcggtggcanatgccgcggtgcangcggnccgctngactagtctanagaaaaaacctnccacaccttccccctgaacctnaaacatnaaatgaatgcnattgttgttgttaactttgtttattgcancttataatnggttacnaatnaancnatancatcacaaatttnacaaaataaaagctttttttnnctgcattctaattngngggttgncaaactcatnangtttttntantttntngatnccccggtncccancncaaanaannnctnttcgcttcttntnantaaataatgngctnggtnggg

SEQ ID NO: 6315 - DNA, 846 bp, Homo sapiens
  misc_feature 442, 476, 505, 515, 522, 539, 566, 572, 588, 643, 652, 671,681, 685, 698, 706, 717, 734, 750, 775, 779, 784, 792, 797,812, 823, 825, 828, 844: n = A,T,C or G
actactatagggcgaattggagctccaccgcggtggcggcccgaggtacacttggaggaaggccaagcaggcgacttgaaagataagtgccccattgaccttttacttagagttttatatgttggcttacttctgggttcctacaacccttctctgattcttccttgtggttggttgtccatgtgtgtgcagtggcctgctagtccttgggaggtgagcatgtgcagtgtgtttactggagttgtacctgcccgggcggccgctctagaactagtggatcccccgggctgcaggaattcgatatcaagcttatcgataccgtcgacctcgagggggggcccggtacccagcttttgttccctttagtgagggttaattgcgcgcttggcgtaatcatggtcatagctgtttcctgtgtgaaattggtatccgctcacaattnccacaacataccaacccgggagcataaaagtgtnaaagcctggggtgcctaatgagtgagctnacttacattnattgcgntgccttcactgcccccnttttcaatcgggaaaacctgtccgtgncaactncatttattgaatcggncaaccccccggggaagaggccggtttgcctatttgggcctttttccctttccttngttaattanttccttgggcctcgggccnttcggcttgngggnaaccggttttaanttaccttnaaagggcgggnaatccggttttccccanaaatcagggggataanccccgggaaaaaaaattttgaaccnaaanggccncccaaaanggccnggaaaccctaaaaanggcccgggtgntnggnggtttttcaaaaggcncc

SEQ ID NO: 6316 - DNA, 844 bp, Homo sapiens
  misc_feature 14, 16, 182, 548, 601, 660, 671, 705, 709, 740, 757, 760,769, 794, 836: n = A,T,C or G
gcttcgctacttangncactactatagggcgaattggagctccccgcggtggcggccgaggtacaggacacaatgcccccagaaaagtaacagccgtcatttatgctagaaaaggaagtgtcctccagagcatagagaaaataagttcctctgttgatgcaacaactgttacttcacaacantgtgtttttagagaccaagaaccaaagatccataatgagatggcatcaacatcagataaaggtgcccaaggaagaaatgacaagaaagattctcaaggaagaagtaataaggcattacatctgaagagtgatgctgaatttaaaaagatatttggccttactaaggatttgagagtgtgccttactcgaattcctgaccatttgacctctggagaaggtttcgattcctttagcagtttggtaaggagtggtacctgcccgggcggccgctctagaactagtggatcccccgggctgcaggaattcgatatcaagcttatcgataccgtcgacctcgagggggggcccggtacccaacttttggtncctttagtgaggggtaattgcgcgcttggcgtaatcatgggcatagctgtttnctgtgtgaaaatggtattccggtcacaatttcacacaacataccaacccgggagccatnaaatgtaaagnctgggggtgcctaatgaggtgagcttactcacanttantgggttgggcttactggccccttttcaatcngggaaaacctgtcgtgnccncttgcattnatgaatcggccacccccccgggaanagcgggtttcggatttgggcgctttttccgtttcttggttanttgattgg

SEQ ID NO: 6317 - DNA, 894 bp, Homo sapiens
  misc_feature 2, 5, 111, 315, 324, 330, 405, 419, 449, 455, 458, 466, 476,485, 489, 493, 505, 508, 512, 532, 533, 543, 552, 555, 560,563, 573, 574, 580, 597, 621, 623, 630, 633, 655, 657, 663,665, 667, 674, 675, 679, 684, 692, 698, 702, 703: n = A,T,C or G
  misc_feature 719, 723, 729, 734, 740, 747, 750, 752, 755, 771, 773, 785,787, 789, 794, 811, 812, 814, 820, 843, 844, 850, 867, 868,869, 879, 881, 883, 889, 891, 892: n = A,T,C or G
cngcntatcgactactatagggcgaattggagctccccgcggtggcggccgacgtacagtggtgtctgcctgtagtcccagctggttgggaggctgaggcgggaggacccnttgagtctaggagttagagaacagcttgggcaacaaagcgagactgtctttaaaaaaaatacacacacacacacacacacacacacacacacacacacacacacacacacacacacaaagactgaaatggaaatgagccgagatcgcgccactgcactccagcctgggcgacagagtgagactctgtcccaaaaaaaaaaaaanattaattanaatgtncctgcccgggcggccgaggtaccttttcatagaacttggcttctatgtgagcacatctttacctgaagttgtttnaatgcattaaattncttctttttactgctttaggtaaagtttcnatgtanctngaaggggntgtgaggganaatttgtcnaagncccntcctgtaaaagntgncaanaactcgtggattcctgcatnncctgatctgngagcttttntgngttanttncatttttaannagcttnccaagggaattttgaanggaaccccattctgaaaaactgtnantctggcnttntgaaatggtttttattcctctnanggcctncntnggggtanntggncgggngaccctanctttcntctnngttttggggggctggngccncccggngtccnttgccncgtggcnggntnttnttaaaactagggggancncccgggcttggngngnatttntatataccagccttatnntnaacccnctgcctttagggggggggcccgnntccacnatttttttccctttatnnngggttaattngncncctttngnngg

SEQ ID NO: 6318 - DNA, 844 bp, Homo sapiens
  misc_feature 1, 3, 4, 6, 563, 565, 566, 567, 568, 569, 570, 571, 572,573, 574, 575, 576, 577, 578, 579, 580, 581, 582, 619, 648,657, 671, 679, 713, 741, 744, 752, 764, 774, 785, 801, 802,803, 822, 825, 828, 829, 834, 841: n = A,T,C or G
ngnntntcactactatagggcgaattggagctccccgcggtggcggcccgaggtacaggctgtgatacatgtggcgatcgatcttcttagattcacggtatcttctgagcagccggcgcaaaatcctcattctcctcatccatgtgaccttctctggcattcgggcattggctgtacctagcgatagtcgctggttcaaacagtgaaaaaaatatgttggctttgacagttgggacaaataccagatgggagatcaaaatgtgtatcctggacccattgataactctggacttctcaaagatggtgatgcccagtcacttaaggaacaccttattgatgaattggattacatactgttgccaactgaaggttggaataaacttgtcagctggtacacattgatggaaggtcaagagccaatagcacgaaaggtggttgaacagggtatgtttgtaaagcactgcaaagtagaagtatatctcacagaattgaagctatgtgaaaatggaaacatgaataatgttgtaactcgaagatttagcaaagccgacacaatagatacnannnnnnnnnnnnnnnnnnaagtcctgcccgggcggccgtctaaaactagtggatnccccgggctgcaggaattcgatatcaacntattcgatnccgcgaccctcgangggggggncccggtacccaacttttggttccctttaagtggngggttaattgccccgcttggcggtaaanatnggcatagntggttcctgggngaaaatgttntcccgtcccanttccaccccccttttnnngccgggaaccttaagggtnaanccnnggggngcctaangag

SEQ ID NO: 6319 - DNA, 930 bp, Homo sapiens
  misc_feature 371, 424, 446, 463, 494, 505, 506, 508, 519, 521, 522, 528,539, 546, 554, 559, 563, 565, 569, 571, 572, 575, 576, 580,583, 589, 592, 597, 598, 617, 625, 630, 639, 640, 643, 658,663, 680, 685, 686, 687, 690, 701, 710, 712, 714, 717: n = A,T,C or G
  misc_feature 718, 724, 726, 728, 729, 731, 733, 734, 735, 738, 740, 743,748, 749, 751, 756, 763, 766, 772, 776, 778, 783, 784, 788,790, 793, 796, 805, 808, 826, 828, 829, 836, 843, 845, 850,853, 857, 864, 865, 866, 868, 886, 887, 888, 889, 890: n = A,T,C or G
  misc_feature 891, 896, 901, 902, 903, 907, 910, 911, 918, 919, 929: n = A,T,C or G
gtaatacgactcactatagggcgaattggagctccaccgcggtggcggcccgcccgggcaggtacgcggggtaactttttaactttataaacttagtattttaactttttaaacttttttgttgaaaactaagacacaaaaacacatgttagcctagatccacacagggtcagggtcatcagtatcactgtcttccacctccacattttgtctctggaaggtcttcaggggcaataacacacatggagctgtcatcgcctgtggtaacaacgcagagtacctcggccgctctagaactagtggatcccccgggctgcaggaattcgatatcaagcttatcgataccgtcgacctcgagggggggcccggtncccagcttttgttccctttagtgagggttaattgcgcgcttggcagtaatcantggtcatagctgttttcctgtntgaaatttgttatcccnctcacaattttcacacaacaataccgagccngggagcataanngngtaatagcctngnngttgcntaatgagtganctaactnacatttanttggngttngncttnanntgnncgcnttntcagtncgngaaannctgtttatgcccagcttcnattaatgnattcngtccaaaanncgncggggatgaggcggntttgnggtttaaggtgcgcctntttannnttntccttgatttnactggaaantncntgnnctatgntncnntntnnnttncnggnaaacnntnttcanatttaanttntatagntttntnattanntttntntcnccnaattatttnggnggggattttccgtggaantnnatcatantaatccntnggggncanattnataaggnnnantgaactctctaaaaatgnnnnnnatttngtggnnngatnatnnttaatgnnattgtccctng

SEQ ID NO: 6320 - DNA, 853 bp, Homo sapiens
  misc_feature 617, 667, 697, 747, 751, 760, 795, 821, 837, 852: n = A,T,C or G
gtaatacgactcctatagggcgaattggagctccaccgcggtggcggcccgaggtaccccctgcttgctcaatagatcacgaccctctcacgtggacccccttagagttgtaagcccttaaaagggacaggaattactcccttggggagctcggattttggagacgtgagcccgccaatgctcccagctaaataaagccctctccttctacaacttggtgtctgaggggttcttgcctgcggctcatcctgctacagacccatattaagaaacatcataatcaaaccatcaaagctaaagacaggagaatactgaatgccccaaagaagtaactcatgattttgagaaatcttcaataagattaacagctgatttctaatcagaaacgatgaaggccagcaggtaatagcctatgtaatcaaaagtggtgaaaaaaattctaccaagaattaatatatgcggaaaaaactatccttcaaaatgaaggataaatcaagatattctcaagtaaaataaaaagtgagagagttcactgctagcacacctgccctacaacaaatgcgaaagggagtccttaggggatgaaataaaataacactggacaggaacctcaactncctatggaaaaataaatgccaagaaaaggtataaaccataggtaagtggnaaagacacttataaggcatttttggcttgnaattccttttctttttaaaacctattcaaaaagacaactgcttaagcagnactncaaatctanggtggttgagaactaatatctaaagattaatctgngccattttaaataataagaaccggcntaagggccgtggacangggcaaagtttttgnt

SEQ ID NO: 6321 - DNA, 904 bp, Homo sapiens
  misc_feature 353, 498, 508, 533, 574, 579, 589, 591, 624, 661, 675, 683,697, 709, 734, 735, 771, 777, 785, 795, 803, 805, 807, 816,828, 835, 844, 864, 867, 869, 875, 879, 894, 897, 903: n = A,T,C or G
ctactatagggcgaattggagctccccgcggtggcggccgaggtacgcggggggcgccattttgtctcggcagcggtggcccgtagctccatcgcattttatgtttctggcgagaagggaacggagttttcatcaggtagattggtttttgtgcggccgctctagaactagtggatcccccgggctgcaggaattcgatatcaagcttatcgataccgtcgacctcgagggggggcccggtacccagcttttgttccctttagtgagggttaattgcgcgcttggcgtaatcatggtcatagctgtttcctgtgtgaaattgttatccgctcacaatttccacacaacatacnagccgggagcataaagtgtaaaagcctgggggtgcctaatgaagtgagctaactcacattaatttgcgttgcgctcactgccccgctttccaagtcgggaaaccctgttcgtgccagctgcattaatgaatcgccaacgcgcggngaagaaggcngtttgcgtatttgggccgctctttncgctttctcgctcaactgactcgcttgcgcctcggtccgtntcagncttgcggcgnanccggtattcaagctcactcaaaaggcggtaatnaccggttattccaccaggaaatccagggggattaacnccaaggaaaaaaancatggtgnaacaaaaagggcangctaaaaagggnccatggaaccctaaaaaaaggcccnnttgcttggcgtttttccataaggctccgcccccctngacgangccattanaaaaattcanccctcaantnanaagggtggncgaaaacccaanaggactntaaaaaatnccagccgtttccccttgaanctncnttatgncccnttcttttccaccttnccnttaacng

SEQ ID NO: 6322 - DNA, 895 bp, Homo sapiens
  misc_feature 563, 578, 603, 627, 634, 647, 656, 664, 672, 706, 717, 738,746, 749, 758, 759, 761, 765, 789, 802, 803, 817, 839, 842,844, 866, 870, 872, 876, 880, 890, 894: n = A,T,C or G
tgccgcgtaatacgactactatagggcgaattggagctccaccgcggtggcggcccgcccgggcaggtacacataggtataaacaacataaaactgacttggaagcgattcctcagcagtgccccattgatctgccctgccaagtgactggctgccagtgcagggcttacctttatgtccccttgaatggagccagcccattcgctgcaggtgcaaacactttgctgatcagcacagtgctgcgcctggctttacatgcaatacatgttccaagtgttcaggattccatagctgcttcacttgtgcttgtggtcagcctgcatatgcccatgacacaagtagtggaaactaagcaagaaagattggctcaggaaaaaccagtgggacgggacattccttatgcagccatgggaggattaactggtttcaagctcgctggcggaaggctacatgcggttagatgacagtgggattggtgtacctcggccgctctagaactagtggatcccccgggctgcaggaaattcgatatcaaagcttatcgataccgtccgaccttcganggggggccccggtanccaactttttgttcctttaagtgangggtaaattgcgccttggcgtaanccatggncataacttgtttncctgtgtgnaaattggntattccgntcacaatttccacaacaacaaaacgaaccggganccttaaaatgntaaaagccctgggggtggctnaatggagnggncttaacttnncnttanttggggtggcgcttcacctggccnccttttccaagtnngggaaaacctgttntgcccaacttgattaaatgaantcngnccaacccccggggaaaagcggnttgncntatngggncccttttccnttcnt

SEQ ID NO: 6323 - DNA, 614 bp, Homo sapiens
  misc_feature 4, 540, 567, 594: n = A,T,C or G
gtanacgactactatagggcgaattggagctccaccgcggtggcggccggggccggagaggggctgaccgggttggttttgatctgataaatgcacgcatcccccccgcgaagggggtcagccgcccgtcggcatgtattagctctagaattaccacagttatccaagtaggagcccgcgtacctgcccgggcggccgctctagaactagtggatcccccgggctgcaggaattcgatatcaagcttatcgataccgtcgacctcgagggggggcccggtacccagcttttgttccctttagtgagggttaattgcgcgcttggcgtaatcatggtcatagctgtttcctgtgtgaaattgttatccgctcacaattccacacaacatacgagccgggagcataaagtgtaaagcctggggtgcctaatgagtgagctaactcacattaattgcgttgcgctcactgcccgctttccagtcgggaaacctgtcgtgccagctgcattaatgaatcggccaacgcgcggggagagggcggntttgcgtattgggcgctcttccgcttnctcgctcactgactcgctgcgctcggncgttcggctgcggcgagcgg

SEQ ID NO: 6324 - DNA, 625 bp, Homo sapiens
  misc_feature 625: n = A,T,C or G
actactatagggcgaattggagctccccgcggtggcggccgcccgggcaggtactttactgcacccagcagactttcaacaactcattgatccaaagatacatgcacagtctgagcaccagctatggtgctcataacttctttaagacttgaaccctttcaatctgtgtgattcattaaattggaccattgatgataagaatacacattgtatgtttctgtgcacatgacagtgtgtgtgtgtgcacgtacctcggccgctctagaactagtggatcccccgggctgcaggaattcgatatcaagcttatcgataccgtcgacctcgagggggggcccggtacccagcttttgttccctttagtgagggttaattgcgcgcttggcgtaatcatggtcatagctgtttcctgtgtgaaattggtatccgctcacaattccacacaacatacgagccgggagcataaagtgtaaagcctggggtgcctaatgagtgagctaactcacattaattgcgttgcgctcactgcccgctttccagtcgggaaacctgtcgtgccagcttgattaattgaatcggccaacgcccggggagaggcggtttgcgtattggggcgctcttcccn

SEQ ID NO: 6325 - DNA, 398 bp, Homo sapiens
  misc_feature 2, 7, 11, 22, 28, 365, 367, 368, 372, 375, 376, 377, 378,379, 380, 381, 382, 383, 384, 385, 386, 387, 388, 391, 392,393, 394, 395, 396, 397, 398: n = A,T,C or G
anccgcntatngacatactatngggctnattggagctccaccgcggtggcggccgaggtacagcaaaacccacctgtgtaaacacacacagcaaagtgatgtaagaagtttccatataaagggctgcagtatggagaggtaatgtgcaggctggtttgcggctgtaggggccaccttgctgcagctctccactgatatggtacctgcccgggcggccgctctagaactagtggatcccccgggctgcaggaattcgatatcaagcttatcgataccgtcgacctcgagggggggcccggtacccagcttttgttccctttagtgagggttaattgcgcgcttggcgtaatcatggtcatactttntnncccnggnnnnnnnnnnnnnnagnnnnnnnn

SEQ ID NO: 6326 - DNA, 921 bp, Homo sapiens
  misc_feature 451, 500, 510, 549, 564, 571, 575, 585, 594, 598, 599, 601,607, 610, 615, 620, 631, 657, 660, 662, 671, 672, 681, 689,692, 699, 702, 708, 710, 717, 725, 726, 727, 728, 734, 744,745, 747, 749, 752, 753, 755, 768, 770, 776, 778, 779: n = A,T,C or G
  misc_feature 780, 784, 785, 787, 788, 793, 797, 804, 810, 819, 827, 834,838, 839, 840, 843, 845, 849, 851, 853, 861, 863, 873, 878,879, 882, 883, 894, 897, 915, 919, 920: n = A,T,C or G
ggcgaattggagctccaccgcggtggcggccgcccgggcaggtacgcggggggaactgctcagttaggacccagacggaaccatggaagccccagcgcagcttctcttcctcctgctactctggctcccagacaccactggagaaatggtgatgacgcagtctccagccaccctgtctgtttctccaggggaaaaagccaccctctcctgcggagccagtcacgatattactacccacttagcctggtacctcggccgctctagaactagtggatcccccgggctgcaggaattcgatatcaagcttatcgataccgtcgacctcgagggggggcccggtacccagcttttgttccctttagtgagggttaattgcgcgcttggcgtaatcatggtcatagctgtttcctgtgtgaaattgttatccgctcacaattccacacaacatacngagccgggagcataaagtgtaaagcctggggtgcctaatgagtgagctnactcacattnattgcgttgcgctcactgcccgcttttcagtcgggaaanacctggtcggagccngcttgcnttanttgcaatttngcccaacancccnngnggaggnggnggganttgcngtaatttgggncggctcttttcccgctttccctttgnttnanttgacttcnnttgcacttnaggtccgnttncgggttncanttgaancngttttcnaatgttcnnnntaaaanggggggggtnncncngtnnantttaatagaaatncntggccnannncccnngnngaaangacnctttttncgtttntagggcccntttttcanggactcntacnnnaantntaantncnttggcctngngtcgtttttngtttnnggnnaagggggtttntcnttcctttttaagggtggngtannc

SEQ ID NO: 6327 - DNA, 934 bp, Homo sapiens
  misc_feature 6, 7, 9, 41, 43, 52, 64, 95, 207, 237, 243, 246, 274, 427,522, 616, 661, 701, 712, 721, 723, 737, 739, 750, 752, 753,755, 758, 761, 765, 768, 771, 777, 778, 786, 787, 789, 792,795, 796, 802, 813, 817, 821, 825, 827, 828, 830, 841: n = A,T,C or G
  misc_feature 842, 843, 847, 848, 850, 855, 857, 859, 863, 864, 873, 874,878, 881, 882, 884, 885, 898, 902, 907, 908, 910, 913, 915,923, 924, 927: n = A,T,C or G
gaaggnngntcgactactatagggcgaattggagctccacngnggtggcggncgaggtacagcntttcctggaggatctctggagcgatatagtntggcgtgccacagaatgtggccgtggtgacaccattgcaaatcccctccttgcacattccgaagtctgccagtttacagtgaccctcgtggtccaacaggacattgtccagnttcagatctctcatactcagcctatacccnatcctncantctagcacccatctctacccatcagagncagaatgaacacccataggggaggtggccactgtgtgcccccccgcgtacctgcccgggcggccgctctagaactagtggatcccccgggctgcaggaattcgatatcaagcttatcgataccgtcgaccttgagggggggcccggtacccancttttgttccctttagtgagggttaattgcgcgcttggccgtaatcatggtcataagctgttttcctgtgtgaaaatgttatccgctcacaattncacacaacatacgagccgggagcataaagtgtaaagcctggggtgcctaatgagtgagctaacttcacattaaattgcgttgcgcttcactggnccgctttccaagttcggggaaacctgtcgtgcccagcttgcattnaatgaaatcggggccaaccccccccggggaagagggcggnttttgggggantttggggcncnttttccggtttttntnccataaaattnanntntcnttngccnttnggngggttnngggtttgnngnggnggnnggtttnaaattttcttnaaangggngggnannangggtttttccnnnaaanntnggggntntncccnngaaaaaaanntttngtnnannaaaaggccccctnaaanggccnnanaancnaaaaaaanngcnttttttt

SEQ ID NO: 6328 - DNA, 984 bp, Homo sapiens
  misc_feature 443, 465, 472, 494, 504, 518, 525, 535, 557, 566, 580, 586,598, 611, 615, 616, 647, 661, 677, 681, 686, 688, 691, 698,713, 722, 725, 739, 754, 788, 805, 808, 812, 826, 829, 837,839, 847, 852, 863, 867, 883, 886, 888, 889, 891, 896: n = A,T,C or G
  misc_feature 900, 903, 906, 915, 916, 919, 920, 921, 922, 929, 931, 947,950, 957, 958, 960, 961, 965, 966, 971, 976, 983, 984: n = A,T,C or G
gtaatacgactcactatagggcgaattggagctccaccgcggtggcggccgaggtacgcgggggctgagctcttggaagacttgggtccttgggtcgcaggtgggagccgacggggtctcactccattgcccaggccagagtgcggggatatttgataagaaacttcagtgaaggccgggcgcggtggctcatgcccgtaatcccagcattttcggaggccgaggctggagtgcaatggtgtgatctcagctcactgcaacctctgcttcctgggtttaagtgattctcctgcctcagcctcccgagtagctgggattacaggcatcatggaccgatctaaagaaaactgcatttcaggacctgttaaggctacaagctccaagtttgggaggtccaaaacgtggttcttgttgactttaaacaattttccttgtcagaaatncattacccttgttaaataaggnggcccangcctcaaccggggttcttttgnggttcctttnaaaaatttcttttncccagcngccgtttccnttttgcaaaggcaccaaaaaancttttgttntttccaagttcaanaaaagnccgggtttcaanaaatccagaaagncaannaaagccaattttgccaggggcaaacccaggnggtacctttgcccngggccgggcccgtttnttanaaaantnagnggggatnccccccgggcttgcnaggaaattncgnaaatccaagccttnttcgaaacccggccnaccctttgaggggggggggcccccggtccccaanttttttggttccctttnaangganggggttaaattggnccncctttggngnaaatcaantgggncaaaaacttgntttncctggggggaaaattnttntnncncttcnaaanttnccnccaaaaaannacnnnncccgggnanaaaaaagggggaaaanccntgggggnncnnaaannggggnccccnccccccnn

SEQ ID NO: 6329 - DNA, 700 bp, Homo sapiens
  misc_feature 558, 588, 621, 633, 635, 674, 675, 685, 699: n = A,T,C or G
gaattggagctccaccgcggtggcggccgaggtacaagttcggctttgagcttcctcaggggtaaatatcagctaaatgcatctttgaacttttctgtctaaaatatcttgccctcctttgatcacttactgttcttggagagcgttttaaaatttcattttcttgacacaggcctctgggaacatccttcaaaggaaaatatgggtgtgtagactactgggtgaaggcttttcttgaccgcccgagccagccaactcaagagacaaagaaaaactttgaagtagtggatctggtggatgtcaatacccctgatttaatggcacctgtgtctgctaaaaaagaaaagaaagtttcctgcatgttcattcctgatgggcgggtgtctgtctctgctcgaattgacagaaaaggattctgtgaaggtgatgagatttccatccatgctgactttgagaatacatgttcccgaattgtggtccccaaagctgccattgtggcccgccacacttaccttgccaatggccagaccaaggtgctgactcagaagttgtcatcantcagaagcaatcatattatctcagggacantgccgccatcatggccgtggcaaggagcccttngggtttcagaanantaggccttctattctggggctgcaaccattctttggagnnggaatattcnttactgggggggang

SEQ ID NO: 6330 - DNA, 867 bp, Homo sapiens
  misc_feature 5, 10, 16, 17, 23, 27, 29, 31, 33, 37, 38, 39, 41, 43, 47,49, 56, 58, 62, 63, 65, 66, 67, 68, 69, 70, 71, 72, 73,74, 75, 76, 78, 79, 82, 84, 96, 98, 99, 190, 334, 558, 586,626, 629, 653, 656, 680, 699, 702, 733, 752, 761, 768, 772: n = A,T,C or G
  misc_feature 800, 821, 846, 858, 859: n = A,T,C or G
ttttnttggnatttannatatcncatncngntntatnnntntntagntnttatacncntttnntnnnnnnnnnnnnannagngnccctatataccncnnacgatcatatagggcgaatggactccaccgcggtggcggccgagtacaggatcttgccatcacctgttcggtcaaacagctggaaggcctncttgaactctgcggtctggtcttcggtgaagtcacacatcttgactgctcagctctccgggaccttttcctgcagtaatggcccccgcgtacctgcccgggcggccgctctagaactagtggatcccccgggctgcaggaattngatatcaagcttatcgataccgtcgacctcgagggggggcccggtacccagcttttgttccctttagtgagggttaattgcgccgcttggcgtaaatcatggtcatagctgtttcctgtgtgaaattgtttatccgctcacaattccacacaacataccgaagccccgggagcattaaagtgtaaaagccctgggggttgcctaaatgagtgaagcttaactcncatttaattggcggttggcgctcactgnccgctttccagtcggggaaaacctgtcgtgccaactgcanttnaatgaaattcggccaaacgccgcnggngaagagggcgggtttggcgttatnggggcgctctttcgctttnctngctcacttgacttcgcttgcgcttcaggtcngtttcggcttggcgggcgnagccggtanttcaagnttcnccttaaaaagggcggtaaatacccgggnttattccaacaatgaattagnggggaataaaccgccaggaaaaagnaacattgtgganncaaaaacg

SEQ ID NO: 6331 - DNA, 983 bp, Homo sapiens
  misc_feature 8, 9, 10, 21, 22, 23, 24, 26, 28, 38, 41, 47, 50, 51, 52,54, 61, 63, 66, 69, 75, 80, 81, 84, 88, 90, 93, 96, 97,98, 99, 100, 101, 103, 106, 110, 117, 134, 158, 178, 223,238, 246, 252, 274, 280, 297, 334, 359, 372, 380, 407, 410: n = A,T,C or G
  misc_feature 411, 412, 413, 436, 454, 460, 472, 486, 493, 507, 513, 528,531, 542, 545, 548, 550, 558, 559, 561, 563, 572, 573, 583,590, 591, 592, 601, 608, 614, 615, 623, 644, 647, 653, 664,669, 670, 699, 705, 710, 713, 717, 722, 734, 738, 759: n = A,T,C or G
  misc_feature 762, 768, 796, 797, 801, 802, 804, 805, 806, 812, 817, 820,822, 824, 829, 831, 832, 837, 840, 841, 846, 849, 850, 853,859, 863, 866, 867, 880, 884, 885, 887, 890, 897, 899, 900,912, 917, 921, 923, 933, 949, 951, 957, 959, 961, 968: n = A,T,C or G
  misc_feature 969, 970, 973: n = A,T,C or G
gtggtctnnnttctatattgnnnngntnacgctacttntanttcatntcnnntntatgtcncnttnttntttggnttgtnntantggntnaantcnnnnnngnagngggntgcgctnatagactcatatagggngaattggactccaccgcggtggcngccgccctgccaggtacgcnggggctgaaacccgcagaggaagacgctctatggatttagtcccngactagcgagatggnaaggctgngggacnggaggctgattgagaggcgaangtgtcntgaaaactacccctaanagccaaaatgggaaaggaaaagactcatatcaacatngttcgtcattggacacgtatattcnggcaagtccaccnttactggncatctgatctataaatgcggtggcatncgnnnnaaagaaccattgaaaaatttganaaggaggcttctgagatntggaanggggctcccttncaagtattgcctgnggtcctntgggataaaacctnaaaagnttgaagcgtttaacngtntgttattcatnccnttngnttattctnncntntggcgggannaattttttanacccagnnnaaggttgcnctttgtnccccgnntcctaaanaacctaaggtgggatcccccncgnggactngcaatggaaanttctnnataattaaaacgcttttaatccgataacnctgtgntgacnccntctnagggnggggggccccgngtanccccagcctttattgcttccnctnataganggaggggtttaaattcgccgccaccttnngccnntnnntccatnggtcnatngncngggtntnncttgngcnngaaanatnngantatgcncgcnttnnataaatttgtcantaannanctnttacttnannccgtgggggcantaaanttgnanaatccctggnggttgctctgaattcnantttgancntnaacttcnnnttnagaattgccg

SEQ ID NO: 6332 - DNA, 1029 bp, Homo sapiens
  misc_feature 6, 7, 8, 11, 13, 18, 22, 26, 28, 30, 31, 34, 38, 42, 43,44, 55, 59, 75, 76, 77, 78, 79, 80, 83, 89, 90, 98, 204,240, 249, 269, 291, 304, 311, 351, 381, 382, 390, 392, 393,398, 416, 444, 468, 499, 525, 547, 554, 563, 578, 585, 586: n = A,T,C or G
  misc_feature 588, 598, 601, 609, 618, 629, 643, 647, 663, 671, 675, 677,682, 688, 691, 698, 708, 711, 733, 741, 795, 800, 801, 806,808, 819, 826, 835, 841, 847, 851, 852, 858, 861, 867, 873,878, 882, 883, 896, 899, 901, 902, 903, 906, 908, 910: n = A,T,C or G
  misc_feature 911, 912, 914, 916, 921, 922, 927, 929, 934, 935, 939, 946,950, 953, 957, 978, 982, 990, 991, 1002, 1007, 1018, 1026: n = A,T,C or G
tttatnnntangnatatntatntatntntnnatntacntatnnnagaatgatatntatncatatttatttatatnnnnnnatnggggcnncttaggcnaatgatatgggcgaattggactccaccgcggtggcggccgcccgggcaggtacgcgggtagggaagcctgtgatgactacagactttgcgaacgctacgccatggnttatggatacaatgctgcctataatcgctacttcangaagcgccnaggggccaaatgaggctganggaagaaaaaaaatctcttttntactggaggctgngcacctnattttgtatccccctgtagcagcattactgaaatacatangcttatatacaatgcttctttcctgtatanntctacttngnntggcntgcaccccttttttcccngcccccagtatttgataaggtaatgaanagtgcactgcaatttgaggggtcnaaagtgagaagtcaaccatatgtgaattggnaccataaaaaaaacttttctggtgtngatacttttcaaaaaaagaaantcaaacntttaatgcntttttgtctcttacntatatanntnttaattatgnatnaagggtcnccctctggnccgcttcttanaaaacttaagtggnaatnccccccgggcctgcanggaatttncganantcaangctttntcngattccngtccaacctngangggggggccccggacccccaantttttgtncccttttaaggagggtttaataggcccccctgggggtaattcatgggacaatanactgnnttctntngtggagaaatntgttttnctgtttaancaattngcccancatnnaatctnaancccggngagctntaaantggnnaaaagccctgggntgncnnnaantngnnngngnctaanntccantnaattnntgangcggctncacntgncccnttttatcagtcgggtaaaccnagtnttggccanntacatataatnaaatngccccaacccnccgggggnagg

SEQ ID NO: 6333 - DNA, 877 bp, Homo sapiens
  misc_feature 6, 9, 10, 12, 431, 451, 473, 496, 540, 574, 616, 651, 655,666, 693, 698, 711, 714, 766, 767, 778, 780, 785, 788, 801,803, 819, 824, 842, 869: n = A,T,C or G
attttnttnncncgtatacgactactatagggcgaattggagctccaccgcggtggcggcccgaggtactgcgaggtcaccttcatggattagcatcctgctgtgagctgaaagactgaacaagcagaagcataagccaaacccatccctccacgctccccactgtgcagatggacttactgaggctccagcatacactgcttgctcagcactttatctatttcaggccaaagtgtcagcagaactgatacccacagggcatccaagtccacatccagacccagttccctctgcggccctctcttaaaccgagccgctgactgctgatggtgagttcccaatcatgggcttgcactgaggggtgccagaggcctgggtgggcatgaagcctggtgggtatggagtgaaggggatttgggagtggcatctanaaggtcagcatgaggggcanagaggagaaaaaagaacccatngcttgcacccacaaggggaaacnggcccaatgcacagaccggggcccctagttaaagcccaattcangccaaacttgcccttcagtgtaaaatcttgagtnggaacaaggacaagacttgataaattgaagaaaattgaaaanaagcttaattgggccagggggccccacttggcttnttgncttgcaagggnggccaccccttggttgtgcaaaaccgnaatancaaagttccttgnccngggccggccggttttaaaaataagtgggatcccccgggcttgcagggaattnnaatttaaaacntnattgnatncccgtcgaccttnanggggggggccccggtnccaantttttttccctttaaggnagggttaaattgcccccttgggcgtantaaatggg

SEQ ID NO: 6334 - DNA, 841 bp, Homo sapiens
  misc_feature 501, 673, 752, 761, 763, 767, 770, 785, 803, 804, 815, 821,834, 837, 839: n = A,T,C or G
acgcgactactatagggcgaattggagctccccgcggtggcggcccgaggtacagtaaaagcaagactgggcttaagcaggtctggacggcacaagtaaactgcagggattaacagcccagactcccctactgcttgttcctccttcttgtaagttttctagacccacatttaaggcctcatagggaggatcctaaggccagttagcaggacaggaaaaaggcacgcttgtttatggatggacatgcgcagtgtgctggcaccggccagaagtgagaaaaggcagccccactcagggatggcctgaaagagaggggtgaagggaaatcttcccagtgggcagaactctgagcagtacctgcccgggcggccgctctagaactagtggatcccccgggctgcaggaattcgatatcaagcttatcgataccgtcgacctcgagggggggcccggtacccagcttttgttccctttagtgagggttaattgcgcgcttggcgnaatcatggtcatagctgattcctgtgtgaaaattgttatccgctcacaattccacaccaacatacgagccgggagcattaagtgtaaagcctgggggtgccctaatgaggtgagctaacttacattaattgcgttgcctcactgcccgcttttcaatcgggaaacctgtccngccagcttcatttaatggaattggccaaccccccggggagaggcgggtttgcggtattgggcgctttttccctttcctnggtaactgnantcanttngcttcggacgttcgnttgcgggaacgggtatannttacttcaaangcgggnattaccgggtatnccnanat

SEQ ID NO: 6335 - DNA, 373 bp, Homo sapiens
cgtaataccgactcactatagggcgaattggagctccaccgcggtggcggccgaggtacaagttgtctttatgctgcgagataagtcctctcttggtttgagctcccaccttttcagtgaactcttacattttgggggatctgctcttgtaaaggacatcctttctggtctttgattacttgagaaaagtgagtgaggtggggccaagatggttgactagaagcagctagtgtgtgccactctcacaaatagcaggaagagtggtgagacactagctcttcaaccggaacatccaggtggacacataaggattcatcagtgacatagtgtgaccttcggatcacggagaagagtgagacagatcaaccattca

SEQ ID NO: 6336 - DNA, 403 bp, Homo sapiens
  misc_feature 293, 318, 371: n = A,T,C or G
tcaactactatagggcgaattggagctccaccgcggtggcggccgcagaaggtcccggcagcagcaggaaagaagacggaccccgcgatgagggcggcggcaaggagcaccttcattgtttgccgttcggagaggcgcagcatccccgcgtacctcggccgctctagaactagtggatcccccgggcttgcaggaattcgatatcaagcttatcgatacccgtccgacctcgagggggggcccggtacccaactttttgttccctttagtgaggggttaatttgccccgcttngccgtaattcatggtcataagctgntttcctgtgtgaaatttgttattccgctcacaaattccccacaaacatacgancccggggagcataaaagtgtaaaagcctgggg

SEQ ID NO: 6337 - DNA, 385 bp, Homo sapiens
  misc_feature 212, 222, 228, 239, 240, 241, 244, 247, 254, 257, 262, 269,272, 275, 276, 278, 285, 295, 296, 297, 302, 308, 310, 317,318, 319, 321, 323, 324, 325, 327, 329, 330, 331, 333, 337,338, 340, 341, 342, 343, 344, 345, 346, 347, 348, 349: n = A,T,C or G
  misc_feature 351, 353, 354, 356, 357, 358, 359, 360, 364, 365, 366, 367,368, 371, 372, 373, 374, 375, 376, 377, 380, 381, 382, 383: n = A,T,C or G
gagcgcgcgtaatacgactcactatagggcgaattggagctccaccgcggtggcggccgcccgggcaggtacatcaggggtgaagggagggttttctagattattgggggagggtaaaattgggatttttttgttgttccttttttgatggggtgtgggggtatagtacctcactcccacgcccccgggtggacagccccccgcgtacctcngccgctctanaactantggatcccccnnnctncangaattcnatntcaancttatcnatnccnncnacctcanggggggcccnnncccancttttntncctttannnangnnnantnnncncctnncnnnnnnnnnncntnncnnnnncctnnnnnaannnnnnnccnnnnca

SEQ ID NO: 6338 - DNA, 916 bp, Homo sapiens
  misc_feature 18, 97, 123, 381, 519, 636, 642, 645, 658, 692, 728, 729,736, 738, 742, 749, 751, 758, 766, 769, 783, 795, 797, 802,818, 829, 835, 850, 858, 880, 881, 899, 901, 905, 907: n = A,T,C or G
cactacttagggcgaatnggagctccccgcggtggcggcccgccgggcaggtaccatagaacaaggcttcctccaacaggcccgagagttagtgcangcatccatggcgcagtcgaacacccngtgtgaaattgttatccgctcacaattccacacaacatacgagccgggagcataaagtgtaaagcctggggtgcctaatgagtgagctaactcacattaattgcgttgcgctcactgcccgctttccagtcgggaaacctgtcgtgccagctgcattaatgaatcggccaacgcgcaggggagaggcggtttgcgtattgggcgctcttccgcttcctcgctcactgactcgctgcgctcggtcgttcgcttgcggcnaagcggtatcagctcactcaaaggcggtaatacggttatccacagaatcaggggataacgcaggaaagaacatgtgagcaaaaggccagcaaaaggccaggaaccgtaaaaaggccgcgttgctggcgttttccatangctccgcccccctgacgagcatcacaaaaaatcgacgctcaagtcagaggtggcgaaaacccgacaggactattaagataccaggcgttttcccctgggaagcttcctcgtgcgctnttcttnttncgacccttgccgnttaccggatacctggtcccgcctttcttcctttngggaaacgtggcgctttcttattaactcacgctttnngtatttnantttnggggtangncggttcncttccaanctnggcttgtgtgcacnaaccccccgttnanccccnaccgttggcccttatnccggaactatngtcttngggtccaaccccggnaagaaacnaatttattgcccttggcagcannccctgggtaccaggtttncnaacnanggttttttt

SEQ ID NO: 6339 - DNA, 907 bp, Homo sapiens
  misc_feature 19, 118, 571, 594, 606, 612, 685, 738, 758, 793, 835, 836,851, 860, 861, 864, 871, 872, 877, 879, 887, 891, 903, 904: n = A,T,C or G
gcactacttagggcgaatnggagctccccgcggtggcggccgaggacgcggggaagcggagcaggtgctgcagaagtttgttcaaaacaagtggctgattgaggaaggggagttcacnctgcgcggcccgctctagaactagtggatcccccgggctgcaggaattcgatatcaagcttatcgataccgtcgacctcgagggggggcccggtacccagcttttgttccctttagtgagggttaattgcgcgcttggcgtaatcatggtcatagctgtttcctgtgtgaaattgttatcccagtcacaattccacacaacatacgagccgggagcataaagtgtaaagcctggggtgcctaatgaagtgagctaactcacattaattgcgtttgcgctcactgcccgctttccagtcgggaaacctgtcgtgccagctgcattaatgaatcggccaacgcgcggggagaggcggtttgcgtattgggcgctcttccgcttctcgctcactgactcgctgcgctcggtccgttcggctgcggcgagccggtatcaaagtcactcaaaggcggnaataccggtatccacaaaatcangggataacccangaaaanacatgtgaaccaaaagccagcaaaaaggccaggaacccgtaaaaagggcccgttgcttggcgttttttcatangcttccgccccccttgacgagcattacaaaaatcgaccctcaaatcaaaaggnggcgaaaccccgccgggctnttaaaaatccaggcgtttcccctggaaacttcctnggcccctttctgtttcgaaccttgccctttaccggatccctnnccgcctttttccttngggaagcgnnggnctttttnnatagntnacccttanggtntttaaattcggnntag

SEQ ID NO: 6340 - DNA, 921 bp, Homo sapiens
  misc_feature 119, 120, 256, 302, 363, 553, 563, 577, 618, 653, 685, 710,732, 735, 738, 756, 758, 766, 796, 799, 808, 809, 849, 865,885, 889, 892, 901, 907, 909, 920: n = A,T,C or G
acgcactactatagggcgaattggagctccccgcggtggcggccgaggtaccagaggaggagatggacgatcagagccatgcacctgtttcctgcaccccctgcgcactggttctatgnncacaaggagtcttacccagtaaaagagtttgaggtgtatcctgagctgatggaaaaatcctatgtgccgttcccttgtgggttggaccctttacgatgttcttcaatatccatgacccagactatgtcaagattcncctgaaaagacaagatcccaaaagtgctgttaggcacaaaatcctngaatcctgggttggtcgaggacttgtgaccctggatggttctaaatggaaaaagcacccgncagattgtgaaaacctggcttcaacatcagcattctgaaaatattcatcaccatgatgtctaagagtgttcggatgatgcttgaacaaatgggaggaacacattgcccaaaactcacgtctggagctctttcaacatgtctccctgatgaccctggacagcatcatgaaagtgtgccttcaagccaccanggcggcaatncagtttggacagtnccttgcccgggcggccgctctaaaactagtggatccccccnggctgcaggaattcgatatcaagctttatcgatanccgtcgacctcgaaggggggcccggttcccancttttggttcctttagtgaggggtnattggcgcgccttggcgtaatnatnggncatagcttggtttctggntnaaattggntattccgctcacaatttcccacaacattcnaanccgggagcnntaaatgtaaagcctggggggcctaatgagtgacctacttncatttattggggttgngcttacctggcccgttttcngtcnggnaaacctgcngcccantncattaatgaant

SEQ ID NO: 6341 - DNA, 948 bp, Homo sapiens
  misc_feature 1, 22, 106, 107, 122, 155, 177, 221, 226, 244, 245, 271,281, 300, 301, 310, 312, 318, 342, 346, 347, 350, 353, 356,360, 369, 370, 371, 374, 376, 378, 380, 395, 410, 411, 421,425, 436, 438, 440, 444, 445, 446, 448, 451, 455, 457: n = A,T,C or G
  misc_feature 465, 469, 485, 499, 501, 504, 506, 509, 510, 521, 523, 527,533, 535, 536, 549, 560, 561, 563, 564, 566, 567, 573, 577,579, 585, 589, 599, 600, 612, 614, 615, 623, 627, 631, 633,636, 638, 639, 640, 642, 655, 656, 665, 669, 670, 678: n = A,T,C or G
  misc_feature 685, 689, 692, 699, 701, 703, 708, 712, 714, 717, 720, 733,738, 740, 742, 744, 745, 749, 758, 759, 767, 769, 775, 777,780, 781, 784, 787, 788, 795, 798, 800, 805, 807, 814, 824,827, 829, 836, 837, 838, 842, 847, 851, 853, 854, 855: n = A,T,C or G
  misc_feature 856, 860, 862, 870, 880, 887, 889, 894, 901, 903, 904, 911,915, 921, 931, 933, 935, 939, 940, 942, 948: n = A,T,C or G
ngcgcactacttagggcgaatnggagctccccgcggtggcggccgaggtacgcgggggcggcgcacttccgtagaggtggacatggcgtacgagctttcgccgcgnngttgcttgccaggtntccaagagtgttgaatcttccaccagaaaactngatcacatcaatatctgcagtnccaatttcccaaaaagaagaagtagctgattttcagctttctgnggatnctttattggaaaaagacnntgaccattcaagaccagatattcaanttcaagccangagactagcagagaagctnngataggatncngcggtnagtgaaatcagtacctgcccgggnggtnncancgnacngtanttttagctnnntcntntntntcaaacttggaattntgcataactttttcnncttttaatangccnaagacaaaatntngnttcnnngngtnatananggaaatcntttngggacccaccgttttnttggcctgcttttntnggnanccnnactaaaatggnanaccnttgctntnnaaatacccgggcnatggccagccnncnntnnaatggnattntntggggntggngggcattccnnccccggggatgnanntagggaangganttcntntgngnnntnaatcccttccatnntaccaatcntgannaccaaggngcctttnttgnttnaattttngntnggtanttcncngangangtatttttaaaanaaatntntntnngtanggtttcacnntattttgnanggtggngnacnncgnccnnctttagnaantnttggnancccctgnactccggaanttnanattttannntttnatttncctnannnncttnanggggggtnccgggggccncggtttngnttgcntttaaanannggtaatngggntccctngctaattaangnanatanngnatcccn

SEQ ID NO: 6342 - DNA, 925 bp, Homo sapiens
  misc_feature 1, 3, 29, 30, 42, 49, 54, 97, 123, 195, 198, 256, 261, 270,312, 323, 329, 331, 352, 367, 368, 399, 417, 437, 438, 454,467, 487, 504, 505, 523, 526, 539, 544, 550, 561, 562, 563,564, 580, 593, 595, 604, 607, 613, 614, 615, 618, 619: n = A,T,C or G
  misc_feature 620, 624, 631, 639, 644, 647, 652, 653, 654, 662, 666, 667,669, 670, 672, 685, 686, 698, 699, 703, 708, 709, 710, 713,723, 726, 745, 757, 766, 770, 772, 813, 832, 833, 849, 853,854, 856, 858, 862, 865, 887, 895, 902, 906, 909, 910: n = A,T,C or G
  misc_feature 912, 915, 919, 921: n = A,T,C or G
ncncactactatagggcgaattggagctnnccgaggtggccngcgggtnctgcncgaggtacgtggatggcccgcgtagcgggggggggatagttangtttggcataattctccctctgagtntcttgaagaacttagggtatcttggctatactagtggattatccttgagctgtatggctctttcctaattgnggntatttacaagaaatttcaaattccctgcattgttccagagctaaattcaacaataagngctanttcaacaantgctgacacgtgtacctgcccgggcggccgctctagaactantggatcccccnggctgnangaattctatatcaagcttatngataccgtcgacctnnaaggggggcccagtacccagctttgttcccntaatgagggttaattgcnccccttggcgtaatcatggnnatagctgtttcctgantcaaattgttatnccgctcacaattccacacancatacgagccccgagcnnaaaaatgttaaaacctgnggngccctaatgagtnagctnacctcncattaaattgnnnnactcctcaactgcccncttttcaatccgngnaaacctttnagnccaacnnnaannnaatnaaactgnccaacgcnccccnganaagcnnntttgggtnttgnngnncnatttcccattctnnccttaatgaatnncttngcccnnnccnttttggctgnggnaaactgtttccccttcctncaaagcccgganaaaccggtntccncnaaaataaaggggataacccccggaaaaaacatttgagccanaagcccccaaaaagcccgnnacccctaaaaagcccntttnntngnggtnttnccataggccccccccccttacnaaattccnaaaaccncccnaanntnaangggncnaact

SEQ ID NO: 6343 - DNA, 852 bp, Homo sapiens
  misc_feature 24, 31, 35, 65, 158, 198, 242, 252, 289, 305, 319, 327, 344,368, 383, 389, 403, 411, 416, 426, 433, 473, 474, 484, 499,500, 507, 508, 523, 528, 530, 544, 549, 557, 562, 563, 568,573, 575, 579, 580, 583, 587, 599, 600, 606, 608: n = A,T,C or G
  misc_feature 610, 617, 635, 638, 641, 651, 658, 660, 667, 668, 681, 684,692, 693, 695, 699, 701, 706, 710, 716, 718, 719, 727, 732,733, 741, 742, 751, 763, 765, 770, 778, 779, 786, 798, 806,807, 812, 813, 818, 826, 829, 834, 837, 841, 842, 843: n = A,T,C or G
  misc_feature 848, 851: n = A,T,C or G
ccccagggaatgcagctcctgaancctaaanagangcttccaggctcttggggaagagagggagnaagagtaaagaggactttgtcttgcattgaagtcctctttgatgagtggggattcctagctcccagaaaccatttttagaaacaccctgggcnagaagggaacctgctgccatgaaggaaaggacccaagtanttgcggaatacgtcacctgctgactaaagatcccttgagccttngataaccagnagcaatatccaagtaagtataccatgggccttgggtnagactcttgaaacttntaggctccaggttnagacccancatattgccacctgtgngtgggctattgtgaggagactttntctgcttgagaaaanctgaangaaaaaataaagcngtatttgnctttnacctgcccgncggcccnctctaaaactagttggatcccccggggcttgcaggaattnnatatcaaacnttatcgatacccgtnnaccctcnngggggggccccggtncccancntttgttccctttantgaanggttaaantgcannccttngcgtnancatnngcntaanctggtttcttgnntgaaantngnttccctnacaatttccccccacatntcnaanccgggaccantaaattntnaaacctnnggttgcccaatgntangccttacnncntttnantttcnttgnccttcntnncccctttncattnngaaaaacnntttgccccntttttttaaatncntcccncccccggnngaagggntttcctttttgngcctttcnntcctnnttaanagaattanctnacttntcnttcnnnttacnaanc

SEQ ID NO: 6344 - DNA, 936 bp, Homo sapiens
  misc_feature 6, 213, 215, 216, 221, 235, 256, 273, 289, 321, 334, 350,353, 373, 379, 384, 386, 399, 413, 421, 422, 426, 427, 428,429, 438, 446, 447, 451, 461, 497, 523, 537, 543, 544, 549,551, 553, 559, 561, 563, 567, 574, 576, 584, 596, 610: n = A,T,C or G
  misc_feature 611, 616, 621, 628, 633, 638, 641, 642, 659, 664, 670, 681,682, 689, 695, 698, 705, 710, 711, 718, 725, 727, 731, 732,735, 737, 738, 744, 748, 750, 753, 757, 762, 764, 765, 768,775, 776, 779, 781, 784, 785, 788, 798, 808, 818, 821: n = A,T,C or G
  misc_feature 823, 830, 831, 840, 841, 843, 851, 853, 857, 864, 871, 879,880, 881, 882, 885, 905, 913, 915, 917, 921, 925, 929, 936: n = A,T,C or G
gcgcgnatcactactatagggcgaattggagctccccgcggtggcggcccgaggtactttttttttttttttttaaattctcatgactttattttgattgggttgttcctgacggagtgggtggaaggttatggatgtttgtatcgagaccttttttatcttccggagacacgatgctaccgtgcataacacaaaacagcaccgataaaatgnannaatangaaagagtgccagnggaatcaagactttaaggcancatcccactggggaaancagctcttcaaacacngtccttcaagcgcgagtggcaaactccttgcnggggagggctgangcgcactttgctactngancttgccactgactctccccnggactncagtnanctcacttttcagntccataagcccccncagcgggnncccnnnnacctgcccnggcgggcnnctcnaaaaactagnggatcccccggggctccaagaaattcaaatatcaancttaatcgaatccgtctgacctcgangggggggccccggnacccannaattngnancccttnantnaggnatcaaanancccccccntggccgaaatcntggaacataacttnntcccnggggngaaaaangaaancccgnttnncaaatcccccacaaccntcaantcccangaccttaaaanngaaaaancccggnggnccccaancgagnngaccaanctacacntnaaannggnanncgctanactngnccnattntcaanannggnaaaaccnncantnccnnatncactaaaaanaaccccccanccccccgganagncnggaaacnnaaaagcccnnanttccctancncctnaaatcancaattcncctaaccnnnnatncgcgaaaaccggtaacaccnccaaaaangnanatancaancccnacaatcn

SEQ ID NO: 6345 - DNA, 957 bp, Homo sapiens
  misc_feature 6, 10, 271, 278, 316, 335, 358, 365, 451, 471, 474, 487,500, 515, 519, 530, 534, 544, 550, 560, 563, 566, 567, 574,592, 593, 597, 603, 604, 606, 607, 608, 610, 614, 618, 619,620, 623, 624, 631, 634, 647, 650, 652, 653, 656, 662: n = A,T,C or G
  misc_feature 669, 671, 674, 686, 706, 713, 715, 725, 726, 732, 736, 739,743, 744, 746, 747, 757, 774, 779, 786, 791, 796, 799, 800,804, 814, 817, 825, 832, 841, 851, 854, 866, 870, 887, 889,892, 895, 904, 908, 909, 918, 920, 925, 926, 930, 933: n = A,T,C or G
  misc_feature 936, 953, 956: n = A,T,C or G
aggccngagngcgcgtaatacgactcactataggggcgaattggagctccacccgcggtggcggccgcccaccgacagcgccacatgccggctctggaggccgcactggatatcctgggcgcgcgtgcctggcggcacctgaacttcaatgaacacctcctccaaggtctggtacctcggccgctctagaactagtggatcccccgggctgcaggaattcgatatcaagcttatcgataccgtcgacctcgagggggggcccggtacccancttttgntccctttagtgagggttaatttgcgcgcttggcgtaancatggtcataagctgtttnctgtgtgaaattgttatccgctnacaattncacacaacatacgagccgggagcataaagtgtaaaagcctggggtgcctaatgagtgagctaactcacattaattggcgttgcgcntcactgtcccgctttcccantcnggaaaacctgtcntgccaacttgcantaaatgaaatcgggncaangcgccgggganaggncggtttgcgnattggngccctctttncgnctnncctcggnttacttgaaattcccttnngctncggtcnntnnngntttngggnnnagnnggtattnaantttactttaaaanggngnnaantaccgntatttcnanaanaatatagggganaaatccccatgaaaaaaaanattttancnaaaaaggccnnaaaaanggcnatnaacnntnnaaaaggcccngttcatgggcttttttncaaangcttccnccccnttggnaannatanaaaaaattantcnttaaattnaaagggngggcaaaancctctcgganttnttaaaaaaaccnagcntttccctctgaaaatantnttnagncttttattnttcnnacactttcntntatanncagnaanctntacccctttttttcttnagng

SEQ ID NO: 6346 - DNA, 1031 bp, Homo sapiens
  misc_feature 1, 5, 9, 13, 16, 18, 19, 21, 24, 27, 32, 35, 37, 42, 45,47, 50, 52, 57, 58, 60, 61, 62, 64, 69, 72, 76, 77, 78,85, 86, 87, 88, 90, 94, 96, 98, 99, 105, 108, 112, 122,137, 311, 339, 354, 368, 388, 390, 395, 397, 501, 521, 533,561: n = A,T,C or G
  misc_feature 579, 586, 599, 605, 607, 609, 611, 631, 640, 657, 681, 682,686, 712, 713, 717, 750, 753, 754, 760, 768, 774, 776, 781,794, 798, 804, 808, 814, 815, 817, 831, 837, 839, 852, 860,863, 866, 870, 883, 895, 900, 909, 910, 916, 921, 922: n = A,T,C or G
  misc_feature 932, 936, 937, 939, 945, 946, 950, 959, 961, 977, 979, 980,983, 992, 996, 1003, 1005, 1010, 1013, 1015, 1017, 1021,1025, 1028: n = A,T,C or G
ngcgnattntggnaantnncnatntcnggatnttngngaaanttnanttngntattnngnnngnatccnctnatannntattcgnnnnanaggngnanncgctantcnatcntatgggcgantggagctccaccgcngtggcggccgccgggcaggtactgatctggttcccactcagagatctctcgtaagatgcaatctatcaggcaatgtctaccacacacacacatgcgcgagtgcgcgcgcacacacgcacacacacgcagaggaagacagacaaaacctcagacagattacatcacagcaaagtnaggactagaaaaaccagaggaaacacangatacttctcatttntaacaccaactctnccaaggtacattacagagtnanccaancnagagaccactggctcctgtggttatttgggttaaacagcagcatgatgctccctctccaactctaaccaacagaattaaccaatgaccccttccttccaacacntgatttacacagccaaccanaaagagcacacnaaggacaatatggagcagggagtacttnggtcggtcttagaactantggattncccgggcctgcangaaatntnantnttaagcttatcgataccgtngaccttcanggggggggccctggtanccccaacttttagattccctttannggangggttaaattggggcgctttgggcgnnaatnatgggccataagctggtatctggggtgaaattngtnntccagntccaaaantcccanancaacnattccagtccggnagcntaaatngtgntaaagnntnggggggcttaaggngagggncnaactcccttaaantggggatnggnctnaatnggccctttccaanctggaaaaatcngtttngccgtatgnnttaaanaaatnngacaccgccncggnngnaggctnnttgntatttggancncttatacccttacttnannacngaattcgcntgancttcggnanttcgnttncngncgangggnttntct

SEQ ID NO: 6347 - DNA, 917 bp, Homo sapiens
  misc_feature 5, 7, 546, 609, 612, 613, 638, 643, 662, 682, 702, 708, 722,730, 753, 773, 774, 779, 829, 835, 838, 852, 872, 875, 899,900: n = A,T,C or G
atgtncngacttgcgtaatacgactcactataggggcgaattggagctccacccgcggtggcggcccgcccgggcaggtacgcgggcttccaccatgtgaggacacagcaagaaggggctgactctgaaccaggaagctgtgctgtgctcaccagacactttgatcttggacttctcagcctccagaactatggggttctgctcttgtcacccagactggagtgaagtggcacaatctcggctcactgcaacctccgcctcccgggttcaagcgattcccctgcctcagcctccagagtagctggactgcaggcgcacgccaccactcctggctaatttttgtatttttagtagagacggggtttcaccatgttggccaagatgttcttgatcttctcaccttgtgatcccgccacctcaacctcccaaagtgcttgagagactaagacacctttctagacagagaggaagcccgatggcaaacatttctcagataggtttgtagctattgacctggctgcatcaaaaggagatgaaatcccttanaaaattgacagcttttattgaaatttaccaatcaagaaaggcataagaaccactggctgcagnttnnagaactatgccagaaaataaaatgntcacnagcttggaagaaaaaattnttagtgagccaacagagccngtggaaaaatatttccagtngaagcnggccccttaaacangggaaatnggcgcttttaaactaagtggaancccccggctgcaggaattcnnaattnaacctatcgatcccgcaactttaaggggggcccgggacccaattttggtnctttanggnggggaaattggccncttggggaaacattgggcanagntgtttctgggggaaatggtatccnntaccaattcccccaaat

SEQ ID NO: 6348 - DNA, 890 bp, Homo sapiens
  misc_feature 2, 3, 7, 616, 629, 653, 674, 712, 721, 728, 769, 774, 780,804, 812, 833, 836, 844, 848, 850, 859, 862, 872, 878, 880,889: n = A,T,C or G
gnngacncgcgtaatacgactcactatagggcgaattggagctccaccgcggtggcggcccgcccgggcaggtacctaaccagaatagatgaggcagcaagagaatggcgctcggtgtgtggggtaaggggagtcaggaggaggacgggctgctcgtgagacagggtaggatggactgtgcctggcttcctctcaagcccccaggctgctacccttggttctagccacctttcctcccaccctccttctcatgcaggctgccaaaaattgcactttgggtctgagattaggagcgcctggccatgtctgaaccccgctcctatcttagtggccgcaggtggctcccaggaaagcatgaatcctgaggttttactggtaagctgggagggattaactgggatccagtcatgtgctccacccagtacctcggccgctctagaactagtggatcccccgggctgcaggaattcgatatcaagcttatcgataccgtcgacctcgagggggggcccggtacccagcttttgttccctttagtgagggttaattgcgcgcttggccgtaatcatggtcataagctgtttcctgtgtgaaattggtatccgctcacaatttncacacaacatacnaacccggagcataaaagtgtaaangcctgggggtgcctaatgagntggctaacttccataattgcgttgcgcctccttgcccnctttttcantccgggnaaaacctgttcgtgcccaacttgcattaattgaaatacggnccacncccccngggagaaggcgggttttgccgtantttgggcnctttttcccctttcttcgttnaantaaaattncttngnctcgggggnttngggtgggggnggaggngngttaaaatnt

SEQ ID NO: 6349 - DNA, 886 bp, Homo sapiens
  misc_feature 89, 104, 212, 217, 228, 273, 333, 335, 366, 492, 538, 550,552, 572, 614, 621, 622, 630, 637, 649, 662, 664, 665, 669,673, 678, 688, 699, 705, 708, 710, 711, 718, 719, 730, 731,737, 739, 756, 757, 758, 760, 764, 765, 766, 770, 771: n = A,T,C or G
  misc_feature 780, 781, 782, 784, 790, 791, 798, 808, 813, 815, 833, 836,837, 849, 855, 857, 858, 860, 863, 871, 873, 885, 886: n = A,T,C or G
gtaatacgactcactatagggcgaattggagctccaccgcggtggcggccgcccgggcaggtacttttttttttttttttttttttttnacttttctttctgtnggaaacaaaagagttgtcttaatttttaatctgaattctgattatacaagtaaattcatcacagttattcagaccatttaaataggatcataaacacattcagcattntgctnttgcccaaggngtcaggcaccatgctagagccccacaatgtcaccctccaagtctnatagcaaatgcagatgagactttttgcattgattatgaagccttctatgacatctgcttnanaaccctaaagctgcccatgcccacctagagngacctaaacctcctagtatctgccaccataaatgggttcgccacctgcctgcgattcccaggccagctgaatgctgacctgtggaagctgaccatgaacatcatcccattcccctacctgcacttnttcatgcctggctttgccccactgaccagccagggcagtcaagcantacctcggccgntntaaaactagtggatcccccnggctggggggaatttcgatatcaaagcttattgaaaccgccnacctcgnngggggggnccgggancccaactttttntttccttttaagngnngggntaanttggngccctttggncggaaaaaatngggcanaancnnggtttcnnggggggaaaanntgggtntnccctttcaaatttcccnnnanaaannnaaannccggggggnnntnaaaaanntgaaaancccggggggnccctntnggggggggcccccccccncannaatttggggggnggggcncnnanggnccgttttnanggggggaaaaann

SEQ ID NO: 6350 - DNA, 979 bp, Homo sapiens
  misc_feature 1, 2, 5, 12, 14, 323, 324, 325, 326, 327, 328, 329, 330,331, 332, 333, 334, 336, 337, 338, 339, 340, 341, 343, 344,346, 348, 349, 353, 354, 355, 356, 357, 358, 359, 360, 361,363, 364, 365, 366, 367, 368, 371, 372, 373, 374, 380: n = A,T,C or G
  misc_feature 381, 382, 383, 384, 386, 387, 388, 389, 390, 391, 392, 393,395, 396, 397, 398, 399, 402, 403, 404, 405, 406, 407, 408,411, 412, 413, 414, 415, 422, 425, 427, 428, 432, 433, 434,435, 436, 437, 438, 439, 440, 441, 442, 443, 444, 445: n = A,T,C or G
  misc_feature 449, 450, 451, 452, 453, 454, 455, 457, 458, 459, 460, 461,462, 463, 464, 465, 466, 467, 469, 471, 472, 473, 474, 475,476, 477, 478, 479, 480, 481, 482, 484, 485, 487, 488, 489,490, 491, 492, 493, 494, 495, 496, 497, 498, 500, 502: n = A,T,C or G
  misc_feature 503, 504, 506, 507, 508, 509, 510, 511, 512, 513, 514, 515,516, 517, 518, 519, 520, 521, 522, 523, 524, 525, 526, 527,528, 529, 530, 531, 532, 533, 534, 535, 536, 537, 538, 539,540, 541, 542, 543, 544, 545, 546, 547, 548, 549, 550: n = A,T,C or G
  misc_feature 551, 552, 553, 554, 555, 556, 557, 558, 559, 560, 561, 562,563, 564, 565, 566, 567, 568, 569, 570, 571, 572, 573, 574,575, 576, 577, 578, 579, 580, 581, 582, 583, 584, 585, 586,587, 588, 589, 590, 591, 592, 593, 594, 595, 596, 597: n = A,T,C or G
  misc_feature 598, 599, 600, 601, 602, 603, 604, 605, 606, 607, 608, 609,610, 611, 612, 613, 614, 615, 616, 617, 618, 619, 620, 621,622, 623, 624, 625, 626, 627, 628, 629, 630, 631, 632, 633,634, 635, 636, 637, 638, 639, 640, 641, 642, 643, 644-978: n = A,T,C or G
nnttngacatantntgtggctgattggagctccaccgcggtggcggccgaggtacgcggggggcgccattttgtctcggcagcggtggccgtagctccatcgcattttatgtttctggcgagaagggaacggagttttcatcaggtagattggtttttgtgcggccgctctagaactagtggatcccccgggctgcaggaattcgatatcaagcttatcgataccgtcgacctcgagggggggcccggtacccagcttttgttccctttagtgagggttaattgcgcgcttggcgtaatcatggtcatagctgtttcctggannnnnnnnnnnncnnnnnncnntntnnaacnnnnnnnnncnnnnnnctnnnngaattnnnnntnnnnnnnntnnnnnccnnnnnnnctnnnnnggggggnccngnncccnnnnnnnnnnnnnntttnnnnnnngnnnnnnnnnnncncnnnnnnnnnnnnanngnnnnnnnnnnnntncnnngnnnnnnnnnnnnnnnnnnnnnnnnnnnnnnnnnnnnnnnnnnnnnnnnnnnnnnnnnnnnnnnnnnnnnnnnnnnnnnnnnnnnnnnnnnnnnnnnnnnnnnnnnnnnnnnnnnnnnnnnnnnnnnnnnnnnnnnnnnnnnnnnnnnnnnnnnnnnnnnnnnnnnnnnnnnnnnnnnnnnnnnnnnnnnnnnnnnnnnnnnnnnnnnnnnnnnnnnnnnnnnnnnnnnnnnnnnnnnnnnnnnnnnnnnnnnnnnnnnnnnnnnnnnnnnnnnnnnnnnnnnnnnnnnnnnnnnnnnnnnnnnnnnnnnnnnnnnnnnnnnnnnnnnnnnnnnnnnnnnnnnnnnnnnnnnnnnnnnnnnnnnnnnnnnnnnnnnnnnnnnnnnnnnnnnnnnnnnnnnnnnnnnnnnnnnnnnnnnnnnnnnnnnnnnnnnnnnnnnnnnnnnnnnnnnnnnnnnnnnnnnnnnnnnnnnnng

SEQ ID NO: 6351 - DNA, 896 bp, Homo sapiens
  misc_feature 2, 3, 4, 576, 620, 630, 645, 649, 664, 682, 722, 732, 737,745, 750, 751, 758, 770, 789, 796, 804, 812, 814, 818, 842,843, 848, 849, 854, 863, 867, 868, 873, 885: n = A,T,C or G
gnnncgccgtaatcgactcactatagggcgaattggagctccccgcggtggcggccgcccgggcaggtaccttccccgagatggtggataaacttatcttgctggacacgccgctctttctcctggaatcagatgaaatggagaacttgctgacctacaagcggagagccatagagcacgtgctgcaggtagaggcctcccaggagccctcgcacgtgttcagcctgaagcagctgctgcagaggttactgaagagcaatagccacttgagtgaggagtgcggggagcttctcctgcaaagaggaaccacgaaggtggccacaggtctggttctgaacagagaccagaggctcgcctgggcagagaacagcattgacttcatcagcagggagctgtgtgcgcattccatcaggaagctgcaggcccatgtcctgttgatcaaagcagtccacggatattttgattcaagacagaattactctgagaaggagtccctgtcgttcatgatagacacgatgaaatccaccctcaaagagcagttccagtttgtggaaagtcccaagcaatcactgtgtncacatgagcgaaccccagcaccgtggccagtatcataagcttcntttttacagngcacacacatgcttncagnccagctgtagctttnggccctggaactttgaanaccctagtgcttcccaaactcaaaaactggggacttttangttcttgagnccccncaaacaanggccnngggattnggtgggggacanggccttaatttttttttgngggcccncccctttnggattggntnttcngggggaaaggggccgggaattccnnctttnnaacantttttgggncctnnaaaanggggaaaaaaantttggggttct

SEQ ID NO: 6352 - DNA, 612 bp, Homo sapiens
  misc_feature 6, 543, 588, 594: n = A,T,C or G
gtaatncgactcactatagggcgaattggagctccaccgcggtggcggccgaggtacataaatccattggcctgagaaccacacccttatcccccaaagcagctgcaacaagcactgcccaaagagagtctgggcttacatatgcctaaccctgcccctacctgatggtctttctttaccaaccctggtagccaaaggcaaagaacatattctcctgggagctctaggacctcacccatagcctgattatccctatgctaccacagctgatgctcttttgaaagcacaatatcctggaaggatgccaaccagcacaaaactagtgcaataaacaaaactacaactaaggaccctcagagagtcaatttcactcccctaccacctccatcaagaacaggtgctgctattcgtggctgagaaacctgaagacagttcacatcacaggatactgtgtagacaccccctagtacgctctagaactaagtggatcccccgggctgcaggaattcgatatcaagctttatcgataccgttgacctcganggggggggccccggaccccagctttttggttccctttaaggggangggttnaattgccccgcctttggg

SEQ ID NO: 6353 - DNA, 584 bp, Homo sapiens
  misc_feature 53: n = A,T,C or G
gactactatagggcgaattggagctccaccgcggtggcggccgaggtactttntttttttttttttttttttttattttaacagtctaatgataccttttgctccaccttcaaaaactgagccagttcttccacagttaggtgatctttcttgtcactgtagctcaaaagtaacaaataaaggtctcgtctcaaagacatcattttgtaaaaaacacagaactcttcaaatgtcaaagttccctgattctcatctgtgtcggcttcctgaaacatttgtctgacttttcttcggggcagattaacattcagtttatgcatcagctgatgtatctcttcaatattcagcaagccgtcaccattcttatcagcttcctcaaaggtctgcttcacccattggtcatgggtcctctgccttttggcaagggagtcttcatcactgatgccagccatcaggtacctgcccgggcggccgctctagaactaagtggatcccccgggctgcaggaattcgatatcaagcttatcgataccgtcgacctcgagggggggcccggtcccagcttttgttccctttagtgaggg

SEQ ID NO: 6354 - DNA, 584 bp, Homo sapiens
  misc_feature 584: n = A,T,C or G
actatagggcgaattggagctccccgcggtggcggccgaggtacaaggcaaatactgctttatttttccttcagctttctcaagcagaagaagtctctcactatagccaccacagctggcaatatgctgggtctcacctggagccagaaagtctcagagtctcacccaaggcccatggtatactacttggatattgctgctggttattcaaggcccaagggatctttagtcagcaggtgacgtattccgcaaggactgggtcctttccttcatggcagcaggttcccttctggcccagggtgtttctaaaaatggtttctgggagctaggaatccccactcatcaaagaggacttcaatgcaagacaaagtcctctttactcttctccctcctctccccaagaggaaggaagggtctcttttggagtcaggagctgcattccctggggttggggaaggggtaagtacctgcccgggcggccgctctagaactaagtggatcccccgggctgcaggaattcgatatcaagcttatcgataccgtccgaccttcgagggggggcccccgggtaccccagctttttn

SEQ ID NO: 6355 - DNA, 578 bp, Homo sapiens
  misc_feature 557, 570: n = A,T,C or G
ctatagggcgaattggagctccaccgcggtggcggccgaggtacacgatggcttccaggaacaggctcaccaatgaatgaaggagaatgaatacaatgatcatgatgaaaaaagatttaaatttcttgttgatttggcataaaatgttgaaaccaacaaagacaacataaaactcagaacaggtccctgtgatgagagcatcaaagcctcgcgtggtcaccagtgtggcccatccaagaagcatgtaaggtcaggtcccacatgagaaaacttgacacagccatgccctgaactcttcctgctaccatatcaaagaaatttgattgaagtttgttttctctatagaatatggcattgcaaaatccttgttgtacctgcccgggcggccgctctagaactagtggatcccccgggctgcaggaattcgatatcaagcttatcgataccgtcgacctcgagggggggcccggtacccagcttttgttccctttagtgagggttaattgcgcgcttggcgtaatcatggtcatagctgtttcctgtgtgaaattgttatncgcttcacaattncacacaac

SEQ ID NO: 6356 - DNA, 591 bp, Homo sapiens
  misc_feature 164, 189, 221, 336, 367, 372, 434, 591: n = A,T,C or G
actactatagggcgaattggagctccaccgcggtggcggccgcccgggcaggtactttttttttttttttttttttttttttgggggttcacatttattgtaacttggaagcccacccttcttcctactcctggagctgtcgtccccaagggctcaggaattanccttgctccacagcaaacagcccanaggccccacctgggcaaaagcaaacaaaacanatacgttcctttccggcaggtgcagatgctctgcccaggcctgcggaagccagctccggtctgtgtgtaaatcctccccaggacttccggcccaccagctccacccgcgtacctnggccgcccgggcaggtactttgcttatttgngaaanaaaaggaatttgaatccaggtctgggcaccatcaaagcctgagggcttccccgtgttgctgngtaaatcagctaacttaccaacctgggaggttggtgctatgctgtttccattttattatggagaaggcaagaaggtaagtggcttgcctgggatcgcatagccagtagtttgatacagtcaggactaaaaaactagggctggctccaaggctgggcn

SEQ ID NO: 6357 - DNA, 927 bp, Homo sapiens
  misc_feature 161, 169, 177, 285, 320, 337, 339, 349, 369, 374, 385, 406,412, 417, 421, 426, 432, 447, 451, 452, 453, 456, 459, 468,469, 480, 481, 484, 485, 498, 500, 505, 508, 511, 518, 522,523, 525, 526, 527, 536, 537, 544, 545, 546, 550, 551: n = A,T,C or G
  misc_feature 552, 557, 559, 561, 565, 566, 568, 571, 575, 578, 582, 583,584, 585, 586, 587, 588, 594, 595, 596, 597, 598, 599, 600,601, 602, 607, 608, 609, 613, 614, 615, 617, 619, 624, 625,634, 635, 640, 643, 645, 649, 650, 653, 659, 660, 661: n = A,T,C or G
  misc_feature 662, 668, 669, 672, 674, 677, 678, 685, 687, 689, 692, 693,694, 695, 696, 697, 699, 701, 702, 703, 704, 707, 711, 712,714, 718, 722, 725, 727, 729, 731, 733, 736, 737, 744, 745,746, 750, 752, 754, 755, 762, 764, 765, 766, 767, 777: n = A,T,C or G
  misc_feature 780, 784, 787, 789, 790, 795, 796, 797, 800, 802, 804, 807,808, 811, 812, 814, 818, 822, 823, 824, 825, 827, 828, 834,836, 839, 842, 854, 855, 857, 858, 860, 861, 863, 869, 871,873, 874, 877, 878, 880, 882, 883, 886, 887, 888, 891: n = A,T,C or G
  misc_feature 894, 895, 896, 899, 902, 903, 906, 912, 913, 914, 916, 924,925: n = A,T,C or G
ggtttgacgccgtaatacgactactatagggcgaattggagctccccgcggtggcggcccgaggtacattacccttaggctgaccattcccttgcgggggcgcaaaactgctttgaggaaatgtccccaggaggaataaactagaggacgcacctgctatntcaccatnctatgganaatcagctaatgaagtggtggcagaagcttggcccgtgtgagtgccccagggtaaaagtctctcttctgtccagtccagagcagagacttctcccccgtggacagcancctgccaccaagactcaagcaacgtaagagtcatntccccaaactggctgtnanaagcaagaancacccagcttcctaaggcanaaganttggaaatctnacagtggcctgcatttacgtnactgcncgggnggcnctctnaactantggatccccggctgnaggnnntcnaantaaagctanngaaaccttcannccnnaagggggggcccngnacacnagnttnaggatancttnnannngtggatcanntcacccnnnagcnnntgatntnantatnngnatntcantanagannnnnnnaatacnnnnnnnnnataannnattnnntnanctatnnaatcatttnnaacantantnatanncangtgccnnnnattatnntantnagnnaatacanananatnnnnnntntnnnngtnatanntnagtnatanaanantntnanacnnaagtgtnnnttantnanntatccancnnnnatttactgtnatntagntananncatcnnnatnantntcnntannantatnaaannnntnnatctancnctncanaaaatattaaannannanntntacttnantnnttnntntnnatnnnatnccnnntanacnnaanatctcnnnantttatatnnca

SEQ ID NO: 6358 - DNA, 855 bp, Homo sapiens
  misc_feature 466, 471, 489, 510, 511, 518, 520, 524, 526, 533, 534, 535,545, 546, 547, 550, 554, 555, 557, 559, 560, 561, 562, 563,564, 566, 570, 571, 573, 574, 576, 578, 579, 581, 587, 590,591, 597, 598, 599, 601, 602, 603, 604, 605, 608, 612: n = A,T,C or G
  misc_feature 613, 614, 616, 620, 622, 623, 624, 625, 626, 633, 635, 636,638, 639, 640, 641, 644, 645, 647, 648, 649, 650, 652, 654,655, 656, 657, 658, 659, 661, 662, 663, 665, 666, 667, 668,670, 671, 672, 674, 675, 676, 677, 678, 679, 684, 686: n = A,T,C or G
  misc_feature 687, 688, 690, 692, 693, 694, 695, 696, 697, 699, 700, 701,702, 703, 704, 705, 706, 707, 708, 709, 710, 711, 712, 713,714, 715, 716, 718, 719, 720, 721, 722, 723, 724, 725, 726,727, 728, 729, 730, 732, 733, 734, 735, 736, 737, 738: n = A,T,C or G
  misc_feature 739, 740, 741, 743, 744, 745, 746, 747, 748, 750, 751, 752,753, 754, 755, 756, 758, 759, 760, 761, 762, 763, 764, 765,766, 767, 769, 770, 771, 772, 773, 774, 775, 777, 778, 780,781, 782, 785, 786, 787, 788, 789, 790, 791, 792, 793: n = A,T,C or G
  misc_feature 795, 796, 797, 798, 799, 800, 801, 802, 803, 804, 806, 807,808, 809, 810, 811, 812, 813, 814, 815, 816, 817, 818, 819,820, 822, 823, 824, 825, 826, 827, 829, 830, 831, 832, 833,834, 835, 836, 837, 838, 839, 840, 841, 842, 843, 844: n = A,T,C or G
  misc_feature 845, 848, 849, 850, 851, 852, 855: n = A,T,C or G
tggctatcactacttagggcgaattggagctccccgcggtggcttccagctcaatacttccatttattaggaagcacattaaccatttctatagcatgatttcttcaagtaaaaggcaaaagatataaattttataattgacttgagtacctcggccgctctagaactagtggatcccccgggctgcaggaattcgatatcaagcttatcgatacccgtcgacctcgagggggggcccggtacccagcttttgttccctttagtgagggttaattgcgcgcttggcgtaatcatggtcatagctgtttcctgtgtgaaattgttatcccgctcacaattccacacaacatacgagccgggagcataaagtgtaaaagcctggggtgcctaatgaggtgagctaactcacattaattgcgttgcgctcactgccccgctttccaagtcgggaaacctgtcgtgccanctgcnttaatgaatcggccaacnccccgggagaggcggtttgcnnattggcncnattncnctttctnnnttactgactnnntgngctnngncnnnnnngnttgnngnnancnngntcaacnccnnacaggnnngnnnnnacngggnnncncaanannnnnggggttncnncnnnnaannannnntngnnnnnnannncnnnnannngnnnnnnaaccngnnnangnnnnnntnnnnnnnnnnnnnnnnnngnnnnnnnnnnnnnannnnnnnnnnannnnnngnnnnnnnannnnnnnnnnannnnnnngnntnnnagnnnnnnnnnannnnnnnnnnannnnnnnnnnnnnnntnnnnnnannnnnnnnnnnnnnnnnaannnnnacn

SEQ ID NO: 6359 - DNA, 601 bp, Homo sapiens
  misc_feature 2, 7, 20, 129, 130, 131, 153, 161, 170, 171, 175, 177, 219,225, 226, 227, 229, 233, 235, 241, 242, 245, 249, 259, 265,269, 271, 275, 282, 283, 284, 285, 293, 302, 303, 304, 306,309, 311, 314, 315, 316, 321, 342, 344, 345, 360, 361: n = A,T,C or G
  misc_feature 364, 377, 378, 383, 385, 392, 394, 401, 402, 410, 412, 414,417, 421, 424, 429, 432, 434, 435, 436, 437, 438, 439, 440,441, 452, 454, 460, 461, 462, 463, 464, 467, 474, 479, 487,489, 490, 492, 494, 499, 500, 502, 505, 511, 513, 518: n = A,T,C or G
  misc_feature 519, 521, 522, 527, 529, 532, 536, 540, 545, 546, 547, 549,550, 555, 560, 561, 565, 571, 574, 580, 585, 588, 592, 594,595, 597, 598, 599, 601: n = A,T,C or G
gntaagncccgaaacgactnctatagggcgaattggagctccccgcggtggcggccgcccgggcaggtacaagagtcttttgcttcctcccacccctagggggaaaaactgctttgtgctttgggaagnnngggctctgaaacccggggacanaaaaactnttttttttnntatngngggagccgggaggatgggctgcagcctgtggaggagggtttnagaggnnnanaagncntttttnnctntagngcctgatatnccacangcangntganagaggtnnnnataagtanagctgttgnnncntgntnttnnnatccnttccatctgctactatttacntnnatagttaaaaattannccnctcttttaattcnntatantntctactncnaagttcnntaatttgntncnatnaatnatntatanatntnnnnnnnnaaaatttaatntnaatctnnnnnaanctatttnatatnttaatacnannanantattnncnccntacttnanatatnncnntggananttncttntttntttcnnnannctttntatcnncctnttaccntantctacnacacntantatngnntnnntn

SEQ ID NO: 6360 - DNA, 479 bp, Homo sapiens
  misc_feature 2, 3, 4, 220, 227, 229, 231, 232, 241, 249, 268, 271, 272,323, 325, 389, 391, 425, 443, 467, 470, 477: n = A,T,C or G
gnnnatccgatcactactatagggcgaattggagctccccgcggtggcggccgcccgggcaggtacatttttcttttttttttttttttgtggatggggacttgtgaatttttctaaaggtgctatttaacatgggaggagagcgtgtgcggctccagcccatcccgctgctcactttccaccctctctccacctgcctctggcttctcaggccttttgnttttccnancnntttcctttngaaacccnatcctccacaagctgcagnccnntcctcccggctccctcctagtctgtcctgcgtcctctgtccccgggttttnanagaacaacttcccaaagcacaaagcagtattttccccctaggggtgggaggaagcaaaagactntntacctcggccgctctagaactagatgggatcccncgggctgcaggaaattcngatatcaagcttatccgataccgnccnacctctngg

SEQ ID NO: 6361 - DNA, 493 bp, Homo sapiens
  misc_feature 2, 3, 4, 9, 11, 83, 109, 115, 118, 120, 121, 126, 130, 133,135, 142, 155, 157, 165, 170, 176, 191, 196, 221, 226, 229,230, 231, 232, 237, 238, 239, 240, 242, 269, 274, 300, 370,383, 385, 398, 399, 408, 434, 440, 443, 452, 462, 470: n = A,T,C or G
  misc_feature 481, 484, 489: n = A,T,C or G
gnnnaagcnancatacttagggcgaattggagctccccgcggtggcggccgcccgggcaggtactttttttttttttttttgntttttttttttttttttttttttagnatcganctntnntaatngganggncnattttgnggaggaaaaaaananattttttnttttntgttgngagccgaggcacggntgcanaagcgtgtctgaggtgtccgggggnggggnggnnnnacccnnnncnctgggactatatcacccgtgcctgggngaccngcacccgcgtcaggatgcaggcaganccctgcaaaaagtgtctaaaattcacactcctcttatggagggacctcgatcggttttaggatagaagcnccaggggaccccncnaacggggtcagtnnaaacagcancccttattttgcacactgggaggggngtgacnccnggaaaaccncaatttttgnctttcacngggggccactntanccttnggcg

SEQ ID NO: 6362 - DNA, 479 bp, Homo sapiens
  misc_feature 3, 13, 204, 210, 215, 223, 233, 359, 379, 383, 400, 401,408, 410, 423, 424, 426, 428, 441, 469, 475: n = A,T,C or G
aancctatcactnctatagggcgaattggagctccccgcggtggcggccgcccgggcaggtaccacatgcctgtaatcccagctacttggaagctgaggcaggagaatctcttgaacttggaaggcggaggttgcagtgaaccaaaatcacgccacagcactccagcctgggagacagagcaaggcttagttttaaaaaaaaancaaatntttgnggcgattntgttttatanggaaaatattcagaattggtaagtccataaggacaaaaaccagattgacaggggctgagatgaaaaagagaatggggtatggggagtgacagcttgataggtattgggttttgttggggggagatnatgaaaacatttggaactangaanaatttacctgacatcanngagttcnanaccacttaaactnntnancttgggtgacatnaattgagactttcttctttataaaaaanaatgtnattt

SEQ ID NO: 6363 - DNA, 471 bp, Homo sapiens
  misc_feature 2, 3, 5, 10, 18, 71: n = A,T,C or G
gnnanagccnaaacactnctatagggcgaattggagctccccgcggtggcggccgtgtcgtcagatgtcanggctgctcagctccatgtaggctgtgtctgtagatgtgtcctcggtcatgatgactctgccctggaacttctgtgcgtagattgtttcactatctttaggatcaaaacctcccatccactcaagcccttttccaggagcctgtcgcacccaagggcatggataatttcaagtgaggggtgtatcccggaaaccttgcaggagaccttcactgaggccccaggcttcttcacctcagccccagactgtacctcggccgctctagaactagtggatcccccgggctgcaggaattcgatatcaagcttatcgataccgtcgacctcgagggggggcccggtacccagcttttgttccctttagtgagggttaattgcgccgcttgggcgtaatcatggtcat

SEQ ID NO: 6364 - DNA, 495 bp, Homo sapiens
  misc_feature 2, 3, 4, 5, 130, 132, 153, 159, 163, 167, 214, 233, 238: n = A,T,C or G
gnnnnagctatcactacttagggcgaattggagctccccgcggtggcggccgcccgggcaggtacgcggggagtgccgtaatggcgttcttggcgtcgggaccctacctgacccatcagcaaaaggtgtngnggctttataagcgggcgctanaccacntttngtcntggtgcgtccagagagacaaataccgatactttgcttgtttgatganaagcccccggttttgaaanaacantaagaattgaaaagggatattgggcgaaggcccgccccagcttgcttgaaaggaaggcccgagggaagaaattctggtaccctcggcccgctctagaactagtggatcccccgggctgcaggaattccgatatcaagcttatcgataccgtcgacctcgagggggggcccggtacccagcttttgttcccttttagtgagggttaattgcgcgctttggccgtaatcatggtcattagctgtttcctgtgtgaaaaa

SEQ ID NO: 6365 - DNA, 489 bp, Homo sapiens
  misc_feature 2, 161, 224, 235, 241, 252, 255, 257, 276, 279, 366, 423,462, 480, 485: n = A,T,C or G
gntaagtgcccgatcgctactatagggcgaattggagctccccgcggtggcggccgaggtacgcgggcaactgtgttgaaatcaaacctgccgcaacagaaattgtttttatttcatgtaaaataagggatcaatttcaaaccctgcttatgatatgaaantattaaaacctagtctattgtagttttattcagactggtttctgttttttggttattaaaaangggtttccctntttttnggcttattaanaananactaaaatcaataaaaatnaangtacctgcccgggcggccgctctagaactagtggatcccccgggctgcaggaattcgatatcaagcttatccgataccgtcgacctngagggggggccccggtacccagcttttgtttccctttagtgaagggttaattgcgcncttggccgtaatcatggtcattaggcttgttttcctgtngtgaaaattgttatcccnctttnacca

SEQ ID NO: 6366 - DNA, 833 bp, Homo sapiens
  misc_feature 3, 21, 35, 43, 54, 88, 91, 107, 127, 144, 147, 168, 185,492, 507, 512, 515, 536, 552, 566, 579, 584, 586, 588, 610,622, 629, 631, 632, 638, 643, 647, 655, 660, 661, 665, 672,678, 685, 704, 705, 708, 710, 716, 719, 721, 729, 733: n = A,T,C or G
  misc_feature 736, 747, 748, 751, 753, 760, 763, 765, 766, 794, 795, 798,809: n = A,T,C or G
ganttggagctccaccgcggnggcggccgcccggnctggtacncggggacattnagaggtgagcccagagcgggtcaagcggactggnganaacttctgaggatgtncatgtccaggagcagccccncgccctgtatggtcggngtntagagcctcacagcaactaanaccaacccagctctcanaagaaggaatgtcaaaatgtcatgttcaattttacattcagtgcctggaatcttttcttcacaattgaaatgaaatgtgctgaaggaggtgaatccatgcattaatcttcagctcacaaaggaaatactacataagaagcatgaccacagactcaagacggacataattggattttttttgccatggcctggaaagaaaggtacctcaggccgctctagaactaggtggatcccccgggctgcaagaattccgatatcaagcttatcgataccgtccgaccttctagggggggccccgggtaccccngcttttgttcccttntagtnganggttaaatttgccgcgccttngccgttaatcatgggncataagcttgtttnctgtgtgaaaatngttantncncttcacaaatttccacaccaanattccgagcccnggagccntnnaagtgntaaancccngggggtgnccttnntgangtgagcntaactnccatttnattggggttgcgctcactnnccngntttttnagntntgggaaanactnccngccccagctgnnttnanaaatttnggncnnacaccccgggggagaagggggggttttnnttntttttgtggcnccccccccccccccccccccccct

SEQ ID NO: 6367 - DNA, 850 bp, Homo sapiens
  misc_feature 414, 514, 518, 531, 595, 612, 613, 618, 625, 629, 640, 656,684, 697, 720, 733, 739, 747, 749, 750, 753, 774, 776, 786,806, 807, 814, 816, 827, 836, 839, 844, 849, 850: n = A,T,C or G
actcactatagggcgaattggagctccaccgcggtggcggccgcccgggcaggtacttttttttttttttttttgagacggagtctcgctctgtcacccaggctggagtgcagtggcgggatctcggctcactgcgagctctgcctcccgggttcacgccattctcctgcctcagcctcccaagcagctgggaccacaggcgtccgccactacgcccggctaattttttgtatttttagtagagacggggtttcaccgttttagccgggatggtctcgatctcctgacctcgtgatccgcccgcctcggcctcccaaagtgctgggattacaggcgtgagccactgcgcctggcccttgaaaaaatcttaaattcctcagccacagcatgttacataccttttccagtgttgtntgcatggttttatttacaagatttttgaaaagacaaaaaataaagtcctgacaaacggatcaatgaatgctaggggtttgaaggcgggggcaggggcgtntctnttaagagacagcncgagggaagattttggggatgggttgaacctggtctggatcttggattgggggggatgataccnggaatcttttaccatgnngtttnaaaatgntttnggaaggtggtntacccaaaaaaatggncaaagttttacctgggcctgggtaaatnttaaaaaccaaanttttaaaaaaattttttaaaacnaggttttaaaaanggcttntttttttntnnaanaaaaacattgaaagggggccntnggttttcccnaaagggggggaaaatttttnntgggaancnaaaaccccttnttttttaanggnaaaanaaaann

SEQ ID NO: 6368 - DNA, 799 bp, Homo sapiens
  misc_feature 590, 649, 704, 715, 727, 741, 747: n = A,T,C or G
gcgtaatacgactcactatagggcgaattggagctccaccgcggtggcggccgaggtacgcgggattgtcagtgtcattataaaatagaggagatagttttaaatgattgatatttaaaaggctaggaagatgccaattgaccaattaagtttatcaaggtcataaagggactagaaagtatatgtgggttaaactgcagacagtcaatactcatcattctcagattttgtatttacaacttcacctactcactaaaatgtatttgtagccctaaaatcaatgctcagggcacttttgcaggcattcccagatgtgcagagcagtgaaaaatgcctgtcaccaatgtgcatgttcctggcaaggtcaaacaaggtgactctgctctcttgtttcagctctaatgccgtaaatactcatcctttttgaggtctactgcatgccatgttttttttgcatttttgtgcattttgttggtgagtctactgttgagatggcccacaagcatagagccccagtgctgtctatgttcctaagtgcaagaaaactatgacgtggcttatggagaaaatatgtgtgttaaagaagcatncttcaggcctgagttacagtgctattggccatgagttcaatgttagggaattggcagtntacattaaataagaggctttaaacagaaacatgcataaacaaggtatatattggncattttgttgnaaaagttgcgancagcaatgtaaccngaatangttttggcctgatgcccaccgcaaggtcaatacacccaagacactggattgc

SEQ ID NO: 6369 - DNA, 812 bp, Homo sapiens
  misc_feature 436, 583, 613, 622, 650, 662, 667, 675, 677, 678, 686, 687,705, 710, 713, 720, 722, 751, 752, 756, 762, 763, 765, 766,770, 771, 778, 782, 783, 788, 792, 809: n = A,T,C or G
ctatagggcgaattggagctccaccgcggtggcggccgcccgggcaggtactggccacgactgcatgcccgcgcccgccaggtgatacctccgccggtgacccaggggctctgcgacacaaggagtctgcatgtctaagtgctagacatgctcagctttgtggatacgcggactttgttgctgcttgcagtaaccttatgcctagcagcatgccaatgtaagtgccttcagcttgtttgggggagactgggtatagaggttagatgggagggcaccctgccctgaaaaggaaaacctgtaacctgaattccaggtacctcggccgctctagaactagtggatcccccgggctgcaggaattcgatatcaagcttatcgataccgtcgacctcgagggggggcccggtacccagcttttgttccctttagtgagggntaattgcgcgcttggccgtaatcatggtcatagctgtttcctgtgtgaaattgttatccgctcacaattccacacaacataccagccgggagcataaagtggtaaagcctggggtgcctaatgagtgagctaactcacattaattgngttgggctcactggccgctttcagttcggnaaactgtcngccagctgcattaattgaatcgggccangcgccggggagnaggcnggtttgcntnnttggggcnnctttttagttttttttgnccccnccnccccccncngggtttggttgttttggcttccggccganncggntttttnncnncccnnaaaaggncggnnaattncggntattcccacaaaattanagt

SEQ ID NO: 6370 - DNA, 820 bp, Homo sapiens
  misc_feature 640, 642, 643, 644, 658, 668, 675, 687, 697, 725, 726, 727,728, 745, 755, 757, 779, 781, 790, 804, 816: n = A,T,C or G
gactcactatagggctgaattggagctccaccgcggtggcggccgcccgggcaggtacagccaacatatttctctttttggccaaaccctgaccacatgccacacgcagattcactgtgccatcagcaagattgacattgaaaaagatatccaggctgtaatggaagaaactgcaattttatctacagaaaacaaatctgagttcctgttaacggattactttgaagaagatcctaacagtgcaatggataaagagagacgaaagtctttactaaaaccaaaattattgagactgcagagagacattgaaaaagcctcaaaagacaaggaaggcctggaacgaatgcttaaaacgtacctcggccgaggtacgcggggagaacagtgccgtgcttttccacagaaggttagaccctgaaagagatggctcagcaccacctatggatcttgctcctttgcctgcaaacctggccggaagcagctggaaaagactcagaaatcttcacagtgaatgggattctgggagagtcagtcactttccctgttaatatccaagaaccacggcaagttaaaatcattgcttggacttttaaaaacatctgttggcttatgtaacagtaggagacttaaaaaacaaggnannngtaagttactgccncccccccccncctattntgaaagggatanatggctttangttccgaactacaaattttgggtcattnnnngattttgaggatgggangaaggagggngnattcaaagggagaacataaatncncagggctgntccctacacccccncccaagcgcttnaaat

SEQ ID NO: 6371 - DNA, 885 bp, Homo sapiens
  misc_feature 8, 16, 102, 123, 400, 422, 423, 428, 434, 449, 522, 523,524, 530, 532, 537, 555, 557, 583, 614, 621, 623, 635, 652,661, 681, 683, 685, 688, 689, 693, 701, 706, 707, 718, 752,761, 782, 783, 784, 795, 809, 834, 836, 862, 869, 875: n = A,T,C or G
  misc_feature 876: n = A,T,C or G
ggtcactnactatcgnctactctactatagggcgaattggagctccccgcggtggcggccgcccgggcaggtaccgcgggtgattgcgccactgcactccanccttggcgacagactaagacnctgtctcaaaaaaacaaaaacgacaaaaaaaaacaaaacagaaaaaataaactaaggcaatgacagtccctggcaaatgctgggagggaggcagcagtggtcagggaaggtaaccctgaagcaggacttgtaaagtaaataagattgggaggccaaggtgggtggatcaccgaggtcaggagttcgagaccagcctggccaacataagtgaaaccccgtctttactaaaaatacaaaaaaattagccaggtgtggtggtgggtgcctgtagtcccangctacttggggaggctgaggcnngagantctcgnacccaggaggcggangttacagtcagctgagaccgcaccattgcacttccagcctgggtgacaagaacaagattccgtcccaatttannntaaaananttcangtcctcggcccgctctananctaagtgggatccccccgggctgcangaattccaatatcaagcttatctataccctncacctcnanggggggggcccngtacccagctttttggntccttttantgaagggttaaattgccccncntnggnntaantcatggtnataanntttttccctgngtgaaaatttgttatccccttcaccaatttccanacaaacatncccaacccggggagcattaannngttaaaacctnggggtgccctaatngagtgagcttacttacatttattgncnttgcgcttaactggccccctttccantcggggnaaactnntcgtgccct

SEQ ID NO: 6372 - DNA, 859 bp, Homo sapiens
  misc_feature 3, 5, 187, 264, 277, 295, 299, 308, 315, 319, 328, 333, 345,352, 359, 365, 367, 372, 383, 391, 402, 418, 420, 430, 435,442, 445, 451, 457, 469, 480, 494, 503, 524, 528, 557, 570,572, 574, 578, 587, 598, 599, 606, 608, 609, 618: n = A,T,C or G
  misc_feature 636, 637, 639, 640, 656, 659, 663, 665, 677, 680, 682, 684,691, 692, 693, 696, 708, 715, 718, 726, 729, 730, 731, 763,766, 771, 775, 798, 814, 821, 822, 823, 825, 828, 834, 835,843, 853, 856, 859: n = A,T,C or G
tgntnactccgtatacactactatagggcgaattggagctccacccgcggtggcggcccgaggtaccgcgggggagacacattcaagaggtgagcccagaaccgggtaaagtggactggggagaacttcggaggatgttcatgtccaggaacagccccccccctgtattgtccgtgtcttaaacctnacaagcaacttaaaccaacccaacttttaaaaaaaaggatgtcaaaatgtcatgttcaattttacattcaatgcctngaatcttttcttnacaattgaaatgaaatgngctnaaagagggngaattcnttcntttattttnaactnaccaagggaatncttcctnagaagcnagaccncngactnaataccgacanaattggantttttttgccnttgcctggaaaaaaangnaccttgcccnggccnggccgtnttnaaatangtgganccccccggcttncaaggaattcnattttaacttattnatacccgcnacccttagggggggggcccgncccnaattttttttcctttatgggggggtaaantcgccccttgggnanancatngggaaaaantgtttccctgnngaaattntnnttcccctcncaatttcccccaaatttnnanncccggagaattaaaangtnaaancncggggggcccantgngngngcccccnnncanttttttgggttngctcacngtncccttttnaannngggggaaaccttttttggcccccttttttttntanaattnccanccccccggggaaggagcgttttntttttggggccctttnccttttnnntnaanaaaaanntgggcccnggggtttggntgnggn

SEQ ID NO: 6373 - DNA, 850 bp, Homo sapiens
  misc_feature 651, 659, 668, 669, 670, 685, 710, 724, 775, 793, 794, 803,809, 811, 815, 847: n = A,T,C or G
gacactcactatagggcgaattggagctccccgcggtggcggccgcccgggcaggtaccgcggagattgaagtgctgcgccagcgggtgctgagaattgaaggcaaagacgaggaaattaagagagcagaggatctgtgtcgtctgatgaaggagaaacttgaagaggaagaaaacctcacccgggagctgaaatctgagattgagcggcttcagaaacgaatggctgaattagagaagctagaagaggccttcagcaggagtaagaatgactgtacctcggccgctctagaactagtggatcccccgggctgcaggaattcgatatcaagcttatcgataccgtcgacctcgagggggggcccggtacccagcttttgttccctttagtgagggttaattgcgcgcttggcgtaatcatggtcatagctgtttcctgtgtgaaattgttatccgctcacaattcacacaacatacgagccgggagcataaagtgtaaagcctggggtgcctaatgagtgagctaactcacattaattgcgttgcgctcactggccgctttccagtcggggaaacctgtcctgccagctgcatttaatgaatcggccaccccccggggagaagccggtttgcgtattgggcgctttttccntttcttgnttactgacnnncttgcgctcggtccntccggctgcggcgagccgtatcaantttactcaaaggcngtaatccggttatccccagaattaagggggataaccccaggaaagaacttntgagccaaaaggccctcnnaaggccctnaacccnanaaanggccccgttggttgctttttccaatagctccncct

SEQ ID NO: 6374 - DNA, 841 bp, Homo sapiens
  misc_feature 2, 6, 8, 477, 556, 563, 638, 640, 666, 712, 759, 767, 771,802, 814, 823, 825, 834: n = A,T,C or G
tnactnanacgctaatacactactatagggcgaattggagctccccgcggtggcggccgaggtacgtgactggttacaatcactacctgtgaaggtcaacgtgcgtgggctcatgtgccaagccccagaaaaggttcgtgggatggctattaaggatctcaatgcagaactgtttgattgtaaggacagtgggattgtaagcaccattcagataaccactgcaatacccaacacagtgtatcctgcccaaggacagtggccagctccagtgaccaaacagccagatattaaggaaccccaagctcactaaggatcaacaaaccacagggagtccctcaagaaaaacaattacaattactgtgaagtctgtcacctctgataccattcatatctcttggaaacttgctctacctatgactgctttgagactcaactggcttaaactgggccataacccggcatttggatctataacanaaacaattgtaacaggggaacgcagtgagtacctgcccgggccggccgctctagaactagtggatcccccgggctgcangaattcnatattcaagcttatcgataccgtcgacctcgagggggggccccggacccaacttttggtccctttaatgaggggntnattgccccctttggcgtaatcatggncataagctggtttctgggtgaaaattgtattcccgttcacaaattncccacaacataccaacccggagccttaaagtgtaaaacctggggtgnctaatgantganctactacattaattggggtgggcttacttgnccgttttcagtngggaaactntntgccaactnttatgaa

SEQ ID NO: 6375 - DNA, 897 bp, Homo sapiens
  misc_feature 351, 376, 378, 391, 428, 442, 447, 451, 452, 453, 546, 553,566, 574, 579, 609, 622, 625, 648, 650, 660, 670, 674, 679,684, 687, 695, 698, 703, 705, 723, 730, 735, 740, 743, 747,749, 752, 757, 758, 761, 762, 764, 767, 769, 788, 798: n = A,T,C or G
  misc_feature 800, 810, 813, 817, 824, 830, 831, 834, 835, 836, 840, 841,842, 848, 849, 854, 860, 865, 870, 876, 878, 879, 884, 885,890, 891: n = A,T,C or G
ggcgaattggagctccaccgcggtggcggccgcccgggcaggtacctggctggggaggccaggctgacggtggtgccagtgtctgaggaggaggtgagggaggccctggtgcgtagtggctacaaggtccgggacctccgcacctatatcatgcctgccaccttagacaggcgtagatgatgtcaaagggccgtcttcttcgcctgggctcagaaggttgggctgtgagggctgtacctcggcacgctctagaactagtggatcccccgggctgcaggaattcgatatcaaacttatcgataccgtcgacctcgagggggggccccggtacccagcttttgttccctttantgaggggttaatttgcgcgcttggngnaatcatggtcatnactgtttcctgtgagaaaattgaattccggtaacaantttccacacaacanacgangccnnngagcataaaagttgtaaaaccttggggtgccctaatgaagttgagcttaactcacatttaatttgcgttgccgcctcacttgccccctttttnaattcgnggaaacctttccntgccaggntgcanttaatgaatttggccaaacgccccgggganaagccggtttgcntanttagggcgccttttaccgctttntngcttaaatgnacttcctggncaanggtcngtatnagnttgcggcnaanccggntnttaaactcacattaaaanggcgggnaatancggtntantcananganatcannggnntnaancncaataaaagaaatttttanccaaaagttncncataaaggcntgnaacnttaaaangccccnnttnnntggnnntctttnnaaagntccccnccccntgtcnggaatnannaaaannaactnntaaaat

SEQ ID NO: 6376 - DNA, 867 bp, Homo sapiens
  misc_feature 1, 5, 12, 37, 96, 104, 105, 107, 110, 111, 113, 115, 122,123, 134, 139, 144, 150, 163, 187, 231, 265, 296, 304, 318,353, 358, 368, 373, 380, 383, 397, 404, 420, 421, 428, 431,440, 442, 471, 498, 499, 500, 507, 562, 574, 589, 594: n = A,T,C or G
  misc_feature 628, 633, 636, 641, 644, 653, 656, 660, 665, 672, 678, 693,694, 704, 705, 709, 715, 720, 724, 747, 751, 753, 761, 766,770, 776, 783, 784, 785, 789, 790, 796, 798, 800, 801, 804,806, 812, 813, 816, 819, 826, 827, 829, 833, 834, 835: n = A,T,C or G
  misc_feature 836, 839, 846, 851, 852, 856, 857: n = A,T,C or G
natangcgcgcntttatacgactcactatagggcganttggagctccccgcggtggcggcccgacgtaccgtgaggcaccatactgctgacagtantacactgnngnatnntnangctccannctgctgatggngagantgaantctgtnccatacccactgncactgaacctgtctgggatgccantggccctgctagatacatcataagatgaggagcctgggcgccangccacgtttgtgctggtacctgcccaggcggccnctctacaactagtggatccccccgtctgcangaattcantatcaagcttatcnataccgtcgacctttagggggggcccagtacccanctttngttccctttnatganggttaantgnacgcttggccgtantcatggncatagctgttccctgnngaactanctntgcatcttnancttgaatgaacatgccgctgttcattttnattaaaacatgtcttctaaactccatnnntaaatcncatggacaattaaatctttttcttacaataattacttttacattaaaaagtcatncattatctttanattattgaaaattangactntaaatcttattatttcccaccttaattaacaatnttgcnccngcccnatnattcaaaanttngganctttnaactacncagatnggcaggtttaacacnntttgacaggnnggcnactgtnaaatntgcnttttaaaattaactttttttttnaaananctgaaatnttttnaaanccctanaaaaacnnntttnnccattncncnntcntntggttnnaanggnaaaaacnnantccnnnntgnaaattanccccnnccannttttttgttt

SEQ ID NO: 6377 - DNA, 640 bp, Homo sapiens
  misc_feature 3, 4, 5, 6, 102, 169, 363, 365, 441, 484, 487, 491, 517,520, 535, 569, 574, 576, 605, 609: n = A,T,C or G
ggnnnnggcgccgtaatacgactcactatagggcgaattggagctccaccgcggtggcggccgcccgggcaggtactttttttttttttttttttttttttngagacagagtcttgctctgtcacgcaggcttgggtgcagtggtgcaatcttggctcactgcaacctntgcctcctgggttcaagcaatcctcgtgccttaacctcctgagtagcagggactacaggaatgtgctaccacatccaactaatttttgtatttttttttttgagatggagtttcgctttcgttgcccaggctggagtgtggtggcatgttctcagcccactgcactccagcctaggcaacaaagtgagactgtntnaaaaacaaaagaaaatgaaacaaaaaaacatttaaaaagtgcccatgggtgatgttagcgcaaagccacattttanacccactgcaccaaaagatgatgactcggagattgaaatcatnatnttanagctctgggaggggaggaggggcttnttncagggtcctacaaanactgggagagaaacccagggcacacgaggctgtntactnancattttgggagctgcctactggtcctcancctngggggcggacgatcaaaaaactggccttgtg

SEQ ID NO: 6378 - DNA, 896 bp, Homo sapiens
  misc_feature 2, 3, 4, 5, 6, 7, 545, 574, 589, 616, 629, 675, 685, 695,708, 719, 720, 770, 772, 786, 794, 800, 811, 817, 819, 828,841, 852, 856, 857, 863, 889: n = A,T,C or G
gnnnnnngagcgcgcgtaatacgactcactatagggcgaattggagctccaccgcggtggcggccgcccgggcaggtacaagcgattctgctgtcccagcctcacaagtagctaggattacaggcatgtgccaccacatctctactaaaaatacaaaaaattagccaggcatggtggcaggtgcctgtagtcctagctactcgggaggctgaggtgggagaatggcgtgaacccaggaggcggagctttcagtgagccgagatcacgccactgcactccagcctgggccacagagccagactccgtctcaaaaaaaaaaaaaaaaatattttctcctctttaaagatttcatcttcagataaccccatacttatccacattaccctactggcctttctctgaccggattgaagataagaattaaaatcatttaaggagattttagatctatgtaagacagagtaatctgttcctagtttgtctgaatttgtgtttggttttcataaaacattggtttattaggagagaaacattttaaatatttnaaaatcatctttatttaaaggctaaagangtttaatttcattgnggtaaactggggatgtggaagacttangatttattaacanttaatagaagcaatgcttaattttttaagccattaagaaaaatcanttccttccanagaaattcantttgaaaaataanaaaggtctttnnttaagccctgccccctcccttttttaaattacttaaccgggggcccgggncnccttttggaaaatnaaaaggtnccttcnggccccctttnaaaaananaaggggganccccccggggctnggggggaattntaanntaaaangtttttttgaaaccccggcacccccnggggggg

SEQ ID NO: 6379 - DNA, 950 bp, Homo sapiens
  misc_feature 3, 12, 14, 17, 18, 19, 307, 336, 399, 488, 593, 602, 606,612, 621, 645, 654, 655, 667, 673, 707, 711, 717, 719, 731,742, 750, 753, 759, 768, 771, 777, 789, 802, 816, 821, 833,834, 836, 847, 849, 852, 855, 862, 867, 868, 900, 901: n = A,T,C or G
  misc_feature 903, 904, 907, 917, 930, 938, 939, 948: n = A,T,C or G
gtnggcgccgcncncgnnntactactcactatagggcgaattggagctccaccgcggtggcggccgaggtacgcgggggacaccctagatcccaagatctccaaggatttggtggcatacccactccagcacacagaagcatgaggttcatgactctcctcttcctgacagctctggcaggagccctggtctgtgcctatgatccagaggccgcctctgccccaggatcggggaacccttgccatgaagcatcagcagctcaaaaggaaaatgcaggtgaagacccagggttagccagacaggcacnaaagccaaggaagcagagatccagccttntggaaaaaggcctagacggagcaaaaaaagctgtggggggactcggaaaactaggaaaagatncagtcgaagatctagaaagcgtgggtaaaggagccgtccatgacgttaaagacgttctttgactcagtaccttgcccggggcggcccgntctagaactagttggatcccccgggctggtagggaattcgatatcaaagcttatcgataccggtcgaccttctagggggggggcccggtaccccaactttttgtntccctttantgangggttnaatttgcgncgccttggccgtaaatcattgggnaatagcttnntttccttgtgtngaaaanttggttattcccgtttcaacaaattcccaccacnaaanaatacngnagcccggggagncattaaaagtnttaaaagnctngggggnggccctaantgnggtggngcttaacttcanaattaaatttggntttggggccttcanatggnccccttttccanntncgggaaaaacntngtncgngccccanatttnnatttaaaagaattcgccccaaacccccggggnnannggnggggtttggngtattgggggccnttttaccnntttacttantt

SEQ ID NO: 6380 - DNA, 778 bp, Homo sapiens
  misc_feature 3, 4, 5, 6, 7, 8, 15, 16, 30, 31, 272, 354, 470, 549, 557,578, 590, 631, 633, 649, 652, 663, 685, 690, 703, 716, 726,728, 734, 745, 756, 762, 768, 771, 778: n = A,T,C or G
ggnnnnnngcgcgtnntacgactactatanngcgaattggagctccccgcggtggcggccgcccgggcaggtacgggtagtttttgagctgacagcagcaaaggcaccataagtcaaaatattggttttggtggagatgatcgatgtgtgtgtgtgagagagagctatgtttctaaccaagggcctaatgtttgttacagaaatgatcccagagacctacaagatgtgggaatcagcataacagggcaatgcagcaattaaccccacatcgntttctgtagttcctttttgtttcattttcttctgtctcacctcgttagaaaattcctcccagtcaggggtcgtccagtgcangacgggggacccaagggtctcaagcctgcaagtccagaaggtgacaaacccaggagcactgggagttaagctttccttggggagggaagagccttgatgtccagcacacagcctgnctataaagacacgaagcgacctacccactgtacctcggccgctctagaactagtggatcccccgggctgcaggaattcnatttcaancttatcgataccgtccacctntagggggggccnggtacccagcttttgtttccttttaatgaaggttaattgcncncttgggcgtaatcatnggnataagctgggntcctggggggaaaattggtatnccggntcacaattccccnaaacattaccaancccgggaagnanttaaangtggtaaaaancctgggggggngccctnaattgnagnggaactn

SEQ ID NO: 6381 - DNA, 960 bp, Homo sapiens
  misc_feature 1, 8, 66, 71, 79, 81, 84, 85, 86, 88, 117, 119, 125, 134,149, 156, 162, 166, 172, 179, 180, 194, 230, 249, 250, 253,268, 271, 273, 274, 275, 276, 277, 286, 291, 299, 312, 333,359, 366, 374, 393, 404, 406, 409, 411, 422, 424, 427: n = A,T,C or G
  misc_feature 428, 433, 450, 465, 466, 468, 471, 487, 510, 512, 513, 516,517, 518, 528, 530, 534, 539, 553, 555, 559, 575, 580, 588,590, 610, 625, 626, 642, 645, 656, 658, 659, 675, 685, 686,690, 700, 702, 706, 716, 731, 745, 748, 756, 798, 802: n = A,T,C or G
  misc_feature 807, 808, 819, 820, 821, 830, 838, 840, 844, 845, 849, 861,871, 874, 875, 891, 892, 895, 898, 900, 901, 902, 904, 907,917, 923, 925, 926, 927, 929, 955: n = A,T,C or G
nttttacncgcgtaatacgactactatagggcaaattggagctcaaccgcggtggcggcccgcccnggcangtactctngnccnnncncggtttttttttttttttttttttaaaantnaataanttttaattnaaaagatatttaaanatttaanttcaanaatnctattnttttaanntttttatacacatngttttaataaaataaatttttttaataatttttttncaaattaaattaaattttnnatnaattatttttttaanatnannnnncttttatanattantttttatntttttaataaaanaattttttttttatataaaanaattttttttttaattataaaattanaaatgangtttaaanttattttatttatttaaantaaaatttttntnttnanttttaaatttntnttnnataantataaaattattttttnaaaattattttattnntnttnttttaatttatagaantaaaaaaaataaattttttaatntnnaannnaaaaaaattntntttnaattnaaggttttaaaaanantttnaaaaaatttttttttnttttnagaaaaananaaataaaattttttataaantataaaaaaaaaaanntttttttttaaatatnttnataaaaaaaantnnttttttatttaaaaantttttttatnnaaanaaaaaaaaananttgnttaaaatttnaaatttttttttttnattaaaaaaaattnaanttattaanttttaaaaaatttttttaaaaaaaaaattttggtttaataanttanaaaanntttaatttttnnntttttttanaaaaattnantatnnttanaattagtttttnaaaaaatttntanntttaaatatttttttnnttnaantnnnanatntttaaaggtntaggtntnnntnaacaaaatttttttttttttattttnatata

SEQ ID NO: 6382 - DNA, 780 bp, Homo sapiens
  misc_feature 2, 6, 13, 15, 603, 641, 650, 679, 699, 709, 715, 727, 751: n = A,T,C or G
gnttancctttgncncgtaatacgattcactatagggcgaattggagctccaccgcggtggcggccgaggtacaaaaccagcttcattattttaccctcacagaacagctgactctagaattctgctaatgatacactgaaaataaatatacgccagactccgtggctcacgcctgtaatcccagcactttgggaggccgaggtgggtggatcacctgaggtcaggagttcgagaccagcctaaccaacaatggagaaaccccgtctctactaaaaatacaaaattagccaggcgtggtggcgcatcccagctactcgggaggctgaggcaggagagtcgcttgaacccaggaggtggaggttgtggtaagctgagatcatgccattgtgctccagcctgggcaacaagagcgaaactccatctcaaaagaaaaaaaaagaataaatatagtaaagcgtgtgaactttgaagccaggctacttggacatgatccagtttgatccagccattcactagctgggtgacttttgacaagtgacataacatctctgaggctctacttcctcttttgtaaaatggagaaaatcagcatctatataaangggttataataaggattaaagtcccgcgtacctgcccnggcgggcgntctaaaactagtggatcccccggctggangaattcatatcaagcttatngatcccgcanctcganggggggcccggncccaacttttgttcctttagtganggttaattgcgcgcttggcgtaattattg

SEQ ID NO: 6383 - DNA, 755 bp, Homo sapiens
  misc_feature 26, 65, 70, 71, 98, 100, 121, 140, 142, 224, 275, 317, 373,396, 442, 452, 473, 495, 552, 615, 662, 665, 685, 689, 701,715, 723, 733, 740, 749: n = A,T,C or G
gttagtcttcgtaatacgactcactntagggcgaattggagctccaccgcggtggcggccgaggnacttnnttttttttttttttttttttttttggntnggtagtttgtttttggtgtanaaggggaatgttgtgaaananaacagttggaaaacccaaaaatatacaaatccacaaatacttagtttatgtctataaacaaagaaaaagccttttacttatnttcagaaatgaaagtataagcacaaagacaattgatcaaattattaattgnggtcttctactggagactatgacccatgtcattttagttatncataaagaaaaataatggtgtaggtgatacctaatgttatccatgtatccgtgaanaaaaagtacctcggccgctctanaactagtggatcccccgggctgcaggaattcgatatcaagcttatngataccgtcnacctcaagggggggcccggtncccagcttttgttccctttagngagggttaattgcgcgcttggcgtaatcatgggcatagctgtttcctgtgtgaaatngttatccgcttacaattccacacaacatacgagcccgggagcataaagtgtaaagcctggggngcctaatgagtgagctaactcacattaattgcgttgcgctcacttgnccncttttcaatcgggaaaactntccntgcccagcttgnatttaatgaaatcngcccaacnccccgggganaagcggntttggcttnttttgg

SEQ ID NO: 6384 - DNA, 1562 bp, Homo sapiens
  misc_feature 3, 7, 11, 24, 26, 29, 30, 48, 54, 60, 64, 71, 88, 99, 119,131, 156, 158, 164, 166, 168, 205, 209, 216, 245, 306, 333,358, 363, 394, 481, 485, 562, 655, 703, 751, 758, 791, 799,809, 814, 819, 840, 920, 986, 988, 991, 996, 997, 999: n = A,T,C or G
  misc_feature 1001, 1002, 1003, 1004, 1006, 1008, 1009, 1012, 1085, 1095,1100, 1110, 1141, 1145, 1158, 1167, 1211, 1230, 1263, 1279,1307, 1310, 1332, 1334, 1353, 1378, 1388, 1412, 1415, 1416,1428, 1434, 1440, 1453, 1472, 1475, 1485, 1494, 1498: n = A,T,C or G
  misc_feature 1517, 1524, 1531, 1540, 1560: n = A,T,C or G
ggntttnaagngccttttcgggtnanttnnccgaacttcacttttttngggggngaccgnaaantccgggnaagccctcccacccggncggggttgggncggggcccggaaagggtttncaaaatcctaantttttaaaaaccaaagcccaggaantnagcccncntnaggggccgaggaaaattaaaaaaaaaaattggcaacnaggnaccgttntggcccaaatttttttccaaaggaatagnccatttcctttttaaaaaattccaggtatttccaggcctttcccaaaaaggaattggggtntggcccccattaaattaaggaactttnaaaaaccattattaaaatgggaatngggcntaaaaaaaaaaaaaaattaaaggttaattanccggaaaaaaaatggttaaaaaaaaaagggggaaaaatggttaaaggttccccaccttccttcaaattccttccaataaaaaaaagnggtnggaaggaaggttaaaaggggaatgggccttaaaaaggcccaaaaaaaattaaaaaaattggtttaaggggttttccntttttttttttttccttaattttttcccccggtttttaatttccaattggcccaaggttccttggccttttccttttttgggaattaattggncccccttttaagggggggtttttaaccccccaatttttttaaaaaggnttttaaaggaaagggggtttttgggtttaaaaattgggcccaaaattngggggtngggggggaaaaattgggaaaaaaaaaaattttngggaattnccaaaaaaanttaantttancccaaccccccttttgggttnccaaattttttttcccaatttttttttccaaaaaaaattttgggcccgggggccctttgggggaaaaaaaaccctttttncccccaaaaaaaaaaaaaaaagggggggggtttaaggggggcccaatttgggaaaaagggaaaaananaanaagannanannnnanannatnttttcccaaaaaaaattcccaaaggaaaaaacccccttccttttttccaaagggggggggggtttttttgggngggggttttnccttngggaattaanttggggggcccaagggaacccaaaagggaantttncccaaaagggttnccccccccncccccaagggggaaaggaaattgggggaaggcccaaaatttttnccaaaaaaaaaattaaaangggggggtttaaaattgggggggcccttgggancccaaaagggggttantttttaatttttgggcccccaggcccanttnggggggggaacccaaggaaaantngggagggcccaaacccaanggggcccttgggaaaaaaaaagggntttttttttngggggaattttatttttttaaggnccnncccccttaaagnaggggncctccntgggatggttaanggggggaaaatttcctttnggnttaaggtccnaaaaaccanttanccccccttaaaaccttttncccaaanggggggnaaaaaattnttttttccaagggtaagggnct

SEQ ID NO: 6385 - DNA, 845 bp, Homo sapiens
  misc_feature 8, 10, 11, 24, 30, 77, 511, 555, 571, 584, 593, 608, 613,653, 654, 670, 681, 690, 692, 697, 712, 727, 728, 733, 744,745, 749, 751, 753, 755, 760, 761, 763, 766, 773, 775, 776,779, 787, 794, 796, 800, 806, 808, 816, 830, 842, 843: n = A,T,C or G
gataattntnncttcgaaatactnctcctntagggcgaattggagctccaccgcggtggcggccgcccgggcaggtncttttactgcctcagacctagaatcagccatttctcaaaggtgtccttgttgcttccagtgaaaaaggtatttggatgctacagtctgcactgaaagatgttcatggttaaatggcttatcacttcccagacttttcaacacaagatctaggagagatgtagtttttcaaagaaagatgaaaataaataataaatttgtgttgatattccaattctaatagaaggttatagagtttttacttatttgattttatattacatcttttttcccctatgctgaaaatcatggctcctaaatgatattaacagaattatttacttttctgcataatatatataatagtttccaaaatctaccagtattacaactattagtaaaaaatgttaagatggtagttaaataccaatttaggctttaatttatctcatgttgnttttaaaaaatcctaaaggttgctttggcttggggtgccaagtnggcttcaattgccctngtaaatccccagncactttttnggggagggctggaangccanggtgggattccactccaaagggtccagggaggttccaaannagccagaaccttgggncccaatttgcngcccacttncnacttncaaaggcctgggggnggaccaaaaaaggannaactnccctttcccanngatnanantnttgtnntngtntaaaaanannagnttcccttnggcccgntnttanaacatnantggggatnccccccggggctgntcagggaatttnnat

SEQ ID NO: 6386 - DNA, 824 bp, Homo sapiens
  misc_feature 1, 3, 125, 212, 231, 345, 349, 367, 371, 372, 386, 426, 433,454, 515, 544, 554, 558, 570, 579, 602, 609, 615, 644, 646,649, 656, 657, 660, 676, 683, 694, 720, 722, 751, 768, 769,778, 781, 792, 793, 797, 798, 802, 807: n = A,T,C or G
ncnactcactatagggcgaattggagctccaccgcggtggcggccgcccgggcaggtactttaggagacccaggcgggcagattgcctgaggtcaggagtttgagaccagcctggctaacatggngaaaccctgtctctactaaaaatacaaaaattagtcgggcatggtggctcacgcctgtagtcccaactgcttgggaggttgaggcangagaatcgcttgaacccangaggtggaggttgcagtgagccgagatcgcgccactgcactccagcatgggcgacagagcaagactccatctcaaaataaagaaagaaagaaacaaagaaaagaaaagcttatnttgnacttctctaaaaaagaanttgnngaacgcctgatgcncacaaatctaaatttggcaaggtcgatcaattaaaggatntttattngcatcacaaaataattctttnctccccccaaaaatcaataaaaaggtcaaatagcaacttttcctaatgtgtttaaaaatgnaatcaccaaatcatgtggtcccccacttnttttccaggntatnattcttatttgnggtaaaagngagggtatccccgcggtcccttngggccgnttttanaacttagtgggaattccccccgggcctgnanggnaatttcnnatntttaaagccttttcanttcccgnccaaccttttngggggggggggccccggaaacccaancntttttgtttccctttagttggaggggttnaatttgcccccttgggnnttaaacaanggnccaataacctnntttnnctgngggtnaaaattgctatttcccg

SEQ ID NO: 6387 - DNA, 656 bp, Homo sapiens
  misc_feature 401, 440, 445, 450, 477, 479, 484, 495, 523, 527, 543, 560,570, 593, 598, 604, 615, 635, 645, 646: n = A,T,C or G
atagggcgaattggagctccaccgcggtggcggccgaggtacacggagtacaaaagaaccaaacacaacggcggggagggagggtctaccaatgagtgtcagtgtctagtgcttccgggagccaactgccaggctagggacactcaagtccctcaaactgtcatcagctcctgccagaccccactccagcatgtcgaggttcatatgagagtgtttgggccagactcctccaatcagtgcacgcgatgggcagaggaggctagggaatcctgagcccaaagctgtattggtccatccccctcaagaagttgttggagctttcagaaccgttcctctttcttgtggtagacaatgagatacccgcttgtaactttttactccattcaccaagaaaaccttgngccctttgaggtctaagtcttcttgctttaaaccccctntgagnagcantggtttgggatttaaagggaaataagntncaaangggccaaggcnaagaaccaaaacctccccttaagggttngtcntttggggccattgccngtcttttttaaaaaaangggggaaaangaaagaaaaaaaccccccccccnaaccncggatnaaaaagccccnggaggcccttgggcttttgnggtcaagggnngccccaaaag

SEQ ID NO: 6388 - DNA, 763 bp, Homo sapiens
  misc_feature 1, 9, 11, 12, 16, 17, 21, 531, 533, 534, 543, 548, 549, 550,551, 552, 553, 571, 588, 623, 628, 673, 677, 692, 709, 740: n = A,T,C or G
ngcctcgtnanncgtnntacnactcactatagggcgaattggagctccaccgcggtggcggccgcccgggcaggtacgcgggagtgactgcaaagccagaagcagtggctcacccctgtaatcccagcactttgggaggccgaaggaggtggatcgcttgaggtcaggagttcgagaccagcctggccaacatggtgaaaccctatatctactaaaaatacaaaaatgagcctagagtggtggtgggtgcctgtattcccagctacttgggaggctgaggcacaagaattgcttgaacccaggaggcggaggttgcagtgagccaaaatcgcaccactgcattctagcctgggcaacagagtgagacaccatctcaaaaataataataataaaaaaaagtgactgcaggggactgggaagaggaaacacaaatctttactggggaatggaattttcaagtgtatgcaccaacccttagaaatcacaaaacatctgacccttctgaaaataaccaccatgagtgagacagcntnnaaaaaaatnttttnnnnnngtacctcggccgctctanaactagtggatcccccnggctgcaaggaatttcatattcaagcctatcgatncgtcnacccttaaggggggccccggttccccaacttttggtcccttttantgangggttaatttgcgcncttgggcgtaaatcatnggccataagcttttttccttggggtggaaanttgtttttccccttcaacaaatt

SEQ ID NO: 6389 - DNA, 645 bp, Homo sapiens
  misc_feature 383, 406, 430, 436, 455, 474, 523, 562, 565, 568, 580, 593,601, 613: n = A,T,C or G
gaattggagctccccgcggtggcggccgcccgggcaggtaccttttagctctgcctggtttatcgccttgtccccgcagcccctggcagcctctcatctaccctctgcttctgtgggtttgccgattccgggcattttatgtaaatggaatcgtatgatatgtggtcttttgtgatcatctttttacacttagcatgatgtttttcatgtatattacggtcgggtgtggtggctcacacctgtaatcccagcgctttgggaggctgaggtgggcagactacttgagctcaggagtttcgagaacagcctgggcaacgtggcaagaccccgtctcaaatcttttttaattggtaaaaaaaaaaaaaattaattaaaaatttccntcccttattggtattaatttggnccaaattactttaaattttctttnataatntgcccaaaacacaccttanccttcctggggtgccacgntaaaatacaatcctttcaaaaaaaaagccacaaggccattggggaaaantgtggtgccttaagttggcaaaataagaaccttggacantgnttnataaaaaaaggnaaatgttttttgntgccccangagaagcctacnaaaatattgtgggtggtgtgggattgtaaaag

SEQ ID NO: 6390 - DNA, 614 bp, Homo sapiens
  misc_feature 499, 531, 534, 546, 549, 552, 575, 577, 578, 579, 605, 607,608, 611, 613: n = A,T,C or G
taatacgactcactatagggcgaattggagctccaccgcggtggcggccgaggtaccttgcagggctggggtaatgttcttcaggagattatacatgccccatgtcagcatccaatatatgatgctgtttctaccatagccaagattcaagaatcaaggggtggaaatgggagcggcaccagttgccattacccctagtcatccattagcataatttttgcttcctgttcctgttcctgtggccttatgctctgctggtctaggggtcttagtggctctcttcattaatgttgtctgacacttaggcctttctgtctgcaaacttgagtcttccttgatggacaacagagcatggaattatttttggaccagagtctagatttacctagtctgtggagtctagaagatttgctgcgtaatatggaacaagttactttgtacctgcccgggcggccgctctagaactagtggatcccccgggctgcaaggaaatttcgantatcaagccttatcgataccccccgaccctcnaangggggggcccgntanccnacctttttggttcccctttaagngnnnggggtaaaaatggcccccccttgggngnnaanana

SEQ ID NO: 6391 - DNA, 807 bp, Homo sapiens
  misc_feature 2, 3, 4, 9, 611, 684, 695, 707, 711, 720, 725, 731, 738,767, 777, 779, 804: n = A,T,C or G
gnnnttacncgcgtaatacgactcactatagggcgaattggagctccaccgcggtggcggccgggcacagtggctcacgcctgtaatcccagcactttggaaggctgaggcaggaggatcacgaggtcaaggattcgagaccatcctgaccaacatggtgaacccccatctctactaaaaatacaaaaaatagctgggtgtggtggtgtgcagctgtagtcccagatacttgggagactgaggcaggagaatcgcttgaacctgagagggggagacggaggttgtagtgagcggatatcgcaccactgcactctaacctgggcgacagagcaagactccatccccaaaaaaatcactactctatacttctaagaatcttctaagaatccctgcttctttttagtgcacatgagcttggttcctcaggcaattattttataatcttcattgctggccataattgcagtgccaccaaattaccactgcatcacaaatggatttgtaaagaatagtcacccatacttataaatgatttgcttataaaaatatctgttaaagccgggcgcagtgcttcacgcctgtaatcccagcactttgggaggcttgagcangtagatcacctgagcttccgacctcaagaccagccttgaccaacatagaaaaacccccgtcttttactaaaancacctggcccnggcggccggttntaanaactaagtnggatncccccnggcttgnaaggaattcgatattcaaagcttattcgnataccggccnanccttgaggggggggggccccggttncct

SEQ ID NO: 6392 - DNA, 858 bp, Homo sapiens
  misc_feature 1, 2, 22, 23, 613, 618, 619, 620, 621, 622, 623, 624, 625,626, 627, 628, 629, 630, 631, 632, 633, 634, 635, 636, 637,638, 639, 640, 660, 667, 737, 738, 782, 807, 815, 816, 821,829, 834, 835, 837, 841, 846, 849, 853, 855, 857: n = A,T,C or G
nnaagttagacctttcacgtannacgactctttatagggcgaattggagctccaccgcggtggcggccgaggtacagctggaaatctgagtagtttcaggaaacacagcatcatcatcttcattgtctttcagattttctagaaatgtctgaaactcttgcacaagattattcagtttgctgacagatagttttgtcctctcttttgggaacttgtttatccacaggttggctccatttagaagcctattagctattgagtctgtgttgtcagagccaacgtccatgtcccaggccaggaagatgttcagtttgcaaaactgtctggttcgtcctgaatttggtattgtctcttcatgtgtttccttatcctttcagtcccccatgccccttggatgggagggagaaagtggatggaaggacccttggaaggtgcgtcttcccaggaggttgtgtcctcacagggggtgtcctcacaggggaaatagcccacagagaggatcaggttggaattggatttggagctgtcgtcctctatgtcgctgttagaggatgaatatgccatggagttcaaaggcacaaatctctctcaacttggagaagcttcaaaaaangaaannnnnnnnnnnnnnnnnnnnnnnggtcctgcccgggcgggcgnttttaanaactaatgggatccccccgggcctgcaaggaattcaatattcaagcttattcgatacccgtccaccctcnnaggggggggccccggtccccaacttttggttcccttttagtggngggttaattgcccccttggcgtaanaaaggggnnataanctgtttcnctggnngnaaanttgtnttncccncncnt

SEQ ID NO: 6393 - DNA, 808 bp, Homo sapiens
  misc_feature 3, 325, 478, 489, 561, 570, 577, 591, 601, 653, 674, 690,695, 747, 760, 773, 775, 778, 783, 789, 794, 796, 803, 807,808: n = A,T,C or G
gtnatacgactcactatagggcgaattggagctccaccgcggtggcggccgaggtacttttttttttttttttttttgagacagagtttcactcttgtcgcccaggctggagtgcagtggcgcgatctcggtccactgcaacctcaccctcccaggatcaagcgattctcctgcctcagccacctgagtagctgggattacaggcgcctgccactacacctagccaatttttgtatttttagaagggacagcatttcaccatgttggccaggctggtctcgaactcctgatctcaggtgatccacccacctcagcctcccaaagnggtgggattacaggcgtgagccactgaaagttctcattagttttttgtttaaattttaaacataaattatgttatagcaaaaattcctaagaattgaaaaccactttatcagaaatatcaaaattcacaaataatcccaaaatttatatagcnttttttccagnctaaaatattaaagctactgagaagtgttaaacttcctaaataggattttacctaacatttggtatcaaaanggtagcccntgtctgncttaaatattccanattatctaanaattcactttccacttggtttcatccaacttttatttttttttcatatttcnggaatttttttagaatccccntccttttttgggggantaaantttttcttttttccccactttaagacattttaatttacttcttgcaaaaaangggattttttggngaccttttttttnanaanaacanaagggnttatnangtttttntttnn

SEQ ID NO: 6394 - DNA, 881 bp, Homo sapiens
  misc_feature 2, 3, 4, 5, 6, 7, 8, 9, 10, 12, 13, 17, 18, 22, 28, 30, 31,33, 34, 35, 39, 41, 42, 47, 48, 49, 55, 57, 59, 60, 61,64, 65, 67, 68, 71, 74, 75, 79, 80, 81, 82, 93, 112, 114,118, 122, 123, 131, 137, 162, 180, 187, 234, 365, 368, 424: n = A,T,C or G
  misc_feature 447, 453, 467, 512, 527, 567, 590, 628, 681, 684, 710, 714,735, 765, 785, 795, 809, 819, 824, 827, 828, 847, 849, 855,879: n = A,T,C or G
tnnnnnnnnntnngtanntttnttacgntnngnnnttantnngatannntccgtnantnnntgnntnnagngannaggnnnnagggttgggcnttgtatacgactcactatnangacncacnntactccancgcggnggcggccgcccgggcaggtactttnggagacccaggcgggcanattgccngaggtcaggagtttgagaccagcctggctaacatggtgaaaccctgnctctactaaaaatacaaaaattagccgggcatggtggctcacgcctgtagtcccaactgcttgggaggttgaggcaagagaatcgcttgaacccaagaggtggaggttgcagtgagcctagatcgcgccantgnactccagcattgggcgacagagcaagactcccatcttaaaataaagaaagaaaagnaaaccaaaagaaaaggaaaaagntttaanatttgaaaccttcntctaaaaaaaaaaggaaaaaaaaaggggaaaaaggcccttggatngccaccaccaaaatncttaaaaattttgggccaaaggttcggattccaaatttanaaaggggattatttttatttttngccattccacccaaaaaattaaaattttcttttttacnttccccccccccaaaaaaaaattccaaatttaaaaaaaaggttttccaaaaantangccaaaacctttttttccccttaaantggnggtttttaaaaaaaatggttnaattccaccccaaaaataaccaattggttnggttccccccaaaccttttnttttttcccngggtttattaaaanttcctaattntgggngtnnaaaaagtgggaggggggantnaccccntggaaagattggaggggccaaaantt

SEQ ID NO: 6395 - DNA, 605 bp, Homo sapiens
  misc_feature 2, 3, 6, 7, 605: n = A,T,C or G
gnnttnnacctcgtaatacgactcctatagggcgaattggagctccaccgcggtggcggccgaggtacttttctttgaaagcataattttccttattttaaaagatgtggctgtcttctctggttgtgagagcaatacactgggtcaggcatatagtaggcactcagtaaatgtttactgaattgaactgattgtttgccatggaattttatcattggatcaatacacacttacttgttaaaccagcttttatgaaaaacatatatgtaatactatgaaagtcaattgcaggagactaatcttatctggaatgtcaagggagattgctatgaagaagtgatttttgagctatgtaaaaatgatagctaagggtggtggcaatggagctatgtgtgtgtgagtaggggtgcccttgaagtagaggcaaaaatatgtgcaaaggctctgaggcagatataggtttggcacattaaacagctgattaaaggccaatgtagctggagaacgaagtggggcagaatgggttttaagaaataaacaggttagtaataatatcagcttttcaaaactctctctggctggtatatatgtataaaaaaagactn

SEQ ID NO: 6396 - DNA, 604 bp, Homo sapiens
  misc_feature 2, 3, 4, 5, 6, 39, 50, 597: n = A,T,C or G
gnnnnncgcgcgtaatacgactactatagggcgaattgnagctccaccgnggtggcggccgcccgggcaggtaccagggtaagcgggggaagctacatacaataataatgcattctcttatttaacattcgcagttaacttttttttgagacggagtctctgtcgcccaggctggagtgcagtggcgcgatctctgctcactgcaagctccgccttctgggttcacgccattctcctgcctcagtttcccgggtggctgggactacaggcgcctgccaccaagtctagctaaatttttgtatttttagtagagacggggtttcaccatgttagccaggatggtctcgatctcctgacctcgtgatccgcccgcctcagcctcccaaagtgctgggattacaggtgtgagccaccgctcccggcccaacttctttttttaactcctgcaaaaccacaacacaaagtcaggtttgttgtgcttagaccatttgctatttcttagcaatcctactctttatccacaaaaccacatcctcattacaatcaattatttatcaagtggggatctcaaaaaatcacattccagattactatatnttagttt

SEQ ID NO: 6397 - DNA, 611 bp, Homo sapiens
  misc_feature 2, 3, 4, 5, 6, 7, 8, 11, 15, 543, 605: n = A,T,C or G
gnnnnnnnccncttntgagcgcgcgtaatacgactcactatagggcgaattggagctccaccgcggtggcggccgcccgggcaggtacgcggggacagtctgctggtgggcagagaagacagaaacgacatgagcacagcaggaaaagaaagttgtctgacagaagtttgatgagaggaatttgactcagaagactgaaatatcctttaaccttactataaaatatcttacaaaatactcattgatttcacagcattagaatcatcaaggtaatcaaatgcaaagcagctgtgctatgggaggtaaagaaacccttttccattgaggatgtgggaggttgcacctcctaaggcttatgaagttcgcattaagatggtggctgtaggaatctgtcgcacagatgaccacgtggttagtggcaacctggtgaccccccttcctgtgattttaggccatgaggcagccggcatcgtggagagtgttggagaaggggtgactacagtcaaaccaggtgataaagtcatcccgctctttactcctcantgtgggaaaatgcagagtttgtaaaaacccggagagcaactactgcttgaaaaatgatctangcaatc

SEQ ID NO: 6398 - DNA, 864 bp, Homo sapiens
  misc_feature 4, 5, 8, 302, 305, 314, 413, 442, 453, 585, 633, 648, 660,676, 729, 746, 758, 761, 797, 811, 834, 839, 846, 851, 858: n = A,T,C or G
aagnnggncgcgaatacgactactatagggcgaattggagctccaccgcggtggcggccgcccgggcaggtacttttttttttttttttttttttttttggggagccggagccttgctctgtcacccaggctggagtgcagtggcatgatctcagctcactgcaacctcagcctcccaggttcaagcaattctcctgcctcagcctcccaagtagctggaattacaggtgcccaccaccaggcccagcctcccaaagtgctaggattacaggcatgagccaatgcacccagccctcagtctnttnttaacctancaaactcctactcagccataggtctagcttatctgtcaccttcctactttccttggcagttgctctttcagcaatctcacaataagctgtatgcatttntaactagaacacttaccacactgtacctnggccgctctanaactagtggatcccccgggctgcaggaattcgatatcaagcttatcgatccgtcgacctcgagggggggcccggtacccagcttttgttccctttagtgagggttaattgcgcgcttgggcgtaatcatggncataagctgtttcctgggtgaaattgttatcccgctcacaattccacncaacatacgagcccnggagcataaaantgtaaaagcctggggngcctaatgaggggagctaacttcacaatttaattggcgttggggctcactggncccgctttttcaaatcngggaaaacctgntcngtggccaacttgcatttaaatggaatcggccaaacncccccggggaaaangcgggttttgcgttatttgggcngcttntttccgntttcnttggttnaatgaa

SEQ ID NO: 6399 - DNA, 860 bp, Homo sapiens
  misc_feature 4, 5, 8, 10, 122, 150, 181, 193, 195, 235, 252, 268, 277,292, 315, 361, 399, 422, 449, 468, 471, 478, 496, 563, 588,614, 616, 642, 649, 671, 691, 731, 735, 739, 782, 792, 797,799, 825, 841, 843, 846, 852, 855: n = A,T,C or G
agtnnacncngtcgcgcgtaatacgactcactatagggcgaattggagctccaccgcggtggcggccgcccgggcaggtacttttttttttttttttttttttttttttcctggggcctggnggctggtgaccaccacagagggaggatnttgccggtccaggatatttttgctgtatttnaggtatttccgnanagtcgcagggcactcctcctccaggtaagccttggcccgntgcacgtaaactggttntgcctcccacttctgnttggttatntgggctgctgggtcnaaggggacccaggctgggatttntttgttgaattcaatgtagtcctttccatcatagtaatatttccanaatgctccgctgcttctgttattctcgatctcacaacnaaaccttccctgcaatacgtganaccctgaaaactcccccgaccccacanagagacaagtcagcctggnganaaatttntcaaaataacttttagtnttgcacattgggcaacccaaaaaaaataaaggtttttgcaattcaagcatgcaatccctttatcaanacaaataggttattactccaatttntacaacagacagagaggggctaactnantttggtttggcattttcaggtttgtntcaaaanaaaaatgttcctccttaaaaanaactacagcctgggccctgngggctttatgcctgaaatccccaacacttttaaaaaactnaaancganggggatcgccccgaacccccagggggttccaaaaaccaacccnaggggtgatnttggngnaaatcccccccccttccaaaaaatanaaaaaatttcccccancntgnggggcnccntccct

SEQ ID NO: 6400 - DNA, 841 bp, Homo sapiens
  misc_feature 637, 671, 673, 763, 765, 780, 781, 807, 822, 839: n = A,T,C or G
taatacgactcactatagggcgaattggagctccccgcggtggcggccgaggtactttttgttgtattttgttttttatctaaatcaattatttgtataaaaattccagacttttatgaattatatgttctctttaataaaattcacgtgattcaatttaaggtttgtaagaataatataaaacattcttattcctggctgggcacggtggcttgagccggtaatcccagcactttgggaggccgaggtgggcggatcatgaggtcaggagatcgagaccatcctggctaacatggtgaaaccccacctctactaaaaatacaaaaaattagctgggcgtggtggcaggcacctgtagtcccacctacttgggaggctgaggcaggagaatggcgtgaacctgggaggcagagcttgcagtgagccgagatcacgccactgcactccagcctgggcgacagagcaagattccatctcaaaacaaaacaaaaaacaacaacaaaaaattcttattccttacctgaaagcaagttttggcttttctaccgaatttcacttattttaaaatcacatttatctttcctaagttgttttaaaacgacatgggactaaatcccaaaaactaaaaatgaaaggngagttataacattgagttactatttaacagggtntnaaaagagcccaaacgccaggctatacagtccaccagaagaagcaaaaaaaaaaaaaaaaaaaaaaaagtaccctgccccgggcggggcgntntaagaactagtgganncccccgggccttgcaggaattcgatntcaagctttttcganacccgtcgaacctcgangg

SEQ ID NO: 6401 - DNA, 641 bp, Homo sapiens
  misc_feature 29, 257, 307, 384, 399, 431, 432, 433, 435, 436, 473, 476,506, 511, 533, 534, 535, 539, 541, 560, 562, 577, 583, 599,603, 625, 629, 633, 635, 640: n = A,T,C or G
gaattggagctccaccgcgggccgaggtnctgtgattatgtaggagaatgcctgtgttattcacactgcagagtaaagtgctgtgacttaaatggtttggatgtttgtcccctccaaatctcaagttaaaatgtgattgctggctgggtgcggtggctcacacctgtaatccttgcactttgggaggctgcggtggggagatcacctgaggtcaggagttcaagaccagcctgaccaacatggtgaaaccccgtctntactaaaaattcaaaaaaattagccaggcgcctgtaatcccagctactcnggaagactgaggcaggagaatcacttgaaccccggaggcagaagttgccgttgagccaagattgcaccactgcactncagcctgggcgacanggcccgagactccgtcttaaaaaaaataatannnannaagaaggtacctgcccgggccggcccgcttttagaantangtggaatccccccgggctgcaggaaattcnatttncaagctttattcgaataccgtnnnaccntngaaggggggggggcccccngntaccccaagcttttntgtatnccctttttaagatgangggnttaaatttgccgccctttgggncggnaaancnatggng

SEQ ID NO: 6402 - DNA, 865 bp, Homo sapiens
  misc_feature 714, 750, 775, 778, 785, 789, 804, 820: n = A,T,C or G
gcgcgtaatacgactcactatagggcgaattggagctccaccgcggtggcggccgaggtacgcgggattgcaagcctgtccccagtctccccactgctgctatgcctgaaaagagccccagccccgtctccaaagcccagggttcgcctcttgctgaaagagcaacgttcccaggctgaggacaaacccaggactgctcaggcggagagatccctgcccccacgttcaccactgacaacccaactccatcctcagtctccgtggcttcagatctggactccgcaccctcctccacctccacctctcttcccagagaccctccccacatcatgctcagtgctgtttctgaagaccatctagacttttgtgttctctggaacattctactcaccttcagctgcagcacatttcttcagcctctccaccaagctctttaaaatgaaaggcagttactgtcttcccttggacaataatgaatgtatctactgtatgtgcagaccatgtcgagaagtggctgggttaagaaaaaagagggtttttgtaaaagcctgtttatttttttaagtcagttttgagcatttctattttaccacccttcacatggttttggggaacccaaattggtattcaaggtcttcatgccaaaacaaagccaaaagttggtttccttacctttctttcctccatgcaccatgatttttcaaatggattggnttcaagtggtcattttttaaaaatggttttcttggngacatggtacccttcccccgggccnggncgggttntaanaaactaagtgggatncccccgggcctggcanggaaattccaatattcaaagctttattcgatacccggccgaccct

SEQ ID NO: 6403 - DNA, 933 bp, Homo sapiens
  misc_feature 3, 7, 11, 13, 17, 19, 33, 37, 41, 42, 44, 45, 48, 50, 53,56, 58, 59, 60, 63, 64, 67, 68, 69, 75, 76, 79, 83, 85,86, 91, 94, 96, 100, 104, 359, 383, 384, 389, 396, 475,485, 486, 491, 497, 513, 518, 531, 545, 557, 561, 575, 581,586: n = A,T,C or G
  misc_feature 588, 594, 615, 638, 645, 663, 677, 688, 703, 715, 726, 728,733, 741, 749, 754, 755, 766, 786, 789, 800, 802, 819, 820,829, 830, 858, 865, 875, 877, 878, 881, 903, 906, 909, 914,916, 924, 925, 927, 929, 932: n = A,T,C or G
atntatntatntntatntntatacatgtatacncatntganntnnatntntanatntnnntanntannntatgtnnatntatntnnacagncgngntgtncaancgtactcgtatacgactcactatagggcgaattggagctccaccgcggtggcggccgcccgggcaggtacgcgggctggcctctaatggagtcactatgacaagagcagcccctgcctctggggggctcacagctcactggaagacactagaatcctgttctagagcctgggtgaggaagtcttgggattcccctgggaaatggaaaactgtgcagcaggaccctatgttgcttccctctgacctgcagcaaganactgtgagaggtgatttcaatcannaaatntctcagnttcactacccttgaacgtcattgggcccaaatgaaatttttcatgaagtaagatttttttatccacaagatccttcagnattatggggnngaatncatgcnttttattttcagttcncccangcctttttctttnattaccatttacanggttcttttcangggntggatggaaggganttttcngggtntncatttncccttaaagcccattaattgnattggtgggttggaaatgtttanggtcttntttggctttcaaccaagnaaaagggattcccnattttttatgnggggcaaggaaattnattttttcccangttggggaagncncttgnaccccacnggttatgncaaannccaactttggnttggaattttcttcccttgnccncatggcccggngnacccccccccaaggatnngaccattgnnggttccctggccctttatgtgtaggccnaaagagncccttgggtnanntcncattaaaatggcccttgtcttnganttntgggngncaaaaatnncngngang

SEQ ID NO: 6404 - DNA, 678 bp, Homo sapiens
  misc_feature 330, 343, 359, 390, 399, 415, 435, 443, 449, 458, 470, 495,497, 499, 518, 523, 527, 531, 549, 553, 564, 567, 570, 581,589, 596, 600, 607, 609, 613, 614, 617, 622, 627, 630, 631,634, 643, 648, 653, 654, 656, 660, 672: n = A,T,C or G
atagggcgaattggagctccaccgcggtggcggccgaggtacggaggagttcctggaagccttcatggatctgagcctccggaatctccgtgaggttgaaattcaggccctccaggatttcatcgtgagtgtcagccttggtccccagggagagcattgcaaaggctgtagcgatgctcactggggagaagaagatattggtgctgttggactggtgtgccagctggcggtataggctgaaggcgaactcagccaggttgggggtgatcttgttgaaggttgggtgatcctgatcatggtgggatgtatctgtcttctgggcaacatctncctggggatcctnagccagggagacaggnaccaggcagcacaggcctgccagcaggaggntgccccacnagacagaagacggcantgttcgattcactgtccccnggttcaantgggtnggtgccttngaaaagcttganggaggacaggggcccctgttccctngncnccgtatttttaaaggcaanttggnatcncaanaagggggcaaacccgggngggnaaggccttgcnttngtnggaaatattanaacccaangggttcnaccnccaattntntttnngtngggangccanaannagnggggttaanatttnacttnngnctcncccccccccccnccccct

SEQ ID NO: 6405 - DNA, 689 bp, Homo sapiens
  misc_feature 459, 461, 500, 523, 543, 545, 547, 554, 565, 593, 594, 613,615, 621, 622, 625, 631, 636, 638, 641, 643, 644, 647, 648,660, 667, 668, 673, 675, 676, 684, 686, 689: n = A,T,C or G
atagggcgaattggagctccaccgcggtggcggccgcccgggcaggtactttaggagacccaggcgggcagattgcctgaggtcaggagtttgagaccagcctggctaacatggtgaaaccctgtctctactaaaaatacaaaaattagccgggcatggtggctcacgcctgtagtcccaactgcttgggaggttgaggcaagagaatcgcttgaacccaggaggtggaggttgcagtgagccgagatcgcgccactgcactccagcatgggcgacagagcaagactccatctcaaaataaagaaagaaagaaacaaagaaaagaaaagcttatattgaacttctctaaaaaaagaaaaaaaagaaagcctgatgcacacaaatctaaatttgggcaagtcggatcaaattaaaagggattattttattttgcaattcacaaaaataaattcttttacntnccccccaaaaaatcaaattaaaaaaggtttccaaattanccaactttttttcctaaaatggngttttaaaaatgtttaattnancncaaaatnccattggtgtncccccaaaccttttttttttccaaggtnntaaaattctttattggggntnaaaggnnganggtttntaacntntgngnntgnngggcaaatttanaagaganntttgnanncttttctntnccn

SEQ ID NO: 6406 - DNA, 878 bp, Homo sapiens
  misc_feature 5, 6, 7, 8, 394, 499, 568, 634, 645, 678, 698, 712, 741,744, 746, 755, 784, 798, 808, 830, 840, 844, 846, 856, 867: n = A,T,C or G
gaagnnnncggcgacgtaatacgactactatagggcgaattggagctccaccgcggtggcggccgggtgcggcagctcacacccgtaatcccagcactttgggaggctgaggcgggcagatcacaaggtcaggagatcgagaccatcctggccaacacggtgaaaccccgtctccactaaaagtacctgcccgggcggccgctctagaactagtggatcccccgggctgcaggaattcgatatcaagcttatcgataccgtcgacctcgagggggggcccggtacccagcttttgttccctttagtgagggttaattgcgcgcttggcgtaatcatggtcatagctgtttcctgtgtgaaattgttatccgctcacaattccacacaacatacnagccgggagcataaagtgtaaagcctggggtgcctaatgagtgagctaactcacattaattgcgttgcgctcactgcccgctttccagtcgggaaacctgtcgtnccagctgcattaatgaatcggccaacgcgcggggagaggcggtttgcgtattgggcgctcttccgcttnttcgctcactgactcgctgcgctcggtcgttccgctgcggcgagcggtattcaagcttactcaaangcggtaatacnggtattcacagaatcaaggggataaaccgccanggaaaagaacattgttgaancaaaaaggccagcnaaaaaggcccagggaacccggtaaaaaanggncnccgtttgcntggccgttttttttccataaggcttccgnccccccttggaccnagcaattaanaaaaaaattggacgcctcaaanttcaaaaagntggngnaaaacccccnccgggactttnaaaaaattcct

SEQ ID NO: 6407 - DNA, 602 bp, Homo sapiens
  misc_feature 125, 247, 258, 287, 389, 463, 470, 524, 563, 567, 571, 591,598, 599: n = A,T,C or G
actcactatagggcgaattggagctccaccgcggtggcggccgcccgggcaggtactttttttttttttttttttttttttctgatggggtctcactctgtctcccagacgggagtacagtggcncgattatggctcactacagcctcaacctccaaggctcaagtcattcttccatctcagcctcccaaggagctaggactacaggagtgtgccaccacgcccagctcattttttttatttcttgnagagacaatanagtttcaccatgttgcccaggctggtctntaactcctgcgctcaagtgatccgtccaccttggcctcccaaagtgctggcattgcaggcgtgagccaccatgccctgcctaattaagtcatttaaagaagntttatgagaactgatagaggctaaattacctcagtgggacaattcaaaataagacaactcctaaaaactgcttnggcttangaggcccagctgggttggcttttggggtagtcccccctttcaaaaagccttttnggcaaatccccaggtcatgctttaaggggtaaggggatnaatncccnatttaattccaagggaaccntgtcccnntaa

SEQ ID NO: 6408 - DNA, 585 bp, Homo sapiens
  misc_feature 455, 511, 525, 543, 551, 554, 567, 585: n = A,T,C or G
tagggcgaattggagctccaccgcggtggcggccgcccgggcaggtactttaggagacccaggcgggcagattgcctgaggtcaggagtttgagaccagcctggctaacatggtgaaaccctgtctctactaaaaatacaaaaattagccgggcatggtggctcacgcctgtagtcccaactgcttgggaggttgaggcaagagaatcgcttgaacccaggaggtggaggttgcagtgagccgagatcgcgccactgcactccagcatgggcgacagagcaagactccatctcaaaataaagaaagaaagaaacaaagaaaagaaaagcttatattgaacttctctaaaaaaagaaaaaaaagaaagcctgatgcacacaaatctaaatttggcaagtcgatcaattaaagggatatttatttgcatcacaaaaataattctttactccccccanaaaatcaataaaaagttcaaatagccaacttttcctaaatggtgttttaaaatggnaatcacccaaaatncatttccgcggtaccctncgggccgnttntagaaactaagtngggattccccccgggctn

SEQ ID NO: 6409 - DNA, 829 bp, Homo sapiens
  misc_feature 1, 3, 8, 9, 10, 13, 16, 18, 21, 22, 23, 24, 26, 29, 31, 35,41, 43, 44, 46, 47, 49, 52, 53, 54, 56, 58, 64, 68, 69,76, 79, 81, 82, 83, 92, 94, 99, 101, 106, 415, 431, 482,489, 493, 500, 505, 506, 527, 528, 573, 587, 601, 625, 657: n = A,T,C or G
  misc_feature 658, 675, 690, 695, 699, 701, 710, 722, 727, 729, 732, 736,742, 744, 752, 762, 784, 800, 807, 819, 820, 825: n = A,T,C or G
ncnttgtnnnttngantntgnnnntngananaacntatgcntnnanntnaannnantnttgatngtgnntttgttnaancnnngagtagagngntgagncnttaanacccatacgattactatagggcgaattggagctccaccgcggtggcggccgaggtacaaacccagtttgttttcaaaaaatcacagtggcaatgcaactcatcactctagaaaagcaagcttaggctacctgaaagattttcccttggaagtttagcgtatgtttgactaacaagaattccctacatcagagactctaggtgctatataatccaaaaacttttcagcctgttgctcattctgtcccatgctggcaataataccttgtcagcccattacccttatttttgaattgctccatctcctggtngggacttgtatcttgnctggccaatatcaggaaacaccaaaccccctgaaagaggttcctgattttnggatttntttnttttttntcttnnattgccttacccttttttttnngggaaagtttttcccaagcccgcaaatttttggaaaaattgaaanatggaccaaagggntgttattatttttnaaattccaaattttttccaatttnccccacccatttgccaatttaccaaacccctnnttaaactttaaaaaatngggggttaaaccccnttaangggncnattattccnaaaaagaaaagncgagnanttnggcnttgagntnaaaaacgngggaaaattnaggaaaaaaataaaaggaaaancccttacccatttttnatttttntgcctttttatnncaaantccc

SEQ ID NO: 6410 - DNA, 894 bp, Homo sapiens
  misc_feature 1, 2, 5, 6, 11, 12, 13, 14, 15, 21, 22, 25, 26, 29, 34, 35,37, 44, 47, 51, 55, 56, 57, 59, 61, 62, 63, 64, 71, 72,73, 77, 78, 79, 80, 83, 84, 86, 87, 91, 93, 96, 99, 101,103, 105, 114, 325, 343, 350, 370, 371, 411, 430, 448, 456: n = A,T,C or G
  misc_feature 511, 522, 564, 609, 621, 635, 666, 697, 699, 703, 724, 728,741, 785, 813, 814, 824, 831, 835, 840, 844, 859, 877: n = A,T,C or G
nnctnnaccgnnnnnttttgnntcnnttngtatnntnacatttnttnactntggnnntntnnnncgtctannntttnnnnacnnannagtngnggncgngntncnggcgccgtnatacgactcactatagggcgaattggagctccaccgcggtggcggccgaggtactttaggagacccaggcgggcagattgcctgaggtcaggagtttgagaccagcctggctaacatggtgaaaccctgtctctactaaaaatacaaaaattagccgggcatggtggctcacgcctgtagtcccaactgcttgggaggttgaggcaagagnaatcgcttggaacccatngaggtgngaggttgcaagtgagccgannatcgcgccactgcactccagcatgggcgaccagagccaanggcttcatctcaaaaatanaaggaatggaaaagaatnccaagagnaagaaaggaaaaaagcttttatatttggaaacctttcttcttaaaaaaaaatagnaaaaaaataanaatggaaaaggccccttgaattggccaaccaccaaaaattcnttaaaaatttttggggccaaaaggttccggattccaaaatttaanaaagggggattnatttttaatttttnggccaatttcaaccaaaaaaaattaaaattnttcctttttaaacttttccccccccccccgncngttnaccccttgcccccgggggccngggncccgccttctttnagaaaactttagggttggggaattccccccccggggtcttggcnaaggaaaatttccggattttttcaaagnntttattcggnattcccngttngaacncttntaaaggggggggggncccccgggtatcccccangacctttttttggtttc

SEQ ID NO: 6411 - DNA, 588 bp, Homo sapiens
  misc_feature 453, 480, 492, 509, 514, 536, 551, 564: n = A,T,C or G
gaattggagctccaccgcggtggcggccgaggtactttaggagacccaggcgggcagattgcctgaggtcaggggtttgagaccagcctggctaacatggtgaaaccctgtctctactaaaaatacaaaaattagccgggcatggtggctcacgcctgtagtcccaactgcttgggaggttgaggcaagagaatcgcttgaacccaggaggtggaggttgcagtgagccgagatcgcgccactgcactccagcatgggcgacagagcaagactccatctcaaaataaagaaagaaagaaacaaagaaaagaaaagcttattgaacttctctaaaaaaagaaaaaaaagaaagcctgattgcacacaaatctaaatttggcaagtcgatcaattaaaggatatttatttgcatcacaaaataattctttacttccccccaaaaatcaataaaanagttcaaatagcaacttttcctaatgngtttaaaaatgnaattcacccaaattccntgtgntcccccaaacttttttttccangttattaatttctanttgggggtaaaangtggagggtattaccctggaaagt

SEQ ID NO: 6412 - DNA, 852 bp, Homo sapiens
  misc_feature 2, 3, 4, 5, 6, 7, 13, 17, 23, 28, 30, 33, 37, 39, 40, 41,49, 50, 51, 56, 59, 60, 61, 63, 64, 68, 71, 73, 74, 76,85, 86, 87, 94, 95, 97, 98, 99, 103, 110, 112, 113, 116,118, 121, 123, 124, 133, 236, 258, 351, 444, 495, 519, 521: n = A,T,C or G
  misc_feature 542, 553, 558, 576, 596, 610, 620, 634, 640, 643, 675, 682,684, 688, 696, 703, 707, 710, 711, 721, 726, 736, 739, 748,757, 764, 774, 775, 778, 781, 787, 794, 802, 804, 805, 821,824, 825, 842, 844, 849, 850: n = A,T,C or G
gnnnnnngttctntagnactatnagtcnanctntccncnnncattgtgnnntatanaannnannactntgntnntnaatattatnnntgttttnnannnagcngagaggntnngantnttntnnccttatacnactcactatagggcgaattggagctccaccgcggtggcggccgaggtacttttttttttttttttttttgagatggactcttgctctgtcgcccaggctggantgcagtggcaccatctctgctnactgcaaccttcgcctcctggattcaagtgattctcctgcctcagcctcctgggtagctgggattacaggcacacaccaccatgcccagctanatttttgtatttttaatatgagacacagtttccccatgatggcgaggctggtctcaaacttcccgacctcaggcagatccaccgtcttgggcnctcccaaaagatgccttggggaatttaacagggcgtgagcccacttgcacnccgggccccaggattgaaaatagnanttcctttggcgacaaaggtangcccaaaaatngtttnggcttaattcaagaagcnaagcttgggggctttttcangtcccacccacaanggcttggctnagtttcccttcaangacctngtngaacccaaagttaaaggggcaaaggcttgttngaattcntngttnggcccaangctcaanggcntgnntattctggtnattgnttcaacctcnccntttttttcntggccctgngggaaanaaccttgggnnttngcnccccantaacttnggccggtngnnggggtggtccttcttnccnngggtttttaaacggggnanttttnntc

SEQ ID NO: 6413 - DNA, 601 bp, Homo sapiens
  misc_feature 511, 583: n = A,T,C or G
gtaatacgactcactatagggcgaattggagctccccgcggtggcggccgcccgggcaggtactgaggctgcaggttctggatgatggtgaactcgtctagggtcttgggctgggggcacttgatgatctcggtggtgtagcgcagcttccagccccggctgtcccccgactcatctgtcccgcgtacgcggggtgggaagaaagaaggggccaaactggaatgtggaggaggcccgtgggggaataaaggctactttgtccagcccacagtgttctctaatgttacagatgagatgcgcattgccaaagaggagatttttggaccagtgcagcaaatcatgaagtttaaatctttagatgacgtgatcaaaagagcaaacaatactttctatggcttatcagcaggagtgtttaccaaagacattgataaagccataacaatctcctctgctctgcaggcaggaacagtgtgggtgaattgctatggcgtggtaagtgcccaatgccccntttggtggattcaagatgtcttggaaatggaagagaaactgggagagtacctcggccgctctaaaaactagnggatcccccgggcttgca

SEQ ID NO: 6414 - DNA, 596 bp, Homo sapiens
  misc_feature 98, 99, 102, 109, 112, 119, 140, 148, 175, 179, 182, 189,202, 205, 223, 226, 240, 242, 249, 255, 262, 275, 287, 311,323, 335, 339, 348, 351, 353, 356, 363, 366, 377, 392, 393,398, 399, 417, 451, 467, 476, 481, 482, 485, 499, 504: n = A,T,C or G
  misc_feature 511, 512, 521, 535, 553, 555, 557, 560, 574, 580, 587, 591,594, 595: n = A,T,C or G
gtaatacgactcactatagggcgaattggagctccaccgcggtggcggccgaggtacttttttttttttttttttttttttttttttttttttttttnnaanaaaaacnctntttattnaaatgacaggcaggaagcggnggcaccancaggggggaaagggcagggacttaatnaacncangcttatnacccgcacttacnggnaattcctcgttcatgggnaanaattgcaatccccnanccccatnacaaanggggttnaacgggttacccncccctgccggcntagggtacctgcccgggcggccgntttaaaactagnggatcccccggnctgnaggaattcnatntnaancttatcnatnccgtcaacctngagggggggcccggnncccannttttgttccctttagggngggttaattgcccccttggcgtaatcatggtcanagctgtttcctgtggnaaattgttntccgnncanaatttccacacaanatacnagccggnngcataaagngtaaagcctggggngcctaatgagggagctancncnacnttaattgcgttgcncttaantgcccgntttnaanng

SEQ ID NO: 6415 - DNA, 597 bp, Homo sapiens
  misc_feature 82, 193, 221, 240, 249, 281, 302, 350, 354, 378, 381, 388,397, 410, 421, 429, 441, 442, 443, 445, 460, 461, 477, 482,490, 492, 494, 495, 498, 524, 536, 540, 547, 563, 566: n = A,T,C or G
gtaatacgactcactatagggcgaattggagctccaccgcggtggcggccgcccgggcaggtacgcggggacacaattttantaataagcttcaaaacccatcactccactgaatccagggatgccagaattgagagtccataggacccgtttaacggatcccacattcagtatacggttttttgtatgcttngagggaaggaaggtattttcaaatgcancttcttttttttttttttnttgctctanttagggctgattttaccactgggcaaattgcntacatttggatccatgccacnctaaatactgtttattttggagatctgtcagaggcaagcacatggaanacanggggattctggtttgaaaaggcanttntcatccngacagattnagatggaaaggancggggtggatnaaaatgcnccgaagtgacannntntcaccctgtcacgtnngctggagtgcagtggngagancacggctnantnnaanctagactttatgggctcaagcgattntcctgcctcaanctcntaagtanccggggatcatagggnctngccccacatccggctaatttttttgtagaga

SEQ ID NO: 6416 - DNA, 1205 bp, Homo sapiens
  misc_feature 5, 9, 10, 12, 14, 17, 21, 31, 32, 37, 40, 41, 44, 46, 49,51, 53, 55, 56, 60, 68, 69, 72, 79, 81, 82, 84, 89, 94,95, 96, 97, 418, 436, 444, 513, 565, 615, 616, 617, 635,640, 641, 655, 677, 683, 686, 690, 702, 705, 734, 740, 745: n = A,T,C or G
  misc_feature 755, 774, 782, 793, 815, 821, 834, 840, 842, 845, 847, 848,849, 852, 863, 865, 867, 869, 877, 879, 880, 894, 896, 914,915, 923, 929, 931, 937, 940, 942, 944, 946, 950, 960, 973,975, 981, 983, 1016, 1017, 1024, 1028, 1032, 1033: n = A,T,C or G
  misc_feature 1036, 1040, 1041, 1046, 1047, 1049, 1052, 1057, 1065, 1073,1077, 1078, 1080, 1089, 1090, 1091, 1095, 1096, 1103, 1105,1106, 1115, 1120, 1124, 1125, 1132, 1144, 1146, 1151, 1154,1155, 1156, 1160, 1170, 1173, 1174, 1176, 1181, 1183: n = A,T,C or G
  misc_feature 1184, 1186, 1189, 1191, 1198, 1199, 1203, 1204: n = A,T,C or G
cctcntacnntnanctntctnatattatttnntatanatnntananatntntnannttangttccatnnttntttattnannanagatnaggannnngcttacgtgtcgtatacgatcactatagggcgaattggagctccaccgcggtggcggccgcccgggcaggtacgcgggtaaggagcgggtggcagctgccctggagaacacccacctcttggaggttgtgaatcagtgcctgtcagcccgctcctgagcctggcctttgacccctcagcctgcatactggtatcctggtcccagctcctgccagggctgttaccgttgttttcttgaatcactcacaatgagaaactaacattttgctttttgtaataaagtttaatttatattcagttcacaaaataaaaaaaaataaantaaaaagtacctcgggcncgctctangaactaagttgggatcccccgggcctgcaagggaatttcgatatcaaagctttaatcgatacccgtccnaccttaaaggggggggccccgggtaccccagctttttggtttccctttaagntggaggggtttaaatatgccgccggcctttgggccggtaaattcatgggnnnataaggccttgtttttcncttgnngtggaaaaatttgnttattcccggccttccacaaanttttcncancacnaaaccattactnatnccccgggggtaggccattaaaaaggtgtntaaaangcccntgggggggtnggccttaaattggaaggtngaagcctnaacttccaacnatttaaaatttggcggtttgcncgcttnaactggccccggntttttncnaantnnntgngaaaaaacccntngnangatgcccnanncttttaatttatantngtaaattttggaccatannccccgggntggaananggcttnttntngngnatanttgggtggtnacttctttatccncnttaggntngggctttaaattggacttaattttacaacaaanngatcagngatntgannttnatgnntaaanntntanttttnttgctcanattaagangganngnattaaaatnnncatnnaaacctntnnaaataatgnatggngctnntatctcntccattaataanancatangcnnnttcnaaaaacgccntgnncnaaaananntnccnanaaaacgnnaatnng

SEQ ID NO: 6417 - DNA, 920 bp, Homo sapiens
  misc_feature 490, 523, 563, 568, 574, 586, 587, 589, 604, 617, 633, 648,653, 664, 673, 678, 682, 685, 700, 712, 713, 714, 735, 739,741, 750, 765, 768, 769, 770, 771, 779, 793, 795, 800, 806,807, 812, 813, 822, 823, 829, 830, 833, 838, 847, 852: n = A,T,C or G
  misc_feature 853, 854, 857, 858, 861, 864, 872, 879, 881, 884, 885, 891,897, 898, 902, 908, 909, 914: n = A,T,C or G
gtaatacgactcctatagggcgaattggagctccaccgcggtggcggccgaggtacttggcaatctaagacacactgggagactgtaagaggaattaatatagaaaagctcttaattataataacatttggaagaaatttttcctttgttttgtaaagtggctaaggttgtaggagtgtgtggtatttattaccttttaaatgaactgtaaatttgccttagaaatttgtttaaaaggctagcaagtgagacccttgaggatgatcatatactaataaagattaccaaaagaaacttcttgtcctgttaggtcagtgttatgatttaatggttttaattacttaaccaattttaagaattgacaatttttaaaaatattttttttctaccattctaaagtaatgtcttttgttgtgggtttatgtgtaactacagggattttggaacataaacattttgaaggatagtcaatggtatttagtcttggatntaaaaatagagaaaatttatagctttatgttantaaaataattttacacacaagagtgatttgagggttttcngcaanagtaanatttgttttggnntnaatgggtttattaancctgggattaacnttaagaaccaatatgnttgatttttaaatgnttaanttccccacctnaaaatattntaatnattnggntaaaaataccttggngcaaaatttaannntggtttggggaaaaaatggtnttangncccccagcntgggggaaattattnaannnntttttttntttaaataaggttntnggggnggctgnnggctnntcaattggnntcctcnntgnatgcntcaaaaggnaaagnnncanncanggnaccttgtngccccgngnccnnaaaccntgtttnnaccncttttnnttgangcatcg

SEQ ID NO: 6418 - DNA, 968 bp, Homo sapiens
  misc_feature 386, 407, 472, 507, 516, 520, 533, 545, 549, 558, 560, 563,577, 579, 588, 589, 591, 592, 601, 603, 604, 608, 609, 610,615, 617, 618, 619, 622, 623, 630, 632, 642, 663, 672, 675,676, 679, 684, 686, 691, 692, 696, 697, 712, 714, 721: n = A,T,C or G
  misc_feature 725, 726, 735, 736, 739, 741, 750, 755, 756, 761, 765, 766,771, 772, 774, 775, 776, 779, 781, 782, 783, 786, 789, 790,800, 810, 815, 824, 825, 827, 828, 831, 839, 840, 847, 854,856, 864, 866, 868, 869, 875, 878, 882, 883, 884, 889: n = A,T,C or G
  misc_feature 890, 891, 892, 893, 895, 896, 897, 900, 904, 906, 907, 911,919, 924, 925, 926, 930, 933, 943, 948, 952, 954, 960, 961,963, 966, 968: n = A,T,C or G
gactcactatagggcgaattggagctccccgcggtggcggccgaggtacctaagcccctctcacaggtccaggtgaggggcaggcagggctgggtatagagtggagtgaggccctctccttgggttaaaatttaaaggggtgccaaaaaaaaaaagagcctcagtaatcaaggtaaatcatattgcaatgcagtattttttaaaaatcagagttattgaaaaattccacgatgaatacagtatcaaaattttaagtcaggctttgtctgggttggtgtccaggtgtgaaggatctcaggaacaggcagcacactatttctgaaacctggccttggacttcagtgagcgcaggggcaaggaacaccacggccctggggccctcgctncccagggctccgcttgtgacnactcttgaccttctggggttcaagaaatgccccagaccgtcctatccctcatgttccggtagganaaggcctgtcttgtgccaccccctggaaatgggtntttctggcntgtncccaaaccctganaacacccctaancttnggtttatancnccntaattcttctgatntngaaaacccnntnncaattgttncnncatnnntgccnannncanncccttantnaaaaccttangggtgaatgaattggcttttnaaaaagaanggnncangcttnanaaccnnaacnnggtttttaaaataantnggttccncgannataaaggtnnttncntgttttctnaatgnngttanaacnnaactnntnnncgntnnnacnaanntcaatttttntttttttccntcttnggttcctcnnannttntttttttnnattcaantcacaanancccaaagntngnnatttcncgngtannnttttnnnnntnnncgntctntnncccnatgaatanacttnnntttnttnatgtctcttntcatnattntntatacnncntcnan

SEQ ID NO: 6419 - DNA, 1156 bp, Homo sapiens
  misc_feature 9, 15, 21, 25, 26, 32, 40, 41, 43, 47, 48, 50, 52, 53, 55,61, 65, 70, 73, 78, 81, 86, 87, 92, 93, 94, 96, 98, 99,437, 497, 614, 647, 652, 662, 665, 674, 679, 680, 684, 691,696, 704, 705, 706, 719, 725, 731, 737, 750, 758, 769, 778: n = A,T,C or G
  misc_feature 780, 795, 798, 815, 816, 819, 825, 835, 852, 857, 860, 874,876, 880, 887, 909, 926, 941, 944, 968, 970, 983, 984, 987,992, 996, 1008, 1011, 1015, 1018, 1021, 1027, 1030, 1031,1035, 1044, 1051, 1056, 1072, 1077, 1082, 1100, 1102: n = A,T,C or G
  misc_feature 1111, 1118, 1124, 1126, 1131, 1139, 1140, 1144, 1154, 1155: n = A,T,C or G
ccccaaccncttcgnatattnttannattaantaacttanntntttnntntnncntttcanattntatanttntttanatnaaganngagtnnnanannctaaacgatcactatagggcgaattggactccaccgcggtggcggccgaggtaccaacagatttctcacggtgctcccaaaactgtgatgtttggaaattctctgccctcagggatccctgaccgcttctctggctcaaagtctgggaccacagcctccctgactatttcgggcctccagcctgaggacgaggctgattattactgttcaacatgggactacagcctcagtgctcaggtgttcggcggagggaccaagctgaccgtcctaggtcagcccaaaggctgccccctcggtcactctgttccccgccctcctctgaggagcttcaagccaancaaggccacactggtgtgtctcataagttgaccttctaccccgggaagcccgtgacagtnggcctgggaagggcagattagccagcccccgtcaaggccggtgaagtgggaagaccaccaccaccctccaaacaatggcaaccaaacaagttaccttgcccgggtcgggcccgcttntagaacttaggttgggaattcccccccggggcnttggnaatgaaaatntcngaatatttncaagnncctntatttcngatanccccggtnnnaaccctttcaaangggggngggggnccccgngttaacccccaancttttttngtcttcccccntttttaagntngaagggggttttaanttnggcgcccgccttggggnngtnaaatcnattggggtcnattaaggctggttttcnctggnggngggaaaatttggtntnttcncgattcncaaattttccaacaaccaaaanattactaagcccggggnggcccataaaatgtngtnaaaaagccccttggggggtggccntnaatggaggtggannctnaactntcanaatttaaatttngcngttngcngcnttcaantgnncccnattttttcnagagtcnggggnaaaaccttgtcttatnccaancttgnattttaaattgaattccngntccaacccnccccggngaaaangngcggntttgccannattngggcacaacnnc

SEQ ID NO: 6420 - DNA, 884 bp, Homo sapiens
  misc_feature 575, 591, 622, 635, 644, 653, 680, 687, 691, 705, 707, 713,715, 716, 717, 723, 725, 732, 742, 743, 751, 756, 757, 759,761, 766, 772, 774, 775, 776, 783, 786, 787, 791, 803, 824,842, 849, 851, 854, 859, 864, 872, 873, 874, 884: n = A,T,C or G
gggcgaattggagctccccgcggtggcggccgaggtaccaatatatcctgtaagtgccagcattgatgccactggggaaggtgcaggtgagactgactgatgctccaggagatgcagagagggaagccggctgagtcagcacagcctgcgagagggaacctgtgcagtgagagaggaacaggaggaggagaggagtccaggccatggtggacacaacctcttacccccgcagtccccgcgtacctgccgctctagaactagtggatcccccgggctgcaggaattcgatatcaagcttatcgataccgtcgacctcgagggggggcccggtacccagcttttgttccctttagtgagggttaattgcgcgcttggcgtaatcatggtcatagctgtttcctgtgtgaaattgttatccgctcacaattccacacaacatacgagcccgggagcataaagtgtaaaagcctggggtgcctaatgagtgagctaactcacattaattgcgttgcgctcactgcccgctttccagtccgggaaaacctgtcgtgccagctggcattaaatgaatcggncaaccccgcggggganaggccggtttgcggtattggggcgctttttncgctttcttcgcntcacttaantttgcttgngcttgggttcttttcgggcttgccggncgaagcnggtnttaagctttacttnanagggcngnnnatttcngntttttcnccaaaaatcnngggggatnaaacnnangnaaaanaacttntnnnctaaaanggnncacncaaaaaggccantgaacccgtaaaaaaggcccntttgttggcttttttccntaagggntncgnccccnttgantagctttnnnaaaaaattgn

SEQ ID NO: 6421 - DNA, 890 bp, Homo sapiens
  misc_feature 653, 671, 680, 701, 710, 713, 727, 728, 735, 738, 745, 746,762, 782, 786, 787, 789, 804, 805, 816, 817, 819, 823, 826,830, 833, 834, 837, 843, 846, 848, 849, 864, 865, 866, 873,874, 880, 885, 887, 888, 889, 890: n = A,T,C or G
gcgtaatacgactcactatagggcgaattggagctccaccgcggtggcggccgcccgggcaggtaccccctacccaaaggtgggtagtcccaaagtgtggctgagtccagggtttttatgggctcggaatgggggagtgcatgctgattggtcaaaaagcaccattcaattggctgaaaggcatggaggaagttctcactgcagttggggactttatctagaactggcagcttggttttcaggctttaatttgtctttggtttgaaggttgggtttcaccagggacccacccctatctgcctaggaatttgtctcccttctgctgctatcactgatacagataggcatagggctatggttttatctgtggtatttggctgttacagagaggttatgacctacaattttctgtctttttagcctgcgcctttcctgactttcaggctagacagatcaggggtttgttgatgctttttttttttcttttcttctgtaggtgtttctgggctacgtgaggcaaaaattaaaacagagaaactcaccacagtgtttttcctttggatcccatgatgccccagatgctctacttttttccttttacctttcaaaaggtgtttttataaacatgtaaaaatccagggtttttcgtttgnaccttcggcccgctcttnaaactaagngggatccccccgggcttgcangaaatttcnaanatcaaaccttatcnnatacccnccnaaccctnnaggggggggcccccgntacccaaactttttgttccnttanntngaaggggttaaaatnnccccctttggnngnattnaangtcnatnnctntttttntantnnaaaaaaacttttcgnnncaatttnnaaaaanaaaanannnn

SEQ ID NO: 6422 - DNA, 879 bp, Homo sapiens
  misc_feature 41, 71, 120, 187, 212, 226, 230, 239, 264, 275, 277, 287,358, 373, 390, 395, 420, 436, 492, 495, 497, 519, 530, 556,594, 616, 634, 652, 662, 664, 671, 673, 675, 677, 682, 688,689, 693, 695, 698, 700, 704, 708, 712, 715, 728, 731: n = A,T,C or G
  misc_feature 732, 734, 737, 742, 750, 752, 754, 755, 768, 772, 773, 785,788, 794, 798, 800, 805, 808, 810, 826, 828, 831, 839, 844,851, 853, 859, 869, 874, 879: n = A,T,C or G
ggagctccaccgcggtggcggccgaggtacatatcctgctnctccagtcatgtagtcctgttttctgcagngcttaaatcttttcccaaagtaagtggattcatcagggttatagtttgngagaagccatttcaagttgtccaatgtgatatatatacatatatcatcatctgctttcatgaaccantccatgtattccagataatggtcangagcatatagaaangctntaactattntccaggacagttggtttctgtcttntttggtgtgtnancccacagtanagaagtctttattttcttttgagctcataaacaacgctttattgcaaccctgggcccatgtatctctgatncgtctgatctttttnttctaagattttgaggncctgncataatccagcaaagaattttcatnttttgatagagtttgncagtgacacctgtgttctggaattttattgatgactagcatttgcaatcaacttanatnantctttttagatgattctgcccngtatcaatctngaaggcctcacgtaagaataattatnaaatgggcaggggagtggtgactcacaccctgtaatcnagcgctttgggggaggccccangcaatggtggattcaccnatgtcaaggaaaacccantataattccngncccaacntngnangaaancccccnntctncnctnanggtntgantaanctnggtgatttatatnttnngngtnccttncccacggncngnncccttcttaaaanaatnngggattcccccncgncctggntgananttcancancnacttattagaaatccncntgnccctctgnggggngggaccntncccccnactgtattgnatccnttttn

SEQ ID NO: 6423 - DNA, 915 bp, Homo sapiens
  misc_feature 560, 576, 580, 607, 625, 630, 640, 652, 653, 660, 677, 703,707, 709, 732, 747, 752, 754, 761, 767, 776, 782, 802, 812,819, 833, 846, 848, 856, 863, 868, 870, 881, 882, 888, 891,903, 915: n = A,T,C or G
tagggcgaattggagctccaccgcggtggcggccgaggtacgcgggggccgcccgcttgctgcacggcagccgtgggactggcacaggctcctcggcagcattatgggcagctggtagagcggccacttctgagagccggatgggccttccgagttcccaccgctccgggtgtcctccccagtgcgccgcgatttttgtgtccaagccccagagtccctctgagaccaacccccagccagcacagacttcctgccttcccagctcggaagcgccctcgagaagtgtctaaaggagacagttgatagccaaacaacagttttggattcactgactgattatgaaagaagcagtagactggtatcaagaatcagtcagcaaggaggccctcaccagacgccaagtgccatgttcttggacttctcagcctccatattcatgaactaagtttttggaatccttaggctttcaacgtgtggaaagcctgagcttaacctactgggagggatgagccatcacctgggagcagattcagccatcctagttgaaaccttcctagggncaaagcaaacccgttncaanttacccagaacattggacccattcagncctttggaaacattttcnggcancaaaaggacnaaaacaggaccnnagacccngtaaagaagttcccccnaggaaataaggggggaaacttatttncagnangaaaaactttaagcccacctaangtttttatggggggnttttngntcctggnagccanaaaccttangccatncttggacaattcccaaaccngaaaattccnttctaancggtaaggggaacntttttaaggccgnantttttttnccttttnaaaancntgggagcctgnntttccnttnttataaaccagnaaaaaaaatttn

SEQ ID NO: 6424 - DNA, 416 bp, Homo sapiens
  misc_feature 129, 130, 154, 160, 166, 171, 180, 181, 189, 194, 195, 207,211, 216, 222, 224, 225, 232, 233, 241, 252, 258, 263, 264,270, 277, 279, 281, 294, 303, 321, 324, 326, 328, 334, 336,341, 345, 347, 349, 350, 353, 364, 387, 392, 394, 395: n = A,T,C or G
  misc_feature 398, 402, 404, 406, 407, 408, 410, 411, 414: n = A,T,C or G
gagcgcgcgtaataccgactcactatagggcagaattggagctccaccgcggtggcggccgaggtactttttttttttttttttttttttttttttttttttttttttttttttttttttttttttttnnaggaaaaaaagttaatttaaaaanccacancaaaantcccncccaagttnnttaaaagnaaacnnccgggggggggnaaanaaacngggctncnnttattcnnccttaagnattcaaaaagnaaaaanccggnngttttngaggggnanancagcaccttcatnagggcaaancccaaatccccaaaaaanatnancnacggcngnaattngccnantnntgngggggtaaaanccccaaaaaaaggttttgggatngccgncnnatnggcngncnnnannctnat

SEQ ID NO: 6425 - DNA, 1066 bp, Homo sapiens
  misc_feature 3, 4, 5, 6, 7, 8, 9, 10, 11, 13, 14, 15, 16, 17, 19, 21,22, 25, 26, 30, 31, 34, 35, 38, 40, 43, 44, 45, 46, 47,49, 51, 52, 53, 54, 55, 56, 61, 62, 63, 68, 73, 74, 75,76, 77, 78, 81, 84, 85, 86, 89, 91, 93, 94, 105, 116, 126,141: n = A,T,C or G
  misc_feature 196, 274, 276, 279, 284, 399, 426, 607, 615, 630, 640, 709,739, 755, 757, 770, 772, 773, 776, 781, 786, 787, 803, 807,817, 828, 835, 837, 838, 842, 844, 845, 857, 860, 875, 876,884, 888, 890, 895, 900, 901, 909, 914, 919, 922, 938: n = A,T,C or G
  misc_feature 939, 943, 950, 952, 958, 972, 973, 974, 980, 984, 988, 989,993, 994, 995, 996, 997, 1002, 1010, 1015, 1018, 1019, 1032,1037, 1043, 1048, 1056, 1057, 1058, 1060: n = A,T,C or G
ttnnnnnnnnngnnnnntntnngtnncttnnaannttntntannnnnantnnnnnnttttnnntttcnttctnnnnnnttnagnnnagntntnngaactttgacnactcactatanggcgaattgnagctccacccgcggnggcggccgaggtacacaagagaggccagccattaagaattgttatcaatacaatnaaagggaatacttggccagagatcctctagataagtagctaaaatgtgatcaaaaggagaaagaggaagaagcaaatncncanacgtnttatgggtcttaataaaaataaagacatctctgaacaaatgataaaatcccttccctgaaaaatttcaaatgagattcacagaaatgcagaagcagaaggaaactttagatttanaaacatctcattttggggctgggtgcngtgggctcaccgcttgtaatttcccggcactttggggaggcccgagggtggggcaggatcactttgaggccaggaagtttaacaccagccctgggcaaccatggtggaaaacccccatcttttacaaaaaaaataccaaaaaatttagcccggggccatgggtggcattaccgcttgtagntcccagcntacttaagggcggcntggagggcantgagaaatcactttgaacccaagggaagtagagggttgcagttggagcctgagaatcattgccacttgnggctcccagcctggggttaaccagagccanggacgttggtccccantntttttaatttttntnnacnaaaanaaaanntaaaagttcccttggncccngggggcgggncccccttttanaaacctngnngggntnncccccccggggnctngcaaggggaaattcnngtttttcnaaancnttttnttggnnttccccgncgganccctntanggggggggggcccccnngttncccccancntttttngggttccccctttnnnagggangggntttnntttnnnnnccccntggggggntatanaanngggggcctttaanttggntttccntgggngggaaaannngntttttc

SEQ ID NO: 6426 - DNA, 917 bp, Homo sapiens
  misc_feature 84, 167, 168, 172, 173, 175, 182, 194, 195, 197, 202, 209,211, 213, 216, 217, 222, 225, 226, 241, 256, 334, 356, 363,376, 377, 378, 384, 385, 387, 408, 415, 421, 429, 435, 438,456, 458, 471, 473, 474, 490, 495, 502, 520, 527, 533: n = A,T,C or G
  misc_feature 554, 574, 581, 584, 586, 588, 589, 599, 605, 617, 623, 629,646, 651, 655, 669, 672, 679, 682, 686, 688, 695, 699, 701,711, 713, 731, 733, 739, 742, 755, 778, 788, 797, 801, 804,807, 812, 814, 818, 820, 826, 830, 834, 840, 843, 846: n = A,T,C or G
  misc_feature 847, 851, 852, 856, 862, 864, 867, 870, 876, 882, 892, 895,896, 902, 904, 907, 911, 914: n = A,T,C or G
atagggcgaattggagctccaccgcggtggcggccgaagctgtgtgtttttaagatgaaaaaaccagacacacagttgacgtcnactctttctgggaattactctcttgaagcccagaatgtgttttcatattagatctaaacaaattataggttcaaaatattaanngttnncntccccangaaaaacaaaanncnctcanccaactntnantanngattntgnngggagcacaggccgntctctgttcccgcantaaaacacactgttgccgcccacagccagggggctctctggcaggtcctcccgcgtacctcggccgctctagaactantggatcccccgggctgcagganttcaatntcaaagcttatcnnncccggnnancctcaaggggggggcccgggncccaacntttgtnttcctttnttgagnggntaattgcgccgcttgggngnaatcatggggcananncttgttttcctgtgtngaaantgttatntcggttacaaatttccanacaaaanataccnacccggggaagcattaaaagnggtaaaaagccctggggggngcccctnaanangnngggggagccntaactncacattttaaanttggcngttggngctcacttgggcccccnttttncaantcggggaaaaaccntgnttgtggnccncccngncttttantttnanaagaaattcngncccaaccccccggggggnanaagggnggnttttggcgttttnggggccgcttttttccgctttanttcggatcanttggcctcncttnggnccncgggncngttncngcttgngggngaanccggtnttnaannttcnnttanaaaggngnggnaantccggntttttncccccaaaantgnngggggntnacncccnggnaaa

SEQ ID NO: 6427 - DNA, 878 bp, Homo sapiens
  misc_feature 4, 5, 15, 20, 22, 23, 28, 31, 100, 105, 109, 144, 146, 148,150, 151, 253, 267, 269, 277, 311, 346, 458, 526, 561, 575,582, 588, 602, 603, 620, 624, 625, 671, 686, 692, 699, 715,716, 718, 723, 725, 727, 733, 734, 735, 739, 744, 748: n = A,T,C or G
  misc_feature 759, 769, 772, 786, 788, 802, 805, 811, 812, 834, 836, 852,864, 868, 869, 877: n = A,T,C or G
tacnntaaggcgaancggancnncccgnggnggcggccgcccgggcaggtacgcggggtttggagggctttgggccaaggcgcagctgggtggtcattcncgcancagnggttcaccacaggcctgggtggtgagcagcggctntnangnnagaagcaggccaaagacagctcgggacagccctcacatttgaggaatgccaggaagactaaggacagtgaaagagggcttgggagttatagccaaccataanctaacacttttctnanaaaaaaanaaaaaaaaaaaaaaaagtacctcggccgctctanaactagtggatcccccgggctgcaggaattcgatntcaagcttatcgataccgtcgacctcgagggggggcccggtacccagcttttgttccctttagtgagggttaattgcgcgcttggcgtaatcatggtcataactgtttcctntgtgaaattgttatccgctcacaattccacacaacataccaagccggggaagcattaaagtgtaaaancctgggggtgcctaatgaggtgaagctaactcaanatttaattgcgttngggcctnacttgnccccctttttccanntccggggaaaaccctgntcgnngccaacttgcatttaattgaattcgggccaaccccccccggggaanaaggccggttttgcntttttngggcgcnttttttcgctttcctnngnttcantngnacttcnnnttgngcctncggntccttttcggnttgggggggnaanccgggtttttaggntnaacttcaaaagggnggntaaaannccggtttttcccccagaaattnanggggttaacccccagnaaaaaaacttgntgannccaaaaang

SEQ ID NO: 6428 - DNA, 810 bp, Homo sapiens
  misc_feature 521, 638, 664, 680, 682, 693, 704, 707, 722, 725, 738, 740,782, 793: n = A,T,C or G
gactactatagggcgaattggagctccaccgcggtggcggccgcccgggcaggtacacctcacaaatgatagtggctgagagccaaatgatgagcttctctgtgttatgtctacctagctgtgattatatcaggcacaggattgcgcgcgtgtgctctaatcccactgtgtcatgcaggatttttacctcggcctatgcctgcctggcagcaacacagccatgttccttacactccgccccctaggccaagggggtcctcttaatgggaactcgtgcacataggggagcaccctggacccataggccacagcaacaataaagagagcaacaacctactactaatattcctgctatgctacctatgattataagagcccagtgtaggccagagcccagagacacccaccatctctgcaggcggtcatcagtaaggtattcaattgccttaatctcccatgacatgacaccccctgcaaagctgccactatgttctggtggttgtcagggatgaatgtacctnggccgctctagaactagtggatcccccgggctgcaggaattcgatatcaagcttatcgataccgtcgacctcgagggggggcccggtcccagctttttgttcctttagtgagggttnaattgcgcgcttggcgtaatcatggncatagctgtttcctgngngaaaattggtntccgtttacanttncacacaacatacganccngggaagcataaanangtaaagcctggggggggcctaatgagtgaggcttaacctcanatttaatttgnggttgggcctcacttgc

SEQ ID NO: 6429 - DNA, 810 bp, Homo sapiens
  misc_feature 626, 637, 643, 654, 670, 700, 798, 803: n = A,T,C or G
gcgcgtaatacgactcactatagggcgaattggagctccaccgcggtggcggccgaggtacgcggggcttgcgctaaaccagcttgtcggcgccattttgtctcggcagcggtggccgtagctccatcgcattttatgtttctggcgagaagggaacggagttttcatcaggtagattggtttttgtgcggccgctctagaactagtggatcccccgggctgcaggaattcgatatcaagcttatcgataccgtcgacctcgagggggggcccggtacccagcttttgttccctttagtgagggttaattgcgcgcttggcgtaatcatggtcatagctgtttcctgtgtgaaattgttatccgctcacaattccacacaacatacgagccgggagcataaagtgtaaagcctggggtgcctaatgagtgagctaactcacattaattgcgttgcgctcactgcccgctttccagtcgggaaacctgtcgtgccagctgcattaatgaatcggccaacgccggggagaggcggtttgcgtattggggcgctcttccgcttcctcgctcactgacttcgctgcgctcggtcgttcgcttgcggcgagcggtatcagctcactcaaangcggtaatacngttatncacagaatcangggatacgcaggaaanaacatgtgagcaaaaaggcagcaaaaaggncaggaacccgtaaaaaggccccgtttggcttgcgttttttccataaggctccgccccccctgacgaacattaacaaaaaatcgacccctcaaattcanaaggnggcgaat

SEQ ID NO: 6430 - DNA, 803 bp, Homo sapiens
  misc_feature 2, 3, 625, 682, 695, 718, 721, 723, 733, 737, 796: n = A,T,C or G
cnnactattggcgaattggagctccccgcggtggcggccgaggtacactgagcaaaggagacagggtcatttataacctgatgtgtccactctactgctgtgtccagtttccactggctggaacgggcatcctgttttcattactatagccttgaaatatagtttgggccatgcgtggtggctcgcgcctgtgatcccagcattttgggaggccgaggtgggtgaatcacgaggtcacgaatttgagaccagcctggccaacatggtgaaaccccgtctatgctaaaaatgaaaaaattggctgggctcagtggtgggcgcctgtggtcccagctactcgggtggctgaggcaggagaattgcttgaacccgggagccagaggttgcagtgagctgagatcatgccactgtacctgcccgggcggccgctctagaactagtggatcccccgggctgcaggaattcgatatcaagcttatcgatacccgtcgacctcgagggggggcccggtacccagctttttgttccctttagtgagggttaattgcgcgcttggcgtaatcatggtcatagctgtttcctgtgtgaaattgttattcgctcacaatttcccacaacatacganccgggaaccataaaggtgtaaagccctgggggtgcctaatgaggtgaagctaactcncatttaattgcgntgggcttcactggccccttttcnagncngggaaacctntcgngccaactggcattaatgaaattgggcccaacccccccgggaaaaaggcgggttttcgtntttgggg

SEQ ID NO: 6431 - DNA, 815 bp, Homo sapiens
  misc_feature 599, 610, 651, 657, 662, 689, 736, 748, 751, 759, 762, 766,768, 773, 777, 789, 794, 812, 815: n = A,T,C or G
cgaattggagctccaccgcggtggcggccgcccgggcaggtaccttgcaaggccccacactctggctcttgttatctctttggcctcaaatcccactactcctttccttcctcgcgcagctccgctagcctcaaacttgctgtaagtatgtatctttcagggactatatattgacagttccctttgtgtgggcaactcagcttctagatttaagtgttgctgcctcacttctttcaaataacaccctctgtgtgaggctggttgtgaccccactggcattacaatcctgctcccttcctcacggccttcccactatatttttccctgctcctaaggatcctgcagtctatttggagagtgaaaacatatccttatgaaaaggaaagcaggaatggaatattatatggaatgtcagatgagtgtaattcaagtcagtatcagaagtgatagttcctggcttggtgccagatgttggaggcctgttgggccaatgacaggaatgtagacttttattctggacagcagagaaacccatacaaaatctccccctcccctgctttgggttctgaattatgtcacaatttctaaccattcttttnatggaaactantttttttgcactgagccataattagacttcaaaattatggnggttantcttnaaataaaggggccctaggattgaaatnttaaaataaaaatggaaatattaaaatcttaaaatttacaaattggncaaaaatgaatnttncttttagnggnaccntnggccngtcntaaaaactaagnggganccccccccgggctggaangan

SEQ ID NO: 6432 - DNA, 1160 bp, Homo sapiens
  misc_feature 3, 4, 7, 8, 10, 12, 17, 20, 21, 23, 25, 26, 29, 31, 34, 35,43, 44, 47, 50, 59, 65, 69, 74, 77, 79, 81, 84, 85, 87,99, 103, 104, 105, 123, 155, 198, 431, 450, 456, 457, 472,473, 478, 480, 481, 496, 498, 499, 500, 501, 502, 504, 513: n = A,T,C or G
  misc_feature 519, 528, 530, 532, 540, 541, 544, 598, 613, 637, 638, 660,661, 683, 701, 704, 736, 753, 760, 761, 776, 786, 787, 803,807, 814, 833, 837, 846, 849, 865, 867, 872, 885, 886, 907,921, 928, 930, 934, 948, 954, 956, 960, 964, 965, 977: n = A,T,C or G
  misc_feature 987, 989, 990, 996, 997, 1002, 1011, 1012, 1013, 1020, 1026,1036, 1043, 1044, 1052, 1058, 1059, 1061, 1085, 1088, 1099,1102, 1114, 1119, 1122, 1127, 1129, 1130, 1132, 1137, 1138,1141, 1143, 1151, 1158: n = A,T,C or G
acnntcnnancnatttnatnntntnnttntnttnntttatctnnttntangtgtatttntttttntttntttanatntnanttnncngcctgggtgggngtgnnntcgatcctatagggcganttggagctccaccgcggtggcggccgcccggncaggtacgcggggactatggcaacaagtatggcggctgctagnggtagatttgaaagtgcgaagagtatcgaagagcggaaagaacagacccggaatgccagggccgaggtgttgcgccaggctaaagccaattttgaaaaagaagaaaggcgtaaagaacttaagcgacttcggggtgaggatacatggatgctacctgatgtgaatgagagaattgaacagttctcacaggaacactcttgtgaaggaaaaagaagaaaaaagacaagccattnaaaaaaaaggcaaaggaanagaaanngaaaaaaaagagccnnctatnanntaagaaatgagtaanannnnnanatagggttncccttngggcccgcntntnaggaactnngtnggggatcccccccccgggggcttgccagggaaaattttagaattattcaaaagncttttattctggatnccccggtgtcgggaccccttcaanngggggggggggcccccggggtnncccccaagactttttttggttncccccctttttaaaggtnggngggggtttaaatttggccgccccgccttttgnggcgggtaaattcaatnggggtcnnttaagccttgttatncccttggtgnnggaaaaatttggtttnttcncggcttnccaccaaattttccccccnccanactttttcnganccccggggggagccantnaaaangttggttaaaaanncccttgggggggtggcccctnaattgtaggtgganccttaancntccncaattttaaatttngccggntnggcncctnnccttggccccgntttttcccantnncggggnnaaaanccttgtttnnngcccaanctttgntttttaaatngaaatanngggccccnaccccnncngtggggaagaagggccggtttttngcntatttttgggncgncttttttccccntttcnttncggcntnnanttganntcngntggcgccnttcgggncc

SEQ ID NO: 6433 - DNA, 652 bp, Homo sapiens
ggcgaattggagctccaccgcggtggcggccgcccgggcaggtacttgcaatggggccaccatgttttctcccattagccagccccattcatcatggatgctatgagtcagccagggggcaggcttgccatgggttttgtgacacccccatccaaagctcaccatgttgcatcccgcccattgtctgtgggaccccaagtttctagccatgtccagttcttcacaaaagctggatgcacatgccaaggcaagccatccacagctgctgctggaagggtggtgcagatctaacagttggagacattggccacctcagcataggtgtgagcccagtccacaatgttgttggagcatgccaacctgtggccgagcaaataactcccaagaatttggcagacaattccggcccttggaccttggatttattgatggcccaactgcacactgccaaatgctgtcacaagaggggcaccaccacttctaaatctcatcctgatgactacaccaattatcaggttcaagccccagctgaggtctgaggagagtgggttgatgaggggcagggagctggaagaacacttgggagacaagcaggtagatgagacacggctttattcagccccgcgtacctcggccgctctagaactagtgg

SEQ ID NO: 6434 - DNA, 635 bp, Homo sapiens
  misc_feature 607, 614, 635: n = A,T,C or G
gcgggccgaggtaccacgatgtatagagcaacactggggtaaaggtcactgtgggatggttacctgctgagacctgtgcaaacgtaacacatgccaccatgccaaggatgtggcggaacaagcagccctaccaaggctgggcccccatggactttgtgcctgctgggagtttataggtctgtggggacataggatggccatatctgccagccaactagactggacattgtacctgcccgggcggccgctctagaactagtggatcccccgggctgcaggaattcgatatcaagcttatcgataccgtcgacctcgagggggggcccggtacccagcttttgttccctttagtgagggttaattgcgcgcttggcgtaatcatggtcatagctgtttcctgtgtgaaattgttatccgctcacaattccacacaacatacgagccgggagcataaagtgtaaagcctggggtgcctaatgagtgagctaactcacattaattgcgttgcgctcactgcccgctttccagtcgggaaaacctgtcgtgccaagctgcattaatgaatcggccaacgccccggggagaggcgggtttgcgtatttgggcnctctttncgctttcttgttacttgactn

SEQ ID NO: 6435 - DNA, 654 bp, Homo sapiens
  misc_feature 391, 396, 457, 478, 554, 585: n = A,T,C or G
ggagctccccgcggtggcggccgcccgggcaggtacgcgggctggctttcatgtgaatacaaaggttacaaagtctatattttaccatcattaatactgaatattatatttcaataagaatctttagaattttaagagaaatttgagtattaaaaaaattatctaatatacccaattagaatcttttcacatgagactacagagaaagatttgtatttgtaacaaaaaattagctgggcatggtggcaggtgcctgtaatcccagctacttgggaggctgaggcaggagaatcgcttgaacccgggaggcggaggttgcagtgagccgagatcatgccattgcatttcagcctgggcaacaagagcgaaactctgtctcaaaaaaaaaaanaatanaaaaaaaggttcctcggccgctctagaactagtggatcccccgggctgcaggaattcgatntcaagcttatcgataccgtcnacctcgagggggggcccggtacccagcttttgttccctttagtgagggttaattgcgcgcttggcgtaatcatggncatagctgtttcctgtgtgaaatttgttatncgctcacaattccacacaacatacgaagcccgggagccataaaagtgtaaagcctggggtgcctaaatg

SEQ ID NO: 6436 - DNA, 644 bp, Homo sapiens
  misc_feature 31, 68, 93, 105, 106, 117, 121, 127, 132, 208, 217, 225,229, 235, 245, 252, 331, 351, 366, 399, 408, 414, 449, 455,462, 494, 496, 512, 532, 533, 539, 544, 546, 549, 564, 573,584, 586, 597, 609, 611, 639, 644: n = A,T,C or G
ggagctccccgcgtggcggccgaggactttntttttttttttttttttttttgagttttaatgtattnattacataaacaagttacacataanaagaaaatactnngaatacaatanacancacaanggacntaggaaataatataatgtcagtgaatatatataaatgtttaatctcactagttaaaaaaaaaaagcacattgaaanaatagtggnggccaggngcantaactnaggcctgtantcccagnactttgggaggctgaggcaggtggatcacaaggtcaggagttcgagactagcctggccaacatggtgaaaacccttctntactaaaaatccaaaaaatngctgggcatggtggngggcacttgtaatcccagctacttgggaggctnaggcagganaattgnttgaacccgggagaccgaggttgcagggagctganatcacntcactgnctccaacctcggggacaggatgagactccatntnaaaaaaaaaaaaaaangaatggtggaataccgtttnncccatnttatntntanttttttaaaaataanaatgtccantgctggcaatnantctggtgacanggtaaactaatntnatatttttgaaaaataatggtattaaanattcn

SEQ ID NO: 6437 - DNA, 923 bp, Homo sapiens
  misc_feature 437, 445, 465, 468, 512, 513, 542, 557, 570, 585, 587, 600,609, 636, 637, 639, 654, 689, 696, 701, 702, 703, 708, 709,718, 719, 720, 724, 741, 743, 746, 750, 752, 753, 758, 776,777, 778, 781, 792, 801, 828, 838, 850, 851, 856, 857: n = A,T,C or G
  misc_feature 861, 872, 873, 893, 904, 909, 912: n = A,T,C or G
gtaatacgactcactatagggcgaattggagctccaccgcggtggcggcccgcccgggcaggtactttactgtacccagcagactttcaacaactcattgatccaaagatacatgcacagtctgagcaccagctatggtgctcataacttctttaagacttgaaccctttcaatctgtgtgattcattaaattggaccattgatgataagaatacacattgtatgtttctgtgcacatgacagtgtgtgtgtgtgcacgtacctcggccgctctagaactagtggatcccccgggctgcaggaattcgatatcaagcttatcgataccgtcgacctcgagggggggcccggtacccagcttttgttccctttagtgagggttaattgcgcgcttggcgtaatcatggtcatagcttgtttcctgtgtgaaattgttntccgctcncaattcccacacaacatacnaanccgggagcataaagtggtaaagcctgggggggccctaatgagtnnagctaacctcacatttaatttgggttggngcttacttggcccgntttttcaagttcnggaaaaaccttgtcntngcccaacctgcantttaaatgnaaatcgggccaaccccccccgggggannanggcgggtttggggtntttgggggggccttttttccggttttctttgggtnaaaatanaattnnnttggnnccttggggnnntttncgggtttggggggaagncnggntttnanntttantttaaaagggggggggannnccnggtttttcccncaaaaattngggggggttaaccccggggaaaaaaanttttgggacnaaaaagggggcnnaaaanngggnccgaaaacccnnaaaaaaggcccccttttttngggggtttttncaaanagngcccccccccc

SEQ ID NO: 6438 - DNA, 1656 bp, Homo sapiens
  misc_feature 2, 3, 4, 5, 6, 7, 8, 9, 10, 13, 14, 15, 16, 17, 18, 19, 20,21, 22, 23, 24, 25, 26, 27, 28, 29, 30, 31, 32, 33, 35,36, 37, 38, 39, 40, 41, 43, 44, 45, 46, 48, 49, 50, 51,52, 53, 54, 55, 56, 57, 58, 60, 61, 62, 63, 64, 65, 66,67: n = A,T,C or G
  misc_feature 68, 70, 71, 72, 73, 75, 76, 77, 78, 79, 81, 82, 83, 84, 85,86, 87, 88, 89, 90, 91, 92, 94, 95, 96, 97, 98, 99, 100,101, 102, 103, 104, 105, 106, 107, 108, 109, 110, 111, 112,113, 114, 115, 118, 121, 123, 124, 125, 126, 128, 129: n = A,T,C or G
  misc_feature 130, 131, 134, 136, 137, 140, 147, 153, 157, 189, 190, 202,210, 235, 248, 251, 282, 286, 288, 295, 301, 320, 344, 359,366, 394, 403, 411, 436, 439, 442, 446, 450, 484, 498, 609,639, 661, 671, 686, 718, 723, 745, 764, 785, 815, 830: n = A,T,C or G
  misc_feature 875, 887, 939, 966, 971, 994, 1031, 1033, 1035, 1036, 1054,1056, 1081, 1100, 1108, 1143, 1149, 1160, 1179, 1183, 1190,1211, 1215, 1250, 1271, 1284, 1289, 1311, 1312, 1313, 1331,1346, 1357, 1364, 1366, 1372, 1384, 1394, 1417, 1419: n = A,T,C or G
  misc_feature 1423, 1443, 1465, 1469, 1474, 1485, 1486, 1538, 1541, 1558,1574, 1584, 1593, 1604, 1610, 1612, 1619, 1634, 1645, 1647,1654, 1655: n = A,T,C or G
tnnnnnnnnnttnnnnnnnnnnnnnnnnnnnnntnnnnnnntnnnntnnnnnnnnnnntnnnnnnnnntnnnntnnnnnannnnnnnnnnnntnnnnnnnnnnnnnnnnnnnnnnagnagnannnncnnnnatncnnctnactatanggcganattngggagctccaccgcgggtggggcgggcccganngtccccagggtngaaccaanagtttacccagaaaaggcagtttgnacaacaaaggaanaantaaggaagcctcagggaatggaagggggaanaaangnaaataangaattngaggaaggaaattttggtngcccccaaacccattttttctttnagaacttcttaaagnaaaaggnaacaccggctcttctttcccagggccanggttctttngaaaagcntcaaacttcttctttaattggcccntcnacntttncaangggtaattacccttccacctttttaccaccaaantaagcaaattttanttaaacctggggaaaaaaggaaaaggttttggggggggaccaaccaattggttaattttttggggtgggaattttaccaattttttttaaaaaaccaacccatttttacgngggaaaaaaaaggttttggccttaattttnttgggaaaaccctttttttttnaatttttggnaattttttttttggngggggggggggggaagggtttaaaaaaagggnaaaanttttaattttttttttgggttngggaattggggcccaaaanaaattaaaaaaaatttaattncccctttttttaaaaatttttggggaattnccgggaacccttttnggccccaaaaaaattttttttaaggaaatttttttgggtgggttnggcccaatttcnaaagggggcccttttttttcctttttttttttttttttttcctttttttttntttttttaaaggcaaagtaaaaaaggnttttnccaaaaattaaattaaaaagggncccttttttttcctttttttttaccttttttggggtntntnncctttttttccttttttncnttttttaatttttttttgggaaggnaaattgggggagggatacnttttggcntttccttgggttccggcccccccatttgcccttgngggaanatttggccaangtttgggggcccgccccgnaatnccttccnggggctttcaaacttgggccnaaanccccttcccaacccttttcccttgggggtttttcnaaaggcccggaaatttccttntttttggcccttnaaaancccttccccccaaaaggcccannntttgggggggaaccttancaaggggcccggtgngaaggccccancccaatngncccccnggccttaaaatntttttttggngattttttttttagggttaaaananaccnaaggggggttttccacccanttgttttaagccccagggcctngggntcttncaaaaaccttnnccttggaaccccttcaaagggccaaattctttggcccccgccccttgggggntcntcccttaaaaaagatancccttccccggggccnggggcccggnttttttaanaactttagggnggggantnccccccngggggctttgggaanggaaatttccnanatttttnnt

SEQ ID NO: 6439 - DNA, 940 bp, Homo sapiens
  misc_feature 17, 20, 42, 74, 76, 79, 110, 111, 112, 268, 272, 282, 395,423, 434, 438, 441, 456, 466, 518, 520, 522, 528, 533, 540,543, 544, 545, 564, 572, 573, 576, 577, 580, 582, 602, 615,628, 636, 675, 677, 678, 697, 699, 703, 704, 710, 712: n = A,T,C or G
  misc_feature 717, 720, 723, 725, 728, 729, 741, 743, 746, 748, 764, 765,768, 770, 790, 792, 794, 800, 803, 805, 820, 823, 832, 835,849, 867, 868, 869, 872, 883, 884, 899, 900, 905, 911, 915,916, 917, 920, 924, 925, 928, 932, 939, 940: n = A,T,C or G
cagcctttagacctttnaanaccccccacttttggaaaattnccgctccaccgcggtggtttgccgcccgggcntngtngtcttttttgtgactggcaggctggaaaatnnnatcttaagaatgctgtgagggccgggcacggtggctcacgcctataatcccagcactttgggaggctgatatcacaggcatgagccaccatgcccatctgcaaatccagtgtgcaaacaattccacactgaaaatacagctctcaagattgaaggngtcntaagcagcanagtctttattataatacaaacaagggaaataggcggcaggcaggctgtctgatttgtgactggcaggctggaaaattctatcttaagaatgctgtgagggcccgggcaccggnggctcacgcctataatcccagccacttngggaggctgangcangtngatcacgaaggtcangagatcgaanaccattctggccaacacagtgaaaaccccatctctactgaaaaatacgaaanananaaaaanagggnccaaaanggnnnaaaaaggttacctggggcngtttctannaanntangnggaatccccccggggcttgnaagggaaattttnatattccaagccntatccganaccggtcaaccctccaaggggggggggcccgggaacccnannttttttggggcccctttcngnggannggttananttgcnacnctntnggnngtaaacccaaangntcncnagccatgttttccctnnaananaaaaataaaataaatacccngntnaaaaanatncnccaaaaaaccataanaanaaccggggncanccattaaaaagggnaaaaaacccagggggggnnnccnaaaaaaagttnnagcttaaccataaanntaaanaggggngggnnncanaatnnccncgantatttcnn

SEQ ID NO: 6440 - DNA, 855 bp, Homo sapiens
  misc_feature 626, 638, 705, 710, 720, 723, 726, 729, 733, 735, 739, 740,747, 750, 762, 780, 783, 786, 787, 792, 795, 797, 800, 804,806, 809, 841, 843: n = A,T,C or G
actatagggcgaattggagctccaccgcggtggcggccgaggtacgcgggggagtctcgctctgtcacccaggctggagtgcagtggcgccatctcggctcactgcaagctctgcctccggtgttcaagcgattctcctgcctcagccttctaagtagctaggattacaggcgcgcgtcaccacgcttggctaatttttgtatttttagtagagccgaggtttcaccaagttggtcaagatggtctcaaacttctgacctcgtgatccgcccgcctcggcctcccaaagtgccgggattacaggcgtgagccaccgcgcccggccgctctagaactagtggatcccccgggctgcaggaattcgatatcaagcttatcgataccgtcgacctcgagggggggcccggtacccagcttttgttccctttagtgagggttaattgcgcgcttggcgtaatcatggtcatagctgtttcctgtgtgaaattgttatcccgctcacaattccacacaacatacgagccgggagcataaagtgtaaagcctggggtgcctaatgagtgagctaacttacattaattgcgttgcgctcactggcccgcttttcaattcgggaaaacctgtcngccaacttgcantaatgaatcggccaacccccgggggagaagccggtttgcttattggggcgctttttccgctttcctnggttnactgaactcnttngcnctncggncntttnngtttggngcnaaaccggttttnaacttacttccaaaaggnggntanntccgnttntnccncaananttnaggggggataaccccgggaaaaaaaaccttgngngccaaaaggcct

SEQ ID NO: 6441 - DNA, 860 bp, Homo sapiens
  misc_feature 435, 451, 462, 493, 564, 573, 574, 575, 616, 665, 682, 684,685, 687, 697, 706, 715, 717, 734, 738, 740, 758, 761, 763,774, 775, 778, 781, 784, 785, 792, 794, 815, 818, 821, 831,832, 838, 854: n = A,T,C or G
ggagctccaccgcggtggcggccgcccgggcaggtacgcggggacctagagtcagatgtattatccaaaggcctgcttctgaagcccctcttgcctcctctctctgcagccttcttgaaacacatcctaagcgtctgagtgctgcagatccagtggggtccggacactgggccccgcaggcgaaagcacgttccagccaccaggaggccacctattgtttcaaaataaagactgggttcctcaaaaaaaaaaaaaaagtacctcggccgctctagaactagtggatcccccgggctgcaggaattcgatatcaagcttatcgataccgtcgacctcgagggggggcccggtacccagcttttgtttccctttagtgagggttaattgcgcgcttggcgtaatcatgggtcatagctgtttcctgtgtgaaattgntatccgctcacaattncacacaacatncgaagccgggagcataaaagtgtaaagcctnggggtgcctaatgagtgaagctaactcacattaattgcgtttgcgctcactgcccgctttccagtcggggnaaacctgtnnngccagctgcattaatgaaatcggccaaccccccgggggganagggcgggtttggcgtatttggggccgcttttttccgctttccttcggnttaacttgacttggctngnncntcgggggccntttccgggnttgcgggcngnaggcgggttttcaagcntcancnttaaaaaggggcgggganatnangggtttttccnncanaantcnngggggananccgccaggaaaaaaaacttgntgnccnaaaagggccnncaaaanggcccgggaacccttnaaaggc

SEQ ID NO: 6442 - DNA, 859 bp, Homo sapiens
  misc_feature 69, 88, 408, 475, 507, 535, 632, 633, 650, 666, 674, 683,697, 698, 705, 716, 727, 742, 761, 764, 781, 788, 791, 799,803, 816, 821, 844: n = A,T,C or G
atagggcgaattggagctccaccgcggtggcggccgaggtacttttttttttttttttttttttttttngggattatttctgaagagnggtcagctaacttttcttttctttccttttttccaagacgcgatctcgctctatcacctaggctgttgtgcagtggcatgatctcaactcactggaacctttgcctcccaggtttaagcaatcctcctgcctcagcctcccaagtagctgggattataggcacgcagcaccacgcccggccaatttttgtaattttagtagagatggggtttcaccacgttggccaggctggtctcgaactcctgaccttgtgatctacccgccttggcctcccaaagtgctgggattacaggtgtgaggcaccgtgcccggcctatttnttaagttacttaaaaagttcagggtcattcgtatgtcgttacaaaacagtcagtgtaagatttttgnctagatttgtctcagcttgtccacctctattnttacaaaagcaacccaatgttcagcatnttataatccatccttcccgcgtacctgcccgggcgggcggtctagaactaagtggatccccccgggctgcaggaattcgaatatcaaggcttattcnnattcccgtcgacctttnaggggggggccccggnacccccancttttttgnttccccttttaagnngaggggntaaatttgcgncgccttggggngtaaatcaattgggncaattagccttgttttccntgngggtgaaaattggtttntcccccntcncaaatttncccnacaaaaattaccnagccnggggggccattaaaggggaaaancccctgggggggccc

SEQ ID NO: 6443 - DNA, 872 bp, Homo sapiens
  misc_feature 13, 61, 73, 109, 115, 632, 634, 666, 701, 710, 732, 737,742, 756, 792, 798, 807, 808, 811, 820, 828, 829, 834, 835,844, 846, 853, 867, 871: n = A,T,C or G
cgcccttaacacntttgaaactccagggcgttttggaactcccccgcggtggcggccgatntacgtgtaaaantaaaatgttttttgtaaatcactgagtcttcctgtntatttntggttagagatctttgggggcttggatggaggaacaggaaaagaggagccaggcttttttggaaaattggcggcagcggtggcatacgggaaactgaaatctttatctaatctcatcctttgtatattcgtcttggatttgctgaagaaaattaaaaggtaaattttgctgtgagctcactgaactcaaattgaaagggaacatatgctgtttatttttgtgaaggacattaattgggtgtgactggcagggttgagacctgaagttcctcttttagataaggaaaatttcccttggtgagaaatctctagactagttatgatagattcctaacccccaaccttgaaaggtaacttaaggctccctcctctaagggaagggctgaagaaaaaattaaacaggcaactgtgcctatgaagatttgcgaaaaaaaaaaaaaaaaaccgtcctcggccgctctagaactagtggatccccccgggctgcaggaattcgatatcaagcttatcgataccgncnaccctcggaggggggggccccggtccccagcnttttggttcccctttaatggaggggttaaattgcnccccttggncgttaattcaatgggtcaatangcttngtttncctggggtggaaanttggttattccgcttccacaaattccccacaaaccntaccgnagcccgggnngcntaaaagggntaaagccnnggggnngccttaatngnagtggancctacctcccattnattnc

SEQ ID NO: 6444 - DNA, 1132 bp, Homo sapiens
  misc_feature 1, 2, 3, 4, 5, 6, 7, 8, 9, 10, 11, 12, 13, 14, 16, 17, 18,19, 20, 21, 22, 23, 24, 25, 26, 27, 28, 29, 30, 31, 32,33, 34, 35, 36, 37, 38, 39, 40, 41, 42, 43, 44, 45, 46,47, 48, 49, 50, 51, 52, 53, 54, 55, 56, 57, 58, 59, 60,61: n = A,T,C or G
  misc_feature 62, 63, 64, 66, 67, 68, 69, 70, 71, 72, 73, 75, 76, 77, 78,79, 81, 84, 86, 87, 88, 89, 90, 91, 92, 93, 94, 95, 96,97, 98, 100, 101, 102, 109, 111, 112, 145, 234, 235, 435,642, 744, 754, 794, 832, 837, 841, 843, 845, 848, 856, 861: n = A,T,C or G
  misc_feature 872, 879, 881, 898, 904, 906, 908, 928, 934, 949, 954, 964,974, 975, 994, 1003, 1004, 1005, 1015, 1028, 1041, 1043,1050, 1053, 1064, 1068, 1070, 1073, 1076, 1080, 1085, 1091,1098, 1106, 1116, 1117, 1120, 1122, 1124: n = A,T,C or G
nnnnnnnnnnnnnntnnnnnnnnnnnnnnnnnnnnnnnnnnnnnnnnnnnnnnnnnnnnnnnnntnnnnnnnntnnnnntnttntnnnnnnnnnnnnnannngggggtntnntacgactcactatagggcgaattggagcctccnccgcggtggcggcccgcccgggcaggtactttaggagacccaggccgggcagattgcctgaggtcaggagtttgagaccagcctgtctnncatggtgaaaccctgtctctactaaaaatacaaaaattagccgggcatggtggctcacgcctgtagtcccaactgcttgggaggttgaggcaagagaatcgcttgaacccaggaggtggaggttgcagtgagcccgagatccgcgccactgcacttccagcatggggcgacagagcaagactccatctcaaaattaaagnaaagaaaggaaacaaaagaaaagaaaagcttatattggaaccttcttctaaaaaaaaagaaaaaaaaaagaaagcctggattgcacacaaaatcttaaatttggccaagtcgatccaatttaaagggatatttaatttgccatcaccaaaaataattctttacttccccccaaaaatcaattaaaaaaaggttccaaaatagccaancttttcctaatggtggttttaaaaaatgttaattcaccaaaattaccattgttgttcccccaaactttctttttccagggtttattaaatttcctatttggnggtaaaaggnggaggggtatacccttgaaagttgagggccaatttaggangaaggtttgaagcctttcaaaacccttgcccttggaanaagangccntngnttnccttttcntttanaagtttttganggaaaantngggttttgggggggccnccaaantncntcctcaaaaactttttttcntttttncccttcattcctggngcctntttttttttnttttggcctnnaaactggcttttttgggtnaaaactttnnntttacccctnggttacccctcgnggcccccttttananaacctangtnggattcccccngggncntgnacngganttttncaattnttcaagncttttttngaatacccgnncanancntcgagggg

SEQ ID NO: 6445 - DNA, 1175 bp, Homo sapiens
  misc_feature 5, 6, 7, 8, 9, 10, 11, 13, 14, 16, 18, 19, 20, 21, 23, 24,26, 27, 28, 29, 30, 31, 32, 33, 34, 36, 37, 38, 39, 40,41, 42, 43, 44, 45, 46, 47, 48, 49, 50, 51, 52, 53, 54,56, 57, 58, 59, 61, 62, 63, 64, 65, 66, 67, 68, 69, 70,71: n = A,T,C or G
  misc_feature 73, 74, 75, 76, 77, 78, 80, 81, 82, 84, 86, 87, 88, 89, 90,91, 92, 93, 94, 96, 98, 100, 102, 103, 104, 105, 106, 107,108, 109, 110, 111, 112, 113, 114, 115, 116, 117, 118, 119,120, 128, 131, 136, 138, 226, 229, 232, 254, 255, 256: n = A,T,C or G
  misc_feature 257, 260, 263, 268, 269, 274, 526, 533, 631, 672, 750, 799,848, 862, 885, 905, 919, 932, 952, 980, 988, 990, 1002,1006, 1015, 1031, 1045, 1047, 1057, 1068, 1069, 1070, 1072,1073, 1089, 1090, 1092, 1099, 1120, 1127, 1142, 1146, 1161: n = A,T,C or G
  misc_feature 1165, 1175: n = A,T,C or G
ttgtnnnnnnntnntngnnnntnntnnnnnnnnngnnnnnnnnnnnnnnnnnnngnnnngnnnnnnnnnnngnnnnnngnnntngnnnnnnnnntntntntnnnnnnnnnnnnnnnnnnngtaagagnagnccgtntncgactcactatagggcgaattgggagctccacccgcggtgggcggccgtggcccgtggctcacgtggcccctaagtttccgggtcttnctnagngctggatggcatgtaagaacannnnatnctntttannccccncgtacctgcccgggcggcccgctctagaactaagtggatcccccgggctgcaggaattcgatatcaagcttatcgataccgtcgacctcgagggggggcccggtacccagcttttgttccctttaagtgaggggttaattgccgcgcttggccgtaatcatggtcataagctgtttcctggtgttgaaattgttatcccgctcacaattcccaccaccaaccattaccgagcccgggggagcattaaagttntaaaagncctgggggtgccctaaatgaggtgaagctaactcaccattaatttggcgtttgccgcttcacttgccccgctttccagttcggggaaaacctgtccgntgcccagccttggcatttaaattgaaatcgggccaacgccnccgggggaggagggcgggtttgccgtattggggccgcttctttcccgcttttcttcgcttcacttgactcgcttgcgncttcggtcgtttccgggcttgccggcgaagccggttatcaagcttcacntcaaaagggccgggttaattacccggttattcccaccaagaaattcaanggggggataaaccncaaggggaaaagaaaccattggntggagcccaaaaaaggcccnagccaaaaaagggncccaggaaacccngtaaaaaaaagggcccccgntttgcttggccgttttttttccaataanggcttccngncccccccttggnccangcctttacncaaaaaaattcgaccncctcaaaagttcananaggggggggngaaaacccccnnncnngggactttttaaaagnntncccaggncgttttcccccctgggaagcntcccttntgggcccctttttcntttnttccgaaacccttgnccgntttaaccggn

SEQ ID NO: 6446 - DNA, 889 bp, Homo sapiens
  misc_feature 506, 535, 540, 597, 618, 625, 644, 654, 669, 702, 735, 739,751, 756, 762, 770, 771, 799, 807, 832, 833, 834, 836, 840,844, 846, 853, 854, 866, 878, 879, 884, 887: n = A,T,C or G
gggcgaattggagctccaccgcggtggcggccgcccgggcaggtactggtctgtggcctgttaggcactggactgcacagcaggaggtgagcagggagcaagctagcactagggcccaagctccgcctcctgtcggatcagtggcagcattagatactcataggagcacagaccctgttgtgaactgtgcgtgtgagggatctaggtttcgtgctccttacaagaatctaattaatgcccgatgagttgaggtggaacagtttcttcccaaaaccgtctcaggaaacctgtccctggtgccaaaatttgggggacctctgacgtagcacactatctggcacataccaagcactcagaaaatatcccatttctcaaaactcagttccagtgtcaagtcttaataagtatattgatcttggaactccaaggtagttggtcctctctttgtgccataaatgtgccttgtaccttcggccgctctagaactagtggatcccccgggctgnaaggaattcgattatcaagcttatcgatncccgncgacctcgagggggggggccccggtacccccagctttttggtccccttttagtgganggggttaattggcgccgcttnggcggtnaatcatggggcataagctnggtttcctgnggggaaaattggttnttccgcttcacaaattccccaccaacattaccnaagcccggggaggcattaaaaggggtaaaaagncctngggggggccctnattgngggggngcctaacnncacatttaaatttgcgttggggcctcanctggcccngcttttccattgggggaaaaccttnnngngccnactngnttttatnnaatttggcccancccccccggggnnaaggnggntt

SEQ ID NO: 6447 - DNA, 852 bp, Homo sapiens
  misc_feature 69, 71, 72, 73, 75, 76, 78, 97, 109, 435, 441, 444, 445,448, 457, 473, 478, 485, 486, 513, 539, 563, 570, 577, 590,592, 607, 609, 612, 619, 643, 647, 657, 660, 662, 671, 673,684, 699, 700, 701, 705, 709, 713, 715, 724, 727, 729: n = A,T,C or G
  misc_feature 734, 755, 763, 769, 772, 784, 786, 787, 792, 803, 804, 806,808, 814, 817, 819, 827, 842, 843, 845, 848: n = A,T,C or G
gaattggagctccaccgcggtggcggccgcccgggcaggttgaggctgcagtaaagccaagatggcgcnannncnntncaaaaaaaaaaaaaaaaantttttttttttnaacgcttataaggtaactttatagactaaggtaagctggccgggtgtggtggttcatgactgtaatcccagcatcttgggaggccgagggggatggatcgcctgaggtcaggagttcgagaccagcctggctaatatggcaaaaccctatctataccaaaaaaaacaaaaattagttgggcatggtggcggaccgcctgtagtcccagctactcgggaggctgaggcttgagaattgcttgaactggggaggacaaggctgcagtgagctgagatcgcacaactgccctccagcctgggcaacagagcaagactccatcacaaaanagaaanaannaancgaaaaaanaaggtccctcggccgntctanaactagnnggatcccccgggctgcaggaaatttcnattttcaagcttatttgattccgccnacctcgaaggggggggccccgggnaccccanccttttngttccccttttangnggaggggttaaattncnccnctttggncggtaaaattcatggggcaataancctnggtttccctnggngnggaaaattngntttttcccccntcaccaatttccccnnnaaanaatnaccnancccgggganccntnaaaangtggtaaaagccccggggggngcccttantggggnggnggcctaaactcncnnttaantttggcgttgnncntnacctgnccncnttttccangtccgggaaaaaccnntncgngccg

SEQ ID NO: 6448 - DNA, 1159 bp, Homo sapiens
  misc_feature 3, 5, 6, 9, 15, 22, 23, 26, 30, 31, 32, 33, 34, 38, 39, 42,46, 50, 51, 52, 55, 59, 60, 61, 62, 63, 65, 66, 68, 69,71, 72, 75, 76, 77, 80, 81, 82, 84, 85, 89, 90, 92, 97,100, 104, 105, 106, 107, 108, 109, 110, 111, 113, 115, 116: n = A,T,C or G
  misc_feature 120, 122, 123, 124, 125, 126, 128, 131, 132, 136, 143, 154,219, 226, 227, 232, 244, 247, 248, 250, 251, 252, 253, 255,260, 421, 530, 573, 582, 629, 678, 690, 716, 719, 747, 762,765, 767, 819, 822, 831, 844, 849, 852, 857, 859, 875: n = A,T,C or G
  misc_feature 880, 884, 885, 895, 901, 906, 913, 914, 924, 929, 941, 945,953, 955, 956, 975, 976, 978, 984, 994, 999, 1005, 1009,1022, 1040, 1053, 1056, 1072, 1076, 1083, 1088, 1089, 1091,1095, 1102, 1107, 1115, 1120, 1128, 1136, 1147, 1148: n = A,T,C or G
  misc_feature 1155, 1157, 1158, 1159: n = A,T,C or G
ccncnnccnatttgnatgcatnnatnattnnnnngtgnntgntatntaannnatnagcnnnnngnntnntnntannnatnnnannctanntntaatnctnttcnnnnnnnngnanngggngnnnnnantgnntaanacgactnactatagggcnaattggagctccacccgcggtggcggccgaggtacacacaaaggaactgatgtcaaggccctttntatgacnnggggncattctagcaanacnncnnnncntattnatcttgggatctacagccacatgaaatacagacacatcgttcccccaagtcaggccagttttaggccattgagttatggggaaatgattaatgggatgaatgaaaaacaaataaaataaataaataaataaatacactaaagccttattagccaggccgtngatcacatgcccaacactcccctccatcccagcactatgcacagttcacggctcatatgcaaaagtgggaagacaccgttggggacaaggaagccaaagccaccaagtngacacattgggtccctcttcttaaaccaccctcaagccacacncaacccctngacggcctcccattcaccagtatggcttggattcatttctttcccancgggacccccttttttattaaataaatccctccattttcacatttttcntaagttttcttngaggggggaaaggaagaggaaaaagnaanaaaaagggaaaggaaaggtggggaaaanggtgccgggaaaccnccnanatggagttatggggccaccaaaaaaaaaagggaaggggccgtagccaactanaancaagccaanggaagggttcaangggtnaangcccnanagggaagtcaatccgnggaanccannggttcaaaanttcaanggggnaaggttnnttgggggccnccccntgggggggcttncaangggggaantnnttcaaggggggggtggaanncntattcnccaggatatnagggnacaagncaangggttttcaatgngaaggggattgatatacntagaaagggtttncancgttttttccggggcnatgnctggaanggtanntntcangccaccntttgngggatttnccggnaatgtttnttgttccngggcataaatnngtgcttntnnn

SEQ ID NO: 6449 - DNA, 1160 bp, Homo sapiens
  misc_feature 4, 11, 12, 13, 14, 17, 18, 20, 24, 32, 33, 36, 39, 43, 44,46, 49, 58, 60, 65, 67, 68, 69, 71, 76, 77, 78, 79, 80,81, 82, 84, 85, 89, 91, 92, 94, 100, 102, 106, 112, 114,116, 178, 185, 200, 201, 205, 213, 221, 224, 226, 279, 399: n = A,T,C or G
  misc_feature 400, 433, 457, 474, 528, 534, 537, 547, 578, 583, 599, 611,634, 642, 656, 663, 671, 678, 687, 705, 712, 718, 731, 741,757, 775, 781, 783, 785, 818, 824, 828, 842, 856, 867, 868,871, 911, 915, 925, 931, 932, 941, 949, 975, 979, 988: n = A,T,C or G
  misc_feature 989, 991, 992, 997, 1003, 1006, 1021, 1025, 1030, 1041, 1052,1055, 1056, 1077, 1087, 1090, 1098, 1099, 1100, 1125, 1128,1130, 1133, 1134, 1141, 1143, 1145, 1148: n = A,T,C or G
ccgnccatgtnnnntgnntntaantgtttttnnttnttngatnntnggntaaaatttnanatttntnnnancaccnnnnnnnanntggngnngntgattnancaanccttangncnaattggactccaccgcggtggcggccgaggtacgaaacctccgtggtgacggggactgtggngcggggnaggggggggctcagnngaanaaaaattntttttttnttncntccattgggcatgaatgtgatggagcccgggatgcaaatgctggcatcaaagntggggcaggtgatgttggaggcggaccgagatgagctggttgtggatcttcacgcagctgaagaatgtgcagttgttcttcggggtcgctcttgaagtccccgggcttcaagatggacgnngctggtttgtccgggcccgttttgatgatacanatgccgtcttgtttccacactttntttaccagccacttccnccggggggggtcttcccattggaagttttccgaaagccccaggggtcttgccanggaagngtngttttgccanggggccaccgttggggggtgccaagggccgnattgnacccgtttggaagtcnagggggttggtntggtttgcacccaaccctttggntccccgtngccaacaacgccangatcccntgggccancttttgngaagggaanattaaaaacttgggaagnaaacccnggggcnttggggtaacccnttggcccccngggcccgggccccgcnttcttaagaaaaccttanttgggnantncccccccgggggcttggcaagggaaaatttccntattanttcnaaaggcctttaatncgcattccccgttncgaaccccttnnaangggggggggggccccccggttacccccaaccttttttggntttnccccttttangtgggnnggggtttanaatttggnccccccttggggccgttaattccatngggnccaattaanntnngtttnccctgntgngtgaaaaaatttggntatntcccncttcaccaaanttccccccacnaannaattaccaaaccccggggagnccatttaaanagnggttaaannnccttggggggggtgcccttaaatgngangnggnngcctaancntnccncatttaaattgc

SEQ ID NO: 6450 - DNA, 1304 bp, Homo sapiens
  misc_feature 3, 10, 11, 16, 18, 20, 21, 22, 23, 25, 26, 29, 35, 36, 37,39, 42, 43, 45, 46, 48, 51, 57, 58, 63, 65, 69, 71, 72,79, 83, 84, 85, 86, 87, 88, 89, 90, 93, 95, 96, 98, 101,104, 105, 107, 108, 109, 110, 112, 115, 116, 117, 118, 119: n = A,T,C or G
  misc_feature 120, 128, 141, 151, 185, 186, 188, 189, 196, 197, 198, 201,202, 207, 214, 215, 216, 219, 221, 224, 225, 227, 241, 275,278, 288, 290, 292, 300, 319, 362, 390, 392, 412, 415, 422,427, 436, 439, 445, 458, 470, 475, 485, 486, 490, 502: n = A,T,C or G
  misc_feature 504, 513, 515, 516, 527, 530, 535, 552, 565, 576, 579, 582,599, 600, 601, 608, 610, 611, 622, 624, 627, 630, 635, 645,648, 651, 652, 653, 656, 662, 665, 668, 675, 695, 707, 715,720, 722, 725, 737, 755, 757, 759, 761, 765, 773, 777: n = A,T,C or G
  misc_feature 784, 786, 788, 793, 800, 804, 806, 811, 817, 820, 825, 834,835, 836, 851, 871, 872, 873, 885, 886, 889, 892, 894, 899,901, 903, 914, 915, 916, 918, 920, 922, 927, 929, 931, 934,938, 963, 986, 989, 991, 998, 1001, 1005, 1015, 1025: n = A,T,C or G
  misc_feature 1037, 1054, 1055, 1058, 1059, 1061, 1073, 1078, 1083, 1084,1090, 1104, 1114, 1115, 1116, 1117, 1121, 1122, 1123, 1125,1126, 1127, 1131, 1134, 1136, 1140, 1142, 1149, 1152, 1155,1156, 1160, 1162, 1177, 1180, 1182, 1185, 1192, 1195: n = A,T,C or G
  misc_feature 1196, 1203, 1212, 1218, 1222, 1226, 1228, 1230, 1231, 1237,1251, 1254, 1255, 1256, 1259, 1265, 1266, 1269, 1270, 1271,1276, 1284, 1289, 1296, 1297, 1299, 1300, 1301, 1302, 1303: n = A,T,C or G
atncgtccannttttntntnnnntnnttnatattnnntnttnntnntntantcatgnntaatntntatntnntatacantaannnnnnnnatntnntnttnttnntnnnnanggnnnnnnacgcttanccactcactatanggcgaattgnagctccacccgcggtggcggccgaggtacttcanntnnttttttnnnttnnttttnttggggnnntancnggnngngggtcgggagaaanaaaaattttttcgcctgctgccttccttggatgnggnagcccgtttntnangctccctntcccggaatcgaaccctgnttccccgttaaccctgtggtcaccatggtaggcacggcgaacntaccattcgaaaagtttgataaggggcnanaacgttttcgaaatggggtnaanccccccncccanggggccccngcntttacntttgccccggggncgggcccgcttntttanaaaccttagnngggnataccccccccngnggccttgcnannggaaatttctnatnttttncaaagcctttatttctntattaaccccgtncctgaaccttnctnaanggggggggggggccccnnngtttttncnncgaaaaccctntntantgnttgcnaaaaaattanggnggnnnggnggtttnaanttntgaaccntaccccttttgggcctaagnaaaaaaattttngggaaaanaaacntnttncttttcccatgnggggggaaaaaaattgtntnantncccntttttcgnaaanaatttcncnanaacantattttntcgnanccccngggggnggnccttntaaaaaatnnnttaaaaaaccccccngggggggggggcccctttannntaaggggggggnnctncancnccccncntntttaatttttnnngngntnggggncnanaantttngggccggggttttttataatgagtngggggggaaaaaaactcttgttnatngnccacacnatngggnatttatatanaaaaaaaaanaggcgccccacntcttcccccgggggggnngannanaccgttttgttngtaanttaanngtgggnttctttttatacanttttattctnnnnaaannntnnnatantgncntttngnccttttnganctnntatntngggtttggcggaccnaancncgngtatttntannttttaantttaaaaangggggnggtnattntntnngtgttntttcccacaaatanatnnnggngggggnnatnnnccgcngagaaaanaaaanatacttnntnnnnnt

SEQ ID NO: 6451 - DNA, 1171 bp, Homo sapiens
  misc_feature 7, 14, 15, 17, 18, 19, 26, 28, 29, 31, 33, 34, 35, 36, 40,41, 45, 47, 57, 58, 60, 64, 67, 68, 69, 72, 75, 76, 82,85, 86, 87, 88, 90, 91, 92, 93, 96, 97, 98, 99, 102, 104,106, 107, 114, 196, 198, 199, 201, 204, 205, 208, 218, 220: n = A,T,C or G
  misc_feature 223, 225, 226, 229, 231, 232, 234, 238, 248, 445, 450, 481,542, 564, 583, 592, 599, 635, 646, 655, 685, 691, 697, 701,712, 730, 736, 743, 750, 792, 794, 795, 809, 812, 821, 846,851, 853, 858, 860, 866, 876, 886, 889, 913, 914, 923: n = A,T,C or G
  misc_feature 937, 938, 944, 945, 966, 968, 972, 983, 985, 987, 992, 995,1003, 1004, 1025, 1028, 1029, 1036, 1037, 1047, 1056, 1063,1068, 1073, 1082, 1090, 1094, 1097, 1098, 1099, 1100, 1109,1118, 1119, 1121, 1126, 1129, 1138, 1139, 1143, 1144: n = A,T,C or G
  misc_feature 1153, 1163, 1165: n = A,T,C or G
ccccccncattatnntnnnttgaatntnnanannnntttnntatntntcatacaaanntngctnttnnngtnacnntgacantcnnnncnnnnagnnnnggngnannatatcanatcgctcactatagggcgaattggagctccaccgcggtggcggccgaggtactcaggaggctgagaacacaggccccttctntnncngannggngtgtatgcangnaananntantnncntttntgtttggctngtgccacaacaaaacagccccaaacagattgccatgagcatgctagcctggcttggtgtttgacgataaaatcagactggtaagtgcagtcagtgttcaggaaagaatctccaggctcttctcccatgacctggtttttaaaatcagcattcatacagcctgctttacccatcttctctgtcctctgcagatgaacnccggntcctaggcaaggggaccaaaaattccttgtncagcctggagggaaggtccttggaaagaaacattccctggaaggattgatgacctgccacntgctcaattcgttggggccagnaatgccagctttccattcntaccttgangggcttnaaagggggaaaaaccttttcacaaccaccgttgganggaaaagggcngccaaatcnttttgttggggaaaaggggttcaaccttangaaatnggggcnaggngggcccagccnaaaaataaggggggcttnccaaantggccancggtttnttggccaaggtttaaaccttgggggttccccaaaggggaagnannccattggggccccnttnccaacaaanctaaaggtttttgcttccttataangaaantnaaaangntccccntgaagctttngttttttttnttnaacaaggttttaggaccaagaaannaaatggggncctcttttggtttnntttcannttaattccccacggggggaangnaaancaggtgggtantnanttccntcnttgggaannaatgaaattgtttggtccttnaanntgtaagnnggatttaaantctcattgnctatacntggtnaaagngaaaaagcnttccaccnaaanctnnnngtgtaggtnggagggagnncntgcanatncacaccttnncccnnatgttgccncacataccangnaaaacg

SEQ ID NO: 6452 - DNA, 1154 bp, Homo sapiens
  misc_feature 3, 4, 5, 6, 7, 8, 9, 10, 12, 13, 14, 15, 16, 17, 18, 19,22, 24, 25, 26, 28, 34, 36, 38, 43, 44, 45, 46, 47, 50,51, 52, 53, 54, 55, 56, 60, 61, 62, 63, 64, 66, 67, 69,71, 72, 73, 74, 75, 77, 78, 80, 86, 87, 94, 95, 96, 99,100, 101: n = A,T,C or G
  misc_feature 105, 107, 109, 114, 115, 118, 120, 121, 126, 131, 138, 139,141, 146, 207, 208, 213, 216, 222, 223, 225, 226, 233, 236,240, 254, 292, 424, 440, 462, 466, 467, 500, 509, 510, 538,555, 560, 587, 595, 598, 632, 636, 723, 737, 748, 772: n = A,T,C or G
  misc_feature 789, 811, 847, 872, 890, 904, 905, 908, 918, 931, 935, 944,956, 957, 958, 965, 971, 976, 982, 992, 995, 997, 1000,1010, 1013, 1018, 1026, 1034, 1036, 1038, 1041, 1051, 1055,1079, 1081, 1089, 1092, 1094, 1095, 1101, 1103, 1109, 1117: n = A,T,C or G
  misc_feature 1118, 1119, 1126, 1127, 1131, 1132, 1136, 1138, 1141, 1149,1153, 1154: n = A,T,C or G
ccnnnnnnnncnnnnnnnnctnannnanactgcntnanataannnnnttnnnnnnnactnnnnntnntnannnnnannanatttanntgttttnnnaannntggngnangtatnntancnnctctnctatngcgaatnngngctcnccccggtggcggcccgaggtacgcgggattcccagcagtttgagaggccgaggtgggcggnnggggntcncaaggnnannaaatttnttncatnctggctactacagngaaaccctgtctctactaaaaatacaaaaaaaaattanctgggcatggtggcaggcacctgtagtcccagctactcaggaggctgaggcaggagaatggcatgaacctgggaggcagagcttgcagtgagccaagatcacgccaactgcactccagcctggggggacagnagccaaggacttgttnacaatagtaaaaaaataatacnaaannaaaaaaaaagttaccctgccccgggggccggcncgctcttannaacctaggtgggatccccccccggggcntgccagggaaatttccnatatncaaggctttattcggattaccggtccnacccttcnagngggggggggccccgggttaccccaagcctttttngttncccttttaagtggagggggttaaaatttggcggcccctttggggcgttaaattcattggggtccattaagccttgtttttcccttgntggtggaaaaaatntgttttatttnccgccttcaccaaatttcccaccnccaaaccattatccgangccccgggggaagccattaaanaggtggttaaaagcccttggggggttgcccttaaantggaagttggaagcctaaaacctcnaccattttaaatttggcnggtttggcagcctnnaancttggccccncctttttcccatntccnggggaaaancccttggttctnnnccccacnttgganttttnatatgnaaatttgggnccnanacnccccccgggnggnaaaanaaggcccngttttttncntntanttttgggccncctnttttccccgctttacctttggctnanatttgganctntnntttggngntttggncccttttnnngtttggnngggnnaaancngtnatttaatnttcnn

SEQ ID NO: 6453 - DNA, 933 bp, Homo sapiens
  misc_feature 7, 23, 75, 93, 100, 102, 108, 122, 123, 125, 126, 127, 128,132, 133, 134, 184, 294, 312, 318, 360, 363, 476, 480, 481,498, 501, 534, 549, 555, 564, 569, 578, 581, 589, 594, 598,601, 619, 645, 651, 674, 687, 693, 712, 713, 716, 738: n = A,T,C or G
  misc_feature 739, 746, 756, 759, 766, 776, 781, 783, 791, 812, 816, 818,824, 826, 828, 830, 831, 835, 843, 845, 846, 866, 868, 869,874, 875, 884, 887, 891, 899, 909, 911, 916, 919, 922, 923,924, 926, 929, 931: n = A,T,C or G
gattaancctttgaaaatccccnatttggaaaaatccggagctccaccgcggttgccgccgagttttccccacantttttcgccgagccgcanactcacngngcgggnttttaccacccaannannnncccnnncgtacctcggccgctctagaactagtggatcccccgggctgcaggaattngatatcaagcttatcgataccgtcgacctcgagggggggcccggtacccagcttttgttccctttagtgagggttaattgcgcgcttggcgtaatcatggtcatagctgnttcctgtgtgaaatttgntatccngctcacaattccacacaacatacgagccgggagcataaaagngtnaagcctgggggtgcctaatggagtgagctaactcacattaattgcgttgcgctcactgcccgcttttccagtcgggaaacctgtccgtgccagcttgcattaatgaattcggncaanngcgccggggagagggcnganttgcggtaattgggcgcttcttccgcttcctcngctcacttgaactcngcttgngcctcaggntccgnttcggcttngcnaggcaaancgggnaatnaancttccacttcaaaagggngggtaaaataacgcggttatcccaanaagaanttcaaggggggaataaccgccangggaaaaagaaancattgngaagccaaaaaagggcccnnccnaaaaaggggccaaggaaaccgnnaaaaaanggcccgcagnttngatgtgngcatttaatnccatnangggctccnccccccccctggtccggagcntttnanaaaaanantngnncccntcaaagtncnnaggggtggcgaaaaaccccncnngggannaataaaaanganaccnaaggcgtntcccccattngnaaatnttnccnnnanagngncg

SEQ ID NO: 6454 - DNA, 836 bp, Homo sapiens
  misc_feature 66, 77, 83, 489, 507, 552, 578, 618, 631, 656, 671, 673,696, 708, 713, 729, 731, 739, 746, 768, 781, 795, 797, 803,812, 815, 824, 829: n = A,T,C or G
tccaccgcggtggcggccgaggtacagagtaggaaggaagaaataaaactatctttgtttgaagangacatgattgnctatgnaaaaaacctgaaagaattgaccaaaaatactcctgaaatgaataagcaattacagtaaagttgcaggatataaggttaatatataaaaagcaattgctgttctacataccagcaatgaacagtagaatttgaaattggaaacacaatactatttgtattagcacccccaaatacttaggtataaatctaacaaaatatgcgcaaggtctgtatgaggaaaactacagtaatctcatgaatgaaatcaaagaattaaataaatgggggatattctatgttcatggataggaagattccatactgtcaagatgtcagttcttcccaccttcatctatagacttttttttcttagatggagtctcgctctttcacccaagctggagtgcaatggcgccatctcagcttnactgcaaacctccccctnccccggtttcaaggggattctcgggcttctcagggtggcttgaanacaagggaggaattcgcttggacctngggaggcacaaggttgttagtggagccgattaaattattnaaaaagtttttangagttccttgccccggggcgacccngctcttaagaaactngngggaatccccccgggcctgcaanggaatttccgantttcnaaggcctttttcggantncccggccnaaccttngaaggggggggggccccgggancccaaactttttngttccctttttagngngggggntaaattgcnccnccttggccnataanccaaggg

SEQ ID NO: 6455 - DNA, 1244 bp, Homo sapiens
  misc_feature 7, 9, 11, 17, 21, 23, 30, 33, 34, 38, 40, 42, 50, 54, 57,58, 61, 69, 71, 76, 77, 81, 86, 89, 90, 91, 93, 94, 130,132, 170, 191, 196, 228, 234, 260, 268, 272, 339, 356, 385,411, 412, 424, 438, 443, 488, 499, 506, 507, 523, 527, 529: n = A,T,C or G
  misc_feature 533, 539, 545, 556, 569, 579, 584, 594, 596, 598, 600, 601,616, 636, 638, 650, 658, 666, 673, 680, 685, 707, 708, 722,725, 729, 740, 744, 753, 768, 769, 773, 786, 788, 792, 806,814, 817, 818, 820, 841, 849, 856, 860, 868, 869, 870: n = A,T,C or G
  misc_feature 873, 874, 876, 881, 882, 885, 888, 889, 892, 898, 900, 903,912, 915, 923, 930, 933, 943, 946, 952, 953, 955, 960, 961,963, 974, 978, 989, 996, 999, 1002, 1005, 1007, 1015, 1023,1026, 1027, 1029, 1030, 1033, 1036, 1042, 1044, 1047: n = A,T,C or G
  misc_feature 1052, 1059, 1061, 1071, 1074, 1082, 1087, 1088, 1097, 1098,1102, 1103, 1108, 1110, 1127, 1134, 1136, 1137, 1140, 1141,1142, 1147, 1150, 1153, 1159, 1165, 1166, 1174, 1177, 1179,1183, 1194, 1196, 1197, 1201, 1209, 1215, 1216, 1221: n = A,T,C or G
  misc_feature 1222, 1223, 1227, 1230, 1231, 1237, 1241, 1242: n = A,T,C or G
cccaccncncnaaaaanaacntnataagcnccnnagtnananactaagantacnacnnaanacatgaananctacnncccnccccngcnnncnnttaacgccttgaataccctcatttagggcgaattgnanctccaccgcggtggcggccgaggtaccatcaagatggntttagtttaagtcagtctccnaagtntttatgaaacacccactcggttttcagtaagnagtggngaactcggtgtttagcctctttcccngaacttancggnaggttcggtattaagctgcagtgctgcagtgtggatggagccctgcttagcagatattaccagtgcntctgctgcttgtttganccatggcctgggggtgtttgagccaaaangcaaggagacctgtcctgagggacgnnccaatgtgcaangggagtcagggttnggcanacagctggttaccattggcccgggggcaggcacggattaataacnaaaccttaagntggggannccccccccggggcctnggcnangggnaaattnccggantaattccaaangccctcttaatcnggaattgacnccggntcgaaccctncngnanngggggggggggcccnccaggaaaaccccccaaccntnattattggaatncccccttnataaaganggaaagnggggtanaaaantatgcccgccgcctttgggggnngataaataccaatnggngtcnaataaggcatnggantatccctangatgatggaaaaaanntggntctaatcccccgncntccnccaaaattatcccnccaaccanaannantacctgaagccccggggggangccaaaantaaaagngtgnaaaaaaannnccnngnggggnnggnccnnaanatggangnggnaggccaaanctnaacatttnaaatacnggncgattgggcnctnacactnngncccgnntntttaccagttncggnaaaaaaaccangacaccnganccnagncngtgaattnaaatgggnaanntnnggnctnaaaccncnccnggatnaaaaaananccgcaatatnccnaatatttngggcnnaccacattnncacnntaccntnggaaaatgactggaacntctaatngnnacnnnggganccnttnacgagnctgcgnnggagaagncgngnaaanaatgattacantnnaaanagggcggngaaatnnggagnnnatcnccnnaaaatncaanngg

SEQ ID NO: 6456 - DNA, 1180 bp, Homo sapiens
  misc_feature 1, 5, 9, 12, 13, 14, 17, 24, 26, 27, 30, 33, 35, 37, 43,48, 54, 56, 61, 62, 65, 66, 68, 69, 72, 76, 77, 82, 83,89, 91, 92, 101, 106, 107, 108, 109, 110, 117, 124, 152,161, 199, 279, 407, 472, 476, 541, 550, 557, 558, 560, 589,595: n = A,T,C or G
  misc_feature 608, 639, 668, 673, 676, 687, 693, 695, 701, 703, 706, 707,709, 723, 727, 734, 742, 744, 745, 747, 748, 755, 770, 789,804, 814, 819, 827, 834, 835, 842, 844, 852, 856, 873, 880,882, 883, 884, 888, 891, 906, 911, 917, 920, 921, 932: n = A,T,C or G
  misc_feature 942, 966, 969, 970, 988, 1001, 1002, 1003, 1006, 1009, 1010,1014, 1023, 1026, 1034, 1037, 1038, 1050, 1051, 1067, 1069,1070, 1072, 1074, 1075, 1083, 1089, 1101, 1104, 1105, 1113,1116, 1117, 1118, 1119, 1121, 1124, 1157, 1158, 1163: n = A,T,C or G
  misc_feature 1164, 1168, 1169, 1174, 1178, 1180: n = A,T,C or G
nattnatanatnnntgngtaatantnntgngtnananattatnttaangttgtnanatttnnatnntnntanttannatatnnttttanannaagaggatntatannnnntattatnactactnactatagggcgaattggagctccaccgnggtggcggncgaggtaccttttcctgcagctgcgccgtatgtctgantgactaaggggcagtcgtgagaggcagagtccaagatctcattggtcgtttccagactgccgtccagccggtgctgattnatcagggcacactccccgcgtacctgcccgggcggccgctctagaactagtggatcccccgggctgcaggaattcgatatcaagcttatcgataccgtcgacctctagggggggcccggtacccagcnttttgttccctttaagttgaggggtttaattgcgcgccttggccgtaaattcatgggtcataggnttgnttcctgtggtgaaaattggttatcccgctcaccaatttccacaccaacattacgtagcccggggnaagccaatnaaagttnntnaaaagaccctgggggggtgcccctaaatngaagtngaaggcttaaacnttcaacaattaaattttggccggtttgccgncttcaacttggcccccggctttttcccanttccnggngaaaaaccctngtttcnantggccnangcnntngccatttaaaatgnaaantacgggnccccaaancnncnncccgggngtaagaaagggccgngaatttggccggttaattnggggggcggcctccnttacccggcnttttnccttcggncttcaanntggaacntncgctttgngatntttggggtccacaatcntggcttngnnnggangangcccggggtatattnaaacntttaanctnnaaaaaggggcnggttaaatancggggttatttcccaccaagaaantcnngggggaattaaaccgccnagtgaaaatgaannnttnttnnaccnaaaaagggncantaaaaaanggnnccgggaaacccnnaaaaaaaagggccccnanntngnnttggagtnttttanccaaatagggtnccnngccccccntgnnnnanganctttacaaaaaaatttaccccttaaaagttcannagggnnggtnnaaaanccantn

SEQ ID NO: 6457 - DNA, 1274 bp, Homo sapiens
  misc_feature 2, 11, 13, 14, 15, 16, 17, 24, 31, 34, 37, 40, 46, 47, 48,49, 50, 52, 56, 59, 60, 65, 68, 71, 83, 91, 93, 95, 99,101, 102, 104, 105, 173, 180, 183, 187, 188, 200, 220, 231,235, 243, 245, 268, 300, 324, 337, 342, 345, 356, 371, 378: n = A,T,C or G
  misc_feature 381, 382, 386, 389, 404, 405, 414, 420, 432, 433, 442, 443,452, 453, 471, 480, 482, 485, 488, 489, 514, 515, 520, 533,535, 537, 541, 549, 550, 551, 552, 574, 589, 595, 599, 605,621, 623, 645, 648, 666, 670, 671, 676, 681, 690, 693: n = A,T,C or G
  misc_feature 699, 700, 701, 702, 705, 706, 707, 709, 721, 723, 729, 730,735, 739, 746, 747, 762, 764, 770, 773, 774, 782, 787, 788,789, 790, 802, 808, 813, 823, 828, 838, 839, 842, 843, 844,847, 848, 860, 875, 876, 877, 878, 880, 882, 888, 889: n = A,T,C or G
  misc_feature 893, 894, 900, 901, 904, 915, 918, 922, 924, 926, 927, 930,931, 932, 937, 939, 943, 947, 952, 956, 963, 966, 969, 978,980, 991, 997, 999, 1003, 1004, 1022, 1025, 1029, 1035,1043, 1048, 1063, 1080, 1082, 1084, 1089, 1101, 1107, 1115: n = A,T,C or G
  misc_feature 1116, 1129, 1131, 1134, 1138, 1141, 1144, 1154, 1157, 1160,1161, 1162, 1164, 1168, 1174, 1175, 1180, 1182, 1184, 1186,1192, 1198, 1206, 1220, 1225, 1229, 1242, 1250, 1260, 1267,1268, 1269, 1271: n = A,T,C or G
tnctacattantnnnnntttattnattaatnatnatntantaattnnnnntnatanttnnttgtnaanatntttattattttnttttaatngngnaatnanntnnttcgtatcactatagggcgaattggagctccacccgcggtggcggcccgcccgggcaggtactttttnatttttnatntatnntttttgcgcgtntgctgccttccttggatgcngtagccgtttntcangctccctntncggaatcgaaccctgattccccntcacccgtggtcaccatggtaggcacggcgantaccatcgaaagttgatagggcanactttcgaatggntcgtnagncgccccccgangtacctctgcccgcnttaaaantanntggnatnccccccgggctgcanngaaatttcnataatnaaagctttattnnataacccgnncaaaccttnngaggggggggggcccggntaccccaancnttnttnngtttcccattttaagatgaaggggnntaaanttgtcaccacccntntngggntgtaaaannnnaatggggacaattaggccttgnttattcccttggtgntggaanaaanattgtnatattacccggttttnanaaaaatttccaaaaaactaaanaantaattcgatgaccccggnggannccatnaaaantttgttaanaantcctannnntgnnngncccctataatgntnagttgnnaaccntaancattcannaatatttaaattttngnattttngannacattaanatatnnnnccccgatctttnttccanatttntcatgggganaacanatctttgtannatnnnacnnatgttttcgatntattataaatggaannnntncnggtccnnaatnncccacnngtnaatgaatgaangantaanantnnatnnntattnantatngacnaaccntttntctcatnatntanaattaatantnaacatgaacantcactnantcgnnctttatggatcattgacntantatntacctnaaataagntatgntgattaaataatatntaatcttaaaaagaggncngnctttnatagtcgttggntatccnctactganncttgtatggatananacncacnatnaanataaaatatnttnatnnntnatcnaatatnntttancntnanaaaatngtacantgataacntattcttaatctangaccnactnatgaattatgganaatctaantaaaattatnattaatnnncnacc

SEQ ID NO: 6458 - DNA, 946 bp, Homo sapiens
  misc_feature 16, 165, 214, 322, 346, 352, 375, 380, 387, 408, 414, 422,435, 438, 439, 446, 451, 458, 460, 461, 470, 480, 491, 496,498, 507, 509, 517, 518, 519, 520, 527, 528, 531, 546, 551,563, 568, 570, 584, 587, 602, 604, 611, 614, 619, 624: n = A,T,C or G
  misc_feature 630, 633, 635, 637, 648, 660, 670, 672, 678, 684, 685, 687,689, 696, 709, 712, 713, 715, 716, 721, 724, 728, 735, 737,741, 743, 749, 755, 760, 764, 765, 768, 771, 774, 776, 780,781, 783, 786, 791, 792, 793, 797, 800, 803, 805, 811: n = A,T,C or G
  misc_feature 812, 813, 814, 817, 818, 819, 822, 823, 824, 829, 830, 833,838, 839, 840, 846, 851, 853, 857, 860, 862, 864, 868, 869,870, 874, 877, 883, 884, 885, 916, 917, 919, 921, 922, 926,933, 936, 940, 942, 945: n = A,T,C or G
gaattggagctccacncgcggtggcggccgcccgggcaggtactttgtgtagagatggggtttcaccatgttgcccaggctggtctcgaactcctgggctcaagcaatccgcccaccttggcctcccaaagtgctgagatttgtattgcctcctataacagcctnctatggtaagatatctgccagagtcacaagccctcccagggttcacggncacctctctcagctgggggagtgccaaagccacaccgtgagagcaacactggatggcagacatcgctgtggccagcttagggaattacagtccagacatgctgactgncaagggaaatgggcctgctcattnaatttntcaaaatgaggaatgggggtgcnaaccntttattncatgaacaataatctgggaanggattnatcttcgngggcttttttacnaannattttancctcnaagggtntnntttttggtnaattatttcnaaccctggaantaatntncctttaagngncaaaaaannnnttggganntgntatttagggcttgtnaaatngatcaatgttcnttttnanttttcaaaaccctnttnatttttttggaaaananttttttntanttttnccatnacggtnatntnanaataaaggggnataattaaaacnctcccccatntnctttcntaaccnnantntttccancaaattaaggaangtnngnngaagntgntatntttggtntngccntnataaanccattnacccngggnnatnccnggntnaaanncnatntttgnnntttnaanaananatcacnnnnccnnntcnnntattnnaanaatannnctcctntttgntngatnttntnantatnnntatnttnggggtnnnctcataattttaaccccatgactttggatcnncntnntctntaggacnacnaatnanttnc

SEQ ID NO: 6459 - DNA, 858 bp, Homo sapiens
  misc_feature 653, 764, 775, 789, 790, 792, 804, 825, 833, 836, 855, 856: n = A,T,C or G
gtaatacgactcactatagggcgaattggagctccaccgcggtggcggccgaggtaccatagaccccctcccatactatggggactcccaggcactccacaagagctaggtgaaattgagttaaaatgacagctatagaccataggaaaaattgctcaaacaatttcagcctgggtaaatgagaggtgccccattagcttattctacccagttcaccctttctctccaggtgatcaagtgtggatcaaggattggaatgtagtccccttgtgaccacggtggaaagaccccagaccgtcatcttgaccacccccacagctgtaaaggttgaaggaatccaagcctggatccaccacagccatgtgaaacctgcagcctctgagacctggaaggtgagaccaagcccagacaacccctgcaaagtgactctgagaaggacgacaagccctgctgcagtccacccagaagctgactcatctatgcacagccaaagcatgaggaaactcatcgtgggacttattctccttaaaatttggacttatgtaataaggacttccactgattttccccacatggaggacttgttcccaatgtattcatcaggtcactgagtaggggcaacaagtttaaaacaggtttctggttttataggntattattggttgcgggacaattcaaagatggggagagacccaaacaaaagtgagtttcagggaaaggtctttttttaaaaagatgatcactttggcttcaattaggaattngtggtaccttngcccggggggccgnntntaaaaacttagngggatccccccgggctggcanggaaattnganttttaaggcttttttgganncg

SEQ ID NO: 6460 - DNA, 984 bp, Homo sapiens
  misc_feature 2, 3, 5, 8, 9, 11, 12, 13, 15, 16, 20, 21, 25, 29, 32, 34,36, 37, 39, 40, 44, 45, 47, 61, 63, 64, 69, 75, 77, 78,81, 85, 86, 88, 164, 313, 442, 460, 500, 579, 584, 602,619, 646, 647, 678, 707, 722, 755, 762, 777, 778, 784, 791: n = A,T,C or G
  misc_feature 792, 813, 855, 857, 860, 864, 871, 873, 881, 904, 906, 907,914, 918, 921, 922, 923, 926, 932, 934, 944, 950, 951, 952,969, 977, 979, 982, 983: n = A,T,C or G
tnnanttnntnnngnnttannttantatnttngntnntnnttgnntnttgattattaattntnnttttntagaanannatnttannancgctaatacgactcactatagggcgaattggagctccaccgcggtggcggccgaggtacatcagggcagtttctanggccaatctctcttcttcttgaccttcttggaatttgtaagtatcagtaatatccatcatgccatctcctccaatttgtttggtcacaattaatttcccaatgtgggtggcatccacattttccaccacatgagtgccatctttcttanctgtaatgtaaatgaggtcgctgttgacctctgcaaaaacaaaaggtgcatcaaattggaagcaagacatggcccgtgcttggatggcttggaaccgagggcggggcccacacccgatacatggccatncgcttattttcctggggnggggtgctgtcccacaagcttgcccagcctccaaaaatcncaaccagggaaagggtcaagggccctttgtcatcccatgcttttcatttccaagccaggtgggtaagtttccacacctngaatncctttgggtgaaggtttnggaaatttcaacgtttncccaattcttttcttcccagggaaaannattgtcccattttggcaaaaatttggggcantcaaatttattcaattgggggccatgaangaaaaataaattttnggttaaaacaaaatttcttttggcgggggttantttcccnaaaggggcaattcgnntaaaanaaattgnngtttaaaaaggaacacccaanccaaaaaaaacccccaacaatttggggcccaataacccgggnanctngggnattttcntnaagaaagnctttccggggtatttcccaaatnannaaaatgnttanaannnccnttcccnanttcccaaggncccgannnggggggggggaaccccncaatatgngncannt

SEQ ID NO: 6461 - DNA, 1129 bp, Homo sapiens
  misc_feature 1, 3, 5, 6, 12, 15, 17, 37, 39, 43, 47, 49, 50, 52, 56, 57,60, 62, 63, 67, 70, 71, 74, 76, 77, 80, 81, 98, 99, 102,104, 105, 107, 111, 115, 117, 307, 320, 328, 351, 356, 381,389, 398, 400, 424, 426, 429, 432, 438, 443, 460, 463: n = A,T,C or G
  misc_feature 472, 473, 475, 487, 494, 510, 512, 517, 519, 522, 533, 545,546, 548, 549, 554, 557, 565, 575, 583, 589, 594, 601, 603,609, 614, 622, 625, 626, 627, 628, 629, 631, 632, 640, 645,646, 647, 651, 654, 665, 668, 670, 684, 688, 689, 695: n = A,T,C or G
  misc_feature 700, 704, 710, 723, 726, 739, 740, 750, 751, 753, 754, 757,759, 760, 763, 765, 766, 770, 772, 774, 785, 792, 796, 799,803, 823, 829, 832, 835, 837, 838, 839, 844, 849, 850, 853,861, 862, 864, 865, 867, 870, 873, 874, 881, 883, 890: n = A,T,C or G
  misc_feature 899, 905, 907, 908, 909, 914, 923, 925, 926, 931, 936, 939,947, 948, 949, 952, 958, 959, 963, 965, 978, 981, 983, 984,989, 1003, 1015, 1022, 1031, 1036, 1057, 1070, 1071, 1074,1075, 1076, 1092, 1102, 1104, 1109, 1121, 1122, 1128: n = A,T,C or G
nantnntttacnaantnttgaaattttttattaactntnaaantttngnnantttnncgntnnttgnatnnttntnnatnntttaatttttaagttgnntananngnagantctngntaatacgtactcactatagggcgaattggagctccaccgcggtggcggccgcccgggcaggtacgctggatcccaattccccacgggacttcatttgactcctttctcatccgcatgcaggaggaggagaagaaccccaacacggagttctacttgaaaaacctggttgatgaccacgttgaacctcttnattgggggcaccnagaccgtnagcaccaccctgccgcttatggncttcnttgcttgctcaatgaaagcacccantaggttgngaggccaangngtccatggaggtagatttgacagnantgnatnggcaantaacncggcaacccaaagtttnganggacccggnncncaaagattgccncttacantggaaaggtcagctgnantcacnanccnaatattcccanaagaattttttnnannaactnttnaattcccncaattgaaanttttttgngactcncggtnattaagntnctatanaaaangtggaacnatnnnnnanngttttttnctggnnnaatnttntttcttttccnttncnctctttaaagtggntacnnccctcnatacntttntaatcnctttcggggcccnganttccttattaaanncattaatatnngnnatntnnctnannctgngngncttgttctatnggttatntttnctnattnttcctaatgccgtttttttngaatanacnccngnnnagaantcttnnatnaaaggggnngnnanacnccnntagtatntnccccaanaattttatntggttntnnnctttntaatattgnanntgggnatttnaanttttcaannntgncctttnncgcntngtaattcactatnggntnngttanaatatttgatttgntttgttattccnatattcnttttttttnttagnttttagccccccccccccccnaaagtaagttttnnttnnntttgcccccccccccncatttttttnangtttncccccccccccnntttttnt

SEQ ID NO: 6462 - DNA, 755 bp, Homo sapiens
  misc_feature 378, 477, 492, 501, 503, 511, 516, 525, 544, 547, 553, 560,566, 571, 576, 606, 629, 634, 659, 666, 667, 671, 672, 673,674, 675, 681, 687, 689, 691, 697, 701, 702, 704, 705, 708,715, 717, 718, 728, 735: n = A,T,C or G
gtaatacgactcactatagggcgaattggagctccaccgcggtggcggccgcccgggcaggtacttaagccaatttctttgaataattttttttttacatttttattttaaaaatgagacagaggctgggcgcggtggctcacacctgtaatcccagcactttgggaggctgaggcaggcgcatcacttgaggtcaggagtttgagaccagcctggccaacatggtgaaaacctgtctctactaaagatacaaaaaaaaaaaaaattagctgggcatggtggtgcatgcctgtggtctgagctgctcgggaggctgaggcaggagaatcgcttgaacccgggacccgggaggtggaggttgcagtgagccgatatcgngtcattgcaccccagcctgggcgacagggcgagactccgtctcaaaaaaaaaaaacagagagacagagtcttggtatgttgccctgtctccaactcctngggctcaactgattntcctacttnancccctggnagtanctgggactncaggcacacacccaccttngcntggctntttaaancttaanttttnttttnggcccttttgtagttttcccacatttccanttccttcacattttatttctccnttttnccccccctttttttttaccccctgnatggganntttnnnnncttttnattttngncntttccnggtnntnntgnggggggnannttcccccccnccccccntccccccctttttttttcct

SEQ ID NO: 6463 - DNA, 675 bp, Homo sapiens
  misc_feature 188, 457, 507, 575, 593, 649: n = A,T,C or G
ggcgaattggagctccaccgcggtggcggccgcccgggcaggtacgcgggagaggagagtagcttttgccatcagtcactttacaaaccatttcaaggaaggacaacctctctggctcctgacacaagccaggcctcggtgcttttatctgttgtggtggtttttcttctttccctttttaaaagacncatgaccaagacaacctagggagtttgtcttgcttgcctttgactatttccttaatctaaccatgctctcgagggctgagcagagactagactcaaggcacaggtttctggtgatggagtaaagttacagcggtatctcatgtctacacaagaagaggaaccgttctgaaagctccaacaacttcttgagggggatggaccaatacagctttgggctcaggattccctagcctcctctgcccatcgcgtgcactgattggaggagtctngcccaaacactctcatatgaacctcgacatgctggagtggggtctggcangagctgatgacagttttgagggactttgagtgtccctagcctggccagttggctcccggaagcactanacactgacacttcattgntagacccttccttcccggccgtttgtgtttggttctttttgcactccatgtacctnggccggtctagaactaagtggatccc

SEQ ID NO: 6464 - DNA, 690 bp, Homo sapiens
  misc_feature 502, 514, 526, 533, 562, 594, 606, 615, 621, 677, 682, 686,687, 690: n = A,T,C or G
ggcgaattggagctccaccgcggtggcggccgcccgggcaggtactagataaacatgcatgtaacgcaggacccatgttcactgagaggtgagatttcacatttacatgtaagacaattaggccctatatggccaaaggtgaggcgcggcccgggagtcactccagtcacatcctccatagaccagcagaaccagtccgtggccagtggtgtcttatcaggaggaagttatggaaagtgacgctgtagttatggccgtgaaatggggggtcagttagtgcctggcagcgagccatcactgtttccataccgcttgtctcaggccagtgcctgcttaactgctagaggaaaagaaaacccaagccttattctttaactgtaagggtgtgtgacttaaccccggcctggcacggccttaggtcctgattataactcggcgtcttattgccgcagagtctgtcaagtctcgtgatctccactttaacacttaatgttgggtcagnttgtgtctaaantgaaaaaggggntggcagnataaccaggtgtgtccaaaccttccatcnttttatggcccggaaactcaattttttaaggnttctctgggggnccccctttnacaaanaggggagcctcgttcaattcggcggggggacttaaggatttttatttcttaagttntaccnaccnncan

SEQ ID NO: 6465 - DNA, 965 bp, Homo sapiens
  misc_feature 6, 8, 10, 11, 12, 14, 17, 20, 21, 23, 24, 26, 28, 35, 41,46, 52, 54, 62, 68, 69, 70, 71, 72, 73, 76, 80, 81, 82,83, 91, 92, 106, 107, 113, 127, 149, 235, 266, 267, 282,286, 291, 305, 317, 319, 345, 347, 363, 376, 425, 448, 464: n = A,T,C or G
  misc_feature 485, 493, 518, 529, 539, 541, 555, 577, 597, 621, 622, 632,673, 674, 691, 697, 699, 701, 712, 721, 722, 728, 745, 761,765, 768, 781, 791, 792, 819, 831, 858, 880, 883, 887, 893,894, 903, 908, 912, 917, 920, 940, 943, 946, 948, 952: n = A,T,C or G
  misc_feature 964: n = A,T,C or G
cccccngncnnnanttncanntnncnantttattnttatangatgngttgtntntattttanataaannnnnnagntggnnnntgaagttnnttctcttatatacnncgaatnggagctccaccgcngtggcggccgcccgggcaggtncgcggggtttagaaatgaaacagttaacacaatcataaatgtagaagatcatgctgatattttggaataacattcaaaaccaagtncccagatctctgtctcttcaccttccccaanntgtctgcttctgcancatntcccncttagtaaaaagcngagccttttctntnagttcctcatgccaaaaccttgccgncngcccttgactcttttntttctctacatanacaggccagactcatccttgcacatcctgtttcattgtaacctcttaangatatatccaggcattcaaccantttctttaccacgctngcactgctgctttcttatggntgcaagcncacagttacctctcaccgggaccantgggcaattangccttctctntncttccctggctttnccatttttcccaccctttggcncccaacttaccaaaaacttntttttcttcccacaaccaagcaanncacacccagngggggaaattcccttttttaaaaagggaattaaaggttcannccttcaattattcttcnttcccntncnggccttcaaanaaatccctnnttggtngggctttttcccaatcnttcaactttcaaccangggnaantggatccccattnttttcccttnnaaccttggtggaccatttaccaggggntttactggttangtttttggaattgccggacccttcccncaaaccccttgtttacttttcnctnaagnaaaggnncttccccanttttnaccnaaggnttnttttgtttccaaaaaaacangcnagncnaggnaaggggtgggcng

SEQ ID NO: 6466 - DNA, 1060 bp, Homo sapiens
  misc_feature 3, 6, 8, 12, 15, 19, 20, 22, 29, 30, 31, 39, 43, 46, 55,57, 58, 59, 61, 73, 75, 82, 83, 94, 96, 97, 100, 107, 111,112, 122, 155, 160, 163, 211, 212, 285, 307, 310, 312, 315,322, 326, 328, 350, 365, 367, 372, 398, 408, 435, 454: n = A,T,C or G
  misc_feature 466, 484, 499, 500, 503, 539, 542, 544, 548, 559, 562, 567,569, 574, 576, 582, 584, 615, 631, 640, 644, 650, 654, 658,659, 662, 695, 697, 708, 716, 730, 733, 735, 739, 741, 742,765, 780, 782, 794, 798, 803, 813, 820, 823, 856, 867: n = A,T,C or G
  misc_feature 868, 879, 881, 899, 917, 938, 946, 949, 954, 955, 960, 969,977, 983, 988, 991, 993, 998, 1005, 1010, 1011, 1018, 1019,1026, 1028, 1034, 1035, 1047, 1058: n = A,T,C or G
cgntgntntctnaanttanntnattatgnnntttttttnttanaanaattgtatngnnnangttttatataananatattcnnacaaggagggntnnctntttattntacnnctcactatanggcgaattggagctccaccgcggtggcggccgnccggncangtacaggtgtcccaaaatgcgctgactcagcttcaccagcccatctcnngatctcattgccaaaaatgtctcttcggtcatgaatgaggatccagcccaaggcttatagacctttgaaccanccagcgcttggccagccctccncangnacntgatggngacntnttgttgctagaaaggtggcgantggttcatatttgcnancccgnaaacaccatgtctccatgagaatctnatcagctaanatggggggacaccactgttcgttgcanccaacttgctcagggaatntttcttgtaagnatggacggtttttgcttngaacaccttgacccnnacnagggggggttttggattgggatttatttggacaaantgnanggancaaaggcttgnccnttttntncattnanatttangnataatttcccaagcttggttttttcaagggnttcaaattttttcccncaaaaggantttnttcttntttnggcnnaancaaaaaattttggttatggaagtttttggaacncnttcaaattttnccccaatnaaggaactttcaantcncnaggnanntttcttttggttaggaaggaagnaaggaaaaacccaangngttcttttgggnaaancccanggtaaattgnttttttngcncccttggggggttttgggccccaaccaaacaangcctttaaaannaaaaaggggtncnaaaataagcttttggggnttgcaaaggggaaatttnccttaagaaaatgggaaccgngccctttnaangtttnnttaanggggggggntttttatnaaaaancccgnggntnggttnaaaaaangcaannacccccnntccccgngnggtggnnatttgggaaaancccgttttttnct

SEQ ID NO: 6467 - DNA, 953 bp, Homo sapiens
  misc_feature 2, 9, 10, 12, 13, 14, 15, 16, 21, 22, 23, 25, 27, 28, 29,30, 31, 36, 38, 39, 40, 47, 49, 50, 51, 53, 55, 58, 63,68, 70, 71, 76, 78, 81, 82, 83, 84, 85, 88, 91, 94, 95,97, 101, 104, 111, 115, 116, 122, 123, 130, 132, 144, 160,182: n = A,T,C or G
  misc_feature 278, 350, 385, 388, 412, 417, 455, 474, 494, 502, 512, 516,531, 598, 640, 698, 705, 727, 749, 760, 773, 782, 824, 836,848, 857, 858, 881, 888, 908, 917, 923, 924, 927, 929, 934,935, 941, 944, 950: n = A,T,C or G
tnctactgnntnnnnnttttnnntnannnnnttttntnnnttttatntnnncnanttntatantatananngttantntannnnnagnagngtnntntgtntgntttttantatnnctattnngcgaatngnagctccaccgcngtggcggccgcccggncaggtacctgtggtctcagctnctcgggaggcatgaagtggggaggatcgcttgagcccaggtggtcgaggctgcagtgagctgtgtttataccaccacactccagcctgggccgcanagtgagactttgtccaaaacaacaacaacaacaacaacaacaacaaaaactgtagcttccattttgggtgtnctctattgctctgtcttggatcattcactctgggnagnaagccagctgccaaaggcatttcnttcancgaggcccaccatgtaatggtaaacagggcaccatganttgagcttggggaagcctnatcctttcctaggttgagcnctttgatnacctgcaagnctgntggcttggacacaancaagtgagcgtttttttgaaaaggatccctaaaaccataacttaaacccagcttaaagtctttccanataacttgttccttgccagaaaacctatggaggataaattanaatggttcatttgttttttaagcctactgaagtgtttgggggtttatttttggtttgnacccttnggggcccgctccttaggaaacntaagtgggaatcccccccgggngccttggcaanggaaattttcggnattattcanaggcctttatttcgaattaccccgttcggaacccttcgtaangggggggggggnccccggggttanccccaaggnnttttttggtttcccccttttganggtgggnagggggtttaaattttgccnccccctttnggccanntangnggaanngggggnaanaaaacnttt

SEQ ID NO: 6468 - DNA, 673 bp, Homo sapiens
  misc_feature 539, 610, 613, 630, 636: n = A,T,C or G
ggcgaattggagctccaccgcggtggcggccgaggtacagttggcccaaaatgaagagcaggcagtagtagaggattaagggcaaagtgccttgttgttaggcctgtcatgaagatgtggggtgagatctgtcttgggcaacaactgatattaagctgaggtctgcagtctcaacttgccactagcttaatgtgcctcccatggggcacagctactgaaagctgatgctgcccaagcatttagggagataattatgccacttggaccacactggtgcgactctaaccccagggctggggccagaatgaggtaaaggaggcaccacgggggtaaacccaaggaagcactctcttggcacctgcaagcaagcaccaacttaaatgtatgccccaggtgcctcatttgtctcaccctagccctggccctgctaatccggggcacaccccttttaggataacacggactaatttggacactttccccaaaccgtatcccagttagacatgatggtggaaaaggtctaactaaagacattgcangggagatgggcgcggtggctcacgcctgtaatcccagcactctgggaggcccggggcgggcggaccaacanggncaggagtttgaaaccancttgtntcaatggctgggtgaaaacccttgtctctactaaaaa

SEQ ID NO: 6469 - DNA, 1004 bp, Homo sapiens
  misc_feature 2, 4, 6, 8, 11, 12, 16, 18, 23, 24, 28, 34, 39, 42, 50, 52,54, 55, 65, 66, 67, 68, 70, 71, 74, 77, 85, 86, 90, 91,92, 93, 95, 96, 98, 100, 101, 102, 104, 110, 166, 419, 477,515, 520, 529, 538, 540, 546, 552, 554, 557, 558, 560: n = A,T,C or G
  misc_feature 561, 565, 588, 593, 597, 602, 603, 630, 639, 642, 651, 662,681, 686, 707, 714, 722, 725, 733, 743, 751, 763, 764, 781,788, 791, 799, 805, 807, 812, 826, 828, 838, 844, 852, 854,855, 860, 867, 868, 872, 874, 886, 889, 891, 902, 904: n = A,T,C or G
  misc_feature 911, 922, 929, 937, 938, 939, 945, 947, 951, 961, 968, 973,974, 975, 979, 980, 994, 995, 999, 1003: n = A,T,C or G
cntntncnaanngttntnttttnntttntttaanaaaantgncggtggtntnannattaatatannnngnnccnctnttaataannaagnnnntnngngnnntnttttanaacaaatatagggcgaattggagctccaccgcggtggcggccgcccggcaggtacncgggcgggaaaggctgagacaaaagagaattcattctgctgtaaagacaagcaggagggtcgacatggactgaaatcaccctctgcagctgggagggctcttctgggcgtccgggcagctgcagctgagaggactttcacaccataaggagatttctgtttttctttttggctgttaatgcttgtctataacatttggtagccattcaccaaggaatgttcattttgggaatggaaggcttgcaagggcactnggttggcagtacgttcttttataaggccagttcacccatgtttgttcaaaacctttanataatggcaccttatgttatttaggtcaccaattaaanaatcnagtaactcntgaaagatnantaaatnataaananaanngnngaantaaagtgtccccttcgggccggntctangaancttanntgggaattccccccggggccttgcaanggaattccnatnattcaaggncctttatttcngataacccgtttcggaccnctttnagggggggggggggccccccnggggttnccccccanccntttttttngtattccccnttttaaantcggaagggggnntttaaatttggcccccnccctttnggncggtaaanttcaantngggcncaattaagccttgntnttccccttgntggtgnaaaaaacntnngtttnttaccgnntttnancaaattttcccnccnancaaacaattancngggaggncccggggggangccattnaaaaggtnnntaaaangncctngggggggggncccttanttggnnntggnngcctaaaccttcanncatntttnt

SEQ ID NO: 6470 - DNA, 669 bp, Homo sapiens
  misc_feature 632, 668, 669: n = A,T,C or G
ctatagggcgaattggagctccccgcggtggcggccgcccgggcaggtacttaagccaatttctttgaataatttttttttttttacatttttattttaaaaatgagacagaggctgggcgcggtggctcacgcctgtaatcccagcactttgggaggctgaggcaggcgcatcacttgaggtcaggagtttgagaccagcctggccggcatggtgaaggcctgtctctactaaagatacaaaaaaaaattggctgggcatggtggtgcatgcctgtggtctgattctcctgcttcagcccctggagtggctgggactgcaggcacacaccaccttgcctggctatttaagctaatttcttttggcactctgtagcctcccacattcagttcctcacatttattttacctataatttcttctaccaattctcctgtattttctccttttcttttgctttcctgttctctgtggtgtcttcctttgtctctctttgcctcctcttgcctcccctatcttttttttcttttaggttgggtttcctttttttccctttaggttttcccttaggtcttcatgggcgttgctttcctcactaacagttaacataaagacgtatttctggttctttgnacctcggcgctctagaactagtggatcccccgggcnn

SEQ ID NO: 6471 - DNA, 684 bp, Homo sapiens
  misc_feature 354, 594, 624, 632, 660, 661, 662, 664, 671: n = A,T,C or G
tatagggcgaattggagctccaccgcggtggcggccgaggtacttttttttttttttttttttttttgagacggagtctctctctgttgcccgggctgtagtgcagtggcacgaccttggctcactgcaacctccgcctcccaggttcacgccattctcctgccttagcctccagagtagctgggactacaggcgcctgccaccacgcctggctaatttttttgtatttttagtagagacagggtttcaccgtgttagccaggatggtctcaatctcctgaccttgtgatctgcccatctcggcctcccaaaatgctggggttacaggcgtgagccaccgtgcccagccccaanatactgggcttttacaggggaatggccacatcgagggtcaagaaaattactgtaagtggtaggatttggcttatgataatgtgtgtgtatgtgcatatacccaagctcacaatacacatgccatttatcttgtagaattagaaaaatgacatgttttcctgaaaatgagggaaataaatgatcaacggggtaggaagagtggtggaaatattgtaacagatttgatcacagtcaagtgtntttttttttccagtccaaaaaaaaactaangcttgganaaataaaggaaagttttcccttttcctnnntncaaaaanaaacctaagttgg

SEQ ID NO: 6472 - DNA, 780 bp, Homo sapiens
  misc_feature 6, 16, 19, 34, 43, 48, 59, 61, 65, 71, 75, 77, 78, 147, 149,168, 170, 197, 222, 225, 367, 379, 383, 386, 391, 409, 422,462, 504, 511, 519, 527, 557, 571, 573, 574, 576, 602, 603,609, 619, 626, 670, 673, 686, 690, 714, 726, 739: n = A,T,C or G
  misc_feature 740, 741, 744, 754, 758, 760, 762, 764, 765, 774, 775: n = A,T,C or G
gctctnccgcgggggnggncgccaggtacttttnttttttttnttttntttttcctgananggantttcantctngnngcccaggctggagtgcaatggtgcactctcagctcattacaacctccgcctcaacggttcaagcaattntnctgcctcagcctccaaagnanctgggattacaggtgcctgccaccacncctagtaatttttttgtatttttanaanagactgggttttgccatgttggccaggctggtctcaaactcctgacctcaggcaatccacctgccttggccacccaaagtgctgggattccaggtgtgatcccctgcacctggcccaccaaacatattctcatttggtattnaaaaattgtccntaanaanaagtntgtttcataaagcacgtntacactgtatatntaggatgacatccttcaccaaacctagtacctgcccgggnggccgctttagaactagtggacccccgggctgcaggaattcngatatcnagcttatnggatcccntcgacctcgagggggggcccggttcccagnttttggttcccttnanngnggggttaaattgccccccttgggggnnaatccntgggcctagngtgtttnccttgtgtgaaattgttattcccttcacaaattccaacacaaanatnccgagcccggggngccntaaaagggttaaagccttgggggnggccttaatggngggggggctaacnnncanttaaattggngggngncncnncctggcccnntttct

SEQ ID NO: 6473 - DNA, 776 bp, Homo sapiens
  misc_feature 64, 67, 87, 137, 216, 303, 412, 470, 506, 508, 590, 592,605, 614, 624, 642, 651, 670, 674, 683, 684, 687, 689, 696,698, 709, 720, 725, 738, 740, 754, 758, 759, 760, 761, 763: n = A,T,C or G
ggagctccccgcggtggcggccgcccgggcaggtactttttttttttttttttttttttttttnggntttgagacagagtctcgctntgtcacccaggctggagtgcggtggcatgatctcgcctcactgcaagctntgcctcccaggttcatgccattctcctgcctcaccctcccaagtagctgggactacaggcgcccgccaccacgcccggntaattttttgtatttttagtagagacggggttttgccacgttagccatgatggtctcaatctcctgacctcatgatccgcccacctnagcctcccaaagtgctgggattacaggcgtgagccaccgtgcccggccttagaacctcatgcatcttattaagagatgcattttcaataacattttatatttaaaagtntttttcaaaatgcttaacatatttgttttaactgactgtatactagaaataaaatgtngaataaaattttaatacccagagacttacaaacatntntgttctaccccatgaacaatataagacattacatttactatcttatattttgctgcttttttccatttaacatagcatgggngnatcttttccaggncaagaatancataaaaggnttttctcattttaaagangcctttttnttccccggcgtaccccttngggnccgttttannaantnagggggntnccccccgggcnttggggggaanttcgntatcaaagctttntnggattccccgttcnaccnnnnanggggggggccccg

SEQ ID NO: 6474 - DNA, 755 bp, Homo sapiens
  misc_feature 3, 620, 635, 708, 735, 740: n = A,T,C or G
ctnctatagggcgaattggagctccaccgcggtggcggccgaggtacaattcatccagagacaaattcctcttcagctgtgagcctatgaaattatacagttatatgcttccaaaagacaatagtgggacaaacaggatagatattcccactccaaaatggggcaacaggaaagaacaaagggctaacaggttctaaccaaatccaaacacctcagataaacaacaaaaaactcagtagggcaaacattaaaccctgaagcttgggtgtagtcttttactcccatttctcattttctggacacactggggtggaagttggacccccaaggctccaggcaaccctacttcatcacattgctggctgcatttcttgtgtgttggagttgcatgcctttgggtctcccagcctggagttgcaccctggtggctctactggtctggggtcttgggatggccctgcctgggcaactccactaggaattgccctgatggtgactctctgcattggcctcactcccacggctgtggatattatttagataccttactcattgttaaaaacaggaactaatatttccaatgagcatatcgcgagacaaatactttatatattctgggnctttcaatccttcangtaagtataattttcatttacagaggaagaaaccaaaagctcaaagaggcaagtaaattaatcaggaccgaanacaggattgtaaaataaaaatagttgncatantttaccatttggctc

SEQ ID NO: 6475 - DNA, 808 bp, Homo sapiens
  misc_feature 595, 628, 644, 649, 663, 673, 684, 689, 691, 700, 703, 710,725, 727, 728, 735, 742, 746, 748, 755, 757, 770, 775, 779,780, 782, 795, 807: n = A,T,C or G
ctatagggcgaattggagctccaccgcggtggcggccgaggtacccgtctagcagctgatgtgggtaaagctggagctgaaagggaattccgaggcctcggtgactgcctggttaagatctacaaatctgatgggattaagggcctgtacccaacagaggtggcatcagcagcagggcggcgcccaggaggggcagcagcctcacgcgggagctctccatcgttctgaaactcgtcgttcccgcgtacctgcccgggcggccgctctagaactagtggatcccccgggctgcaggaattcgatatcaagcttatcgataccgtcgacctcgagggggggcccggtacccagcttttgttccctttagtgagggttaattgcgcgcttggcgtaatcatggtcatagctgtttcctgtgtgaaattgttatccgctcacaattccacacaacatacgagccgggagcataaagtgtaaagcctggggtggcctaatgagtgagctaactcacattaattgcgttgcctcactgccgcttttccagtccgggaaaacctgtccgtgccactgcatttaatgaatcggccaccccccnggggagagggcggtttgcgtattggggcgcttntttccgctttccttgntttanttgaattcgtttgngcttgggtcnttccgggttgncgggngnaggcggtantangcttccntcaaaagggccgggnannccgggtnttcccanaaananggggggnanaccccgggaaaanaaacntttnngnccaaaaagggccnccaaaaagggcnc

SEQ ID NO: 6476 - DNA, 1659 bp, Homo sapiens
  misc_feature 3, 4, 5, 7, 8, 10, 11, 13, 14, 15, 16, 17, 19, 20, 22, 23,24, 25, 26, 27, 28, 29, 30, 31, 33, 34, 35, 36, 37, 38,39, 40, 41, 42, 44, 46, 47, 51, 53, 54, 56, 57, 58, 59,60, 61, 63, 64, 65, 67, 68, 69, 70, 71, 73, 77, 79, 81,82: n = A,T,C or G
  misc_feature 83, 88, 89, 93, 94, 99, 102, 103, 105, 106, 107, 109, 111,112, 113, 114, 115, 117, 118, 119, 121, 122, 123, 124, 125,126, 127, 128, 129, 130, 131, 132, 133, 134, 135, 140, 146,147, 151, 154, 166, 167, 171, 172, 176, 180, 185, 187: n = A,T,C or G
  misc_feature 199, 207, 227, 237, 261, 265, 273, 285, 298, 314, 324, 409,417, 429, 431, 435, 437, 447, 455, 461, 463, 468, 495, 516,521, 537, 549, 561, 569, 574, 588, 600, 603, 605, 608, 613,626, 629, 646, 655, 670, 671, 677, 685, 697, 718, 719: n = A,T,C or G
  misc_feature 729, 752, 754, 787, 815, 818, 821, 824, 826, 832, 842, 849,902, 907, 913, 918, 920, 957, 958, 960, 970, 975, 987, 998,1009, 1011, 1013, 1015, 1018, 1019, 1025, 1029, 1030, 1032,1035, 1045, 1048, 1058, 1078, 1087, 1088, 1090, 1096: n = A,T,C or G
  misc_feature 1097, 1102, 1106, 1108, 1118, 1119, 1123, 1127, 1140, 1159,1160, 1174, 1195, 1215, 1224, 1236, 1238, 1246, 1251, 1252,1261, 1262, 1270, 1295, 1297, 1313, 1330, 1340, 1346, 1352,1378, 1381, 1387, 1393, 1396, 1403, 1407, 1413, 1420: n = A,T,C or G
  misc_feature 1444, 1446, 1455, 1460, 1465, 1474, 1487, 1491, 1497, 1502,1522, 1538, 1542, 1546, 1553, 1566, 1592, 1607, 1632, 1633,1637, 1638, 1645, 1649, 1651, 1652: n = A,T,C or G
ccnnngnncnngnnnnnannannnnnnnnnngnnnnnnnnnntnanntggnannannnnnngnnngnnnnnanaaanangnnncacgnncgannggagnggnnannnangnnnnngnnnannnnnnnnnnnnnnncagcngagggnncttnaangcttttgaaaanncccnnactntttntgatnangtgacgcagatngggaatcnccacccgcgagtcggcgggngccgcgcccngggcgatgtgcttaccgccggggnagcnagtctatnctccttctgacnaaggggtgccatnttaaccttattaaggntgattacctnggcctgccccttattggttggaccgaccaaaatgcccagacacaaacccttttcgttacctgggggggaccttttcttaaccacncaaaccangcaaaccttggntngtcnanagagtattgnccaagacnccgctncnggatntaggaattggtatcaatatcccggcgngggaaaattttaaagggggcnattanattggcccccccttgnaattggaatagncctttggccctngggttaanaatanccccgcccccaatncccaaaaaaaanaananccnaaaanccccggggggttnttntgttaaatttaaacccntaaattttnggggaaaaaaaattnncccccnttaaaaanaagggggggtgnaagggaaaaaaatttaaaaannttgggggggnaaaaaggacccccccccttgggntnccctttggggtggttattggggcccccaaaccnaaaccgccccccaaaggggggttggggnaanttnttntncctccnttccttgaanaaaaagnaaaaaaaaaaccctttttggggggggcccttggggggggaaaaattttttttnccttngggccntcggntngggggggcccccctttaattttaaaaaaaaaaatgannangaaccctttnccttnttaaaaaccaangcgaaaaaganaaaataataananangnaanntcaccnccanntntanaataggaganaanagaagataanaagaaggggtttaacccccnttcgggggnncncccggnntttcntttnanaaaaaaaacnnttangggnggggggggaatanccccccccccccggggggnncctttgggcccaanggggggaaaaaatttcccggnaattaaatttccaaaagggncttttaaanttcggggaatanancccccggngtccnnaaccccctnncctaaagngggggggggggggggcccccccggngntataacccccccaaanaccttttttttgggttntccccccttntttaangatagngaagggggggggttttaaaaattttnggncccccncccccnttnggggggngggntaaaantcccaanttgggggggccccaaaaaaggccntnggggatttnccccnttggnggggggggnaaaaaaattgggngttnaatttnccggngttcaaacaaaaattttccncccccaaccaaaaccnaatnaacnggaaagnccccggggggggngcccaattaaaaaagggtgggggttnaaaaaaaggcccctngggggggggtgggccccttaaaaanngganntttgganagcncnnaaaacct

SEQ ID NO: 6477 - DNA, 1767 bp, Homo sapiens
  misc_feature 14, 43, 62, 64, 74, 104, 117, 127, 158, 190, 223, 429, 519,566, 585, 691, 770, 834, 862, 869, 882, 892, 945, 1025,1051, 1058, 1102, 1153, 1157, 1166, 1168, 1172, 1192, 1245,1312, 1315, 1323, 1338, 1361, 1382, 1393, 1434, 1442, 1453: n = A,T,C or G
  misc_feature 1482, 1522, 1542, 1557, 1570, 1572, 1637, 1655, 1676, 1678,1717, 1736, 1761: n = A,T,C or G
ccggaaaaaatttngggggaaaggcccttcccccaacccccgnccggggttgggggcccggngncccccggccnccccggggggcccaaggggtttaaccccgncccgggggggggnaaaaattttnggggcccccggaaagggggaagggaaaaagncccggcccggaaagggggggcctttaacccgnaaaggccccggttcctttccccttggaaaaagngaaattggcccaaaaaaaaaaccccaaggccccggtttgggggccgggggccccccggcctttccttaaaggaaaaaccttaaggttggggggaaattcccccccccccggggggggccctttgggcccaagggggaaaaatttttccgggaatttaatttccaaaaaggccctttttaaatttccgggaattaaacccccggttnccggaaacccccttccgggaagggggggggggggggggggcccccccgggggttttaacccccccaaaaggcctttttttttttgggttnttcccccccttttttttaaaaggttgggaaaggggggggggtttttnaaaaatttttgggcccggncccggcccttttttggggggcccgggttaaaaaatttccaaatttggggggtttccaaattaaagggccctttgggttttttttccccccttttgggttggggttngggaaaaaaaaaaatttttgggtttttaaattttccccccgggccttttcccaaacccaaaaaaattttttcccccaanccaaaccccaaaaaacccaaaatttaaaccccgggaaaaggcccccccgggggggggaaagggncccaaaattttaaaaaaaaaaggggttngggtttnaaaaaaaaagggncccccctttnggggggggggggggtttggggcccccctttaaaaaaaatttggggaaaagggntttggggaaagggcccctttaaaaaaacccttttcccaaaacccaaaatttttttaaaaaaatttttttgggccccgggnttttttggggcccgggcccttttccnaaacccntttggggcccccccccgggccctttttttttttcccccaaaagngtttccccgggggggggaaaaaaaaaacccccctttgggtttcccgggttngggnccccccaangncccntttgggcccaaaattttttnaaaaaatttggggaaaaaaatttcccgggggggccccccaaaaaaaccccggnccccggccccgggggggggggggaaagggaaaaggggggccccggggggtttttttttgggcccggnttnaatttttngggggggggcccggncctttccttttttcccccggccntttttccccctttccgggccntttccaaaccnttgggaaacctttcccggcctttgggcccgggccctttccngggggttncccggtttttnccgggggccttttggcccgggggccccgnaaaaggccccggggggttaatttccaaaaggccctttccnaaccctttccaaaaaaaaanggggcccgggggttnaaaaatttaaccncnggggtttttaaatttccccaaccaaaggaaaaatttccaaaggggggggggaatttaaaaaccgncccaaaggggaaaaaaangaaaaaccaatttggtttggnangcccaaaaaaaaaaggggccccaaagcccaaaaaaaaanggggccccaaggggaaaancccccgtttaaaaaaaaaaaggggncccccg

SEQ ID NO: 6478 - DNA, 898 bp, Homo sapiens
  misc_feature 1, 4, 6, 10, 11, 12, 14, 15, 16, 17, 18, 19, 20, 22, 25,26, 27, 28, 29, 30, 31, 32, 34, 35, 36, 38, 39, 40, 41,42, 43, 44, 46, 48, 49, 50, 51, 53, 55, 56, 57, 63, 64,65, 66, 68, 69, 70, 71, 73, 74, 76, 77, 78, 79, 80, 81,82, 83: n = A,T,C or G
  misc_feature 84, 85, 86, 93, 94, 95, 96, 97, 103, 104, 105, 107, 113,119, 120, 133, 141, 154, 227, 260, 283, 345, 435, 492, 503,551, 564, 592, 602, 604, 607, 618, 642, 666, 730, 767, 770,788, 789, 791, 798, 799, 803, 832, 833, 834, 837, 841: n = A,T,C or G
  misc_feature 843, 854, 860, 862, 863, 866, 886: n = A,T,C or G
naantnttgnnntnnnnnnntntannnnnnnntnnnannnnnnngntnnnnantnnntattannnntnnnntnnannnnnnnnnnnagtaagnnnnngaattnnngngggtcncttaanncaactcactatanggcgaatnggagctccaccgnggtggcgggccgcattcatggcgttggggaggtcctgcttgttggcgaacaccaggaggacagcatcccgganctcgtcctcggccagcatcctcatgagctcctnacgggcctcgttcacacgctctntgtcattgctgtccaccacgaagatcaggccttgtgtgttctggaagtagtgggcgccacangggcgcggatcttgtcctggccacccacgttccacacagatggaagctggatgtatctttgtacctcggcccgctcttagaactagttgngatccccccgggcttgcaaggaaattcgatatccaagcctttatccgaatacccgtncgaaccctcgnaggggggggggccccgggtaccccaacctttttggtttcccttttaanttggaggggttanattgccgccgctttgggccgtaaatcantggtcataancngtnttccttgtgtngaaaatttggttatttcccgcttnacaatttcacacaacaataccganccggggagccataaaagttgtaaaagcctgggggtgccctaatgagtgagctaaactcacattnaattgccgtttgcgcttacttggccgcttttttcaantgngggggaaaaccctggttnngngcccagnntggnaattaaatgaaatatggccccaaacgccnnnggngggnanaaggcccggtnttttgncnngtnttttggggcggcctcctttncggccttttcct

SEQ ID NO: 6479 - DNA, 1423 bp, Homo sapiens
  misc_feature 68, 85, 99, 100, 102, 104, 106, 108, 113, 115, 119, 121,123, 125, 127, 129, 133, 135, 137, 139, 141, 143, 145, 157,171, 197, 219, 233, 254, 271, 272, 300, 309, 336, 348, 381,403, 415, 431, 443, 450, 464, 498, 500, 519, 536, 538: n = A,T,C or G
  misc_feature 548, 557, 563, 573, 574, 585, 595, 600, 606, 623, 648, 663,671, 673, 676, 701, 704, 706, 719, 727, 741, 743, 748, 753,761, 772, 777, 785, 788, 795, 800, 803, 811, 824, 845, 863,865, 874, 875, 876, 897, 900, 918, 920, 952, 959, 965: n = A,T,C or G
  misc_feature 980, 982, 990, 997, 1008, 1010, 1015, 1019, 1021, 1023, 1046,1053, 1058, 1069, 1075, 1076, 1078, 1086, 1088, 1089, 1098,1101, 1102, 1125, 1128, 1139, 1140, 1148, 1150, 1155, 1156,1161, 1164, 1180, 1184, 1185, 1186, 1202, 1215, 1218: n = A,T,C or G
  misc_feature 1225, 1247, 1252, 1268, 1279, 1281, 1282, 1289, 1291, 1297,1298, 1308, 1320, 1329, 1330, 1338, 1342, 1344, 1345, 1346,1349, 1351, 1375, 1379, 1380, 1387, 1388, 1393, 1400, 1403,1411, 1419, 1421, 1422: n = A,T,C or G
taattaagggggggccgggaaaaatttgggggaaaggcctttccccaaccccggcccggggttggggnccggggcccccggaagngggttaacccttcnntntntntnttgtntntttntntntntntntgtntntntntntntnggccaaaaattnggaaaaaaaaaatnaaaaaaaattgggttttttttttttnaattttaaggggggcccaaagnaaaaattccccaanaaaaattggcccttccaaaanggggcccccccttttcnnttaaaatttaaatccccccccccaaagnttttttaangttaaggttttgggggaaccttttaangggggggaaaancaaaaaagggggaaaaccccttttttaaaattnaaaaaaaaattttggggggganccaaggccaaanggaaaaaagcccgaangccttttaaagntgggaantaaccttttggggngggggggccccaagggggccaattttaagccccnancaaccccaagccccccccnacatttttttctttggnantaagggggcnaaacccccnttgccnacctttgggnnggggggggggntgggaaaaantttcntttttngcccccaaaaaaggttnggaattgggggggccccccaggccnccccacccaaagganccccaaangnccncccggtttttgccccccccaagggnaanancccctttggaaanggtttttntttcaaaggggaantnccccncccgntggccccnaaacttttttngttcnaaccaaanggngggccanggccnttncaaccttntcaaagggggggngggggccaaaaaaaagggggngcccccccccttttgggngngggggtttnnnttccccaaggggggggggganagncccccaaggggccccctntnccccttttaaaaaaaaggggggcccccccccnggaaaancccccntttttttttttttgngncccaattnggaaaanccccctttttnanccccntttnanangggggggtttggggccccccttnttaaacnccagncccttttttangggggnngngtgggggncnncaaaaaaanttnnccccccccaaaaagggggggccnttnccaaaaaaaannaaaacccntnttttnnggggngcncccccaaagggggggngttnnngaacccccccccccanggcgcgggggccnttnggccccnaaggggggggccttttttaaancccanccccaaaaattttttnttttccccccngnnttttaancncttttnnggcccccccnaaaaaggggggnccaaatttnnaaccccgngggnannnaanantttttttttttttttgaggggggngggnnccaaaannatgcnccccccncantggggggnggggcccncnng

SEQ ID NO: 6480 - DNA, 1581 bp, Homo sapiens
  misc_feature 4, 36, 52, 60, 70, 76, 80, 82, 102, 108, 112, 114, 116, 118,120, 122, 124, 126, 128, 136, 138, 142, 150, 156, 158, 167,173, 175, 183, 185, 189, 195, 197, 199, 213, 218, 226, 262,264, 265, 268, 275, 276, 307, 325, 337, 339, 349: n = A,T,C or G
  misc_feature 353, 357, 373, 382, 400, 402, 408, 414, 424, 428, 436, 438,451, 453, 457, 493, 499, 504, 505, 525, 530, 541, 560, 620,640, 665, 666, 693, 718, 728, 776, 787, 805, 823, 871, 895,955, 963, 968, 981, 1003, 1016, 1044, 1060, 1097, 1100: n = A,T,C or G
  misc_feature 1140, 1153, 1159, 1216, 1231, 1236, 1249, 1264, 1276, 1280,1301, 1302, 1319, 1333, 1342, 1375, 1380, 1382, 1419, 1422,1424, 1434, 1438, 1448, 1450, 1492, 1535, 1556, 1567, 1571,1573, 1576: n = A,T,C or G
accnttaattaaggggggccggaaaaatttgggggnaagaccttccccaacnccggcggnggtgggggcnggggcnccgncnccccggggggccagggggtnaacctntatntntntntntntntntntatgtctntntctntgtgtatntatctntntgggggggnggaaantncctctctntnaatntaaatntntnccccaaaaccttgnaaganaaccaaanaccattttttttttcccaaaaaagagaccaaggggngnnccnccaaggnnccattttggtggcaattaaacggccaattgntgtcaaaataaatgggtnccttaatttgtntnggccacgcanaaanaagngaaaattattggcctnaccagaggntccaattggccacaattntnccagcnaatttntcttccacantgangcctagtntncttggaacctagnanaaanttttacaaaggggaccaaaattttcccccaaaattntggggngggtnncaaaaaaaccaatttttttnaaaanttgggaaaaanttaagggttaaaaaggttntcccttaacctttttttttccttgggcccccccttttgggggggggtttaatttaaattnaaaaaaaaattgggggggtngggttcccttttttttcccaaaganntggggaaaaaaagaatggggtgggttnggtaaaaaaaaaaaaaaaaccccanggggaaaatntcccaaatttgggtttgggaaaattgggggggcctttggggccctttntttcctttttnaaaaaaccaaaaggggtngggcccccccccaaaccncccggggttttttccccccaaaaaattgggggaaacccaagggtttcnaaagggcccccccccccctttttnttgggggggccctttgggaaaaaatttttttttcctttccaaaagaggcctttaaatttncttttttnccttnggggtgaaagggntttttcccccaaaaaaaaattncccccaatttttnggcccaaagggcccccccaaaaaagggntttttttttttcccgngaggggtttttgcccttttttttttttttttttcttngcngggttccccccttttcttttgggtttcccaaaaggggggnaacccttggggtncccttngggggggttcccaaaaggacccccccccttgggggtgcccccctttttttttttccnaaatttttttttttnccttnggggccccctttncccccttggggggtnggggggggggtngggnctttaaaaacccccggggggnntttttccctttccaaanagaaaaaattcccnatttaaggnaaaaggttttttttggggggaaaaaaaaccttnccaangncctttggaaacctttttctttttccccttggttaaanttngnaaaagggggnaagnccttgggggntnccccaagggttttggggggggccccccccccctttgggtgcnaatttaattttgggccccttttttttccaaggggttcccccancccttttggggggggggggancccccctgggngccngnaanggggg

SEQ ID NO: 6481 - DNA, 833 bp, Homo sapiens
  misc_feature 478, 511, 515, 554, 557, 563, 570, 578, 592, 622, 629, 632,642, 645, 662, 669, 670, 677, 698, 700, 714, 727, 738, 751,759, 771, 783, 784, 785, 817, 820, 823, 831, 833: n = A,T,C or G
ggcgaattggagctccaccgcggtggcggccgcccgggcaggtacgcgggaccccatggcgttatttatttattttttgagagggaatcttgctctgtcgctcaggccagagtgcagtggtgtgatcttggctcactgcaacctgtgcctcccgggttcaagcgattctcctgcctcagcctccagagtagctgggactacaggggcatgccaccacgcccggctaatttttgtatttttagtagaagcggggtttcaccatattggccaggctggtctcaaactcctgaccgtatgatctgcccacctcgacctcccaaagtgctgggattgattacaggtgtgagccactacgcccagcccccatggagctatttttatttaaaacacatacattataactctattgatctgattacaaaagcgcctattttgttaaaatgttttattgtgataaaaattcaaaaattattaatgntagccaacaaaattcaagcaaaacataaaatgntgtnaagtaaaaagtgaaaagaattttttcctttagttccctnttnccactncccattnttccaaanaaataaccttaaanttttggggggggggggctttccccaggaanggttggntcnggtttggggnttnattattatttaaatatnccccatnnttttccntttttttgaattacccccccncnattttgtattatangggtttttttttnaaatggaaaanggggatatttatnttgtaccntcgacccggctnttaagaacctannnggattccccccgggcttggcagggaatttccnatntcnaagctttntn

SEQ ID NO: 6482 - DNA, 961 bp, Homo sapiens
  misc_feature 326, 328, 363, 372, 403, 454, 464, 477, 481, 486, 491, 503,508, 513, 518, 519, 537, 544, 547, 550, 554, 567, 576, 582,586, 590, 593, 601, 608, 609, 615, 621, 624, 635, 636, 651,654, 655, 663, 666, 671, 678, 681, 693, 695, 698, 703: n = A,T,C or G
  misc_feature 722, 727, 735, 740, 743, 746, 751, 753, 755, 761, 763, 782,790, 791, 793, 794, 795, 796, 798, 800, 808, 812, 814, 816,822, 824, 829, 843, 848, 849, 850, 854, 856, 862, 864, 866,870, 874, 876, 885, 886, 888, 891, 892, 896, 900, 901: n = A,T,C or G
  misc_feature 903, 906, 910, 914, 918, 931, 934, 937, 942, 952, 953, 956,961: n = A,T,C or G
gtaatacgactcactatagggcgaattggagctccacaggcggtggcggccgaggtactttaggagacccaggcgggcagattgcctgaggtcaggagtttgagaccagcctggctaacatggtgaaaccctgtctctactaaaaatacaaaaattagccgggcatggtggctcacgcctgtagtaccaactgcttgggaggttgaggcaagagaatcgcttgaacccaggaggtggaggttgcagtgagccgagatcgcgccactgcactccagcatgggcgacagagcaagactccatctcaaaataaagaaagaaagaaacananaaaagaaaagcttatattgaacttctctaaaaaangaaaaaaangaaagcctgatgcacacaaatctaaaatttngcaagtctatcaattaaaggatattttattttgccatcacaaaattaattnttttacttcnccccaaaaaattnaatnaaaanagttnaaattaatcaanttttntgtcnttaanngttggtttaaaaattgtntttccanccnaanattncaatgttgtcccncagaccttncttttnccanattntanaatttctnatttgtnntaaaantggaanttntacccttgaanntgagggccaatttangannagttttgngcntttcntaatccntancctgtaaaaagnantcnttgtngtttttcttaaaaaagttnttaanggaaaatngttanggngancacanananttcttntnaaattttttttgtttttcnccttaatnntnnnncntntttttttncttngncntcaaantncttancttggtaaactttngtttnnncctngntttttntncntggnctgntncggtttttnnanatnngtgngttnncnccngagntttnagtnattttgtattttntanctnttttnagttccttgnnagnttttn

SEQ ID NO: 6483 - DNA, 910 bp, Homo sapiens
  misc_feature 133, 165, 177, 186, 191, 203, 205, 213, 226, 230, 234, 240,248, 308, 310, 323, 334, 335, 350, 374, 379, 388, 391, 394,400, 402, 405, 408, 419, 429, 432, 440, 442, 450, 455, 457,460, 468, 477, 479, 499, 503, 512, 532, 534, 543, 556: n = A,T,C or G
  misc_feature 566, 569, 576, 577, 590, 591, 595, 596, 604, 616, 628, 630,632, 633, 637, 638, 644, 655, 668, 669, 671, 677, 679, 684,685, 687, 695, 700, 711, 717, 720, 728, 729, 733, 745, 748,750, 753, 768, 769, 775, 784, 787, 794, 797, 810, 813: n = A,T,C or G
  misc_feature 814, 821, 827, 828, 843, 844, 851, 860, 870, 873, 874, 885,895, 905, 906, 908: n = A,T,C or G
gtaatacgactcactatagggcgaattggagctccaccgcggtggcggccgaggtacttttttttttttttttttctttttttctttttttttttttttttttttttttttttttttttttttttttcccaancccccaggagggctttatttttttttttaaanatcctgttctgnggcttcctnggctntttttgcccgtntnccaaaaanccgggcgttggcncggnccanacgganactcccgngtacctgcccgggcggccgttttaaaactaggggatcccccgggctgcaggaattcgatntnaagcttatcgatnccgtcaacctnnagggggggcccggtncccagcttttgttccctttagggngggtnaattgcccnctnggngtaatnanggncanagctgtttccnggggaaaatngtnatccgttnanaattccanaaaananacnagccgggngcataaagngnaaagcctggggggcctaatnaggngagctaacncacattaattgggtatggcncnactgcccgnttttccaggcggngaaaaccctnggnggcccannttggaattaaaannaatnngcccaccnccccgggggganaaggggggtttngntnnattnnggggcnccttttccgantttctttggttannangaactncnttggnncncgggtccntttcnggttggggggngaaagnggnttttaaanntcanttaaaaaggggnggntnaanccggggttttccccnnaaaaantaagggggntanaaccccnggnaaaaaaaacattnttnnccaaaangggccnnacaaaaaagggcccnngaacccntaaaaaaanggcccgtggnggnnggcgttttttncaaaaggccncccccccctnngnag

SEQ ID NO: 6484 - DNA, 1554 bp, Homo sapiens
  misc_feature 5, 12, 13, 32, 36, 44, 54, 57, 63, 75, 79, 87, 149, 154,155, 158, 167, 170, 195, 202, 215, 222, 223, 248, 263, 271,285, 298, 312, 316, 339, 354, 373, 404, 409, 420, 453, 459,474, 517, 527, 528, 532, 540, 567, 578, 598, 629, 647: n = A,T,C or G
  misc_feature 661, 671, 677, 685, 695, 707, 723, 746, 754, 787, 798, 811,827, 837, 843, 856, 857, 872, 912, 924, 926, 931, 984, 999,1057, 1077, 1081, 1091, 1135, 1138, 1157, 1171, 1179, 1195,1202, 1204, 1205, 1206, 1208, 1211, 1216, 1223, 1229: n = A,T,C or G
  misc_feature 1232, 1239, 1242, 1244, 1247, 1257, 1262, 1263, 1269, 1270,1273, 1275, 1305, 1310, 1311, 1313, 1327, 1329, 1337, 1356,1357, 1363, 1364, 1367, 1376, 1377, 1378, 1379, 1387, 1392,1393, 1400, 1406, 1413, 1419, 1422, 1441, 1445, 1448: n = A,T,C or G
  misc_feature 1453, 1459, 1463, 1467, 1468, 1472, 1475, 1480, 1493, 1506,1513, 1533, 1534, 1537, 1543, 1551, 1553: n = A,T,C or G
aattncccggcnnaaaaacccgggccccccanaaanaagggggntttggtaaanaanggaaanaacccccaaggngccnttccgaanaagggggggaagggaaaccaccaaaccgttggggaagggggcccaaaggccccccttgggcnaaggnnaanttaaccggnggnaaggccccctttttttggggggggncctttgngcccccccaaatntccaacnnccggggtgggggccccctccaaatnggttggggggaattngggggccncccaaaaaaaaccnccccacccaaatngggtttttaatttntttngggggcctttcctttggaaaccnccggggggaattggnggaaaagaccttttggccntttgggggccggccccaaccccattgggccnttggngggggaaaggnaagggaaaaaagttttgggggccctttgggggngtcccnccccttttaattaanccccccttacaccaaagggcccccgggttggggaaaaatttgncccccaatgnnaacntttttttnaaaaaggaaattttgggccccccccgngggaagggggnaaaaagggcccaaaaaaccntttcctttttccggtttaatttaaaaaaaanaaaaaaaaaagggccganggggggcccccaantcccttgggncttttnaaaaaccncccccttttngggggccttccnccaacccccaattaanatgggggccacccttgggggggnacccttcnggggaatttttttcctttcttttaaattccttnggaaattaaanggaaagggggttnatttttttttttcttnggttgggggncccccncttgggggggggnnaaaggcctttggggncctttggttcccttttttccccccccttaaccaccccccnaaaaaggggggnanttggnccccaaagggggaaaaagggaaaccgggttccccaacccccaatttttatgtnccccaattggttggnggccaaaacccccttttttaaaccttttccttaattgggccccctttcaacccaaaangggtgggcccctttttttcnaagnaaaggaaggncccccccccaaaattttccttggccttttttccccccaccccanagnaaaatttaaaaaacccctnaaaatgggccccanttccaagngggccaaaaaaaaacnatttttncnnnanaanggggnacgattngaaaanagnaaaactntcngnggntttccctttngcccnntggggnncgngntaatcaggtttatcttaaaaaactcaaggnggggnnangccccccccggtgntnatggccanaggggaaaatttgtggttnnctctcnnttnggcctttgnnnngggggatnatacnntttaatnaaaacnttttggntggggnggnggaggcccccccgggttancccnacnagaantatttngggntggnncccnaanaaaantggggggggggtntccacattttgancccattnttgggggggggggtgttttnnatngggatnacctaaangnt

SEQ ID NO: 6485 - DNA, 1015 bp, Homo sapiens
  misc_feature 1, 2, 3, 6, 7, 8, 18, 19, 26, 34, 36, 37, 40, 47, 52, 57,59, 60, 61, 70, 72, 82, 89, 99, 100, 101, 111, 115, 116,117, 126, 148, 168, 193, 256, 277, 301, 322, 366, 402, 405,407, 451, 462, 471, 474, 487, 497, 512, 519, 558, 564, 568: n = A,T,C or G
  misc_feature 588, 590, 591, 606, 620, 623, 641, 646, 655, 660, 664, 692,703, 704, 724, 727, 729, 733, 734, 742, 745, 753, 756, 757,769, 772, 777, 787, 788, 791, 797, 800, 816, 825, 835, 839,840, 864, 866, 867, 884, 885, 887, 888, 889, 896, 904: n = A,T,C or G
  misc_feature 925, 929, 932, 939, 945, 950, 953, 956, 957, 965, 967, 969,975, 984, 997, 999, 1005, 1013, 1014, 1015: n = A,T,C or G
nnnctnnntcattctttnnattttantcccccancnnttntttatanttttntttantnnntttatatanantttcttaaanccagttnagtttatttnnngttggggctntttnnnttctataanttcgaattggagctccaccgcngtggcggccgaggtactttnttttttttttttttttttttttttngaaaaaacatgccttttaggggtttggcctaacaaggagtgctaccttttccctattaaccancgacattttaatgaagtcatntatggaggggtggaggtgaggaanctgtttctttttccatgtgtntagggctacccaaactcagcttgcttggctgctccctatggccngagcacatttgagctaagggaggtctttcacccaantgntnaactgtctgaacctacaggcctccccaaccccaagaaaagtcanggggccaaggnttggcacanttntgggggaggaagnaagggggagnagtagacagtaaacngtaaaanaaagggggtctgatgtttgccaaacccttccattttggnaagagnctgnaacctttcccaaaggcaaanannccctagggggggttngcaacaaggcattnttnttcctaagagaagggggngaagngccttgccngtttnggcnttttttttttgggcccccccaattttgntgggaaatttnngggggcttggtccccaccangcnancccnngttaaggnggncccccctnatnnccaagaacaaangtnttttntaagggggannccnttgggncgngggccatttttccaanaatttttcnttggggaaanggannggctttttttaaaaaaaaatgggntnnactttcgggggaaaaannannntaaaaancttaaaanaataaccttttaaatttcccncttnggncccctcnccaaanttttnaanctnnttttaaangnantatttngtttctttngggaaaaaaaaananttcttntttttatnnn

SEQ ID NO: 6486 - DNA, 989 bp, Homo sapiens
  misc_feature 3, 4, 9, 11, 15, 16, 19, 25, 27, 29, 31, 32, 33, 35, 36,38, 39, 52, 53, 54, 55, 57, 61, 62, 66, 68, 69, 70, 73,76, 87, 88, 90, 93, 94, 96, 100, 101, 111, 117, 119, 129,184, 360, 399, 477, 494, 502, 599, 610, 615, 617, 624, 652: n = A,T,C or G
  misc_feature 656, 658, 661, 665, 675, 676, 677, 679, 685, 691, 692, 703,707, 711, 718, 744, 749, 756, 761, 770, 789, 804, 810, 828,831, 833, 834, 850, 856, 861, 876, 882, 888, 890, 893, 916,927, 934, 939, 949, 950, 955, 962, 975, 982, 985, 988: n = A,T,C or G
  misc_feature 989: n = A,T,C or G
tannctttnantttnnttnaatatnantnannntnntnnaaaattttataannnntntttnntttntnnnatnagntactggggggnngnttnntntggnntttcatggcnaatcgnanctccaccgcngcggcggccgcttcgcatttttcttttgcaggttgcatgccagccaatattcctntgtgctgggaagggaaagtttgaggatgtatcaagaccatagcagtggatctcactgctcttgcctactcagggctttatctacacattgatagcccctcagaggaaaggcaccagccgaagagtcgacactggctctgggcttggatgctgcctctgataaaacgctgggcactntgaccctgaagccaggggaggggagtgcttgggcaagcntgccccccgccgtacctcggccgctctaagaactagtgggatcccccggggcttgcagggaatttccgataatcaagncttattcgatacccgtncgaccttngaggggggggggccccggtacccaagctttttgttcccttttagtgaggggttaaatttgcgccgccttgggcgtaaatcattgggtcataacctgnttttcccttgngggtngnaaaattnggttaattcccggcttccaccaattttncccncnacnaaancaattaaccnnnanccccgnggggannccattaaaaangtgngttnaaaaggncccttgggggggtgggcccttaaatngaggntggaagnccttnaaccttcancaattttaaattttggggntttggcgcctttaancttggncccggctttttttcccanggncnngggaaaaaacccttgnttcgtngcccnaacccttgcaaattnaaattngaaaancnggncccaaaccccccccggggggaangaaaggcccgnttttggngtaantttgggggcnnccttntttcccncttttcccttttnacttaanttnaann

SEQ ID NO: 6487 - DNA, 714 bp, Homo sapiens
  misc_feature 613, 629, 634, 657, 678, 691, 710: n = A,T,C or G
ctatagggcgaattggagctccccgcggtggcggccgaggacgcgggggtaattaactgattgaattcaggcaaatgagacatcatgaacttcagtggttattgatatttcagggtatatacctgaaatgcctagaggatacagatttctcatttcattctttggtctttcatttctctatatacagaaatgaaatgacacttctgggaggcagtagaagcaggaagtcaatgaattgagtagagggtcccattccctcaggctgtcattgatcagtgacaatttataaaaacaaactgcaaagtctgtggcaagtggctgcctgcttcctagaaggagcccatgaaggttaaactctgtggtcggtatttgcaagcgccgggcgtggtggctcacgcctgtaatcctagcaccttgggaggccaaggcaggcggatcacccgaggtcaggagtttgaggatttgcaagcaaaaggtcctctcctgagtctttcccagatacccagcagtgcagaggctagctgtggaaggttgcagtgggacaggaatgtattgtatgccttgccttacttgtcaccattgagatttccagagaaatgggcataaccgtctnttaacaaccaccgccngaaangccaaattccataccttaaggtngccaccaaaaatttttaaggnccctgccccgggngggcctttttaaaactagnggaa

SEQ ID NO: 6488 - DNA, 851 bp, Homo sapiens
  misc_feature 50, 467, 527, 615, 639, 653, 672, 685, 703, 704, 716, 725,741, 755, 778, 785, 789, 791, 792, 799, 806, 808, 812, 815,824, 829, 832, 840, 844, 845, 846: n = A,T,C or G
ggcgaattggagctccaccgcggtggcggccgagcgtctgcgggggccgnttccaccctcagcggatgataatctcaagacaccttccgagcgtcagctcactccccttccaccctcagctccaccctcagcagatgataatatcaagacacctgccgagcgtctgcgggggccgcttccaccctcagcggatgataatctcaagacaccgactacggcggactaatcttcaactcctacatacttcccccattattcctagaaccaggcgacctgcgactccttgacgttgacaatcgagtagtacctcggccgctctagaactagtggatcccccgggctgcaggaattcgatatcaagcttatcgataccgtcgacctcgagggggggcccggtacccagcttttgttccctttagtgagggttaattgcgcgcttggcgtaatcaatggggcatagctgtttnctgggtgaaaattgttatccgctcacaaatttccacaacaaacaataacgaagccgggangcataaaagtggtaaaggcctggggggtgcctaaatgaggtgagcttaactcacattaaattggcggttggcgcctcactggcccgcnttttccagttcggggaaaaccttnttcgtggccaagcntgcatttaaaatggaaatngggccaacccccnccggggaagaggggcggnnttggcggtattngggcgcctntttcccctttcctcgncttaacttggactnccctttgggcttcgggccgtttncggctgncggncnnagccggnatttaancntcanttncaaaggggngggantanccggtttntccnnnaaaat

SEQ ID NO: 6489 - DNA, 716 bp, Homo sapiens
  misc_feature 632, 648, 658, 681, 686, 697: n = A,T,C or G
atagggcgaattggagctccaccgcggtggcggccgaggtactcagactcacccccaactgccatcttctccaaccagcctgtgaacatgagagtagaggaggacaatgacagcccctcagtagtgtccccaactcaccaatggacagggaaatcatggttttgtttggatttggtttcaccttcatgttgtccacaatggctcggatggggttgaaagttttcttggccatgtctgagggcctcacagaccacctggcctttctgcctttcatttttcccggcacagagcttctcccaccaacgttgacatgcacgtccagaattgaggggaggttgcctttgctgctcatctgaatcatgtatgggtccatcactagcgaagccttccaagtaaaggagaaagcagcctccaagaagccaaccccgaaagctcccttagctcttctttgacaggttacaggggcccccgcgtacctgcccgggcggccgctctagaactagtggatcccccgggctgcaggaattcgatatcaagcttatcgataccgtcgacctcgagggggggcccggtacccagcttttgttccctttagtgaggggttaattgcgcgccttggcgtaatcattggncatagctggttcctgngtgaaattgntattcccttcacaatttcccacnaacanacgacccgggngccttaaagtgttaaagcc

SEQ ID NO: 6490 - DNA, 641 bp, Homo sapiens
  misc_feature 3, 24, 36, 66: n = A,T,C or G
ggnactccccgcggtggcggccgngtacgcgggggnagctacaacaggcaggcaggggctgcaagnatggtgttgcagacccaggtcttcatttctctgttgctctggatctctggtgcctacggggacatcgtgatgacccagtctccagactccctggctgtgtctctgggcgagagggccaccatcaactgcaagtccagccagagtgttttatacagctccaacaataagaactacttagcttggttccagcagaaaccaggacagcctcctaagctgctcatttactgggcatctacccgggaatccggggtccctgaccgctctagaactagtggatcccccgggctgcaggaattcgatatcaagcttatcgataccgtcgacctcgagggggggcccggtacccagcttttgttccctttagtgagggttaattgcgcgcttggcgtaatcatggtcatagctgtttcctgtgtgaaattgttatccgctcacaattccacacaacatacgagccgggagcataaagtgtaaagcctggggtgcctaatgagtgagctaactcacattaattgcgttgcgctcactgcccgctttccagtcgggaaacctgtcgtgccagctgcattaatgac

SEQ ID NO: 6491 - DNA, 704 bp, Homo sapiens
  misc_feature 628, 636, 649, 659, 661, 663, 664, 672, 689: n = A,T,C or G
ggagctccaccgcggtggcggccgaggtacgcggggcccaggtgtgttggcacatatctgtaatcccagttactcggaggctgaggcaggagaatggtgtgaacccaggaggcggagcttgcagtgagctgagattgtgccactgcactccagcctgggagacagagcaagactccgcctcaaaaaaaaaaaatgttcagggaatcacaagaaaatagagatagaaaattaaatgaaatttagaaagcaatccatgcatgtagtgagaaatttgacaaagaaatagaaacaagaaaacaaatagaaatcctatctataaacaatacagtaactgaactggaataactcattggaaagctttagcagcagacttaatcaaataaaagaattggtgagcttcaggacagaacatatgaaattacccattcagaggagcaagaataaaaaagggtaaagaagacctacaagaattgtggaataccatcaagcagactaacctctgcataatagggaattcctgaagatgaggaagaaaagggtgtagaaagcatacttaagcaaatcatggcttgaaaaagtcccaaatctagagaaagatgacactgtctaggtaccctgcccggggggnggttttanaactaggtgggtncccccgggcntncnnggatttcnttttaaggtttttggtncccggggccctgagg

SEQ ID NO: 6492 - DNA, 889 bp, Homo sapiens
  misc_feature 160, 227, 250, 260, 288, 303, 315, 330, 332, 335, 337, 338,341, 350, 370, 381, 403, 410, 411, 413, 419, 420, 422, 428,433, 449, 459, 468, 478, 482, 486, 490, 502, 505, 507, 508,514, 522, 524, 539, 543, 548, 552, 563, 570, 574, 575: n = A,T,C or G
  misc_feature 579, 580, 584, 592, 596, 599, 603, 605, 610, 616, 619, 624,625, 631, 632, 647, 669, 686, 691, 692, 694, 696, 699, 703,704, 710, 712, 714, 716, 732, 735, 738, 763, 766, 769, 791,793, 802, 803, 809, 813, 816, 819, 826, 836, 837, 846: n = A,T,C or G
  misc_feature 847, 855, 858, 859, 860, 862, 868, 884, 885, 887: n = A,T,C or G
tagggcgaattggagctccccgcggtggcggccgaggtactttttttttttttttttttttttttttggtagcgtcgcttctgtcctactttatttattggtcagggcaatcacaaagatgtgcataggctcaaagaaaagagacataaccccgaccacncgatggaagaagtgacgcggtcatgttatgagaggagtgtgtgggatgggagatagggctgtggccncctgcagaaaacagcatttgctncaggctgtcntggaagcccaggatggggatttagcctncctgaggggtcagcnaccaaaggcctntgggaggaagtgacnanctntnngcngaggatgtnaagggctaaaaggagaatgnggaagagtttnagggagaggaatcaatgaaacnagttccnnanaccctnngntgaagnctggnttggtctttgcttcangtgtgattgnccaaatccntattgggcancggnggancttngcgccctgtatnagnannaaaaanggtgcccnangtgcctcttggggcngggnttttnttantgcccctaccnccccttncaannaggnngccncccctttncccntcnaggngngggtncccaanttncaccnngggtgnntttaaacaaggatcncatgggccgccctaaatccccntttttctccaaaaattntttgnncnantangggnnaaaatnantngnaaggcccaaaaaaccnccnctnatttcccctcccccccatgttcggncgnccnaaaaaacctttgctgggccccncncttccaccnnactaantttnaangtnacaactnggaaaaaaannaactttaannccccgggnggnnngncccccnccccccttttttttgnntncg

SEQ ID NO: 6493 - DNA, 914 bp, Homo sapiens
  misc_feature 1, 4, 5, 9, 10, 15, 19, 20, 21, 27, 30, 35, 43, 45, 47, 49,50, 52, 53, 54, 55, 62, 63, 68, 72, 73, 74, 84, 96, 97,100, 104, 121, 414, 464, 480, 545, 649, 658, 671, 700, 713,733, 735, 747, 766, 795, 808, 811, 812, 834, 838, 860: n = A,T,C or G
  misc_feature 881, 884: n = A,T,C or G
nacnnccgnngcagncttnnntgtcgnttnttttntttgattngnananntnnnngttttcnnttttncccnnnagcgggggtnggctggagcacnnagnttgnctatacggcgaattggngctccaccgtggtggcggccgaggtacttttctttttcttttcctggattccccaccgaatattcacttttctggatgtattgattcaactaggcatcatacgtgactgtagaattgcagatattgtggacacggccatgcctatcaccatttgtatagcttattttaacaattgcctgaatcctcttttttatggctttctggggaaaaaatttaaaagatattttctccagcttctaaaatatattcccccaaaagccaaatcccactcaaacctttcaacaaaaatgagncacgctttcctaccgcccctcagataatgtaagctcatccaccaaggaancctgcaccatgttttngagggttgagtgacattgtttcgaaacctgttccataaagtaatttttgtggaaagctcttaagnaactaggtgggatccccccgggcctgcagggaatttcgatattcaaggctttaatcgattaccggtgcgaccctctgaggggggggggccccggtaccccaagnctttttggnggccccttttaantggaggggtttaaaatttgcgccgccttngggcggttaaatnaatggggtcaataagccttngnttttcccctggnggtggaaaaatttggtttnatcccgcctttcaccaaattttcccccanccaaacatttacntanncccgggggcaggccattaaaanggtngttaaaaagccccttggggggntggcccttaaattggaggggnagncctaaaccttccacaattttaaatttggcg

SEQ ID NO: 6494 - DNA, 825 bp, Homo sapiens
  misc_feature 228, 422, 545, 566, 576, 584, 643, 645, 651, 655, 676, 687,702, 709, 710, 723, 729, 743, 748, 751, 757, 764, 766, 769,777, 779, 790, 808, 811, 814: n = A,T,C or G
ggcgaattggagctccaccgcggtggcggccgaggtactttttttttttttttttttttgagacggagtttcactcttattgcccaggctggagtgcaatggcgcgatctcggctcactgcaacctctgcctcctaggttcatgcgattctcctgcctcagcctccccagtagctgagattacaggtgcctgccaccacccccggccaattttctgtatttttagtanagacggggtttcatcatgttgaccagcctggtctcaaactcctggcctcaagtgatctgccctcctcagcctcccaaagtgctgggattacaataattttcactttcatggtgcttataatacactggatgatgtgaccaaggaagaattggacccaggtcataaatgatctaaatatggccttgagatgtttnaatgttcttctatgaacatttataaggaggaattaagtacctgcccgggcggccgctctagaactagtggatcccccgggctgcaggaattcgatatcaagcttatcgataccgtcgacctcnagggggggcccggtaccccanctttttgttnccctttangtgaggggttaatttgcgcgccttggccgtaatcattgggcataagctgttttcctggngngaaaanttgntattccgcttcacaatttccnacaacataccnagccgggggagcatnaaagtgnnaaagcctgggggngccctnaatgaggggagccncaacnccncaattnaatttgngnttngggggccncncctggccccgnttttccctttgggaaaanccnttngtggccccccg

SEQ ID NO: 6495 - DNA, 831 bp, Homo sapiens
  misc_feature 577, 670, 674, 687, 696, 698, 700, 741, 743, 770, 776, 779,780, 781, 788, 792, 798, 802, 804, 815, 826: n = A,T,C or G
tactatagggcgaattggagctccaccgcggtggcggccgcccgggcaggtacgcggggagtcaggcctcagaaagatggcgtcctcggagcaggcagagcagccgagccagccaagctctactccaggaagtgaaaatgtgctgcctcgagagccgctgggacttgctgtgctgctcaggctggagtgcagtgtgcaaacacggcttactgcagccttcaccttccggccgctctagaactagtggatcccccgggctgcaggaattcgatatcaagcttatcgataccgtcgacctcgagggggggcccggtacccagcttttgttccctttagtgagggttaattgcgcgcttggcgtaatcatggtcatagctgtttcctgtgtgaaattgttatccgctcacaattccacacaacatacgagccgggagcataaagtgtaaagcctggggtgcctaatgagtgagctaactcacattaattgcgttgcgctcactgcccgcttttccagtcgggaaacctgtcgtgccagctgcattaatgaatcggccaacgccccgggggagaaggcggnttgcgtattggggcgctttttccgctttctcgctcactgacttgctgcgcttcggtccgttccggctgcggcgaagccgggtattagcttcanttcnaaaggcgggtaantaccggttntncncaaaaaatcaaggggattaaccgccagggaaaagaacattntnagcccaaaagggccgccaaaaaggccncggaanccnnnaaaaaanggcncggttngttngngggtttttccntaagggtcccncccct

SEQ ID NO: 6496 - DNA, 806 bp, Homo sapiens
  misc_feature 2, 5, 6, 9, 17, 599, 605, 647, 672, 716, 733, 749, 793, 795: n = A,T,C or G
tnacnntgnggcgaatnggagctccaccgcggtggcggccgaggtacaaaccagcccaggttgtaaggactaaaataaatacctgctctttaatgcccaggcactgacaaacatccacaaacatcaagaccatccaggaaaatatgacctctctaaatgaaataaataaggaatcaggaaacaatcctggagaaacagaaatatgtgtgcttttagacaagaattcaaaatagctgtgttgagcaaactcaagataacacagagaagaaattcagaattctgttagataaatttaacaaggagattgaaataatgaagaatcaagcagaaattctggcatttaaaaatgcaattgacatatgtaagaatggatgagagtctcttaattcagaatttatcaagcagaaagaattagtgagcttgaagacaaactatttgaaaatacagtcagagaacacaaagaaatagaaaagaatgaagcacacctacgagatctaggaaatcgcctcaaaaggacaaatctaagagcaattggtttaaagtggaaatagagaaaaagatagggggagaaatctcattcaaagggataatccacagangacttnccaaacctgaaagaaatattattggatattcaagtagaaaanggttttagaacacccaacagatttnacccccaaaagactacatcaaagcatttaattttcaacctttcnaagatcaatggaaaatnaatgctttttaaaagnggcaggggaaaaggaaacccatttcttcccatttgagcttttgntncctcgggccgc

SEQ ID NO: 6497 - DNA, 865 bp, Homo sapiens
  misc_feature 262, 406, 416, 417, 437, 449, 451, 455, 465, 474, 494, 498,515, 517, 550, 584, 587, 607, 619, 620, 626, 652, 662, 663,666, 691, 697, 711, 722, 728, 764, 776, 777, 802, 804, 810,812, 819, 822, 824, 825, 826, 829, 831, 836, 848, 849: n = A,T,C or G
  misc_feature 850, 856, 860, 862, 864: n = A,T,C or G
tagggcgaattggagctccccgcggtggcggccgaggtacgcggggggcggtggttgggtggtaagatggcggctgtgagtctgcggctcggcgacttggtgtgggggaaactcggccgctctagaactagtggatcccccgggctgcaggaattcgatatcaagcttatcgataccgtcgacctcgagggggggcccggtacccagcttttgttccctttagtgagggttaattgcgcgcttggcgtaatcatggtcatanctgtttcctgtgtgaaattgttatccgctcacaattccacacaacataccagccgggagcataaagtgtaaagcctggggtgcctaatgagtgagctaactcacattaatttgcgttagcgctcactgcccgctttccaagtcnggaaacctgnnaatgccagcttgcattaatnaatcggccaacncncggntgagaggccngtttgcgtntttgggcgctctttcgcttncttngctcacttactcgcttncnctcggtcgtttcggcttgccgccaagccggttntcaagcttcaactcaaaaggcgggtaattacggnttntcccaccagaaattatgggngattaccgccanngaaaanaaaccttgtttaggccaaaaaggccnatctaaaaannccnattaaacccctaaaaaaagggcccncgtttncttggcttttttcnataggcttccngccccnttgaccaagcatgaaaaaaaaatttaccccttcaanttaagatgtggnntaaaccccgccagggactttttaanantccctngntttttcnccntnnnaananccctntttgccctcttnnnttttcnaacntntnc

SEQ ID NO: 6498 - DNA, 823 bp, Homo sapiens
  misc_feature 573, 611, 638, 687, 691, 696, 704, 733, 737, 754, 759, 774,797, 799, 807: n = A,T,C or G
agggcgaattggagctccccgcggtggcggccgaggtacgcgggatgaagattatgaattgttaggacagccagggcaagatagaccctgtctctacaaaatttttttctaaattaaccgggcatggtggtgcctgcctgtagtcccacctgtgtgggagaatcacttgagcctgggaggtcaaggctgcagtgagccatgattgcacccctgcactccagcctgggtgacagagtgagaccctggctcaataagagggggaaaaaaaaattgttaggagctgggtgcggatgcagcctgcaatcccagctacttgagaggctgaggccggaggattgcttaaacccaagaatttgagcgtagcctgggcaacacagcaagaccccatctaagaaaaaaatgttttttaaatcagcttagcccaaaggggttgtgaatggggaggtataaaaagcaaaagattatttttttggcttctaagccaaagaacttacaggggattttttttttcagtcccagaacctgcagataccctgctacttgcttcacgtggatgctcaagtgccccagcanccatcttaataccattaaaccaggttaaaaaatccttncatgtggaggaaaacatgttttttttntcgccttaacttttttccacatgaaatgtgtgccccatggcttggggcncatnggctnatgccctntaattcccaaccacttttggggaggcttnaaancaagccaaatttgcttngaggnccaggaatttcgagnaacaagtttggccaacatttggngnaaaccttnttttttaccaaaaaat

SEQ ID NO: 6499 - DNA, 746 bp, Homo sapiens
  misc_feature 1, 4, 16, 21, 23, 26, 29, 31, 38, 56, 92, 123, 146, 173,182, 187, 191, 197, 201, 203, 210, 211, 213, 215, 216, 218,229, 231, 265, 363, 395, 404, 437, 443, 459, 466, 474, 496,519, 535, 548, 559, 567, 575, 607, 610, 613, 614, 622: n = A,T,C or G
  misc_feature 623, 629, 634, 639, 661, 667, 673, 675, 679, 682, 689, 690,691, 698, 701, 727, 729, 734, 736, 737: n = A,T,C or G
nctnactatagggtgnatggnanctngancntggaggngggcggcccggccaggtnccaggaagccctgggggccgagagttctgcctggtnccacctgatcactctgtcatgacctcagttnatgtgaacctttcgcccaccttngtctcaaacccagccctgagcccctanatgctgggntgtgngcanggaccncttncnggcttcnnanannangggagccctcnantatgcagaacatgttaactatcacagatacacangaggtcgtgactgaaatgacttcccaagggaactgtccttgtcatcctttttaaaaacattaaatgtcaggaaagacgatatgagagctcagactgcncccacggggggaactgagagagagaggcccantacctaggncgctctagaactagtggatcccccgggctgcangaattngatatcaagcttatcnataccgncgacctcnagggggggcccggtacccaagnttttgttccctttaggggagggntaattgcgcgcttggngtaatcaatgggnatagctgggtncctggggngaaaattngttaattccgctcacaattccacacaacatanggnggnnggggaggnntaaaanaggtnaaagncttgggggttgcctaaaagggntgaacntaaccncnccanttnaatttgnnnttggggnttnaaccttggccccctttttcaaaaaangnaaaancnngccccgcct

SEQ ID NO: 6500 - DNA, 719 bp, Homo sapiens
  misc_feature 440, 505, 546, 549, 563, 652, 661, 677, 682, 683, 685, 688,691, 711: n = A,T,C or G
gtaatacgactcactatagggcgaattggagctccaccgcggtggcggccgcccgggcaggtacttttttttttttttttttttggttaaagatctagcctgaaaatcccattacaaaaactgcctagaacacagtttacctttcttggaaagatgaagaaccaagttaatccagaatacactcaaatcccctggctcttgaaagtctcagttttcaacctgcttggagattgtttagacaaatctctaagtcttaactaaaattcattttcaggtattatattaagccaagataaatagaaagtgttggaggtcgtaaaaaaaaaaaaaaagacaaaataaacccactaccttcaagggttaacaactactaaaactatacttatggcccttcatcactgcatttgctaacccagctttccattaacaaaaaatgcctnatgaaatggacaccttggagaaaataagtgccccccaataagtgcacaaagcagcttgactcttnctgatttccaggatgactgatgaaaatgggccatcagttgntgncattttcatacttnctttgacaacatgctgaaagctgggcgcgatggctcacgcctgtaccccaacactttgggaagcttgaggccggttggattgttttgangtttaggangttcaagaacccagtntggcnncnttngcnaaaacccttttttttttttnaaaaaaat

SEQ ID NO: 6501 - DNA, 1571 bp, Homo sapiens
  misc_feature 3, 6, 11, 133, 141, 173, 343, 379, 453, 472, 516, 521, 542,546, 552, 560, 563, 566, 577, 584, 603, 606, 614, 617, 631,650, 657, 686, 690, 692, 696, 697, 715, 723, 728, 748, 767,769, 811, 813, 815, 833, 842, 851, 881, 894, 896, 899: n = A,T,C or G
  misc_feature 901, 922, 928, 933, 959, 968, 973, 974, 993, 994, 1000, 1002,1013, 1024, 1032, 1049, 1065, 1074, 1100, 1118, 1124, 1145,1151, 1164, 1180, 1181, 1182, 1183, 1184, 1188, 1190, 1193,1194, 1195, 1203, 1215, 1217, 1220, 1241, 1254, 1257: n = A,T,C or G
  misc_feature 1258, 1259, 1263, 1274, 1283, 1287, 1288, 1293, 1299, 1304,1305, 1311, 1314, 1315, 1318, 1319, 1324, 1325, 1331, 1332,1354, 1362, 1363, 1365, 1366, 1376, 1407, 1408, 1410, 1420,1429, 1430, 1437, 1438, 1451, 1452, 1468, 1469, 1470: n = A,T,C or G
  misc_feature 1471, 1472, 1473, 1474, 1475, 1481, 1489, 1490, 1493, 1497,1504, 1506, 1507, 1508, 1509, 1510, 1511, 1512, 1513, 1514,1515, 1516, 1517, 1519, 1524, 1528, 1529, 1530, 1539, 1540,1542, 1543, 1548, 1553, 1559, 1562, 1564, 1565: n = A,T,C or G
ccnttnaaatnaccggaaccttcaaccttatttaaggggggcccgaaaaatttgggggaaaggcccttccccaaaccccggcgggggtgggggccggggccccgcccccccggggggccaaggggtttaccgnccgggggnccggggggggggggttggggaaccccaaccgnccccggccccccttccccaattccccggttggccttggcaaattggaaaaaaaaaaaaccaattttccccaaccggtttggccccccccttttggttccggccggccggttccttccccccaattccccttggaattccccccaaggaccccccattttccccttttaangcccttaattttttaattccccccttttttcccttnggggttttttccccggaaaaaaggggccaaaattttaaattaattccttaattttaattggttaaattaaaaanggttaaaaaattaattaanttttaatttaattaaattgggggaaattggtttggtttgggttnggttnggttggcccggtttggcccgncccngtttgnaaaaattnggnttngttttggaaanaccccgncctttttttttgggccaanggncccttttncgnggggcccctttaanagggtttccaaaaccgggntttttgngggccccccccctttttaaaaaaaaagancccngnaaannccccccgggttttttganaaaaaaanttttngggggaaaaaaaaacctttngggggtttttttttttaananaaaaaaaaaaaccctttccttttggggggcccttttccaaanancncccctttggtttcctttnggggggggnccctttggnaaaccccccctttttttttttcctttgggnaatacccgggttncnttncngggggggcccccccccttttntttggnaattnttggggttttcccccccgggaaaatnggggggttnctttnnttttttttccccccctttnnttgggngnctttttttttntttcccctttncccggggnacctttggttgggttcncccaattttttttggnaaccccggntttttttttaaaaaatttttgggggnctaccctttttttttttnggaaancatgggtgccccccttggccncaaaantatgtttttcctnaaaaaatttgttttcnnnnntttnanaannnattttttngggggttttccncnctngggggggggggaaacaaaatnataaaaaaaaaanatnnnaaantattttttttnggggggggnagtnnggganaaaacntttgnngggggnggnntannttccnnaaaaannattttttataaaaaaaaaaaanttgggganntnntttttttttnaaaaaaaaaaaaatttttttgtggggggccnnanaaaaattttnaaaaaaaannaattttnntaaaaaaagaaanntttttttttttttttnnnnnnnncacaanacccaatnnatntttngagaagngnnnnnnnnnnnnanaaaancctnnntaaaataannannataantgtgntttatnaancnntggggg

SEQ ID NO: 6502 - DNA, 746 bp, Homo sapiens
  misc_feature 445, 448, 544, 564, 576, 584, 588, 595, 612, 619, 624, 650,653, 654, 656, 663, 664, 665, 667, 668, 670, 671, 672, 673,674, 675, 676, 678, 679, 680, 681, 682, 684, 687, 688, 690,691, 695, 698, 699, 700, 702, 703, 704, 706, 708, 711: n = A,T,C or G
  misc_feature 712, 714, 715, 716, 717, 719, 722, 725, 726, 727, 729, 730,732, 734, 735, 738, 739, 740, 742, 745, 746: n = A,T,C or G
gggcgaattggagctccaccgcggtggcggccgaggtacatatggtatacaggctctataaatcagggtctcctccccccaccttttttttaacttttgagaacaccacaaacactgcaaagatatttgacaattttctcaggttttttttttttgagacggagtctttttctgtcacccaggctggagtgcagtggcgtggtcttggctcgctgcagcctctgtctcccgggttcgagccattctcctgcctcagcctcacaagtgactgggattgtaggcgcctgccaccatgtctggctaatttttgtatttttagtggagacggggtttcaccatgttggccgggttggtctcgaactcctgacctcaggtgatccacctccttcggcctcccaaagtgctgggattacaggcatgagccaccacacctggcctattttgntgntcttgaagtaaataaggaaaaaaaatttttcaaaaccaggttaaattttggtttaattgctggctctttgggatttaatgacaagcttggtaattncaatggaaagcccaaaaccncttgtccttgancaagtggngctnggcacancttggaccaagcctccncggggcnttaangaggccattttttttttttttttttnggnncncggcttnnnanntnnnnnnntnnnnntnccnngnntccnctnnntnnnantnttnnannnntnatnttnnnanncntnnatnnngnagnn

SEQ ID NO: 6503 - DNA, 1881 bp, Homo sapiens
  misc_feature 3, 6, 7, 8, 20, 24, 33, 48, 83, 89, 96, 98, 100, 102, 104,106, 108, 110, 112, 114, 116, 118, 120, 122, 124, 126, 128,130, 132, 134, 136, 138, 148, 149, 151, 152, 159, 171, 184,185, 217, 221, 234, 243, 330, 389, 441, 456, 536, 644: n = A,T,C or G
  misc_feature 701, 743, 884, 921, 931, 993, 1005, 1133, 1142, 1171, 1181,1202, 1217, 1233, 1260, 1295, 1312, 1316, 1331, 1382, 1386,1418, 1448, 1459, 1465, 1494, 1501, 1518, 1549, 1588, 1603,1621, 1635, 1653, 1665, 1670, 1688, 1710, 1721, 1732: n = A,T,C or G
  misc_feature 1753, 1774, 1785, 1792, 1801, 1808, 1818, 1823, 1827, 1829,1834, 1843, 1856, 1867: n = A,T,C or G
ttnttnnngggggggcccgnaaanttggggggnagagcccttcccccncccccgcgcggggtggggggccggggcccccgganaggggntcccctntntntntntntntntntntntntntntntntntntntntntnggggagaggnntnnggggganaggttttttttntaaccttcccctnnggccttgggccccccaaaaagcccttgggganaagntggcccaaaattnggggccaanccgggaaattccttttggggggggtccaacctttggccaaaaccccctttcgggaaccctttcccccaaaggggcctttcaaaaagncaaaaattcccctttttctttggcccctttttggggcccccttccccccaaaaaaaggntggcctttggggggggaaaccaaaacccaaagggggcccaatttggaaaggnccccaaccttgggcnggcccccccaaaaacccccccccttttaaaaaaaatggggaaaaaaaatgggtttttttaaaaaaaaaaagggaaattangggaaaaagggaaaccaaaaatttaaggggggccccctttttccccctttttaaatttttccaaaaaagggaaaccctttttccaaacctttggggttcccccttccnaagggtttttttttccaaagggtttttaaaccttttccaaatttaaaggggtttttnccaaaaaaaaaaaaaaaaattttaatttcccaaaaaaaaaantggggggggaaaaaaaaaaaatttttttttcccaaagggaaaaaaagggtttaaaaaaaaaacccaaacccctttttttttggggtttaaaaaaggggtttttttttttttaaaaaaaaaatttggggccctttggggccnaacccccccaaatttttttccctttggggaaaagggnaaaaaagggncccaaatttgggggggggggggggaaaaaaaagggtttaaattttggggtttcccccccttngggccctttttngggcccaaaaaaggggaaaattaaaaaaaaaatttccccaaatttccccccccccaaattggggggggtttccccccaaaaagggttgggggttggggtttaacccccccttttgggccccccccccnggggggggncccgggggggccccccgggccctttttcntttaaagggnaaaaaacctttaaaagggggnggggggggaaatttncccccccccccccccngggggggggcccttttgggcccaaaanggggggaaaaaaattttttcccgggaaattttaanttttccaaaaaaagggncccntttttaaattttccngggaaatttaaacccccccggggtttccggggaaaaccccccttttccggnaaanggggggggggggggggggggggcccccccccnggggggtttaacccccccccaaaagggccnttttttttttnggggtntttcccccccctttttttttaaaaagggnggggaanggggggggggttttttnaaaaatttttggggcccggcccccgcccctnttttgggggggccggggtttaaaaaaattcccaaatttnggggggggcccaaanttaagggcctttgggggnttttttcccccctngggggggggggggggggnaaaaaaaatttnggggntttaatttccccgggccntttccaacccaaaaaatttttnccccccccccncccaaaaccantttttcccgggaaggcccccnggggggggagggccccatttnaaaaaaagggnggggttnaaaaaaggnccccctngggggggggnggggncccntnaaatngggaggggngggggggcctttnaaaccttccanccaatttttaaatt

SEQ ID NO: 6504 - DNA, 699 bp, Homo sapiens
  misc_feature 589, 602, 621, 627, 629, 647, 649, 655, 657, 675, 680, 688,690: n = A,T,C or G
tcactatagggcgaattggagctccccgcggtggcggccgaggtaccaaaaagactctcaaaaaccaatactcccacgggcaagggaatagccaagtttgttgcggtttccaatgaatgacgtcagccctgtgtaggtctcaatcaaaatgggttcagttaacaccatcagtttctttcctcttccagatccagttgaattcttgtgggcattctggatagctggaacaagcttagacatgaacccagacaacttgcaaatttcaaggaatttctcactggtgtatttcataggatgctcagtgaaagtagcataaggaacttcagtggaccatgggttccagcgggacagaagagactgctcctccggactccccaagtagatcctaaggccttctccttgtctcttgtccagggacatcccagggaaggtgaacttgcccaggcagatgcgatagacagcgctcagaggaatccgctgcagctgcacacaactcagcatgatgaagtcgtatttgcagatcaagagagtcttgtctgtgaccagtaagaattctctccttctcattggtccagtggtctatctttgncaagaaccagaanccttgaatggtctcttcanaagttnancttccctgacctttcagntnttcatngnaggcttaatggccccgancgctntagaactngnggatccccc

SEQ ID NO: 6505 - DNA, 852 bp, Homo sapiens
  misc_feature 1, 2, 3, 4, 5, 6, 7, 8, 9, 10, 11, 12, 13, 14, 15, 16, 17,18, 19, 20, 21, 22, 23, 24, 25, 26, 27, 28, 29, 30, 31,32, 33, 34, 35, 36, 37, 38, 39, 40, 41, 42, 43, 44, 45,46, 47, 48, 49, 50, 51, 52, 53, 54, 55, 56, 57, 58, 59,60: n = A,T,C or G
  misc_feature 61, 62, 63, 64, 65, 66, 67, 69, 73, 74, 76, 78, 79, 80, 81,82, 83, 84, 85, 86, 87, 88, 91, 414, 533, 534, 538, 544,558, 582, 703, 723, 741, 743, 744, 757, 764, 783, 786, 787,790, 793, 801, 814, 816, 818, 840, 847, 852: n = A,T,C or G
nnnnnnnnnnnnnnnnnnnnnnnnnnnnnnnnnnnnnnnnnnnnnnnnnnnnnnnnnnnnnnnnnnnangggnngngnnnnnnnnnnnctnactataggcgaattggagctccaccgcggtggcggccgcccgggcaggtacctggcccatgtgtaactttatgggtgacccaaaattgtgtgaaatagcttattaacactcatatttaactgctaattcctaaatgaaaaattctaggtcgggtatggtggctcacacctgtagtcccagcactttgggaggccgaggcaggtggatcatttgaggtcaggagtttgagaccagtctggccaacatggtgaaacctcatcactactaaaaatacaaaatcagctgggcatggttgcgggtgcctataatcccagctacttggnaaggcttgagggtaggaagaaatcacttggaatttggggaggtggaggctgcagtgagcccaaagatagccgccacttgcactccagcctggggagacagaagcgaggactgtcttcannaaanaaaaanaaaattaaaaaaanaaaggtccctcgggcccgctctanaactagtggatcccccgggctgcagggaatttcgatttcaagcttatcgataccgtcgacctcgagggggggcccggtacccagctttttgttccctttagtgaggggtttaattgccgcnccttggcgtaaatcatgggncatagctggtttccttgngnngaaaatttggttnttccccntcacaaatttccccacaanatnnccnaancccggggnagcattaaaaagngntnaaaaccccggggggggggcccnaaaaaangggan

SEQ ID NO: 6506 - DNA, 880 bp, Homo sapiens
  misc_feature 2, 3, 5, 6, 8, 9, 11, 12, 13, 15, 16, 17, 18, 20, 21, 22,23, 25, 26, 27, 28, 29, 31, 33, 34, 35, 36, 37, 38, 39,40, 41, 42, 43, 45, 46, 47, 49, 51, 53, 54, 55, 56, 57,58, 59, 60, 61, 62, 63, 64, 65, 66, 67, 68, 69, 70, 71,72, 73: n = A,T,C or G
  misc_feature 74, 75, 76, 78, 85, 86, 87, 88, 94, 96, 100, 101, 104, 105,113, 117, 174, 175, 187, 220, 369, 520, 728, 729, 734, 738,761, 768, 770, 774, 779, 781, 782, 791, 792, 804, 810, 825,851, 853, 878: n = A,T,C or G
tnngnntnnannntnnnntnnnnannnnnantnnnnnnnnnnngnnnangnannnnnnnnnnnnnnnnnnnnnnnntnaggggtnnnngtgtgngntgcnnctnnttaactcntatngggcgaattggagctccaccgcggtggcggccgcccgggcaggtacgcggggattcnncagaccttctgnagattctgtggttatactcactcctcatcccanagaatgaaatttaccactctcctcttcttggcagctgtagcaggggccctggtctatgctgaagatgcctcctctgactcgacgggtgctgatcctgcccaggaagctgggacctctaagcctaatgaagagatctcaggtccagcagnaaccagcttcacccccagagacaaccacaacagcccaggagacttcggcggcagcagttcagggggacagcccaaggtcacctcaaggcagggcagggaacctaaaaccccctgaaatccataagtgggagaaaagtatcttactaacagnaacaagcccttgcaaaagccagggaaaagggaaatgcaccgggaggccgtgccaggtggaaaaacaattcatcgaaaatggaaagtggaatttgcacaaaaattacttgaagaaaattcagtctattaaaaccatgggccatgagaagcttgaaaaagaatggggatcattggacttaaaagccttaaatacccctttgtagccccannagctntttnaaaaccgaaaagccttcctttanaagtaananaaantgaancnnaaaaaaaannggggtccctttngggcgncttcttaaaaaactnagtgggatccccccccggggccttgncnggggaaattttcgaatttttcaaancc

SEQ ID NO: 6507 - DNA, 760 bp, Homo sapiens
  misc_feature 126, 225, 290, 342, 385, 439, 474, 475, 485, 505, 557, 564,569, 578, 587, 608, 618, 634, 665, 672, 676, 678, 681, 682,687, 688, 700, 705, 712, 722, 736, 738, 745, 749, 754: n = A,T,C or G
tcactatagggcgaattggagctccaccgcggtggcggccgcccgggcaggtactttttttttttttttttttttttttttttttggcaatggggtctcaccctgtcacccaggctggagtgcagnggtgcattcatagctcactgcagctttgaactcctgggctcaagtgatcctcctacctcagcctcctgggtagctgggactacaggcacatgctactgngcctagccaacattaacacttttaaaaaatgatcaaaacatgggaacctaaaggctcaacaatanaactcacaataaattccagtgtcaatataatggaaatttacataggcattanaagttttatttacaattaattgttggcaaattcttaacaaatnttcataaaatcaagtagaaaaaacaaatgacaatcatttaaataataatctcanaatatttttgattaaaggagctatacaaattatanntatgtacatncatgaaaagaaaatgagacnttttaatagtaaaatatttccaaatgcaataccagtagtattggtttctttntttacanaaagnggataaatnattttttanaaaaaatttgggaaaaatccncctaaaatantaatccctaaaaaaangatttttttgaggaaaaatttaaggggttcnaaaatanaccngnttnnctatnnaatctttttaanctaanttggaanaaaaaaaaanaaaaagttccccgngntaccttnggcncggtnttataa

SEQ ID NO: 6508 - DNA, 1669 bp, Homo sapiens
  misc_feature 18, 41, 72, 103, 106, 109, 125, 127, 137, 139, 142, 144,151, 153, 162, 174, 212, 221, 274, 308, 313, 316, 358, 360,411, 436, 705, 830, 886, 968, 971, 973, 984, 1018, 1087,1145, 1146, 1162, 1172, 1175, 1255, 1258, 1275, 1279, 1293: n = A,T,C or G
  misc_feature 1300, 1307, 1311, 1358, 1382, 1407, 1430, 1445, 1475, 1499,1539, 1567, 1583, 1591, 1596, 1599, 1609, 1613, 1626, 1634,1646, 1664: n = A,T,C or G
gggggaaaggcccttccncaaccccccggccgggggttggnggcccggtggccccccggcccccccgggggnccaagggggtttaaccaagggggcccaaagnggnggncctttgggggggtttnanaaaaaaaaancnaangncgggttngnccccaaccnccaatagcattngaataccagaataggtttttggtccttttgggcctttngcccaaccnttcccttaaaaacccccaaaaaggcccccttaaaaacccccaaccaaaggccntttccggccaaatttttttactttaagggggttnccaanaanaaaattcccttgggaaaaaaacccaattggggggcccccaananttgggaagggaaagggaaaagggaaacctttaaaaaaattttgggaaaggnaagggggggcccggcccccaaattnttttttttttccttttttttcccaatttttgggccccccctttggggggaaaccccctttttccaaaaaatttttttccctttccccctttccccctttcctttgggcccccttaaagggggggggttttttttcccaaatttggggaaattcccaaatttttaaatttaaaaaaaaattttttttaaaggggggccccaaaaaccccaaaaaatttttttttaaatttgggggggggtttttttttttggggggggaaaaacccaaanaaaaaattgggggggtttccccccaaaaaattgggggggcccccaaagggtttcccccaaagggttttaacccccccccgggggcccaaccccaaaaaggggggggggcccctttgggttttttnccaaattttgggaaaaaaaaaaaggggggggggaagggggaaccctttttaaaccnttggggggggggaaagggggggtttgggcccaaaaagggaaaccaaagggtttggggggcccaaatttttttcctttccccnttncntttcccccttncttttttgggcctttgggccttcccaaaaggccnacccaaagggccccccccttggggggaaatttttgggcccaaaggccccccccccggaaaggggggccnttgggaagggaaaccccccaagggaaacccaaaaaaaagggccccccccggggggggnnaaggggggcccaaggnaaaaaaaaanggnaattgggccctttccccaaaaagggaaaaacccccaaaacccaacctttaatttccaaaaaatgggggttcctttttttnggnccaaaaaaaattccccnttcnaacccaaggggggnaattttnccccttnggtngggggggttcccccaaggcctttttttggggaaaaccttgggggggnaaaaaacccctttttttctttttncgggggaattccccggccaaccttncaattttccccaaccttgggaanttggccccaaggccnttgggcccccccttgggaaagggggaattngcccccaaggttaaccccctttcnggggcccggctttcttaaggaaaaaccttaggttgggggnaatccccccccccgggggggccttggcnaagggggaaattttcnggaattanttcanaanggccttttanttcngaattaaccccgntctccganaaccccttccgnaagggggggggggggggncccct

SEQ ID NO: 6509 - DNA, 954 bp, Homo sapiens
  misc_feature 1, 2, 3, 4, 5, 6, 7, 8, 10, 13, 14, 15, 16, 17, 18, 19, 20,21, 22, 23, 24, 26, 27, 29, 30, 31, 32, 33, 34, 35, 36,37, 38, 39, 41, 42, 43, 44, 45, 47, 48, 51, 52, 53, 55,56, 57, 59, 60, 61, 63, 65, 67, 69, 70, 71, 72, 74, 75,76: n = A,T,C or G
  misc_feature 77, 78, 79, 80, 81, 82, 83, 84, 85, 86, 89, 90, 94, 97, 99,101, 102, 104, 105, 109, 110, 111, 112, 113, 128, 215, 488,632, 714, 734, 769, 777, 785, 815, 821, 829, 837, 842, 851,863, 874, 881, 920, 937: n = A,T,C or G
nnnnnnnntnttnnnnnnnnnnnntnntnnnnnnnnnnntnnnnntnnttnnntnnnannntnantntnnnntnnnnnnnnnnnnnagnnaggnagnanannanntgtnnnnnactactcactatagngcgaattggagctccaccgcggtggcggccgaggtacttgaccccacagccatctgggatgagccggttttcagccaccatgtcttnaaattcatcagcattgaacttggtgaagccccacttctttgagatgtggatcttctggcggccaggaaacttgaacttggccctgcgcagggcctcaatcacatgctccttgttctgcagcttggtgcggatggacatgataacttggccaatgtgaaccctggccacagtgccctggggctttccaaagacacctcgcatgcccgtttgggaagcctccccgcgttacctgcccgggcggccgctctagaactagtgggaatcccccggggnctggcagggaatttcgatatcaaagcttatcggatacccgtccgaccctcgaaggggggggcccggttacccaagctttttgtttcccttttaagtggaggggttttaaattggcgccgcctttggccgtaaaatcattgggtncaataaggcttgtttttccctggtgttgaaaatttggttaattcccggcttcaacaatttcccacacaaaacaattaccgangcccggggaagccattaaangttgttaaaaaagcccctggggggggtggcccttnaaatgganggtgggancctttaaacttcaacaatttaaatttggcngtttgncggccttnaacttggncccgnttttttccnaagtttcggggngaaaaaccctnttcggtnggcccaagcttggcatttaaaatggaattcgggccaaanccccccccgggggaaanaaggcccggtttttgct

SEQ ID NO: 6510 - DNA, 1526 bp, Homo sapiens
  misc_feature 23, 29, 35, 53, 59, 61, 69, 84, 90, 92, 105, 110, 113, 115,117, 119, 135, 139, 141, 143, 145, 147, 149, 152, 157, 159,160, 165, 167, 171, 173, 174, 179, 182, 187, 189, 193, 194,205, 207, 209, 247, 249, 255, 270, 293, 297, 299, 318: n = A,T,C or G
  misc_feature 320, 328, 339, 343, 345, 347, 368, 376, 383, 387, 392, 399,400, 412, 414, 432, 444, 453, 472, 487, 572, 659, 688, 696,703, 711, 725, 732, 737, 771, 798, 806, 815, 820, 829, 836,839, 845, 863, 879, 902, 906, 958, 971, 980, 1004: n = A,T,C or G
  misc_feature 1013, 1030, 1031, 1034, 1044, 1046, 1057, 1071, 1087, 1095,1105, 1126, 1137, 1144, 1154, 1159, 1160, 1161, 1162, 1173,1184, 1189, 1198, 1211, 1216, 1226, 1228, 1230, 1237, 1242,1248, 1292, 1296, 1311, 1314, 1318, 1324, 1354, 1360: n = A,T,C or G
  misc_feature 1368, 1372, 1378, 1388, 1390, 1401, 1402, 1404, 1409, 1415,1420, 1423, 1425, 1438, 1462, 1470, 1490, 1493, 1496, 1497,1501, 1502, 1511, 1514, 1517: n = A,T,C or G
ccggaaaaattttgggggaaagnccttcnccaacnccggccgggggttggggnccgggncnccgtaagnggtttaaccggccgngggggngnggccggggttggnggttnttngngngnttggggttaaaaaggnaatngngncngngnttntggtngnnaagananatanannaaagnacnttctntntccnnaacctttttgngntnggtgggggggggggggaaaaaaaccttgctgggccgcngnccttcnttaaaggaaaaaccnttaagattaggtggaattccccncccncngtggggaccttggccaagngnaaaaattnttctggaattnattncnanaacggcccttttaattccggnaattaacnccggttnccgnaaccnccttccnngaaagagggggngnggggggggccccccccgnggtttacccccnccaaagacnttttttttttggtattccnccccttttttaaagnttgggaagggggggttatttaaaaaatttttggcccggcccggcccttttggggccccggttaaaaatttccaatttgggggttnccaaatttaaaggccctttggtttttttccccctttgggtggggttgggaaaaaaaatttttggggtttttaatttccccccgggcntttccaaaccaaaaatttttccccaaccnaacccaanaacccantttaaccntaaaggccccccgnggggggnaaggncccaatttaaaaaaaaaggtttggtttaaaaaanggccccctttggggggggggggttggncccccttnaaaattggnaaggntgggaaagncctttanaanctttcnaacccaattttttaaaanttttggcccggttttnggcccggccctttctaaaccttnggcnccccgggcctttttttccccaaaaggttccgggggggaaaaaaaaccccttngttccggtttggnccccaaaanctttgcccaattttaaaattgggnaaaatttcnggggtccccaaaaaccnnccncccggggttntnaagaaaagggncccggggttttttnggccggttaatttttngggggggncccggccctnctttttccccgggcctttttncctttcgggcntttcaanctttggaaanctttnnnncttttgccggnccttcctgggntaccnggttttccngggcctttgcctnggtcngaaaaccccngntnaatttcnaaagnctattnaaactttcaaaaaaaggggcccgggggttaaaattaacccgggngttnattttccccaccaanggnaaanttcaangggggggaaattaaaaccccccaatggggnaaaaangaaaaacnattnttttgnaagcccaaananaaaggggcccnnanccaanaaaaangggcnccnangggaaaaccccgnttaaaaaaaaaagggcccccccangtttttgnccttgggcccggtttttttnccncannatanngggcttttnctnggnccccccccg

SEQ ID NO: 6511 - DNA, 950 bp, Homo sapiens
  misc_feature 1, 3, 4, 5, 8, 9, 10, 11, 13, 15, 16, 19, 20, 21, 22, 23,24, 25, 27, 29, 30, 31, 32, 33, 36, 37, 39, 44, 46, 48,51, 53, 54, 55, 57, 59, 61, 62, 63, 64, 65, 66, 67, 68,69, 70, 71, 72, 73, 74, 75, 76, 77, 80, 81, 85, 86, 88,89, 90: n = A,T,C or G
  misc_feature 92, 93, 94, 95, 97, 98, 99, 100, 102, 104, 105, 107, 168,170, 184, 194, 195, 201, 204, 207, 208, 210, 213, 407, 460,524, 626, 673, 676, 708, 714, 739, 740, 741, 746, 795, 828,832, 859, 865, 867, 884, 891, 910, 920, 923, 929, 939: n = A,T,C or G
  misc_feature 943, 949: n = A,T,C or G
nannnccnnnnantnnatnnnnnnntncnnnnnttnntnttcantntnaantnnntntnannnnnnnnnnnnnnnnnagnnaggnntnnnannnnannnncntnntncgactcactatagggcgaattggagctccaccgcggtggcggccgcccgggcaggtacgcntnggtgaccggggagnagcgctcggnngagganctnttnncnttngcaggttcgaggcgattcgagctccagctaggatgatcgaggttgtttgcaacgaccgtctggggaagaaggtccgcgttaaatgcaacacggatgataccatcggggaccttaagaagctgattgcagcccaaactggtacctcggccgctctagaactagttgggatcccccgggcttgcagggaattcganatcaaagccttatccggataccgtcggaccctcgaaggggggggggcccgggntacccaagcttttggttcccctttagtggagggtttaaattgcggcgccttgggcgtaatcatnggtcatagctgggttcctgtggtgaaaatttgttattccgcttcacaaatttcccacaccaacattacgaagcccggggaagccataaaaagtggtaaaagncctggggggtgccctaatggagtggaagccttaaacttcacaatttnaantttggcgtttgccgccttcacttgccccggcntttttnccagttccggggtaaaaaccccttnnnccgtnggcccaagccttggcatttaaattggaaattccgggcccaaaaccgccncccggggggaagaaagggcccggttttttgccntaantttgggggcggccttttttccgctttncccttngnctttaaacttgaacttnggcttgnggccttcgggttccgtttncgggctttcnggncaaaanacggttattnaagnttttang

SEQ ID NO: 6512 - DNA, 1700 bp, Homo sapiens
  misc_feature 7, 13, 20, 28, 36, 43, 80, 85, 87, 88, 90, 91, 124, 134,141, 145, 186, 207, 209, 210, 212, 214, 241, 441, 739, 749,849, 933, 951, 992, 997, 1006, 1014, 1041, 1057, 1087, 1100,1105, 1115, 1120, 1189, 1194, 1212, 1312, 1322, 1327: n = A,T,C or G
  misc_feature 1337, 1344, 1358, 1372, 1382, 1416, 1426, 1435, 1455, 1474,1480, 1497, 1519, 1531, 1583, 1584, 1589, 1596, 1617, 1631,1637, 1646, 1649, 1657, 1665: n = A,T,C or G
cctttcnccaccnccgggcngggggttngggggccnggggccnccggcccccccggggggtccaagggggttttaacccncccgngnngnnggtggtggggggggccccaaaaacccccgggcngggagaaggnaacccangggnaaaattttttccaaccaaaaaaaaccttttttttccaaggnccttcccccaaggcccaaggntnntntnccaaaaagggggaaaaaaaattggttnccaaaaaaaattgggaacccaaaaagggaaattggggggaaaagggaaacccccgggaaggttggttccaaaaagggaaggcccttaaaaagggaaacccaaaacccaaaaaaaaaaagaaggggggcccccccccccaaaaaaaaaaattttttttggttttttttttccaaaaagggaaaaaaaaaaacccccaaaanttgggaaaaaaaaaaaaaaaagggccaaaaagggccaaaaattttccaaagggaaaaaccgggtttgggaaaaaagggtttccccccaaggggggaaattcccaatttggggggaatttgggtttgggccttttttaatttcccttttttccaaacccaaagggttttcccaaaccctttgggcctttggggggggggttccccctttgggaaaaaagggttttttccttttccccctttccttttggggggcccccccccaaaggtttgggccccccaagggccctttgggcccggnaaaaaaaggncccccccccttttcctttgggccccccaaaaaaaaggggggggggccccccaaagggaaaaggggggaaaggggggccccccgggggtttgggaaaattnaattttaaagggaaagggccctttcctttgggaaattttttaaacccccccccaacccccccccgggtttccaaaggggggggncccaacccccccgggccntttgggaaaaaagggggggttcccaaccctttgggaaaaanttaanccctttttnaacccttngggttggggcccaacccccccccgggnaaaaaaaaaaaaaaanttaaaaaaaaatttcccccttgggcccggnaagggttttttcnaaccnggcccccccnggccngggtttaaagggttttttccgggccccccccccccttgggaaatttttttttttgggaaagggcccggnaaccntttccccttttttttccnggccaaattggggggggggaaattcctttaacccaaaaaaaaaaaccccccgggaaaaaccctttgggcccccttttttaaaaaaaagggaacccccttnttttttttcnaaccnaacccggggnacccggnttgggaaaaaaggnttccaaccaaaggnaaaacccttngggacccaaaaaaaaatttccccccaattccccnttgggttccnaaaaaggtnggccaacccgggggggttcnttttttggaaaaaatttcnttaaanccacccaaaaaaaaaangggccccatttagggaaaaaangggaaattttcntttttttaaaaaaccaaaccccccttggttaaccccttttgggggccccggnnttttntttaagnaaacctttaaaggttgggggnatttcccccccccngggggncctttgccnaangggaaaantttccggnatttattccaaaaggccttttaattccggaattat

SEQ ID NO: 6513 - DNA, 939 bp, Homo sapiens
  misc_feature 1, 3, 4, 5, 7, 10, 11, 12, 13, 14, 15, 16, 17, 18, 20, 21,22, 23, 25, 26, 28, 29, 30, 31, 32, 33, 36, 39, 41, 44,45, 46, 48, 49, 50, 51, 52, 53, 54, 55, 56, 57, 58, 59,60, 61, 62, 64, 65, 66, 67, 68, 70, 71, 72, 73, 74, 75,76: n = A,T,C or G
  misc_feature 77, 78, 79, 80, 81, 82, 85, 86, 87, 91, 92, 94, 95, 98, 99,100, 101, 103, 108, 109, 121, 187, 239, 389, 459, 462, 490,523, 530, 580, 691, 703, 727, 732, 772, 803, 806, 810, 832,852, 855, 856, 876, 889, 893, 900, 901, 902, 905, 908: n = A,T,C or G
  misc_feature 909, 910, 935: n = A,T,C or G
ncnnncntgnnnnnnnnncnnnncnntnnnnnnatnatntntcnnntnnnnnnnnnnnnnnntnnnnntnnnnnnnnnnnnnagnnnaggnntnngtnnnncntaacnnctcactatatgncgaattggagctccaccgcggtggcggccgcccgggcaggtacgcggggaggcattgaggcagccngcgcaggggcttctgctgagggggcaggcggagcttgaggaaaccgcagatnagtttttttctctttgaaagatagagattaatacaactacttaaaaaatatagtcaataggttactaagatattgcttagcgtccaagtttttaacgtaattttaatagcttaagattttaacgagaaaatatgaagacttagaagagtngcctggagggaagggaaaaaggattaaaaggttttcttaaaacatgacgggaggtttgagatggaaagcnttnttcatgggaggtaaaaaaatgtatttanaaaggaaaatttgagagaaaagggacttacagnagccccngaatttaataccaataggaagggccaatgcttttagattaaaaatgaaangtggactttaaacagccttaaagtttagttttaaaaagtttgtagggtgattaaaaataattttgaaggccgaatcctttttaaaaaagaagatttaaaacccggaagggnggattaaaaagnaccctttgaaaatcccattggacnccaanggggaagaaatttgccggttcatttttaaaaaggccctangtttaaacggccattttttaccttaaaaccnccnggancccaaaaaaaattggggaaaanggattttaattttgggggangtnnggtcaagggatttgaaaaancaaatttttgggnaggnaaagaannnagnaannnttttgggaaagtggggaaaaaaacngggg

SEQ ID NO: 6514 - DNA, 1125 bp, Homo sapiens
  misc_feature 3, 5, 10, 11, 13, 15, 18, 19, 22, 24, 26, 27, 32, 34, 35,36, 37, 39, 40, 48, 49, 50, 53, 55, 57, 63, 65, 70, 75,83, 89, 97, 98, 99, 100, 101, 105, 107, 109, 110, 117, 119,122, 123, 124, 125, 128, 129, 130, 140, 141, 143, 154, 199: n = A,T,C or G
  misc_feature 200, 203, 205, 216, 222, 225, 227, 229, 239, 242, 243, 339,375, 379, 396, 408, 415, 422, 453, 467, 478, 488, 492, 496,506, 513, 542, 544, 546, 570, 576, 580, 589, 610, 635, 640,650, 682, 695, 697, 707, 718, 730, 732, 736, 743, 745: n = A,T,C or G
  misc_feature 757, 765, 777, 788, 801, 804, 806, 831, 841, 848, 856, 874,882, 887, 888, 889, 894, 897, 903, 916, 926, 930, 940, 952,957, 964, 978, 996, 1019, 1020, 1030, 1037, 1052, 1053,1059, 1078, 1079, 1095, 1102, 1103, 1111, 1119, 1124: n = A,T,C or G
tcnantcgcnntntngtnntgntncnntcttntnnnntnntaactttnnnttntncntctttntncggangtatntatccctnttcccnagtatagnnnnntatngntnnttatttntnggnnnnagnnnttactcatcnngnccgaattggtngcctccactcgcggtggcggccgaggtacgcgggattgtccctgnntgncngcgggggtgcngagaanaanantntttttttttnttnnctcgcagctggagatctgagaacggacagactgcctcctcaagtgggtcccagaccctcgagtagcctaactgggaggcacccccaagtaggggcnagactgacacctcacacgcccgggtactgatatttncatnttttttagtcttattgntttagtgttcangaataantcttttnatttctctttcctggaacaattaatttttgnttataggggaaaanacttggaaacnaaaacttacnttcntttnaaacaacctnccttgtnttcttttttattaaaaaacattggtgttncntngaattttgtgtatatggaatgttntttttntttntatggtgtncctagggttaattgttgtcangaaaaaattgcaaaaacaaccgggngtaanacccaaattnttttttcttttccttttttttcccccaaaacnaaccttttttaangnttctagggangggaaatttangcaaattaaaananaggnccttttngntggttttaaggnaaattttnacccctttttcnaatttttttgnaaaaaaggaaaanacntnggggaaaaaatttaaaaagttttgngattggtggnaggtttnccccttgncccccgggggccggggcnccggcttnttaannnaaacnttngggtgngaattcccccccncgggggcctnggcnatgggtaatnttcgaatttttncaaangcctttntttgggataacccngttccgaaccctccgganggggggggggggccccccggggnncccccaagcnttttttnggttctccccttttnnggtggngtggggtttaatttttgtnnccccccttggggccgnttaatanncatgggtnccaattanggccnc

SEQ ID NO: 6515 - DNA, 1546 bp, Homo sapiens
  misc_feature 9, 25, 44, 46, 58, 64, 66, 68, 70, 72, 74, 76, 78, 80, 82,84, 86, 88, 90, 92, 94, 96, 98, 100, 102, 106, 109, 113,114, 115, 118, 120, 122, 124, 132, 153, 165, 187, 195, 197,210, 242, 256, 261, 277, 330, 334, 343, 348, 368, 371: n = A,T,C or G
  misc_feature 377, 380, 389, 405, 449, 451, 463, 465, 468, 471, 495, 497,503, 523, 540, 578, 594, 626, 642, 661, 662, 669, 681, 742,743, 775, 776, 777, 778, 779, 780, 781, 786, 789, 791, 793,794, 795, 796, 799, 803, 805, 806, 808, 809, 811, 817: n = A,T,C or G
  misc_feature 819, 820, 823, 827, 831, 833, 834, 835, 845, 846, 855, 862,870, 871, 873, 875, 876, 877, 880, 884, 892, 894, 901, 902,908, 911, 917, 919, 922, 924, 928, 929, 935, 941, 951, 956,964, 965, 966, 967, 968, 969, 972, 980, 981, 983, 988: n = A,T,C or G
  misc_feature 990, 992, 993, 995, 1003, 1006, 1007, 1008, 1011, 1014, 1019,1023, 1029, 1032, 1036, 1037, 1042, 1046, 1047, 1048, 1051,1052, 1053, 1057, 1071, 1073, 1077, 1078, 1079, 1080, 1086,1092, 1093, 1094, 1099, 1100, 1101, 1102, 1103, 1105: n = A,T,C or G
  misc_feature 1106, 1108, 1112, 1132, 1135, 1139, 1142, 1150, 1153, 1155,1159, 1164, 1165, 1166, 1169, 1174, 1175, 1176, 1177, 1180,1181, 1183, 1186, 1192, 1193, 1194, 1195, 1200, 1206, 1209,1210, 1211, 1212, 1221, 1224, 1225, 1226, 1232, 1233: n = A,T,C or G
  misc_feature 1236, 1238, 1246, 1247, 1248, 1255, 1257, 1259, 1260, 1267,1271, 1272, 1273, 1276, 1278, 1280, 1282, 1284, 1285, 1289,1290-1293, 1295, 1302, 1303, 1307, 1309, 1310, 1312, 1313, 1326,1328, 1331, 1337, 1341, 1342, 1346, 1347, 1353-1354, 1359: n = A,T,C or G
  misc_feature 1361-1363, 1370, 1372, 1378-1379, 1384, 1389-1390, 1392,1394, 1401, 1404, 1406, 1407, 1410, 1413, 1417-1418, 1421, 1429,1433, 1435, 1437, 1439, 1441, 1446, 1449-1450, 1454, 1456, 1458,1461, 1466, 1469, 1474, 1480, 1482, 1485, 1488, 1491, 1494-1495: n = A,T,C or G
  misc_feature 1498-1500, 1507, 1509, 1515, 1518, 1521-1522, 1528-1530, 1532, 1538, 1541, 1543-1545: n = A,T,C or G
ggggtaggnccttccccaccccggncgggggtgggggccggggncnccggaaggggtnaacctntntntntntntntntntntntntntntntntntntntntatntgntgannngtntntngnccttggcnaaggacaacacctaaaccttntttttatttttnattggccaaccccggggggggnaatgggtntntccaaagggttanttcaaccaaaaaaccctaattttaaccaaaanaggccaatattaanttaanattcaaccccccttcnccttttcccccccctttttaacattgggcgttttcaaaaaaccttaaattttngggnggggggttnaaaanaaaataattataaaatttanaanatttanaanaagcccccncctttgggggccgggntggggggtggggggcctttccaaccgggcccccttgggttaaanantgggccaccaangnccnacnctttttttggggggggaaaaaggncntttggnaaaaaggccccggggggggnttggggggaatttccanacccccctttggggaaggggggtttccaaagggggggnaaggtttttttcccgngaaaggagaagggccaaaggcccccccccggngggaaacccaaaaacncaaatttgggggggccggnnaaaaaanaacccccccccnccgggtttcccttttcttttaaccctttaaaaaaaaaaaaaaattttaaccccaaaaaggnnttttttccccggcccggggttgggggggggtnnnnnnntttantcncntnnnnctnaatntnntnnancaatantnngtntggnctanannnggaaccacanngataagacnctaattntttaaatnncncnnncangtgntggtaacncntttttannggttgntanaaaatnantangngttnnatttcnattttngggattttanccttntacctagnnnnnnttntcattttnngnagccngngnngnattaattnttnnnaanttnggtgnttanggatcnaanatgnnaatangggnnnatnnncacnaatgttttatattnangtgnnnncttccnaatttnnnaagannnnngnnangaantatgttttttgtaaaatatngtntttntcntgtacttntantnaatnaatannnccnttagnnnnatnntnaangtattnnnnctatnctattnagnnnnttttttttnttnnnactatnncantnaatagttnnnattattncntnnacaacantatnnnatngnanananntttnnnnntnttaatgnnatcntnntnntatttttttatgntngtnttaatntatnnatanntaggannagtanannnattgatntnttgctnntattnagacnntnantttattnttntnntgnttnttanngttntttaaanttanantntnannttancanntatngntnatnctttntanttatntttgtntnttnctntantgnnttnnntgatcancntgatgnttnttnnttatcntntncatttnatntnnng

SEQ ID NO: 6516 - DNA, 894 bp, Homo sapiens
  misc_feature 1, 2, 3, 4, 7, 8, 9, 12, 14, 15, 16, 17, 19, 21, 22, 23,24, 25, 27, 30, 31, 37, 38, 41, 42, 43, 44, 45, 48, 49,50, 51, 53, 54, 57, 59, 60, 61, 62, 63, 64, 68, 69, 70,71, 72, 73, 74, 79, 82, 83, 89, 90, 91, 92, 93, 94, 95,96, 99: n = A,T,C or G
  misc_feature 119, 170, 186, 417, 476, 691, 711, 741, 782, 816, 849, 866,886, 888: n = A,T,C or G
nnnnatnnnttntnnnntntnnnnntntanntttctnnttnnnnnttnnnntnnttncnnnnnncttnnnnnnnggttnttnnaattgnnnnnnnnttnacttctatagggcgaattgnagctccaccgcggtggcggccgcccgggcaggtactttaggaggcccaggngggcagattgcctgangtcaggattttgagaccagcctggctaacatggtgaaaccctgtctctactaaaaatacaaaaattagccgggcatggtggctcacgcctgtagtcccaactgcttgggaggttgaggcaagagaatcgcttgaacccaggaggtggaggttgcagtgagcccgaggatcgcaccactgcactccaagcatgggcgacagtagcaagactccatctcaaaataaagaaagnaaaggaaacaaagaaaaggaaaagctttatattggaacttctctaaaaaaaggaaaaantaaggaaagcctggatgcacaccaaatcttaaatttgggccaagtcggatcaatttaaagggatattttattttgccattcacaaaaataaattcttttactcccccccaaaaatcaataaaaaagtttcaaaatagcaactttttcctaatggtgttttaaaatgttaattcacccaaaatacattgtggttccccaactttttttttccaagnttaataaatttcttatttgnggtaaaagtggaggttattacccttggaangtggaggggcaattaaagaagaagttttggaggcttttcangacccttgccctgggaagaagaggccgttgtttnctttttctttaagaagtccttgaagggaaaatnggtttggggggggccanccaaaaatttcttttcaaantntttttt

SEQ ID NO: 6517 - DNA, 843 bp, Homo sapiens
  misc_feature 495, 527, 606, 628, 647, 652, 680, 682, 708, 749, 755, 776,777, 778, 791, 796, 806, 812, 821, 828, 837, 838: n = A,T,C or G
gactactatagggcgaattggagctccaccgcggtggcggccgcccgggcaggtacctgtggtctcagctactcgggaggctgaagtggggaggatcgcttgagcccaggtggtcgaggctgcagtgagctgtgtttataccaccacactccagcctgggccgcagagtgagactttgtccaaaacaacaacaacaacaacaacaacaacaacaaaaactgtagcttccattttgggtgttctctattgctctgtcttggatcattcactctgggagaagccagctgccaaaggcattccttcagcgaggcccacatgaatggtaacaggcacatgagtgagcttggaagctgatcctttcctagttgagccttgatgactgcagctgtggctgacacagcagtagctttttgaaagatcctaaaccataactaaccagctaagtcttccagataactgtcctgcagaaactatgagataataaatgttcattgntttagctactgagtgttggggttatttgtcgnacctcggccggtctagaactagtggatcccccgggctgcaggaattcgatatcaaagcttatcgataccgtcgacctcnaagggggggccccggtacccancttttttgttccctttaanttgangggttaatttggcgccccttggcgtaantnatgggcaatagcttgttttcctgggntggaaaattgtttattccgcttcacaatttccacaacaaanattacnaagcccgggaagcattaaaannngttaaaagccccnggggnggcctaatgnggtggngcctaaccnccccttnatttgggtnnggccc

SEQ ID NO: 6518 - DNA, 843 bp, Homo sapiens
  misc_feature 1, 2, 3, 4, 7, 8, 39, 185, 203, 271, 306, 338, 495, 552,655, 661, 678, 700, 702, 708, 722, 731, 745, 751, 772, 785,789, 795, 801, 818, 830, 831, 838: n = A,T,C or G
nnnnagnngtttcgcgtaattcgactcactatagggcgnattggagctccaccgcggtggcggccgcccgggcaggtacttttttttttttttttttttttttcgagacagggtctcactctttcatccaggctgcagtgcagtggcgctaccgcggctcattgcaacctccacctcctggtctnaagccatcctcccacttnatcctcccaattagctgggattacaagctcaagccaccaagcctggctaatttttaaattttcagtanatatagggtttcgccacattgcccagggtggtctnaaactcctgacctcaagggatccacccacctnaacctcccaaagtgctgggattacaggcatgagccactgctctgcctttttccccttttttaacctgaaagtatctttgccaattctgtaatttcttcaggtatcaaaaatcatcttcccaataagacacagcagtatataacctactatatatttnacttatttattttatttatattcaataagcccaatttgaatgtaaaaaatttttatntaacataatatcaataaataatttcttatgtacctcggccgctctaaaaactagtggatcccccgggctgcaggaattcgatttcaagcttatcgaacccgcnaccttnaagggggggccccggtnccaacttttggttcctttaagngngggttnattgggcccttggngtaatcatngggcaataggctgntttccnggggggaaaattgtttttccncttcaaaatttcnccanaaaaantacaancccggggacctttaaantgttaaaaaccnnggggggngccct

SEQ ID NO: 6519 - DNA, 708 bp, Homo sapiens
  misc_feature 599, 600, 611, 612, 613, 614, 615, 616, 617, 620, 646, 665,667, 696, 697, 706: n = A,T,C or G
ggcgaattggagctccaccgcggtggcggccgaggtactgctatagggagagaagaaaggtggtttcagctcagggcagttctggggaaggaaaaagaagacctgatctatgaatggcagagtgcaggcagcagcccaagacacactccactgacttcagatgtcaggttccttcccacaaactctgaactatcctgcctacctcgcctcctcctgatttgtatagagaagtggtcccaactgtcaggcatgtgtctggccactctctacacctcaccagccttctctcactggactctccatttccctttcatcccctgagcttcctggcacccttgtccctgcctccccttctccaggactcatctcctgtaacccttcaactccagttctcccagtgacacagagccaattctatcaattcttactagcagcctgctagtctccagaagaaatactcttagcaaaatctgagataaaatctaatccctgcctaggcctaaaaccatgaaatattatcaaaactctacataaggcttacaaactattaagaccaaaagcacaaatacagagatagatgcactctcttccaggacttnnttttttttttnnnnnnnttncttttttggacatcaaaatggggtcnttttatttttggaaacaancngggaaaaaagagccccttttccctttcannaggaaaaanaa

SEQ ID NO: 6520 - DNA, 734 bp, Homo sapiens
  misc_feature 396, 528, 542, 553, 563, 564, 577, 607, 609, 610, 647, 656,665, 666, 695, 697, 707, 713, 724, 726: n = A,T,C or G
ggcgaattggagctccaccgcggtggcggccgcccgggcaggtacgcgggccaccgggcgcggtggcgcgtgcctgtagtcccaagtatctgagaccactgccatgagccatcatgctcagctaattttttttattttttataggatggggtctcactatgttgcccatgttgctcaggctgatctcaaactcctaggctcaagctaatcctcctgccttggcctcccaaagtgctggaattacaggcatgagccaccttgccccatctgaataaataggaaattaatgttcacttccagccctagactggaagctcctgagccccagtgctgtgtctgtttaggatctattgcttaacagattgatgaccctcacatagggaagttcagtacctnggccgctctagaactagtggatcccccgggctgcaggaattcgatatcaagcttatcgataccgtcgacctcgaggggggggcccggtacccagctttttggtccctttagtgagggttaattgcgcgcttnggcgtaatcatggncataagcttgntttccctggnntgaaattgttatnccgcttaacaatttccacacaaacaatacnanncccggggagccttaaaagtgtaaaagccctggggggnggccctaantggagtggnncctaaactccacatttaatttgcggtttngngcttcacctngccccncttttccaagncnggggaaat

SEQ ID NO: 6521 - DNA, 859 bp, Homo sapiens
  misc_feature 65, 179, 185, 186, 187, 195, 199, 204, 216, 223, 232, 240,244, 250, 253, 258, 264, 265, 266, 267, 270, 271, 280, 281,282, 283, 291, 292, 298, 300, 322, 325, 330, 334, 337, 339,349, 353, 355, 356, 359, 369, 370, 373, 376, 378, 380: n = A,T,C or G
  misc_feature 389, 392, 395, 405, 408, 412, 422, 425, 429, 431, 432, 433,439, 445, 447, 454, 456, 458, 463, 466, 467, 478, 479, 480,481, 482, 483, 485, 490, 494, 496, 499, 502, 510, 511, 515,526, 537, 539, 542, 543, 551, 552, 554, 557, 563, 565: n = A,T,C or G
  misc_feature 567, 568, 569, 576, 583, 584, 587, 590, 596, 598, 599, 602,608, 610, 612, 614, 618, 620, 624, 626, 627, 629, 632, 633,634, 639, 641, 642, 647, 649, 653, 654, 660, 664, 673, 674,676, 678, 682, 685, 686, 690, 705, 716, 720, 722, 726: n = A,T,C or G
  misc_feature 732, 743, 745, 746, 747, 748, 753, 754, 755, 759, 763, 770,771, 773, 774, 776, 777, 778, 780, 781, 783, 789, 790, 791,792, 795, 808, 810, 811, 813, 817, 827, 828, 832, 834, 836,837, 839, 843, 844, 846, 847, 853, 854, 855: n = A,T,C or G
ggcgaattggagctccaccgcggtggcggccgaggtacttttttttttttttttttttttttttnggtttctaaaaaacatgccttttaggggtttggcctaacaaggagtgctaccttttccctattaaccagcgacattttaatgaagtcatctatggaggggtggaggtgaggaanccgttnnntcttccangcgnttagngccacccaaacncccctancttgtccgntacctaangccngaaacncantaatnctaaannnnggnncttcccccnnnntggctcannttcctnanaccttacaggcctcccccgtanccncaggnaaanagntnacgggggccncaancnnggnactctcgtgnnaanacnananaaaacggtntcnacngtgtacatcnaancaancaaattcaanccntttngnnngacaangtcccnanatattgnanancattntcnnaaaaaaccccnnnnnncnctttnaaancnctntgnccaaaatnngggnataccaccaanaacacttcgtncntanntctcgggnngntcngcctanantnnnctcattnaatcgtnnganatntcccgnannttntccggngnanancccnanaatnanncnaannnttttncnntaatntntccnntatttntttnaaaaaccanntnancccnttnnttgnacataccggaaaaanctctgcgtaangccncnctcnttttantaacaaaatcncnnnntgtgnnncccnttgngtcactnnanncnnncnnanattctnnnnctntcccttttccatntnntncatntatctttaannacgntncnncntaanntnnatattnnnctcc

SEQ ID NO: 6522 - DNA, 1111 bp, Homo sapiens
  misc_feature 2, 3, 4, 10, 11, 12, 86, 107, 109, 138, 140, 156, 167, 169,249, 272, 274, 287, 291, 303, 310, 312, 321, 324, 327, 328,331, 345, 346, 363, 380, 393, 403, 411, 414, 418, 427, 430,442, 458, 473, 500, 506, 527, 537, 562, 563, 576, 591: n = A,T,C or G
  misc_feature 623, 634, 666, 670, 677, 692, 696, 710, 719, 769, 770, 779,796, 812, 813, 820, 825, 826, 834, 852, 853, 856, 858, 863,867, 870, 891, 900, 927, 943, 957, 968, 973, 974, 977, 1006,1022, 1031, 1048, 1051, 1053, 1056, 1059, 1079, 1082: n = A,T,C or G
  misc_feature 1090, 1093, 1099: n = A,T,C or G
gnnntagttnnnccgcgtaatacgactcactatagggccgaattggagctccaccgcggtggcggccgcccgggcaggtactttangaggacccaagccggccagantngcttgaggtcaaggattttgaaaaccagncntggcttaacatggtgnaaacccttgtntntactaaaaaattccaaaaattagccgggcatggtggctcacgccttgtagtcccaacttgcttgggaggttgaggccaanaaaaatcgttttggaacccaagnanggtggaaggtttncaantgaagcccaaanaatcggngncccaattgnaanttnnaanaatggggccgacannaacccaaggaactttcnatttttaaaaatttaanggaaaggggaaanggaaccccangggaaaanggnaaanggcttttanttntttgaaactttntttttttaaaaaaaangggaaaaaaaaaaangggaaaaggccctttgattgcccccancaaaanttttaaaaatttttgggcaangggtcctttncaattttaaaggggggatttttttnnttttgcctttccncaaaaaagggggttnttttttaacccccccccccccaaaaaattttnttttaaaaaanggtttcaaaaattggcccaccctttttccccnaaanggggggnttaaaaaaatttttnattncccccaaaaatacnctttggtgntccccccaaaattttttttttccaaggtttaaaaattttttttttggggnnaaaaagggnggggggtttttcccccntgaaaggggggggccnnataaaanaaaanntttggggntttttaaaaaaccttttnnttngnaaaanaaancgnttttttttttttttttaaaanattttttgnaggaaaaaatttgttttggggggcccncaaaaatttttttttnaaaacttttttttnttttttccccnttaannccnggaagctttttttattttttttgggcccnaaaatttttttttttnggaaaaaanttttttttaaacccttnggnanccnttnggggcccctttttaaaaaanatntggggggntcncccccngggcttttaaat

SEQ ID NO: 6523 - DNA, 725 bp, Homo sapiens
  misc_feature 382, 478, 516, 539, 622, 635, 675, 683, 685, 687, 688, 691,695, 701, 705, 714, 715, 718, 723, 724, 725: n = A,T,C or G
ggagctccaccgcggtggcggccgcccgggcaaggtactttttttttcttttttttctttttttttttttttttttagacagagttttgctcttgttgcccatgctggagtgcaatggcacgatcttggctcactgcattctccacctcccgggttcaagcaattctcctgcctcagacatttgagtagctgggattacaggcacatgccaccacaaccagctaagtttttttatttttagtagagatagggtttcaccatgttggccaggctggcctcaaactcttgacctcaggttatcctcctgcctctgcctcccaaagtgctgggattacagacatgaggcaccacacccagcctcaatattttgcttctttagtgncaatattttgaattcttttcccaggattttgtaaatttctttttgattgggatatgttgctggaaaattattgtgtttgttttggaggtgtcatanttccttgcttttcatgtttcctgtgttcttacattggnaatttgtgcatcttgtggtacanttgctttttttccaattttttttgaaattttgcttttcaataagggggagggactttttcctgaaaaatggaattgccctaangtgttttcaattnggggtagggatagctttttggcttttgattctgggggcantggtccananannggnaaancccctngaantgaattttnnttnaaccnnn

SEQ ID NO: 6524 - DNA, 1550 bp, Homo sapiens
  misc_feature 12, 78, 103, 131, 147, 148, 168, 180, 192, 264, 299, 325,345, 400, 412, 515, 516, 530, 544, 546, 572, 622, 644, 646,660, 662, 684, 710, 745, 748, 773, 779, 794, 802, 816, 848,849, 863, 868, 879, 896, 897, 902, 905, 906, 915, 916: n = A,T,C or G
  misc_feature 923, 932, 949, 962, 963, 966, 968, 971, 992, 994, 1020, 1022,1025, 1028, 1040, 1043, 1046, 1057, 1059, 1067, 1081, 1082,1103, 1109, 1135, 1136, 1144, 1146, 1154, 1155, 1160, 1161,1165, 1166, 1175, 1206, 1216, 1224, 1241, 1247, 1252: n = A,T,C or G
  misc_feature 1256, 1279, 1280, 1284, 1285, 1288, 1301, 1316, 1350, 1356,1358, 1360, 1371, 1376, 1381, 1382, 1385, 1403, 1412, 1419,1420, 1421, 1423, 1438, 1441, 1442, 1449, 1458, 1480, 1493,1496, 1498, 1509, 1518, 1519, 1522, 1524, 1529, 1531: n = A,T,C or G
  misc_feature 1538: n = A,T,C or G
tggggggaaggncctttccccaacccccggccgggggtttgggggcccgggggcccccggaaggggtttaaccccctnttaaattgggaaattggtttggttnggggggggcccccaaggcccaaaaaccnttaagccggtttaagnnaaatttcctttgggaaattnccaaccaaaggnaaaaaccaaagntgggccccgggaattttaattcccggccaaatttttggaaccccccccggggggggggaaaggccctttggnaagggggtttgggggaaagggggggccccccggcnttggtttgggggcccccaaccaaggncccccaagggttccgggggnaaaggcctttggcccaaaaagggtttgggtttttccttggggggggtttgggggnaattcccggccnggccaatttaatttgggcccaaccctttccaaaaaaaaaattgggccttccttttttttgggttaaaaaaaaggggggaaaaaaaaggccccccaacccaaannccaatttggtttcnccaaaaaagggggngnaaccccctttggaaagggggcccggnaaccctttttgggggaaaggggggccttttggaaaagccccaaaaaaagnttggggcccaaggttttttttngnttccctttaacccngnaacctttcccctttccgggggnagggaaaaaaaaaacccccccaaccntttttccaaaaaaaaaggaacccggcccaagtttnccnaaaggtttgggccctttgggggggnaaaaangcccaacccaaaccnaaagggcncccaaaaccttttnggtaaaaccccaaaccctttttttttttttgnncccttttgggggtnaaaancccccccccgntttttgggggaaaaaanntcccnttnntgaaaaggnngtggtanaaaaagctnttttaaaaccaaaaaancccatttttttannatntnggnccccccttttttaaagggggnantcccccccacaaaaaaaaaaaaaaangnggntancccccccaattnggnaantccccttggtntnctttgggngggggttccccaannattttccccaaatcctttttnttgggnaaacccattttttttttcttccaaannaaattttntntggggtcnntttcnngggnnggggaaaanggaaggcccttttaaataatttttgcccccnaaatttgtgntaattganaaacccgggggggaaancccaanttttngggnaaaaaaaaaaaaccctctttttnncccnnttnttttatttttttnggggggggggtcctntaaaatttgttttgggggggccccttttggttanattttnantnggggggaaacnccccnttctnncgngggaatttttaacccccncccttttcnccccccnnnanaaaaaaaattgggcnttnngccccanaacccaagngggtgggccaaaaaaatccccnttttggggggganacnanaaaattccccnaagtttttnnaangnccccnanttggggngccttaaaaaag

SEQ ID NO: 6525 - DNA, 1541 bp, Homo sapiens
  misc_feature 31, 33, 40, 42, 78, 83, 106, 116, 175, 180, 182, 267, 280,285, 302, 333, 362, 436, 441, 473, 474, 511, 516, 532, 564,566, 577, 590, 654, 716, 722, 806, 813, 827, 868, 872, 890,895, 903, 916, 917, 944, 954, 967, 968, 1006, 1011: n = A,T,C or G
  misc_feature 1027, 1045, 1048, 1055, 1058, 1059, 1124, 1133, 1136, 1161,1190, 1196, 1200, 1207, 1227, 1232, 1238, 1257, 1258, 1267,1277, 1291, 1311, 1314, 1317, 1319, 1337, 1341, 1342, 1346,1359, 1368, 1371, 1372, 1373, 1375, 1377, 1403, 1404: n = A,T,C or G
  misc_feature 1410, 1423, 1447, 1467, 1474, 1475, 1479, 1500, 1502, 1503,1506, 1513, 1532, 1533: n = A,T,C or G
tggggggaaaggcccttcccaacccccggcngnggttggngnccgggggcctccggaaagggggtttaaccggccggnggggnaaaaaccggttgggttcccaagntttggggttnggggaaacacctagggacccctttggcccccggttcccttaagaaaaaaaaaaaaaccnccttngnccccaaaaaaattaattgggaaattggaaaccaatttccaaaaaaggaaaaagggggttgggggttgggaaaaagggcccaaagnggcccggtttccnggggnaaggggggggccccccncccctttccaaaaaggggggggcccaatttncccctttgggggggcccttaacccaaccntttgggaaaggccaaccccccaaggggggtgggggggttcccttcccctttctttggaaactttttccaaaaancaaanggcgggaaaacaaaccccccaaacttttcccnntttcccaaacccccttttttccgaaaaccgccccttnggggngggggtttttgggggnccaaattttttggccccccctttcaaaaaccngnaacccccaacnttttttttggttnccaaaaaggcccttccaaattttttttcccccttgggggttaaattggggaaaccaaaaacccnggaaaaaattttttttggggggccttaacccaaggggcccaaaaacccaagggggggggttngggggnttgggggaaacccctttccaaatttgggggcccccccaacccaatttgggggccccctttcccccaaaaaggggggaagggttnaaaaggnaaaccccccccttngggggaaacccccaaacccccaaggcccccccccagggccnaaangggaagggccaatttaanatgtnaagggggnaaaaaggaaaggnnaagggaagggaacccccctttcaaacntttggctttnggggggggggaannttcccccccttgggcccaaccaaaccttccaaggtttnccccnccccaaaccccaaacnaactttgggaaaatttcnttnccccccnttnncctttcaaacaaaggtttttttcccaattggttaaagaaaccccccctttttggaaaaaaaaaanggggggggnaangggggggccccttaagggggggaangcccccgccaaaccccttttggtgtcaantggttnaacncttttgnccccccggggggcccggggnccccncttttnttaaaaaaacccttaaggnnggggaattnccccccccgngggggcccttgtgnaaaagggaaaaatttttccnganttntnttcaaaaaagccttttantttnngganttaacccccggtncgaaacccnttnnnanangggggggggggggcccccggggttanncccccnaaaaacttttttntgggttttccccttttttaaaggngggaggggggggttttaaanttttgcnncccnccttttgggggcggtttaaantnnaantgggggntccaattaaaagccttggnnttttcccg

SEQ ID NO: 6526 - DNA, 847 bp, Homo sapiens
  misc_feature 2, 3, 8, 9, 10, 11, 12, 637, 647, 718, 721, 737, 781: n = A,T,C or G
gnnatagnnnnncgcgcgtaatacgactactatagggcgaattggagctccaccgcggtggcggccgaggtaccattgtccagggagctctgaaaagcatcctatgtcgcaccccgggagagttttaccacaacactctgagcttcctcaaggtaagggcagctcctgccctccactttgggagtttgggagtcagagaatgccgcccgtggaattaggaataattggttctcctttctggagccatgttccaatattaggagacggcatcggtgtaagcatccacacacacgtttctcacttccggccattctctctgcccctggtgaaaagcttcaagtaatagagctttttctttttcactccttatgccagaacatcacacctacgttcccactcttcaatgagggggctatttttaatgacttggcttttcttttacttaaattttgatccttgatttctccttgcctcttcttgtagtccaatgttgatctctgttatggggcgttggctgccatccctggactccggccagtccgcccttctggggctatgtaccttgcccgggcggccgctctagaactagtggatcccccgggctgcaggaattcgatatcaagcttatcgataccgncgacctcganggggggcccggtacccagctttttggttcctttagtgaggggttaaattgcgcgccttggcgtaaatcatnggncatagctggttcctgnggggaaaattggtattccggttcacaaattcccacaacaatacnagcccgggagccataaaagtggtaaaaagccctgggggggcctaatgaggggagcttaactcaaat

SEQ ID NO: 6527 - DNA, 711 bp, Homo sapiens
  misc_feature 542, 552, 591, 603, 604, 642, 648, 660, 666, 667, 695, 702,705: n = A,T,C or G
ggcgaattggagctccaccgcggtggcggccgaggtactttttttttttctttttttttttaagagatggagtcttgctctatcacccaggctagagtgcagtggtgcaatctcggctcactgcagtctccatctcctgggttcaagggattcttctacctcagcctcctgagtagctaggattacaggcacatgccaccgtgcctggctaactttttgtatttttagtagagacggggttccaccatgctagccaggctggtcttgaactcctgacctcaggtgatccgcctgccttggcctccaaaaatgctggaattacaggcatgtaattccaaccttagacactcagtttaaaccctcttatcctatcttcactggaagagcaaagcaatctcctaccttgttttgtcaataagaagggaatattattaagccccagtaatcctgttgattaccatagtgggcattgtttctctagaagtaaagtagaatctttggggttcccgatggcaagaaataccagagtcatcaagctttanatgaaatctntttggggaggtaaagcccagtaagttcttttgctgcagnttcttaaattgnngagactcaatctttgtgatttggaaaaagggctcgagntattcntgactctttaangctgannccaaagaatggggggcaagcccctgganttcaganctngctttt

SEQ ID NO: 6528 - DNA, 751 bp, Homo sapiens
  misc_feature 3, 4, 457, 465, 513, 538, 579, 592, 594, 618, 633, 637, 662,667, 683, 717, 748, 751: n = A,T,C or G
gtnntacgactcactatagggcgaattggagctccaccgcggtggcggccgcccgggcaggtacatatttgtgtaatgtaaacttgcttgtgttgatatgaaaacgtagtttgaaaactgtacgcggggattccccagaccttctgcagattctgtggttatactcactcctcatcccaaagaatgaaatttaccactctcctcttcttggcagctgtagcaggggccctggtctatgctgaagatgcctcctctgactcgacgggtgctgatcctgcccaggaagctgggacctctaagcctaatgaagagatctcaggtccagcagaaccagcttcacccccagagacaaccacaacagcccaggagacttcggcggcagcagttcaggggacagccaaggtcacctcaagcaggcaggaactaaaccccctgaaatccatagtggaaaaaagtntcttactnacagaacaagcccttgcaaaagcaggaaaaggaatgcacgggaggccngccaggggggaaaacaattaatcgnaaatgggaaagtgaaattttgccccaaaaaattactggaanaaaatttcagtcntntttaaaaacccatggggccttganaaagcttgaaaaaanaatnggggatcatttgggactttaaaagnccttnaaatacccccttgttnggccccagagcttttttaaaaccgaaaggccttnccaaaaaaaaaaaaaaaaaaaaaaaaaaaanggn

SEQ ID NO: 6529 - DNA, 707 bp, Homo sapiens
  misc_feature 556, 565, 598, 620, 629, 640, 679, 681, 684, 697, 704: n = A,T,C or G
gactcactatagggcgaattggagctccaccgcggtggcggccgaggtactaaccagttgggttaaatttataatatattgtaactcataatatatcaaattggaaagttttgaaagaggcataaaacactttccttctcaagccaactttcttacttctttttccttcattcattgtgatacaagagtcccagttagtaacaccatcgatttcttttttttttttttggagaccgagtctcactctgttgcccaggctggagtgcaatggcatgatcttggctcactgcaacctccacctcctgggttcaagtgattctcctgcctcagcctcccgagtagctgggattacaagtgcccaccaccatgcctggctaatttttgtatttttagtagagatgggttttcaccatgttggccaggctggtctcaaactcctgacctcaggcaatctgcctgcctcggcctcccaaagtgctgggattataggcatgagccaccacgtccagcctcaacatcatgttcttaatattcatctatgctgacatgtacctgnccgggcggncgctctaaaactagtggatcccccgggctgcangaattcgatttcaagcttattngatacccgncgacccttganggggggggccccgggtccccagcttttgttcccctttangngangggtaaattggcnccccttngct

SEQ ID NO: 6530 - DNA, 775 bp, Homo sapiens
  misc_feature 8, 77, 93, 101, 121, 138, 147, 167, 257, 273, 277, 287, 301,302, 315, 330, 357, 391, 402, 413, 416, 422, 435, 443, 456,464, 466, 474, 479, 546, 562, 563, 567, 595, 609, 613, 622,624, 627, 628, 643, 644, 647, 648, 657, 658, 659: n = A,T,C or G
  misc_feature 663, 671, 672, 673, 680, 683, 693, 694, 696, 699, 700, 715,724, 744, 752, 753, 754, 759, 760, 762, 763, 765, 773: n = A,T,C or G
gaatacgnctcactatagggcgaattggagctccaccgcggtggcggccgcccgggcaggtactttttttttttttntttttttttttttggnaacctcantgtaattttaatgacctcanaccagtgacaagggcanactgaccangggctgtggggggatcccanagcaacctcgagggcgtcccggtgcttaccacctggaaactggtgaggtggtgggagaactcctggtggaccctagtggaagccttccantaatttcttgaagctnagcnctcaggtgantagggcgacatctnntggccggttgttnaaggtcattgcaaanaggaaggaagcccaggaggggagcctncagtgagggcgtcctggggttcttccggtttttnaccaccctttngccaccccctntanttcaanaccccaagagttngttaagtnaaaaaggggcggnattccccncntacccttnggccngttttaaaaaatagttgggattccccccggggccttgcaaggaaatttttatttttaaaagctttantttggattaccccttnnaccnttctaaagggggggggggccccggtttnccccaacttttttntttnccctttttnantgnngggggtttaatttgnnccnncctttggcnnnaaancaatgggnnnataaaanctngttttccttnngntgnnaaaattttttttttnccgctttcncaattttccccaaaaaaaantatccaannncgggnnanntntaaatatntt

SEQ ID NO: 6531 - DNA, 1636 bp, Homo sapiens
  misc_feature 27, 58, 66, 130, 142, 149, 150, 152, 160, 170, 180, 193,208, 214, 228, 230, 256, 261, 265, 289, 297, 347, 354, 361,437, 452, 489, 513, 569, 625, 716, 779, 810, 816, 830, 849,881, 887, 909, 987, 990, 1015, 1021, 1040, 1079, 1085: n = A,T,C or G
  misc_feature 1099, 1154, 1157, 1177, 1189, 1190, 1214, 1234, 1236, 1239,1262, 1288, 1291, 1314, 1317, 1321, 1332, 1335, 1337, 1381,1495, 1513, 1518, 1569, 1571, 1590, 1592, 1599, 1600, 1624: n = A,T,C or G
tgggggggagggcccttcctccaaccnccggcccgggggtttgggggcccgggggccncccggccnccccgggggggcccaaggggggttaacccccaaggtggtttgggaaaaaaccaaaaaaaaaggnttttttaaaccnccaaggnnanaaaagggncccaaggttntcggaaaggnaacccaaaaaggnaaaaaaaaaatttancacggnaaggcccttccaangngggaattggggaggggggggggaaanaaaanaagnaaaaaaaaaaaaagggcaattttngggaaggnaaggaaaaatttttttgggtttggcccccccccccaaaaacccccaattnttttccnccttccnaagggaaccttcccttaagaagggaaaaaaagggaaaaaccaaacccggccctttcctttctttccccaagggggnccaaagggggtttcnttgggaaaaaagggcctttccaaaaacccttcctttnctttttaaattttgggcccctttncaaacctttttcaaagggggggttaaattaacccccctttcccaaccttttttttnaacccaacccaaaaatttaaaggggaaaaaaatttttttaattttaaaaacccttnggggggaaaaaaaagggaaaaaagggttttttggggggggggggggaaccccaaccccaatttggggtttaaattttttttgggggggttngggaaattttttaaccccaatttttttttttttaaaaaaaaaccccaaccccaaatttttttnaagggggggaaaaaaaaaaaaggggtttttngggccntttaaatttttttnggggaaaaacccctttttnttttttttaaattttttggggaaatttttttntttttngggggggggggggggggggaangggtttaaaaaaaaaggggaaaaaaatttttaaaattttttttttttggggttggggaaatttgggcccaaaaaaaanttnaaaaaaaaatttaatttcccccttntttttnaaaaatttttggggaaatncccgggaacccttttttgggcccccaaaaaaattttttnaagggnaaattttttggggngggggtgggcccaattccaagggggccctttttttgccttttttttgtttttttnccntttttcttttttttaaaggnaagggaaaaagnnttttccaaaatttaattaaaaggnccttttttgtcccttttttntnccntttttggggggtttccctttttncttttttcctttttttaatttttttnggnaagggaaattggggggaagggtnccntttnggcctttcttnggntncccggccccccccaattggcccttgggggaaaatttggcccaangttggggggccggcccggaaattccttccgggggctttcaaccttggccaaaaaccccctccccaaacccttttcctttgggggggttttccaaagggccggaatttccctccntttgggccccttcaaaanccccntttcccccaaaggccaagttttggggggggaaccttaaccaaagggccggntnggaaggcccccggccccantngcccccnnggggctttaaaattttttttgggnggatttttttcg

SEQ ID NO: 6532 - DNA, 929 bp, Homo sapiens
  misc_feature 6, 10, 11, 12, 14, 16, 17, 19, 22, 23, 25, 26, 28, 30, 31,32, 33, 35, 40, 42, 43, 47, 48, 49, 50, 53, 56, 58, 59,62, 63, 65, 68, 69, 70, 72, 76, 77, 79, 80, 81, 82, 83,85, 88, 92, 99, 102, 103, 351, 498, 523, 529, 538, 550,552: n = A,T,C or G
  misc_feature 581, 589, 594, 597, 599, 604, 610, 640, 653, 656, 667, 671,675, 683, 688, 690, 716, 724, 736, 741, 755, 763, 766, 770,776, 784, 812, 815, 835, 836, 844, 849, 851, 854, 856, 858,879, 884, 886, 888, 893, 902, 903, 912, 917, 918, 927: n = A,T,C or G
acaaanatannntntnntntanntnncntnnnngnatatncnntttnnnntanttntnnctnnanctnnntncttnntnnnnnanatnagtnttatggnctnncgtaatacgactcactatagggcgaattggagctccaccgcggtgggcgtggtcgcggccgaggtacgcgggcggagggtgaggtgggagggtctcttgagctctggagttggaggctgcattgagctatgatcacaccactgcactccagaaaaaataaaaatgtaaaagaacttgaagccaggacttggggcgggtgctctgagtgcaaaagacagaagatgctgttatccaaggggtagaagcanatttggggaccctggacttctctctgcactcagcaaggatgtgttgacttgtgaagcctggtgtgaagacttggccctcttgccctggggggcctttctgccaggtcccttggcccgcttgactcacgccccccttccttacccaangaagagttcccgggtttgcttgatncgtggntgctttganttaggagccctngngttgggttgacagcattggaccgagcganggttgatnggaanacnancaagncaattntatttccaaaaggtccaaagaaccttactnggaaaaccaaaanttnccaccccaacnggtngggnccggggcnattgncntttgggggggggttattggggcccancaatcttnccagcccattcngaacnattttaaacaagcntttccccnggnaaanttttcntagccaanaaggggtttttttggaaggggttagggncangggtctttggcccttggctnntttccaangaaananggncntnttggtattctttggtggggcnccttngncngaaanatcctattnnttgggggtngcccnnccttttttnat

SEQ ID NO: 6533 - DNA, 705 bp, Homo sapiens
  misc_feature 3, 4, 7, 8, 567, 681: n = A,T,C or G
ggnntanngagctcgcgtaatacgactcactatagggcgaattggagctccaccgcggtggcggccgaggtacacttcctgaagaaaaacagtatcataggaaccatttcaaaagttctaggagctaatcttgaaacagaccaagcctggagacccagttgcacagttccagagatggcttcaaggtggcgaattaacaacccggccattgttgagatgacgtcagcctgatgtccaggtggactgggacccaaggtggccaccagaacaagacacgaggacattgtgcctgcccgggcggccgctctagaactagtggatcccccgggctgcaggaattcgatatcaagcttatcgataccgtcgacctcgagggggggcccggtacccagcttttgttccctttagtgagggttaattgcgcgcttggcgtaatcatggtcatagctgtttcctgtgtgaaattgttatccgctcacaatttccacacaacataccgagccgggagcataaagtgtaaagcctggggtgcctaatgagtgagctaactccattaattgcgtttgngctcactgcccgctttccagtcgggaaacctgtcgtgccagctgcattaatgaatcggccaaccccccggggagaggcggtttgcgtatttgggcgctctttcgcttttcctcncttacttgacttcgcttttggctt

SEQ ID NO: 6534 - DNA, 1613 bp, Homo sapiens
  misc_feature 2, 3, 7, 73, 79, 108, 113, 139, 146, 164, 189, 208, 224,239, 248, 270, 276, 296, 322, 433, 467, 471, 519, 543, 671,709, 824, 897, 934, 939, 967, 970, 985, 1026, 1062, 1070,1085, 1109, 1158, 1182, 1224, 1293, 1298, 1373, 1377, 1378: n = A,T,C or G
  misc_feature 1381, 1397, 1418, 1435, 1447, 1469, 1490, 1520, 1535, 1550,1573, 1594, 1595, 1604: n = A,T,C or G
annaatntggggggaaggcccttccccaacccccggcccggggttgggggcccgggggcccccggaagggggnttaacnccccttttcccaaaaccaaccaaaaaccnccaanaaagggggcctttttttgggcccccnaaaaggnttggtttttccccaaggnaaaaaattggaattgggttccccanttttattttttgggggccnaattgggaacctttcnccaattcgccccggnaattccccnccccaaaattccccccctttcnccggcncctttcggggaagggcctcnccccaattaaaaaaaaggcccccccnaaccttgggcgggttggggggaacccctttccaattccccaaccgggaaaaaaggggttgggaaattttgggccttcccccaaaaaaaacctttccaattgggggggggcnccaacccaattttcaaaaccaaaccaaagggccntttnctttttcccccaagggttgggggggggccaaaccaaaccccccgggcncccccccaaatttcccccaaattntggggaaaaaattgggggggaacccaaagggtttttttttccaaaaaaaaatttgggccccccaaccaaaaaatttcccttttttggggggggggggaaaccttttgggaaagggggggggggggttncccaaagggaaaattcccttttttttgggcccaaaggnccaaaggggtttttccctttttccttttggggaaagggggggttggggggccctttgggaaacccaaatttccaaattttttgggtttgggggggcccgggggggaaaaaagggnaaatttgggtttaacccccctttgggcccccccccggggggggggcccgggggggccccccgggccttttccntttaagggaaaaaaacccttaaaggggttgggggggnaattncccccccccccccccgggggggggcccnttngggccaaaagggggnaaaaaatttttcccggaaatttaaattttccaaaaaagggnccctttttaatttccgggggaaattaaacccccggntttccggnaacccccttttccgnaaaggggggggggggggggggggnccccccccggggtttaacccccccaaagggcctttttttttgggttttnccccccttttttaaaggattgggnaaggggggtttttaaaaatttttggccggcccggcccttttnggggccgggtttaaaatttcaatttgggggttcccaatttaaggcccttgggttttttcccccttggtngggtnggaaaaaaattttgggttttaattcccccggcctttcaacccaaaattttttcccacccacccaaaaccattttnaccnnaangccccccgggggggangcccatttaaaaaaagtttgnttaaaaaaggccccttngggggggggttngggccctttaaaattggaaggntggaggcctttaaaaccttcnaaccaattttaaaaatttggccggttttgngcggcctttccaacnttgggccccccgggnttttttcccaagttcccgggggnaaaaaacccttgggtttccgnngggcccaancctttggct

SEQ ID NO: 6535 - DNA, 1616 bp, Homo sapiens
  misc_feature 3, 15, 28, 37, 69, 74, 127, 140, 190, 203, 225, 226, 277,336, 339, 342, 360, 417, 440, 445, 512, 544, 556, 581, 643,705, 736, 761, 782, 808, 809, 821, 824, 833, 844, 882, 897,922, 928, 932, 937, 949, 987, 1012, 1034, 1068, 1085: n = A,T,C or G
  misc_feature 1088, 1124, 1131, 1142, 1184, 1199, 1212, 1221, 1256, 1264,1269, 1275, 1305, 1309, 1312, 1313, 1337, 1340, 1351, 1353,1359, 1383, 1418, 1430, 1462, 1463, 1468, 1469, 1479, 1512,1518, 1524, 1530, 1532, 1536, 1538, 1558, 1563, 1565: n = A,T,C or G
  misc_feature 1568, 1574, 1577, 1586, 1587, 1595: n = A,T,C or G
ggnggaaggcccttncccaaccccccgnccggggttngggggcccgggggccccccgtaagagggttanccggnccggggggggcccttgggaatttgggggggggaaaaaaggggacccccttgtncctttttgggggnaatttatttttaaaaaccaaaaaaagggaaaccttcctttttcccttttnggccggttccgtncctgggccttttccaaggggtnnaaaacctttttcccaaaaccaaattcctttccccggcctttggaattgggnaaggcccccttaaattaaaaacctttgggtggggaaccaaaccccttcccccttggganccnttncaaccaaaaaatttccanttaaatttaatttcctttccccgggtcccaaaaaatttttaaccctttccttggggnggggaagggaaaaaattcccaanaattngggaaaaaaaaccaatttaaatttttttccaacccccaaaaatttgggtttccaaacccttgggttnggcccctttaaaaaaaaatagggggggttttncccttgggggtncctttttttccccccttcccaaagntttgggcccgggaaaattggggggggaaagggaaaaaaaaaagggccccccccccaaagggnaaaaaaaaaaaattggggaaaaatttggggaaattaaaccctttaaatttaaattttttttnggggggttttttttcccaaccccaaaaattngggggggaaaaaggggggaaaaggncccggccctttcccaaatttngggggggggggggggccccccccctnnaaatttaatttnccnacccccccnttgggtttaanttttttccaaaaggggggggggccccctttaaattggntgggccccccaaaancccaaaaatttaaaatttggggaancccaangggnaaaanccccccttaaancctttggggggggggaaaaaccctttttttcttttggnaaaagtttggggggaaagggggggncccggaaaaaaccccccaaccnttggggaaggggcccccaaaaaggggggaaaggnccctttgggggtttaanggntttttaaccccggttttttgggtttcccccgggccnaaaaatnggggggaaggnaaaaaaaaaaccctttttgggggggaaagggggttttccggncctttgggggaaggnccaaaaaaattanccttaaaanttaaaagggccccccaaaaaaaccttttttccccnttcaaagnccttnggccantaaaaaaaaatttccccaaatttttttggnccanggnnggggggaaggttttccccccaatnggntttttaaaatntngggggnccccttttaaattggccccctttnccttttcctttccaaatttttaaattccccccaanttaaccccttgngccccccgggggggccgggggcccggcctttnntttannaaaaccttanggtgggggaaatccccccccccggggggccttnggtaangggganaatttncngaantnatttccaaagggccttttantccgnantancccccnggnggggaaccnntttaaagnggggggggggggccccccccg

SEQ ID NO: 6536 - DNA, 893 bp, Homo sapiens
  misc_feature 3, 8, 9, 11, 12, 13, 16, 17, 18, 19, 20, 23, 24, 26, 28,29, 33, 34, 37, 38, 40, 41, 43, 44, 45, 46, 47, 49, 51,52, 55, 56, 58, 59, 61, 62, 63, 64, 65, 66, 67, 68, 69,70, 73, 74, 75, 77, 78, 79, 80, 81, 82, 83, 84, 86, 88,92, 93: n = A,T,C or G
  misc_feature 95, 97, 99, 100, 108, 109, 247, 301, 455, 465, 522, 535,536, 552, 578, 646, 675, 686, 687, 701, 719, 738, 756, 757,761, 778, 783, 789, 791, 793, 795, 797, 800, 825, 838, 873,880, 882, 883, 891: n = A,T,C or G
ttntcttnncnnnctnnnnncgnnancnncttnngtnngnntnnnnntnannttnnanntnnnnnnnnnnttnnntnnnnnnnntntntggnngnangnnctgcgcgnnatacgactcactatagggcgaattggagctccaccgcggtggcggccgaggtgattccccagaccttctgcagattctgtggttatactcactcctcatcccaaaggaatgaaatttaccactctcctcttcttggcngctgtagcaggggccctggtctatgctgaagatgcctcctctgactcgacgggngctgatcctgcccaggaagctgggacctctaagcctaatgaagagatctcaggtccagcagaaccagcttcacccccagagtacaaccacaacattccagggagactttggccggcaagttagttcagggggacagccaagggtcacctcaagncagggcaggnaactaaacccccctggaaatccataggggggaggaaaaagtattttttactaacagnaacaagcccttgnnaaagcagggaaaaggnaatgcaccgggagggcgtgccaggtnggaaaacaatttcatcgaaaaatgggaagtcggaatttgcacaaaaaattactggaaggaaatttcanttcttatttaaaaacccatgggggcattnagaaagcttgnnaaaagaatggggancatttgggaacttaaaangcctttaaaataccccttngtaggccccagaagcctnntttnaaaacgaaaagcatttncaaantttttnangnantnggncccaaaaaaagttacccttgccccngggcggggcccgnttttaaggaaccaagggtgggggaacccccccccnggccttngnnaggggaantt

SEQ ID NO: 6537 - DNA, 1661 bp, Homo sapiens
  misc_feature 4, 25, 43, 74, 92, 94, 98, 111, 117, 121, 123, 133, 138,143, 148, 189, 191, 201, 237, 254, 274, 288, 308, 312, 319,322, 336, 365, 372, 380, 381, 384, 411, 446, 455, 478, 528,539, 561, 591, 609, 624, 639, 683, 693, 703, 709, 715: n = A,T,C or G
  misc_feature 719, 729, 732, 758, 766, 771, 780, 837, 843, 898, 910, 913,955, 969, 977, 979, 980, 982, 988, 997, 1006, 1025, 1051,1059, 1062, 1067, 1074, 1110, 1114, 1155, 1178, 1187, 1199,1242, 1276, 1286, 1314, 1317, 1327, 1330, 1335, 1337: n = A,T,C or G
  misc_feature 1338, 1349, 1360, 1369, 1379, 1414, 1417, 1432, 1437, 1444,1482, 1485, 1493, 1520, 1528, 1534, 1546, 1548, 1569, 1580,1581, 1587, 1588, 1619, 1627, 1635, 1649: n = A,T,C or G
aggngttttgggggaaaggcccttnccccaactccgggccggnggtttgggggcccgggggcctccgggaaggnggtttaaccctttttttntncccnccccaaccaaccnccaagncccngnggtttggccnccggnaaccnttaancgccaaccggtaaaccggcccgggggttaaaaattaccttncnttgggaattncttttttccctttggttgggggggggggcccttttnggaaaaagggggccggnccgggggaaagggggaattnaaaaggcccaaggngggggcccggggggtccaanggtnaaaaggnccnccggccaaaaaccnccgggcctttttccaaaggccaaaggccntttttcntttgggtnnttnccccttttggggggaaaggccccccanaaaaaggcctttgggggccgggtttttaacccccnccaatttcngggtttttgggggggggaaattnttcccggggggaaaggggggggggggaaagggaatttaacccgttttggncccaacccaanaagggtttttcccttttccccnccaacccaaaccttttttaaaggccctttngggggcccaaaaggtccnaaggggggaaagggnaaccccccccccccnttttttttccttttccgggggggaaggggggcccaaaccccggnaaaaaaaccncccaaaaaanaaaccnaaaggncccnccctttaaangtnaaaaaaggggaaacccaaaaaaaaanttggcccnccccnccgggcccngttttaacccccctttgggcccccccccggggggggacccggggggccccccggccntttccntttaaaggggaaaaaaccctttaagggtttgggggggaatttcctcccccccccngggggggggccnttnggcccaaaggggggaaaaaattttttcccgctaattaatttncaaaaaaagggccnttttaaantnncngggaantttaacccnccgggtatnccctaaacccccttttcanaaaaaggggggggggggggggggggncccccccnggnggttncaacccncccccaaagggccctttttttttttgggtttttccncccntttttttaaggttgggaaggggggggtttttaaaaattttnggccggcccggcctttttggggnccggttaanaaatttccaaanttggggggttccaaattaaagggccttgggttttttccccttnggttggttgggaaaaaaatttttgggtttttaanttcccccggngctttccaaccaaaaaatttttcccacnaanccaaaaaccnaantttancnntaaggcccccngggggggaggnccaatttanaaaaaggttnggttaaaaaaaggcccccttggggggggggttggnccntttaaaattggggangggtnggaaggncctttaaaactttccaacccaattttaaaaatttggcnggnttttggcngggccttcaaatttggggccccgggcntttttttncccaantttccggggggnanaaaacccctgggttctcggtngggccccaagnncttttnnccatttttaaatttgggaaaattccgggggncccaaaancgacctcnccgggtgtggaaangaaagggcccct

SEQ ID NO: 6538 - DNA, 1631 bp, Homo sapiens
  misc_feature 3, 61, 66, 71, 77, 121, 137, 147, 154, 155, 161, 175, 198,219, 224, 253, 274, 320, 356, 455, 482, 485, 492, 494, 499,580, 586, 600, 603, 616, 649, 660, 692, 707, 730, 739, 748,818, 843, 854, 861, 863, 875, 936, 958, 986, 993, 1065: n = A,T,C or G
  misc_feature 1075, 1138, 1151, 1161, 1215, 1235, 1278, 1343, 1379, 1408,1422, 1446, 1467, 1469, 1472, 1484, 1496, 1498, 1499, 1500,1518, 1525, 1534, 1542, 1584, 1595, 1606, 1621, 1629: n = A,T,C or G
ggnggcccggaaaaatttgggggaaaggcccttcccccaacccccggccgggggttggggnccggnggccnccggcnccccggggggcccagggggttaacctttttttaagggggaaggnaacccccccaaggggnccgggggggnccaaagnnaaattntgggccccttgggnaagggggttccaagggggaaagnttttttgtaagtaaccccaanggccnccttggggccttaaaaaccaattggggtnggaaaaaaaccccctttggtncttctttaccttaaaaaaaaaattaaccaaaaaaaaaaatttttanggccccggggggccaattggggttgggggcctttcnacccggccccttgggttaaaggttccccccaaaaccttgggccttttgggggggaaaggggttttggaaagggggccaaaaaggaaaggaaaaattccngccctttttgggaaaaccccccaaagnggnaaggggntnggggnaaggggggttttttggcccaaaggtttgggaaaggccccccgggaaaggaaattcccgggccgggccccaaccctttggcnaaaccntttcccccaaaggnccnaattggggggggncccggaaaccaaagggaaaggcccaaaaagggnaaccctttccnccaatttcctttccaaaaaaaaaaaatttaanaaataaggtaaaaanaagggaaaaaaaaagggtaaaanaaccccaanaaaaaggtnaaaaaaaaaaagggaaaaaaaaaaagggccctttttaaatttaaatttttggggaaaaaccctttttccntttcctttaaaaaaaaaaaaagaanaggggaaaaanaaaaaananaacaataggggnaaaaaaaaggggcccccctttggggaaattgggccccaacccaaacccaaaaaaaaatttncttttaaaaaaaaatttttttnggggggcccaaaaaaaggggtttccggnaaaattnccaaaaaaatttttttaaaaaaaaagggggggaattttaattttttttttaaatttttttttggggcccaantttccaaaanccaaaaaaaaaaaatttaaaaattttttcctttttttttaaacctttcccccccccccccccnaaaaaaaaaaaanttccaaaaanttaaaaaaaaaaaaaagggttttttccaaaaaaaaaattaaagggcccaaaaancccttttttttttccccttnaaaattgggggttggggtttttttaaaaaaaaaaattgggttnaaaatttccaacccccaaaaaaattggcccatttgggttgtttcccccccccaaaaactttttcntttttttcccaaggttttaaattaaaaaattttccnttatttttgggggggttaaaaaaagggtngggaggggggtaanttaaccccttgggaaaggtttggnaaggggccaaatttaaagggnanggnaaggttttgggnaaggcctttttnannnaacccctttgcccccttngggaaanaaaggaagnccgtgggntttccttttttctttttcccccgggggggttaacccctttcngggccccggcntttctttaagnaaaaccttaagggtngggggatnct

SEQ ID NO: 6539 - DNA, 675 bp, Homo sapiens
  misc_feature 616, 618, 620, 672: n = A,T,C or G
actcactatagggcgaattggagctccccgcggtggcggccgaggtacctgttgccataccacacagatgctttccaattcctaccacaggtagtttttcttctcttagcacaggaatcttgttcaaacacaagtgttgaatatcaatttgaagtctttcaaacactgaatttttctttctgtgttttccatccaccttgaatcttgtggtcaccttttccactaggatgaagtgaactttttcagcatcttttaaggcaatatcaacccaatgagataattttccctttcccgctccaaactcaacaaagcatcttcttggaccaagtaactttaaattttcaatgttacctgctgtttcaggtgcttggttgcagaatcgccatttttagggtcattaagtgcatcgtgtaatgcttcacttgcttttctcaatttcttaattaacttttccaactgctcttcagatagagaagaaattggaactaattgttcaggtatttctgtttcatctcttaagcctgcattaaatatcttgaatatagaaatcaggttttggtttctctcttgagttacattttttcaaatgccttgctagttgatcttcatatactgngngnttttggatctaaagggcacagggattctttttccgagcatctttctttcctncat

SEQ ID NO: 6540 - DNA, 975 bp, Homo sapiens
  misc_feature 3, 4, 5, 6, 9, 12, 14, 15, 16, 18, 19, 24, 25, 26, 29, 31,36, 39, 40, 48, 49, 50, 53, 56, 61, 63, 65, 66, 67, 68,69, 72, 73, 74, 75, 76, 77, 78, 79, 80, 81, 82, 83, 84,85, 88, 89, 107, 109, 190, 203, 205, 207, 245, 250, 257,269: n = A,T,C or G
  misc_feature 288, 295, 297, 362, 401, 407, 420, 422, 436, 443, 451, 468,480, 502, 513, 520, 552, 553, 559, 563, 564, 587, 608, 620,636, 645, 653, 655, 669, 672, 673, 676, 689, 692, 694, 695,703, 714, 728, 731, 744, 762, 775, 791, 794, 800, 803: n = A,T,C or G
  misc_feature 807, 823, 828, 840, 842, 846, 857, 859, 865, 867, 877, 880,882, 885, 886, 888, 899, 902, 911, 913, 914, 915, 916, 927,932, 937, 944, 953, 954, 956, 958, 962, 966, 967, 968, 969,970, 971, 974, 975: n = A,T,C or G
tgnnnnttntgncnnntnngattnnnctntngtatnttnnttaacctnnntcntantgcgnancnnnnnttnnnnnnnnnnnnnnagnngaggggtgaggcctcgcntnaccgactcactatagggcgaattggagctccaccgcggtggccggccgaggtacttttttttttttttttttttttttttnttttttgagacanantnttgttctgttgcctaggctggagtacaatggcacaatnttggntcgctgnaacctttgcctnccgtgttcaagcgattttnctgcctnanccttctgactagctgggattacaggcgcgtgccaccatgcccagttaatttttgttatttttagnaagaggacggggtttcaccatgttggccaggctggtttnaaactnctgacctcagggntnatgctacctgcctnagccttnccaaagtngctgggactacaggggngttgagcctacncgggctcagcctaatttttggnattttttagcnaaaaaanatgggggggtttcacccaattgttttggcccnngccttnggtnnttaaaacttttttgacccttccnaaggttggatcccaacccttncccccgggggcngggccggtttcttagnaaacttatnggggggantncccccccgggggcnttnnaangggaaatttcggnatnannttcaaaangctttttattnaggaaaaccccggnccnaaaccttttcaanagggggggggggcccccnggggtacccccangctttttttggattcnccntttaanagngganggggtttaaatttggnccccncctttggggggngnaaanacaattggggncnataaancntttttttccnttngnggnngnaaaaatttggnttntttcccccntnnnncaaattttccnccaanaaacnatacccnaaccccggnngncntttnaaannnnnnaann

SEQ ID NO: 6541 - DNA, 1191 bp, Homo sapiens
  misc_feature 6, 10, 14, 17, 18, 19, 22, 23, 26, 27, 30, 33, 34, 35, 36,38, 40, 43, 46, 47, 48, 50, 52, 56, 62, 65, 69, 78, 79,80, 81, 82, 83, 84, 85, 86, 89, 90, 97, 101, 102, 104, 110,122, 139, 186, 200, 340, 380, 386, 411, 508, 525, 529, 536: n = A,T,C or G
  misc_feature 569, 597, 626, 668, 676, 682, 691, 698, 736, 746, 747, 749,756, 769, 777, 778, 790, 806, 815, 816, 822, 833, 843, 846,902, 903, 904, 907, 920, 922, 926, 928, 939, 942, 943, 947,948, 949, 961, 962, 974, 976, 979, 984, 991, 993, 1010: n = A,T,C or G
  misc_feature 1012, 1017, 1018, 1019, 1024, 1031, 1035, 1040, 1041, 1044,1046, 1049, 1054, 1055, 1058, 1059, 1061, 1063, 1064, 1069,1086, 1102, 1108, 1109, 1110, 1118, 1122, 1125, 1127, 1128,1130, 1131, 1160, 1164, 1169, 1170, 1179, 1182, 1184: n = A,T,C or G
  misc_feature 1185, 1191: n = A,T,C or G
accccncttnctcnttnnnatnntgnnganaannnntntnatncannnananttanagaatnaanattnatttgagannnnnnnnnatnngtgatcntggnntngatccnatgggcttatgnagctccaccgcggaggnggccgcccgggcaggtcttcttgaaagtggcaggcagtattttattntaaactatgtattngttatgattctatcttagggccatgaaatgacaagcattggactgctacttggtgtttctgctgcaaaactaggcaccatggatatgtctattactcggcttcttagcattcgcattcctgctctcttacccccaacgtncacagagctggatgttcctcacaaatgtccaagttggctngcagtnggtttggcattgggccttgtatatnaagggggacagctctacaagacatactgcagcaagttccctggttgggctgaagataagggaccggcctccctgggttccctggaaaatgggaaatnacttggcaacttgacangaanaagttcnattgcctccccttaagcctggcttgggcttttnggccccctgggggcaatgggaacatgcntttgggggggccaatggggcaagccaaanttttggaataaggggtaattggtcctggattccttcaaaatngtggcccnttggangccaaggcntccttanttccaaggttaccccttctgggcccggtttcttaaggnaaaccttaanntngggattncccccccgggggnctttgcannggggaaatttcngaaattaatccaaagncctttaatnnggaatnaccccggtccnaacccttttnaanggggggggggggccccccgggtatcccccaaccttttttgggttcccccttttaannnggnggggggttttaantntggncnccccccttggnccnntaannncaaattggggtnnataaggctttgntnttnccctngggggtngnaaaaattgggataatcncngttcnnncaatnttccccnaccnacacnntancngangcccnnggnngncnntaaanaagggggaaaaagcccntggggggtgggccctnaacggnnntggaggcntatnacncnncnnctttaaatttggtgtgttggggggcttanatcnggccnnctattttcnacntnnggggan

SEQ ID NO: 6542 - DNA, 1592 bp, Homo sapiens
  misc_feature 14, 71, 89, 117, 122, 134, 136, 144, 148, 157, 173, 178,180, 195, 201, 206, 229, 231, 239, 269, 290, 332, 335, 341,354, 358, 361, 370, 375, 389, 394, 401, 419, 444, 468, 476,520, 536, 538, 565, 567, 576, 587, 592, 595, 598, 601: n = A,T,C or G
  misc_feature 602, 610, 613, 653, 665, 687, 692, 720, 736, 741, 758, 770,804, 813, 819, 844, 866, 903, 922, 945, 963, 969, 973, 1035,1042, 1047, 1081, 1088, 1100, 1139, 1147, 1150, 1152, 1155,1186, 1190, 1202, 1204, 1205, 1211, 1234, 1262, 1263: n = A,T,C or G
  misc_feature 1319, 1322, 1327, 1344, 1377, 1382, 1412, 1436, 1439, 1443,1461, 1465, 1476, 1484, 1488, 1503, 1508, 1510, 1514, 1521,1530, 1533, 1535, 1546, 1557, 1567, 1568, 1587, 1588: n = A,T,C or G
tgggggaaaggccnttctcaacctccggtccggggttggggggcccgggggcccccggccccccggggggnccaagggggtttaacccnccccggaaaaaatttttttcaaattccnccggnaaggttgggggntnccaaattnccanccaaggttnccccccccaggaaagnggttngnaatttggaaattggncccttnggggnaaggggcccggttgggccaaagncnccgggggnaattccccaagggggtaaggtttttccttnggttgggagggccaaaggccnaacctttacccccaattttgggttggcccttgggaaaaaggnggnccaagncccccaagggggnaagnggnaaggttggnttggnaatttaaaaaaaanttaanggggccnccttgggcccaattaccnccaattttttccttttccctttggnaagggggaatttgggttggggttncccccccnaattacttttaagggggggggaaaaaaggggggcctttgggggnaacccttaaaggcggncnccctttttggggccggggggccatttncnccatttccnaaggggggggnaaccnttntcnaanntgggtttnggngggccaccccctttttaaccttttgggggggggaaaaggnaaaggggggggngggcccccttttcaaaaaaaantgggncccaacccccaaaatttgggtttcccanaaagggggggggtttntttcnaaaaaggaaaaatattngggttttttccnccttgggccattttttttttcccccccccccaanaggggttancccaanaaaacctccaaacccaacccccccnaaccaaaccctttccaaaaggnaaattcccccctttccccctttctaaatttttccaanccaatttcctggccccaanagaaaattttcctttcccccccntttttgggccttcccttnggaccncccntttggcctttaagcaaggattgggaaacctttctaaacctttaaaaattttcgaattttaanaataccnttggncccctttggccccttcctttcgggttaaaaaggnaaatttntccccttttccnttttttttttttttcccttttgggaaaaaaagggtttanccccaagnggntnggnaaaaacccaaaaaaagtttttttaacccccntggnaaaaaagggccnanntttttnggagggaaccaaaaagggaaaanaaaattaaaagggcaaggcccctccaanngggaaatttggaaggggggggaaaaaaaaaggaaaaaaaaaaaggaaatttggganggnaaggnaaaaatttttttgtttnggccccccccccaacccccaattttttttcccntttcnaaggaacctttcttaaaaaggaaaaaaagnaaacccaccggccctttttttttnccntaangggccctaaggggctccntttnaaagcccttcnaaaccttncttnattttaaatttgggnccttnanaccnttttcangggggtaanttncncctttcaaaanttttttaaccnccaaaatttnngtaaatttttattaaaacnnggcg

SEQ ID NO: 6543 - DNA, 1257 bp, Homo sapiens
  misc_feature 2, 10, 18, 20, 23, 28, 31, 33, 34, 36, 40, 50, 57, 59, 62,63, 66, 67, 68, 70, 72, 74, 86, 98, 105, 109, 110, 115,126, 131, 137, 138, 140, 150, 162, 180, 213, 218, 219, 232,239, 247, 249, 253, 290, 347, 352, 362, 379, 408, 444, 456: n = A,T,C or G
  misc_feature 466, 469, 482, 487, 488, 498, 503, 507, 510, 516, 548, 553,556, 559, 561, 580, 592, 593, 596, 597, 606, 608, 616, 621,628, 636, 638, 652, 676, 678, 698, 706, 715, 729, 731, 736,739, 742, 747, 759, 763, 765, 768, 770, 776, 781, 788: n = A,T,C or G
  misc_feature 800, 801, 805, 815, 824, 828, 834, 849, 855, 864, 866, 879,884, 885, 887, 891, 901, 909, 913, 919, 931, 937, 938, 942,952, 953, 959, 964, 969, 970, 972, 973, 991, 992, 994, 995,998, 1005, 1007, 1008, 1013, 1022, 1024, 1028, 1050: n = A,T,C or G
  misc_feature 1054, 1055, 1060, 1064, 1074, 1077, 1089, 1095, 1097, 1098,1104, 1111, 1114, 1121, 1129, 1131, 1135, 1141, 1144, 1147,1151, 1156, 1157, 1164, 1168, 1169, 1171, 1176, 1178, 1179,1183, 1186, 1191, 1193, 1194, 1204, 1206, 1224, 1228: n = A,T,C or G
  misc_feature 1237, 1253, 1256: n = A,T,C or G
tnatcatganaatgaatnantanaaacnatntnncnttancatcaatttngatcatncnttnntannntnantntctcaatatttntaacattaattntattatntagnngttanacattataatncactnactatnngncgaattgganctccaccgcggnggcggcccgaggaactangaaatttttttttttttttttgcccacagggcntgganngggagagatacanacaaaancttttttntnttanttccataatttcttgatggacatgtttttctcactgnccttctgcatgacctttggctactgccatctacaaagtcctccttgagtgacatggnactcnctcgttctcncagggcatacatgccancatttctgtgcacaccgcccttcactttnagccccctggattgcttcctggcatggagcctcaanccaatttttttntcaggggttngancccccccgggttnagggnncaatttttcncgagnaaantgnaattcntttcaaaaatggtcccagacccgtggtccctntattnatntgngnggggggttggggaaaattncaaatttttttnnttnnttaaaatgncncccccctnggggncgaaaanacaaattngnccgagtttccccangggaattcattcaaaaattccctnantttaggttaagccccacttngaattaanacccctatngaattggttttttntnggggnagnggnccctntaaaaaaccccntttntnaanancttggnttttngaagcanaaacttcctcanntcanttctggtggnccccttggntaanttttanaacttgtgtcccccnttctcnaggaaaacncncccccctttccantcccnntngagnggaagccccncaataggntaanggcccnatttttcctctnccaatnnaaanaatgtgattnntaattngggantccanntnnttttccccggttggcccnntnnaanaaaaaanannatttnccctttacncntttntttttgagcccttttccccccnaatnnaaatnatcnttgtataccnttnccccgggggccngggccngnnttttanaaaaacntantgtgggnttcccccncngggncctgcnaanggnaatntccgnnaatatcnaaannantaatntnngaanaanccccnanngacccctctntnggggggggggggcccccngggnaccccacanatttttggggcacccnttng

SEQ ID NO: 6544 - DNA, 1589 bp, Homo sapiens
  misc_feature 5, 27, 50, 52, 74, 97, 112, 130, 132, 180, 202, 245, 247,249, 252, 286, 287, 292, 294, 326, 361, 378, 400, 406, 418,424, 432, 444, 445, 476, 512, 543, 546, 549, 554, 568, 608,612, 617, 620, 653, 673, 692, 694, 695, 715, 725, 765: n = A,T,C or G
  misc_feature 766, 814, 823, 932, 949, 964, 993, 1030, 1044, 1049, 1061,1126, 1131, 1148, 1162, 1171, 1191, 1228, 1236, 1241, 1279,1329, 1342, 1344, 1358, 1371, 1373, 1390, 1391, 1402, 1413,1417, 1430, 1442, 1451, 1466, 1471, 1487, 1505, 1508: n = A,T,C or G
  misc_feature 1509, 1538, 1544, 1545, 1553, 1557, 1564, 1566: n = A,T,C or G
ggggnaaggcccttccccaacccccgnccggggtttgggggcccgggggncnccggccccccgggggggcccanggggggttaaacctttttttggnaaggggggaaaaaangggaaggggcctttggtntnaatttttttcccttttgggtattaaagaaaagggggggtaattccttngggggttccaaattcccttttnttttcccttgggcctttcctttgggtttgggttcccttttttngntnttnttaaattgggccttcctttcctttttggggaagnnaaggntnccaaatttggggggtttttcccccccttttcntgggccaaacccccttttgggggggggcctttttngggggcccccccggccnttgggcccggggggggggggtnaaaggncccccccccttngggttnttttttcncccccaaaaagnnccaaattgggggggttggggggggggaaccncccccccctttgggcctttggggtgggccccccttncccccaacccaaattacctttggggttgggntgnttnccttncccccaaattaccnttgggcctttccctttggggggaaaaattgggcccccccnttcnccccnttnggcccccaaaaacccgggcccaaacccaaaggnaaaggaccctttccttttcncccaaagggaccccctttncnnggggggggggggaaaaaccntttttggggncctttgggcctttttttttggggggttttttggggggggnnaaaaaaaaattttttcccccccccctttttgggggggggaaatttttnaaaaagggncccgggtttttccccccttttgggcccccttttttccccccggcccaaaagaccaaacccttttttttcccctttaagggcctttccaaaggaaaaggccaaggggggncctttccaacccaaggnaacccccggtttggntttgggaaaggtttggtttcccccttttnggggggggttaaaccccctttccgggggggccccggncctttccttaaggnaaaanccttaaaggttnggggggaaatcccccccccccccgggggggcctttggccaaagggggaaaattttcccggaattnatttncaaaaagggcccttttnaattccgggaattnaacccccgngtccgggaaacccctttctngaaagggggggggggggggggcccccccggggttaanccccccangaccntttttttttgggttttccccccttttttaaagttgggnaagggggggttttaaaaaattttgggccgccccggccttttgggggccgnttaaaaatccaantnggggggtccaaatnaaaggccttgggntnttttccccttgggtggnngggaaaaaaantttgggttttnattnccccggcctttcnacccaaattttncccccccanccaaaacccaattanccccnaaaggccccggggggnaggcccaatttaaaaaanggnnggtttaaaaaaggcccctcggggggggtnggcccnntaaaaatngganggtggangnccttaaaaccttctaaccaattt

SEQ ID NO: 6545 - DNA, 896 bp, Homo sapiens
  misc_feature 2, 3, 5, 9, 10, 11, 12, 14, 15, 16, 17, 18, 20, 21, 24, 25,26, 27, 28, 30, 31, 32, 33, 34, 38, 39, 40, 41, 42, 44,45, 46, 47, 48, 49, 51, 52, 53, 54, 55, 56, 57, 58, 60,61, 62, 63, 64, 65, 66, 68, 70, 71, 72, 73, 74, 75, 76,77: n = A,T,C or G
  misc_feature 78, 79, 80, 81, 82, 83, 84, 85, 86, 87, 89, 93, 97, 101,104, 128, 391, 445, 460, 509, 637, 722, 808, 811, 817, 838,852, 853, 879, 886: n = A,T,C or G
cnntnttcnnnntnnnnntnnacnnnnncnnnnnattnnnnntnnnnnntnnnnnnnncnnnnnnntntnnnnnnnnnnnnnnnnnnangggngtgngganttncgtcattcgactcactataggttngaattggagctccaccgcggtggcggcccgcccgggcaggtactttaggagacccaggcgggcagattgcctgaggtcaggagtttgagaccagcctggctaacatggtgaaaccctgtctctactaaaaatacaaaaattagccgggcatggtggctcacgcctgtagtcccaactgcttgggaggttgaggcaagagaatcgcttgaacccaggaggtggaggttgccagtgagcccgagatcgcgccactgcactccagncatgggccgaccaggagcaaggactcccattctcaaaataaagtaaaggaaagnaaacaaagtaaaagnaaaagccttatattttgaacttcttcttaaaaagaaggaaaaaaaaganaagcctgatgccacaccaaattttaaatttttgggcaaggtccggatccaatttaaagggattattttattttgccattcaccaaaaaattaatttctttttactcccccccaaaaaaatcaattaanaaagttcaaaataggcaacctttttccttaatgtgtttaaaatgtaattcacccaaatacatgtgtcccccaacttctttccagntataatttctattggtgttaaaggtggagggtatacccttgaagtgagggcaataaagagaagtttgaagctttccagacccttgnccntggaanaggaagccgtgtttcttttcnttaagaggtcttgnngggaaaaattggtttgggggggccancaaaaanttttcttttt

SEQ ID NO: 6546 - DNA, 736 bp, Homo sapiens
  misc_feature 64, 465, 587, 617, 624, 682, 686, 689, 709, 713, 724, 725,732, 735, 736: n = A,T,C or G
gccttacgctttgaagatccgcgtttttcgactcttctagggcgaattggatctccccgcggtngcggccgtccgggcaggtactaaaaaaaactggaggggaggccaggcacagtggctcacacctgtaatcccagcagcactttggggggccaaggcaggtggatcacgaggtcaggagctcgagatcatcctggctaacatggtgaaaccccatctctactaaaaaatatttttaaaaattagccgggcgtggtggcaggcgcctgtagtcccagctactcaggaggctgaggcaggagaatggcgtgaacccgagaggcagagtttgcagtgagcggagatcgcgccactgcactccagcctgggcaacagagagtgagactgtctcaaaaaaaaaaaatttggagggagtggaagttacatcagataaggatacatgtagaaagcctcaaaaattaatanactaattaaaagaataatggttaaaataacaagaagtcaggccaattaatcagaataatgaatctaaaactagacccaaatgcaaacagaaaattcagtgtatggtaaaggcagcattttcnaaatcagttgagtaaaaaagacaggatttnggcaatnaaatggatttttgggaaattgggtaaccatttttaagggggaggaaaaaatttgggantccnttnaccttcattacccccagccngggnttaaaattttnnaaagatnaann

SEQ ID NO: 6547 - DNA, 937 bp, Homo sapiens
  misc_feature 4, 6, 7, 10, 12, 13, 18, 21, 22, 23, 24, 25, 26, 27, 28,29, 31, 37, 41, 43, 44, 45, 51, 52, 56, 57, 58, 60, 61,63, 67, 68, 70, 71, 73, 75, 76, 78, 82, 83, 84, 88, 90,95, 96, 97, 100, 102, 103, 109, 114, 428, 449, 463, 480,521: n = A,T,C or G
  misc_feature 533, 571, 646, 649, 658, 691, 703, 706, 711, 729, 730, 731,735, 739, 740, 755, 766, 791, 792, 804, 806, 807, 809, 815,819, 832, 836, 842, 845, 850, 901, 912, 914, 918, 929, 934,937: n = A,T,C or G
cttncnnccntnncaccnttnnnnnnnnntntgtatnctcnannntcctannttgnnntnnantacnntnncntnntncagnnnagtntntgggnnntgngnnctcgcntaatncgtactcactatagggcgaattggagctccaccgcggtggcggccgcccgggcaggtacgcggggcccttttccggtccggcgtggtcttgcgagtggagtgtccgctgtgcccgggcctgcaccatgagcgtcccggccttcatcgacatcagtgaagaagatcaggctgctgagcttcgtgcttatctgaaatctaaaggagctgagatttcagaagagaactcggaaggtggacttcatgttgatttagctcaaattattgaagcctgtgatgtgtgtctgaaggaggtatgataaaagatgtttgaaagntgttgatggaaacagtgtggnatccctactctttngatcctggggaacccancaccaaggcaaagaaagctttggattgaaaagcctatggtnaaaaaagcttgngttcaaattttcggcggaaggttgaaccgcccgtcctnttgagactgccagtttgtttaaagcaaaccttttttccaccggggatggggattaaaggaaatactccttgccangantaacgccantggtatttgccaagcccctttatttaaaaaagntggggccagccnttnttttntggggggcccatctccannntacncttnngggcccgctcttaanaaacctaaggnggggattcccccccggggcctttgnnaggggaaaattncnnantattcnaaangcttttattccgnatancccggnccnacccntcggaagggggggggggcccccggggtacccccaaacctttttttggtttncccctttttantnggangggggtttaanttttnccn

SEQ ID NO: 6548 - DNA, 1205 bp, Homo sapiens
  misc_feature 1, 2, 3, 5, 10, 11, 14, 17, 19, 21, 31, 35, 38, 39, 43, 47,50, 59, 61, 63, 74, 75, 76, 78, 83, 84, 87, 90, 93, 97,98, 99, 101, 105, 106, 108, 118, 119, 124, 125, 135, 189,196, 197, 198, 214, 215, 226, 228, 246, 250, 316, 341, 378: n = A,T,C or G
  misc_feature 397, 411, 412, 463, 464, 469, 473, 474, 481, 484, 516, 519,520, 530, 544, 558, 576, 579, 580, 583, 591, 594, 600, 603,605, 609, 611, 619, 633, 653, 654, 669, 677, 681, 705, 723,738, 740, 766, 767, 769, 772, 785, 792, 796, 807, 808: n = A,T,C or G
  misc_feature 811, 817, 834, 835, 839, 843, 852, 853, 855, 865, 867, 874,877, 878, 888, 895, 899, 903, 910, 915, 916, 919, 925, 926,928, 937, 945, 946, 950, 962, 967, 976, 980, 982, 997, 1001,1006, 1008, 1020, 1022, 1028, 1029, 1035, 1036, 1040: n = A,T,C or G
  misc_feature 1042, 1047, 1058, 1070, 1074, 1077, 1079, 1081, 1082, 1087,1095, 1097, 1112, 1113, 1114, 1116, 1120, 1123, 1125, 1127,1128, 1129, 1131, 1132, 1133, 1136, 1142, 1143, 1145, 1151,1154, 1165, 1168, 1169, 1170, 1171, 1173, 1180, 1184: n = A,T,C or G
  misc_feature 1186, 1187, 1190, 1193, 1202, 1203: n = A,T,C or G
nnncnatatnnttntantntntaatgttatnattnttnntttntaanttnattatgatncntntcatcgttatnnntnttatnntantanggngtannntnattnncntcttctattnntatanngcgaattggngctccaccgcggtggcggccgcccgggcaggtacgcgggaacacggtcaagttnctgctgnnnggtctacctgaagaanntaaccctcttntncacctgctccccggctgnccgnaccttccgggccttcgcggctgaatttctttttccccttggtccttctcctgggtctggccatctncagcgttcccctgctttacagcatnttccttgatcccgcctttctaagctttgtggtccatnccgggggcaagatctgttncatcttgggcccannatccactgagttctatttatcaaggcactcccttggaggaccaccccaagnnatttncctnntttcttnctngggggaaccccaaggcctttttggcttgtgcnccnnttttcttggntggatcctcacaangcattccttgaatngggcggtaaccctttcgnganncgncttccttnagnaaactnagntngggnantccccccnccgggggcttgccnagggaaaatttgccgattannttcaaaggcctttantttggatnttancccgggtccgaccccttctttaanggggggggggacccccgnggataaccccccaangntttttttggttttccccttttaaaanntnganggggggtttaaantttgccncccngccctttgggnngtnaaattnaatgggggtccaataanncttngttntgtcctggnntngaaaaaattngntttaatnttnngttttcaacnaaatttntccnccanccaaatnatttnnccnaagacnngnggggaggcnaataaaanngtgntgaaaagccctnggggngttgggccntaantngaggtggagacttanaccntacancnattaaatttggngnttgggnncttcannttgncnccgantttttccagcntcgtggaaaacncccnttntngnngaccnttgttttnantttaatggaaattcnnncnaaanatncncnnngnnnatnaaaggnncnagaatntcnattattatggnggnnnntnatttacnctcntnnctnagnttaccatgnncc

SEQ ID NO: 6549 - DNA, 988 bp, Homo sapiens
  misc_feature 2, 5, 6, 7, 8, 9, 11, 13, 14, 15, 17, 21, 26, 30, 35, 36,39, 42, 46, 47, 48, 51, 54, 55, 57, 59, 60, 65, 68, 69,70, 71, 73, 74, 75, 77, 80, 86, 89, 193, 205, 251, 289,293, 315, 320, 332, 355, 359, 407, 421, 434, 441, 442, 456,460: n = A,T,C or G
  misc_feature 462, 473, 475, 478, 484, 496, 499, 505, 526, 550, 551, 579,587, 612, 623, 637, 644, 649, 665, 697, 717, 734, 751, 757,760, 762, 771, 773, 775, 785, 788, 802, 804, 831, 835, 840,853, 863, 867, 879, 880, 881, 885, 889, 913, 921, 930: n = A,T,C or G
  misc_feature 941, 954, 959, 961, 964, 972, 983, 984, 985, 987: n = A,T,C or G
cnttnnnnntnannntntgtnttctntatnacctnntanttnttcnnnctnatnnancnnatttnttnnnnannngnatntagccnttnttactcgcgtaatacgactcactatagggcgaattggagctccaccgcggtggcggccgcccgggcaggtactttttttttttttttttttttttttttgaaanagggtctcactntgtcacccaggctgaaatgcagtagtgtgattttggctcattgcanccttgacttcccaggctgaagtgatcctcccgccttancctnctgagtagctggggctacaggnatgcnccaccatgctgngctaatttttgtattttttgtantggngggatttccgccatataaccctggcctggtctggaaacccctgggctngggcgaatccgctngctttaagctttnttaaaanngcttggggattacnaggncntggagcccacnanctncccaanagccttgtgagnttnttttanagggagggaaacaatattctncaattctggaaaacaaaacccttnnaaaatggcccaaaaaccaaaaacttggnagttttangccccccctcctcctgatacttggntgggtaataantaatttggggaggntaaaaanaaacncctcatttttggtccntttggaataaaaaagggggattttgccaattngcctttttgaaaattttgcnaaaaaaaaacccttttnaatttttcttttttttngggggnttngncccccaaantngntggccaaagnaantttaaaaaaaattntnattttttgggataaaaaattttttttntaancccanaggcttttacttnggcttttttntttnttgggggggttnnngggngggnagtttttttacaagggggtctttnaacctttnttttgcaanaaggaaaaggngttttgttttttngtggngnaanccccaaanaaatttaaccnnnant

SEQ ID NO: 6550 - DNA, 975 bp, Homo sapiens
  misc_feature 1, 2, 7, 9, 10, 12, 13, 16, 18, 19, 21, 26, 30, 31, 32, 39,41, 42, 43, 48, 50, 51, 55, 57, 58, 61, 62, 65, 67, 70,76, 77, 78, 79, 85, 88, 91, 99, 106, 359, 369, 384, 388,443, 450, 477, 497, 503, 528, 552, 569, 583, 584, 586, 598: n = A,T,C or G
  misc_feature 628, 660, 700, 702, 707, 708, 787, 791, 803, 807, 812, 813,816, 823, 842, 848, 852, 857, 858, 865, 893, 896, 900, 906,908, 911, 912, 919, 923, 925, 928, 930, 931, 932, 933, 939,940, 943, 947, 956, 962, 966, 970, 974: n = A,T,C or G
nnctttntnnannttntnncnccatncctnnncctcttnannnattcntnnttgntnnaannttntnttnctctcnnnnagcttngtntcngccttccnactcgcntaatacgactcactatagggcgaattggagctccaccgcggtggccggccgcccgggcaggtactttaggagacccaggcgggcagattgcctgaggtcaggagtttgagaccagcctggctaacatggtgaaaccctgtctctactaaaaatacaaaaattagccgggcatggtggctcacgcctgtagtcccaactgcttgggaggttgaggcaagagaatcgcttgaacccaggaggtggaggttgcaantgagcccganaatcgcgccacttgnactncagcattggcggcgacagtagcaagactcccatctcaaaatattaggaaagtaanagtaaancaaaggaaaaggaaaaggcttatattngaacttctcctaacaaattngaaaanaaaagaaaagcctggatgcacacanaatctaaaattttggccaagttcngatccaaattaaagggntattttattttgcnntncaccaaaaaatnaatttcttttactcccccccccaaaaaaanttcaattaaaaaaaagtttcaaaaataggccnaaactttttttcccttaaattggtggtttttaaaaaatgntnaaatnncacccccaaaaataaccattggtggtgcccccccaaactttttttttttcccaggtttaattaaatttccttattttgncggntaaaaaaggttnggangggtnnttnacccttngaaagttgggagggccaantttaangtangaagnnttgggangccttttaaaaaacccttgctttggganaangaangccgcngntcnnttttttntttnanaangnnnnttgaannggnaaanttgggtttngggggnggcntcanaatnt

SEQ ID NO: 6551 - DNA, 1496 bp, Homo sapiens
  misc_feature 80, 94, 98, 122, 139, 154, 161, 162, 165, 175, 185, 189,274, 296, 302, 316, 401, 439, 461, 483, 504, 538, 545, 549,570, 578, 589, 612, 662, 676, 703, 743, 770, 795, 796, 806,811, 847, 855, 878, 890, 900, 908, 934, 951, 956, 967: n = A,T,C or G
  misc_feature 986, 988, 1052, 1068, 1071, 1090, 1109, 1121, 1125, 1162,1180, 1249, 1252, 1272, 1284, 1286, 1289, 1294, 1331, 1336,1340, 1379, 1380, 1387, 1423, 1447, 1453, 1460, 1468, 1476,1487: n = A,T,C or G
aagaatttgggggaaaggcccttccccaacccccggccgggggttgggggccgggggcccccggaaaggggttaaaccgnccgggggggggggnaagntttcctttccggctttctttggtncaaaccccccaaggggnccttggggaaagatnggccaannttngggggccggnccccaattcnttcnggggccttcaaccattggccaaaagggcgttctttggcgccttccccggggtgggttttccaaaaaggccggaaatattccttcnccttgggccccttccaaaggcncctttncttaaaaggattanggcctttaagggggaatttttaaccaaggggccgggccgggccgggttcaaaccccaaccggccttttggggccttaaaaatttnttttttgggttaatttttttttttaaagggttaaaggnaagggcccccgcgaagggggtngttttccaacctccaaaaaggntttagggggttccaaaaaggnaattggggggttccttccaaaaaaaacctttttnctttggnaccnccttccggttgggaaattacncccggccnccccccgggcnccttctgggggggcgccctttcncccccaaaaaaaggctttggtcccccgggggggggaaatttttaacccanaggggcccgggttnggaaagggcccccaaccccccgggccngggcccccccggggggcccccgggccttttcctttaaggnaaaaaaccctttaagggttgggggggnaattcccccccccccccgggggggnncctttgggcnaaagnggggaaaaattttttccggcaaattaatttcccaanaaagggcntttttaattttccgggaaattancccccggatccnggaacccccnttccccangggggggggggggggggccccccccnggggtttaacccccccnaaggnccttttttttngggttttcccccttttttnangtttgggaaagggggggtttttaaaattttggcccgcccggccttttgggggccggtttaaaantacaaaattggggggnccnaattaaagcccttgggganttttcccctttggttgggnggggaaaaaaantttnggttttaatttcccgggcctttcaaccaaaatttttnccccacccaaacccaaancaatttatcccgaaaggcccccgggggggaaggccaatttaaaaaaggttgggttaaaaaaagggcccnttngggggggggtggcccccttnaaattggaaggntnggnaaggnccttaaaacctttcaaccaattttaaaaatttggccngtttnggcnggcctttccaaccttggggcccccggccttttttccccnngttccgngggggaaaaaaccccttgtttcccttggcccccagnccttgggccaattttaaaattggnaaattntcggggnccaaaacncccccccnggggggaaaanaaagggcct

SEQ ID NO: 6552 - DNA, 899 bp, Homo sapiens
  misc_feature 322, 348, 441, 464, 467, 513, 525, 553, 554, 565, 579, 580,600, 624, 627, 635, 639, 640, 674, 675, 681, 694, 698, 703,704, 711, 714, 723, 730, 734, 759, 760, 762, 765, 770, 777,781, 786, 787, 793, 807, 819, 829, 834, 838, 841, 859: n = A,T,C or G
  misc_feature 865, 867, 868, 871, 879, 880, 882, 891, 895, 896, 899: n = A,T,C or G
gaattggagctccccgcggtggcggccgaggtacctcccagtcttcgggaggacttattaaaacagattgctgggccctaccccagagtttctgattctgtagatctggggtggggcctgataatttgcattctttttgttttgttttgtttttaaagatggagtctctctctttcgcccaggctggagtgcagtggtgcaatcttggctcactgcaacctctgcctcctggcgccaagtgattctcccgcttcagcctccctagtagttgggactacaggtgcaggccaccacatccagctaacttttgtatttttagtanagatggagtttcaccatgttggccangcctggcctcaaactcctgacctcaagtgatccacccgcctcagcctcccaaaagtgcttggacagaagaatcactttgaacccagatgtttngagaccaggcttatgcaacatantgngccccactatttatatttttttttaaactaaaagaaaaaattattnaaagtaaaacangtgctaaaaattagttgaatggcaaatnncaaaaaaaatncaggggaaacttannttggcatggaccattttttntaggaaaagaatatttttaaaatnaangcctgggnagannacttcgggtggtctttcaagcttttaaaaaacannaaaatnaagttctttttgncccnccttnnattaggntgnctaagaaancaaaaangaanacctttgttttcaaaaatggaaggnngnacncattnttgaaangcgnctttnnccccantgccttgggtatangggggaaaggcnctttttttanaaccntttnggnataaattacctatggggngggganannaanggaccctnngnatctttcgntttnntan

SEQ ID NO: 6553 - DNA, 871 bp, Homo sapiens
  misc_feature 64, 66, 298, 325, 428, 520, 546, 577, 579, 590, 602, 630,639, 645, 657, 663, 666, 672, 673, 677, 701, 740, 743, 749,773, 777, 799, 803, 805, 806, 807, 816, 828, 832, 845, 846,847, 851, 852, 853, 862, 863, 866, 867: n = A,T,C or G
ggagctccaccgcggtggcggccgaggtactttaggagacccaggcgggcagattgcctgaggncnggagtttgagaccagcctggctaacatggtgaaaccctgtctctactaaaaatacaaaaattagccgggcatggtggctcacgcctgtagtcccaactgcttgggaggttgaggcaagagaatcgcttgaacccaggaggtggaggttgcagtgagccgagatcgcgccactgcactccagcatgggcgacagagcaagactccatctcaaaataaagaaagaaagaaacanagaaaagaaaagcttatattgaacttntctaaaaaaagaaaaaaaagaaagcctgatgcacacaaatctaaatttggcaagtcgatcaattaaaggatatttattttgcatcacaaaataattctttacnccccccaaaaatcaataaaaaagttcaaatagcaacttttcctaatgtgtttaaaatggtaatcaccaaaataccatgtgtcccccaacttnttttccagttataaatttctattggngtaaaaggtgaggggtataccctgaaagttngnggccaataaangaagagtttgangcctttaagaccctggcccttgggaggnggaagccgnggttcntttttttaaaanttcttnganggaaanngggntttggggggggccacaaaaatttnttctcaaatctttttttctttttccccctcattcctggngcntctttntttttctttgggactccaacctgngttntttggggaaaacctttggttancctngnnnccttgcccngggcggggccgngttnttaaaaaactatnnnggannnccccccggnntgnngggg

SEQ ID NO: 6554 - DNA, 891 bp, Homo sapiens
  misc_feature 315, 319, 342, 415, 494, 530, 541, 552, 591, 605, 608, 616,626, 633, 645, 652, 654, 662, 677, 695, 720, 735, 736, 739,746, 761, 768, 770, 773, 778, 783, 789, 804, 806, 811, 817,822, 824, 832, 834, 836, 840, 856, 869, 872, 878, 885: n = A,T,C or G
  misc_feature 891: n = A,T,C or G
ggcgaattggagctccaccgcggtggcggccgcccgggcaggtactttaggagacccaggcgggcagattgcctgaggtcaggagtttgagaccagcctggctaacatggtgaaaccctgtctctactaaaaatacaaaaattagccgggcatggtggctcacgcctgtagtcccaactgcttgggaggttgaggcaagagaatcgcttgaacccaggaggtggaggttgcagtgagccgagatcgcgccactgcactccagcatgggcgacagagcaagactccatctcaaaataaagaaagaaagaaacaaanaaangaaaagcttatattgaacttctntaaaaaaagaaaaaaaaagaaagcctgatgcacacaaatctaaattttggcaaggtcgatcaattaaaggatnttttattttgcattcacaaaaataatttctttactccccccaaaaatcaaataaaaaggtttcaaataggcaacctttntccttaatgtgttttaaaatgtaaatcacccaaatnacatgttgttnccccaactttnttttccaggtttttaattttcttattggtgtaaaagtgnagggtttaaccttnaangtgcccgncgttcccttngggccgntctagaaactangtgggantnccccccgnggcttgcaaggaaanttcgatattcaaagcttnattcgaatacccgttcggaccttcnagggggggggccccnngtnccccaanctttttggtttcccntttttgntnganggggnttaantttgcnccgcctttggcgttnantccantggtcnatcancntgtttttncngntgtnaaaattttttttttcnggttctcataatntcnctcganaataatnagcccn

SEQ ID NO: 6555 - DNA, 1203 bp, Homo sapiens
  misc_feature 1, 2, 4, 6, 7, 8, 10, 11, 12, 13, 14, 15, 17, 22, 23, 25,27, 28, 29, 30, 32, 34, 35, 36, 37, 39, 40, 41, 42, 43,44, 46, 47, 48, 50, 51, 52, 53, 54, 55, 56, 61, 63, 64,67, 69, 70, 72, 75, 80, 81, 82, 83, 84, 86, 87, 88, 89,90, 91: n = A,T,C or G
  misc_feature 92, 95, 96, 101, 108, 335, 350, 384, 460, 464, 472, 476,496, 515, 578, 580, 607, 625, 662, 669, 688, 696, 709, 715,716, 732, 736, 739, 751, 754, 759, 770, 775, 794, 797, 804,811, 817, 825, 834, 839, 840, 845, 847, 861, 876, 888: n = A,T,C or G
  misc_feature 894, 896, 898, 918, 940, 941, 944, 947, 961, 962, 963, 966,982, 985, 995, 1009, 1024, 1030, 1034, 1065, 1066, 1069,1079, 1094, 1095, 1098, 1099, 1102, 1103, 1114, 1115, 1116,1118, 1119, 1131, 1150, 1151, 1153, 1154, 1155, 1158: n = A,T,C or G
  misc_feature 1160, 1168, 1181, 1187, 1188, 1197, 1200, 1203: n = A,T,C or G
nncntnnntnnnnnnantattnnantnnnnanannnntnnnnnntnnntnnnnnnnatttnannttntnntnaanttttnnnnnannnnnnnagnnatggntctttanacgactcactatttggcgaattggactccaccgcggtggcggccgaggtacgcggacaaaaaatacaaaaattagccgggtgggacacgcctgtaatcccagctactcaagaggttgaggcaggagaatagcttgaacccgggaggcagaggttgcagtgagccgagatcacaccactgcactccagcctgggtgacagagcgaggctccgtctcaaaaaaaaaaanaaaaaaaaaaaaaanaaaaaaattgttttagcgctgggtttcccaaggnggggagaggacagacccaagcctggagcctggcccctggcctgtgtgctgacttcttgggggtcccttaaacccantggnatttttcntgtnggagccctgttcaaaccatnagccaacaatctccttcantaagtgggaaaaagttatttcctgaatccgtttccaccaaaagccaagttagtttttttttcntncaactctcaatgtttaaaccaggaatnaaaagaaaaaagggcttncgttatttcaatggcaaaaaaaaacctggcttctttnttaaatngggaaaaaaaaaaaccaanacccatgnaaaaaaaggaaanctttcnnggggaaaaagggccangccnacngagggggaaacncgnaaaanggaggaaaacnttgtngggaagggggaaggaaacnaangaaaccntaaaaangccccntttatttntattaattngaaanntcagngnaaaaaaaaaaaaanattggtttacccttnccccccgggggngggggncngntttttaaaaaaactaaggtngggaattccccccccgggggcnntgnaanggaaaatttttggnnnttnaaaggccttttatttnatntaccccggtnccaacccttttaanggggggggggccccngggtancccnaaacttttttgtttcccccttttaagtgggnnggnttaatttggngcccccttggggggnnaannaannggggcaaaaannntnntttccctggggnggaaaaaatttgtttttcnngnnnccnanatttcccncccaaaattttanatgacnnggggggatntanaan

SEQ ID NO: 6556 - DNA, 930 bp, Homo sapiens
  misc_feature 482, 491, 494, 512, 538, 557, 566, 571, 583, 586, 592, 625,627, 639, 640, 649, 664, 677, 708, 732, 733, 742, 743, 744,750, 756, 773, 774, 787, 791, 794, 796, 805, 806, 810, 811,814, 819, 822, 826, 831, 832, 838, 844, 845, 850, 851: n = A,T,C or G
  misc_feature 855, 857, 858, 859, 863, 864, 877, 880, 881, 890, 899, 901,904, 905, 909, 911, 915, 917, 924, 927: n = A,T,C or G
ggagctccaccgcggtggcggccgcccgggcaggtaccttagcatcatctggtctgaccttccactttgcagataaggaaactgaaagctaggaagaagaagggatccacacagcaggcctccacttctttccttctataatagactctctttgcaataaagaaaaatgcgtttgacatacacatctccaatgtaagctgtatgcagcaggtgcagtggaatgctacagcagtcacatacacagcactaagggacccagtggctgaaagggggtcaaaaaagacttcatctgagaggtgacttggactaggaggggcaagttagaagttttaagggaagatgtgccaggaaggctaacctctcaccataatacataccccccatctaagtcaaaagttgttgctgggaagccactatgtggagactgcacatcctggcctcctctgcatccagggtgggggcccacattgattacccagttnggcccaaanaangaccgttgagccaggganttgattgtggtgttcagttttaaganccaaagggcaagggtaaanaaaagcaancccgntgcccctttttncantcaggnccctttttccctttgcccgcccggcccaaaaancnaaacttcttggnngcttccccngggggaaggggccangagccccatgggnttgaaaaagggagcctgaattcccctggcantcacctggtggtgaaacccaacgnngccaaagcnnnaaaccncccccnccttggaacttgttaannttggggaaatctngtcntcntngtggtgttnnaaannttngtgcnagncaanaaaanncccttntggccnntttannaacntnnngggnntccccccgggccntgnnagaaattcntattttaancnttnnatantnccgncncccctgntgnggg

SEQ ID NO: 6557 - DNA, 863 bp, Homo sapiens
  misc_feature 562, 571, 601, 625, 629, 639, 667, 680, 709, 710, 718, 726,746, 749, 758, 762, 766, 792, 794, 798, 803, 809, 813, 816,823, 824, 829, 833, 837, 849, 850, 852, 854: n = A,T,C or G
ggcgaattggagctccccgcggtggcggccgagtttcccccacaccaagtcgccgagccgcagactcacagccgccatcttaccacccaaccaccgccccccgcgtacctcggccgctctagaactagtggatcccccgggctgcaggaattcgatatcaagcttatcgataccgtcgacctcgagggggggcccggtacccagcttttgttccctttagtgagggttaattgcgcgcttggcgtaatcatggtcatagctgtttcctgtgtgaaattgttatccgctcacaattccacacaacatacgagccgggagcataaagtgtaaagcctggggtgcctaatgagtgagctaactcacattaattgcgttgcgctcactgcccgctttccagtcgggaaacctgtcgtgccagctgcattaatgaatcggccaacgcgcggggagaggcggtttgcgtattgggcgctcttccgcttcctcgctcactgactcgctgcgctcggtccgttcggctgcggcgagcggtatcagctcactcaaaggcggtaataccggntatccacanaatcaaggggataacgcaggaaagaacatnttgagccaaaaggccagcaaaaangccnaggaaccgtnaaaaaggccgcgttgcttggcgtttttncataggcttccgncccccttgaccgagccttaacaaaaattnnacccctcnaagttaanaaggtgggcgaaaaccccgnccngggcctttnaaanaatnccccggcggtttttcccccgggaaananttcntttgngggccntttnttntttcccnnccctncccntttnacgggaataacnntncnccctttttt

SEQ ID NO: 6558 - DNA, 803 bp, Homo sapiens
  misc_feature 19, 85, 490, 602, 622, 629, 632, 648, 659, 666, 681, 688,700, 724, 732, 734, 739, 742, 753, 762, 767, 768, 782, 785,788, 790, 796: n = A,T,C or G
gactactatagggcgaatnggagctccaccgcggtggcggccgaggtacgcaagagctcacccacctacctgacccaccactggnatttccagaacccaggcaagccacctggaaagagttggtctgcctggagtagctaacactggtgctagtatacatcaccttggtgcccaagaacgggcatgcccagcctactgtagccactgctgggacccgaagactggcccatgtatcccattccccaacaaaacttcaccacagcttccactaacaaccacatgctaagccactgagtaaatcacagacaaaaatgatgctgtttatagttgaagaaatcatacagcgattacactactgcacatgcccagaatcaaagccaaagcatcctacccaatgaacactatgcatacattttcaggaaaagtcctcccctatgaaagcaaattcaaaaaattggaaaaagcaactgttacacaagatgcacaaatnccaatgtaagaacacagggaaacatgaaaagcaaggaactatgacacctccaaaacaacacaataattttccagcaacatatcccaatcaaaaagaaatttacaaaattctngggaaaggaattcaaaaatntttgacnctntaaagaagcaaaaatnttttgagggcnggggtgnggggggccttattgntctgttnaatccccaaccncttttgggaaggcaaaaaggcccnggaaggantnaaccntgnagggtccaaanagttttggnggggnngcccttgggcccanatnggngngaaaanccttttt

SEQ ID NO: 6559 - DNA, 751 bp, Homo sapiens
  misc_feature 1, 6, 533, 548, 553, 560, 561, 563, 585, 595, 602, 606, 616,623, 633, 635, 644, 645, 651, 675, 678, 679, 681, 706, 711,712, 714, 715, 719, 724, 727, 736, 751: n = A,T,C or G
ncgtantacgactcactatagggcgaattggagctccaccgcggtggcggccgaggtactttaggagacccaggcgggcagattgcctgaggtcaggagtttgagaccagcctggctaacatggtgaaaccctgtctctactaaaaatacaaaaattagccgggcatggtggctcacgcctgtagtcccaactgcttgggaggttgaggcaagagaatcgcttgaacccaggaggtggaggttgcagtgagccgagatcgcgccactgcactccagcatgggcgacagagcaagactccatctcaaaataaagaaagaaagaaacaaagaaaagaaaagcttatattgaacttctctaaaaaaagaaaaaaaagaaagcctgatgcacacaaatcttaaatttggcaagtcgatcaattaaaggatatttatttgcatcacaaaataattctttactccccccaaaaaatcaataaaaaagttcaaaatagcaacttttcctaatgtgtttaaaaatgttaatcacccaaaanacatgtgttccccanctttnttttccnngntataaatttcctatttgggggnaaaagggggngggtttnaccnttggaaggtnggagggncaattaaaananaaggtttgnngctttnaaaaacccttgccctgggggaaanganncngggttttttttttttttaaaaagtnttggnngnnaaantgggnttnggggggccncaaaatttttttttn

SEQ ID NO: 6560 - DNA, 850 bp, Homo sapiens
  misc_feature 1, 6, 314, 349, 352, 353, 387, 438, 456, 477, 491, 530, 537,542, 581, 593, 608, 633, 642, 643, 645, 646, 648, 657, 663,672, 673, 677, 680, 681, 683, 685, 714, 715, 716, 721, 733,751, 753, 777, 780, 787, 791, 799, 802, 803, 804: n = A,T,C or G
  misc_feature 825, 828, 839, 840, 841, 842, 844, 845: n = A,T,C or G
nccagncttaaagtctcgcgtaatacgactcactatagggcgaattggagctccaccgcggtggcggccgcccgggcaggtactttaggagacccaggcgggcagattgcctgaggtcaggagtttgagaccagcctggctaacatggtgaaaccctgtctctactaaaaatacaaaaattagccgggcatggtggctcacgcctgtagtcccaactgcttgggaggttgaggcaagagaatcgcttgaacccaggaggtggaggttgcagtgagccgagatcgcgccactgcactccagcatgggcgacagancaaggactccatctcaaaataaagtaaagaaaganacnnatgaaaaggaaaaagcttatatttgaaacttctnttaaaaaaaaagaaaaaaaaaaaggaaagcccctgatgccacacaaaattnttaaatttgggccaagtncgatcaattttaaaagggatntttttatttggcantccacaaaaaataaatttctttttacttccccccccccnaaaaaantcaanttaaaaaaaagttttcaaaattccccggcggtaaccttntgggcccggttnttaaaaaacttaggnggggattcccccccggggcttgcanaggaaattnncnnanttttcaaangctttnttcgggatnncccngtnngnancccttcaaagggggggggggcccccgggnnnccccnaagggttttttnggttcccctttttaagtngngggggtttaaatttgccccccttnggnggtaaantcangggggcanaannntgtttccttggggggggaaanttngtttttccccnnnncnnaaaaa

SEQ ID NO: 6561 - DNA, 1347 bp, Homo sapiens
  misc_feature 6, 12, 27, 54, 55, 60, 63, 90, 97, 103, 121, 147, 151, 182,206, 237, 258, 313, 330, 350, 368, 385, 387, 389, 414, 425,466, 471, 480, 493, 498, 506, 535, 555, 565, 575, 576, 580,584, 591, 592, 608, 610, 614, 616, 622, 624, 627, 646: n = A,T,C or G
  misc_feature 659, 664, 670, 671, 680, 697, 707, 713, 721, 722, 724, 731,734, 747, 750, 752, 753, 768, 774, 782, 791, 793, 794, 796,800, 804, 807, 810, 834, 843, 848, 853, 868, 886, 892, 903,904, 913, 917, 918, 919, 920, 926, 930, 938, 951, 953: n = A,T,C or G
  misc_feature 956, 962, 967, 968, 970, 972, 973, 974, 976, 977, 978, 985,987, 991, 1002, 1019, 1030, 1036, 1037, 1044, 1047, 1059,1063, 1072, 1088, 1090, 1092, 1108, 1109, 1110, 1111, 1113,1128, 1130, 1147, 1155, 1159, 1160, 1161, 1178, 1180: n = A,T,C or G
  misc_feature 1182, 1189, 1190, 1199, 1207, 1214, 1218, 1220, 1223, 1224,1229, 1234, 1243, 1258, 1259, 1260, 1276, 1278, 1300, 1302,1305, 1306, 1328: n = A,T,C or G
gggtgngggggnaagactttgcgcaantccgtccgcgattgcggccgcgcaagnntgggnggnaaaaagagagataatcattcctgggcnttttggntgtgantttaatttgccccttaanaaaaattaagggcctcctttttcatntttnccttttttattgggtttggccccccttaagnccccaaccccttttggaaaccttntttgggggccttggaaaattaaaaaaaaacnaggttccccttcaaaaaaatngttttttttggaccccttaagttggggaaaaaaaaaaaagcccaatcggaaaagnaaggggtttaaccttantaaggggccttgggggccanttggggtgggggtggccnattggcccttgccaaantncncccaaggggaacccctttggggggnaaggggccccnaaagtaaccgaaggaaaggggaattggggcctttttggaanggccntccaagggnaaggttttttggnattanccccaaanttccttgggggggccaaaaacaattgggnttggaaaaaaaacccccccnaattcttttntttacccagnnaagntgangggttgnnacctcctcctcctatngnttananaattananaanaagggggtttacccccctnggggggccccggnttttntttaannaaaaacctnaaggggggggggaattncccccccccngggggnccttggcnnanggggganaantttttccggaatntantnnaaaagccctttttantttctntaattaanccccggatnannancccntttntanaanggggggggggggggggcccccccnggggttaanccccncaaancttttttttgggttncccccctttttaaaaagngggggnggggggggttnnaaaattttnggcnnnncccccntttngggccccngtttaaaatccanantgngggggncccanntnannncnnngggtttntncccntgggggggggngaaaaaaaatttgggtnttttttccccnccttcnnaaaaaanttnccccccccccanaccnttttccccnaaaccccccggggggngnanccctataaaaaaaagnnnngnttaaaaaaagacccncngggggggggggggcccnttaaaaangggnnnggggggaggccttaaancntncccaaannttttaaaantttggggngggtttngggngngcnnttaanaattngggcccccntgttttttcccaaannnccggggggaaaaaaancntttgttcgtggggcccccaaananttnngtttttttaaaatgggagaaantttgggccccccccccccc

SEQ ID NO: 6562 - DNA, 794 bp, Homo sapiens
  misc_feature 178, 193, 199, 215, 257, 279, 434, 483, 532, 552, 575, 590,609, 624, 626, 627, 628, 631, 639, 657, 686, 701, 758, 759,763, 769, 772, 793: n = A,T,C or G
acgactactatatggctaattggagctccaccgcggtggcggccgaggtactttttttttttttttttttttttttggcaacacttgggaggctgaggcgggtggatcacctgaggtccggagttcgagaccagcctgaccaacatggagaaaccctgtctctactaaaaatacaaanttagctgggcgtggnggggcncacctgtaatcccagntactcgggaggctgaggcaggaaaatcgcctgaacccggganacagaggttgtggtgagccganatcgtgccactgcactccagcactccagcctgggcaatgacagcgaaactctgtctcaaaaattatatacatatatattttttggccaggcgcagtggctcacgcctgtaatcccagcactttgggaggccgaggcaggcagatcatgaggtcanggagaatggagacccctcctggctaacaccgggggaaaacccccgtttntacttaaaattccaaaaaaatttgcccaggccgttgtttggccgggccnccctgtaagtccccaacttnacttgggggaaaggcttgaagcnaaggaaaaatgggcntggaaccccaaggaaaaanggcgggaacttttgnannngangccttganaatcggggcccaattggnaactttccaacccttggggggggacacangggaagacttccgtnttcaaaaccccaaaaaaaaaaaaaaaaaaaaaaaaaggtcccctttgggcccggctnntaanaaactnagngggatcccccccgggcttggnc

SEQ ID NO: 6563 - DNA, 875 bp, Homo sapiens
  misc_feature 115, 597, 622, 656, 690, 691, 703, 704, 714, 716, 717, 730,732, 743, 746, 750, 757, 760, 769, 772, 778, 793, 794, 795,796, 799, 803, 810, 830, 834, 838, 839, 846, 854, 860, 874: n = A,T,C or G
tatagggcgaattggagctccaccgcggtggcggccgaggtacaagaaactaggactgtttgcacgtgaggttgttgaggagccaaaggccctcagggagcagactgggctgttnctggaaaaagaactgcagaaggataaataaggctgccacaacacgctcatctctgagctgcatttgccctcccacagtctccactgctgcctcagttagcaggttgcttagacatcgaagcacggggcatgccagcagctccagtcctgcatcctcgcttttctggacagccccagccaagtccaacagcagcaaccccagagtagacagagccccatggccaatgagcagaggattgctgacctggctgcagatgatgtaatgaaggcaccaggcaaaccccgcgtacctgcccgggcggccgctctagaactagtggatcccccgggctgcaggaattcgatatcaagcttatcgataccgtcgacctcgagggggggcccggtacccagcttttgttccctttagtgagggttaattgcgcgcttggcgtaaatcatggtcataggcttgttttccctgtgtgaaaattgttattccgnttcacaattttccacaccaacattncgaagcccggggagcattaaaagtgtaaaagccntgggggtggcctaaattggagtgagcctaacttnncattaaattggnnttggggctananngcccggttttccnanccggggaaaanttngctngccaacnttncatttaatnaantcgggncaaaccccccggggnnnnggncggntttgggnttttggggcgctttttcccncttncttnnctaaaanaaactccntggccnttgggttttttggng

SEQ ID NO: 6564 - DNA, 1084 bp, Homo sapiens
  misc_feature 3, 4, 6, 7, 9, 13, 15, 16, 17, 21, 24, 25, 27, 40, 41, 42,43, 44, 46, 53, 54, 55, 58, 63, 65, 73, 77, 78, 82, 83,86, 87, 88, 90, 92, 93, 95, 97, 101, 105, 107, 108, 109,111, 124, 137, 139, 140, 141, 168, 176, 191, 201, 202, 289: n = A,T,C or G
  misc_feature 388, 445, 456, 464, 468, 481, 495, 513, 515, 540, 551, 568,580, 581, 598, 607, 614, 629, 635, 639, 647, 649, 653, 659,671, 675, 706, 713, 718, 719, 725, 729, 748, 751, 752, 762,766, 833, 850, 865, 873, 882, 884, 886, 892, 900, 903: n = A,T,C or G
  misc_feature 904, 914, 923, 930, 935, 938, 945, 949, 951, 952, 957, 973,974, 981, 989, 991, 996, 999, 1000, 1012, 1013, 1020, 1027,1034, 1041, 1042, 1044, 1049, 1050, 1052, 1062, 1066, 1067,1068: n = A,T,C or G
canncnntntccntnnngacnttnnantatattatcattnnnnntntttcatnnnaantatantntcgtgatnattnnattnnttnnncngnnangnggtnagantnnnanactctactatttncttactggggggngnnntggagctccaccgcggtggcggccgangtacacangtagtttgtcagacnggggtaaaannagaatacttcacacacgtttcaacaccatacaaggcattattcttcacacagtaacatctaatgtcgttcttttatttttgaaacancaggaaaagagccctttcccttcagaggaaaataaaaactttatctgttgcttaagccaaactccaggggaggaaggtgtagtcctctggggaaagtanaggggatggggatgtattgggaggaagaatgggaccgcccctttcataagcaccttnagggagggaanggaatttngcanggagggtttcttngggggaccaagtcnacaccaagcttttctccngnatccctttggccccccttttttccnttcaccttgcnaccaacttggtgttaancccgggccgttnnaacaaccattggggggnaccttttgnccccccnccgttaaccctttgnctcccngggnccggggcncnggtnttcttnaaaaaaccttangttngggaaatacccccccccggggccttggcaangggaaantttcnngaatanttcnaaaagcccttttatttcgnaannccccggtccngaancctttcgcaagggggggggggggcccccggggtaaccccccaagatttattatggttcccccttttnaagtgggaagggggttnaaatttggccccccncttttggnccgttaaantnanttgggntcaattanccnngtattttccntggtgtggnaaaaaanttgtnttntttcccncttnanncaaantttcccccacacaaannatttccnaaatcccngnggganggnntttaaaatgtgnntaaaaanccccccnggggggntggcccnnanattgnngntggaagcctnaacnnncacaaatttaaatttc

SEQ ID NO: 6565 - DNA, 711 bp, Homo sapiens
  misc_feature 4, 9, 19, 22, 25, 27, 29, 319, 336, 343, 370, 371, 382, 440,451, 454, 472, 474, 478, 489, 498, 501, 509, 512, 513, 517,519, 527, 529, 530, 531, 534, 543, 567, 576, 592, 594, 595,599, 613, 614, 615, 616, 626, 632, 635, 636, 637: n = A,T,C or G
  misc_feature 642, 652, 655, 657, 659, 680, 682, 691, 693, 697, 707, 709: n = A,T,C or G
gtgnccgcntctcctactnctntangncnaattggagctccccgcggtggcggccgaggtacaacaaataaccccaacactcagtagctaaaacaatgaacatttattatctcatagtttctgcaggacagttatctggaagacttagctggttagttatggtttaggatctttcaaaaagctactgctgtgtcagccacagctgcagtcatcaaggctcaactaggaaaggatcagcttccaagctcactcatgtgcctgttaccattcatgtgggcctcgctgaaggaatgcctttggcagctggcttctcccagantgaatgatccaagacanagcaatngagaacacccaaaatggaagctacagnntttgttgttgntgttgttgttgaagttgtagttgttttggacaaagtctcacttttgcggcccaggctngtagtgtggtngtntaaacacagcttacttgngngctnttaccacctgngctcaagcnatncttccccnctnnagcntnccgaggtngnnnaanaccacaggnaccctgcccttggacgggcggtcnaaaaactcngtggatcccccgggcntnnaatnaaattccgattttnnnntttttttttntccttngannntctangggggggggnccntntncccatacttttttttcccttntnatttaaggnanaaanttggcccccntncg

SEQ ID NO: 6566 - DNA, 841 bp, Homo sapiens
  misc_feature 2, 4, 5, 6, 7, 9, 13, 14, 20, 21, 22, 29, 30, 34, 39, 40,42, 45, 49, 52, 53, 54, 55, 56, 59, 60, 62, 63, 69, 70,73, 74, 76, 78, 85, 86, 89, 92, 93, 102, 103, 115, 116,118, 142, 153, 167, 175, 191, 211, 222, 249, 308, 323, 369,450: n = A,T,C or G
  misc_feature 462, 481, 521, 545, 547, 550, 554, 575, 578, 584, 592, 597,610, 625, 627, 636, 643, 644, 661, 662, 665, 670, 671, 674,676, 693, 694, 716, 727, 730, 731, 742, 750, 760, 761, 771,775, 778, 783, 786, 792, 795, 809, 818, 822, 823, 824: n = A,T,C or G
  misc_feature 825, 826, 833, 835, 836: n = A,T,C or G
cncnnnngngatnncttatnnnatcttgnntatntgatnntncanaaancannnnnagnnannatcttnncannantnccccagnnggnttnntgcctttgnnacaccatcggcnnanggactccaccgtggaggcggccgnccgggcaggtncgcgggccagggcncggtggcncgagcctgtagtcctnagccttcccaaagtgctagnattacccgggnggtgagccacctgtgcatggcttccanctctccttcttagaatagtggggtatagtctgcacaacaggaaccatggcggggaatanacactttcccatagncaaatagcatacctgactctctgtgctaatattgcacatttgttanaacaatgaatgaattggatggatgggatggatggattgaatgaaatgaaacatatactactgattattttattccagagtnctcaaaatattngctgcctgatattttgagngctgactgggaattacttttggattaggataaaacaactngggaaataatgctgcttgaaaaangntcntaantaaaatgtgtttttttgcccnatngccccngaattttntaacnactagggaggttnccctcggcccccttntnacaaacttnggtgggnncccccccggggctgcgnnggnaaatnnccntnattccaagcttttatgnngctgcccggtccccccttagangggggggggcnccnntccccccagcnttatgggncccccctttnngggggggggnaaantanggctncgncttagngcntaaaatgattgggnaaaaaaagnttgnnnnncctgggnannaaaat

SEQ ID NO: 6567 - DNA, 694 bp, Homo sapiens
  misc_feature 207, 216, 244, 281, 282, 287, 324, 362, 368, 378, 386, 485,499, 509, 512, 521, 524, 535, 582, 583, 585, 587, 589, 591,603, 609, 612, 613, 615, 621, 627, 629, 632, 633, 644, 645,646, 653, 657, 658, 662, 666, 667, 671, 673, 675, 680: n = A,T,C or G
  misc_feature 682, 686, 687, 692: n = A,T,C or G
cactactatagggcgaattggagctccaccgcggtggcggccggggggacctcctcgtccaaagaagggaagaccttgtcggcaccattgagaggcgtgttctcttctggctgccgctcgagcaccgagagctccagctcgtctactggctgtgagggttgggccaggtccatgtgccggtagggaaagtctccccgcgtaccttgnccgggcggncgctctagaactagttggatcccccggnctgcatgaattcgatatcaaagcttatcgataccgannacctngagggggggcccggtacccaacttttgttccctttanttgagggtaattgcgccgcttggccgtaaatcatggtnataagntgtttcctgngtgaaaantgttatccgctcacaattccacacaacatacgagccgggagcataaagtgttaagcctggggtgcctaatgagtgagctaactcacattaattggcgtngcctcactggcccnctttccaaantcnggaaacctntcntgcccacctgnaattaaatgaaatttgccaaaaccccccggggagaagggggttttgnnantngngncctttttttccntttccntannanaaaatnacctcntngcnntgggggttttnnntttgggnaaanngggnttcnntttncntnaaagngngggnntttcncc

SEQ ID NO: 6568 - DNA, 768 bp, Homo sapiens
  misc_feature 2, 3, 4, 6, 8, 10, 11, 14, 17, 18, 19, 21, 23, 26, 27, 31,34, 38, 39, 40, 41, 42, 47, 55, 57, 58, 59, 60, 62, 63,64, 72, 73, 74, 76, 77, 78, 79, 80, 81, 84, 86, 88, 89,95, 101, 102, 103, 104, 105, 109, 226, 241, 657, 679, 700,713: n = A,T,C or G
  misc_feature 721: n = A,T,C or G
tnnncngntnntgntannnantntanntttntantttnnnnnctttnattttttntnnnncnnnttaataannnannnnnnagnangnngttaanactttnnnnncccncactatatggcgaattggactccaccgcggtggcggccggcgggaggctgacgagagccgggaggcgttagccgaaggaagagaaaaaccgaagacgaagccactacagcgtcgcancgcggcagcggcgtntgctttataggagagggcgcaggcccccgcgtacctcggccgctctagaactagtggatcccccgggctgcaggaattccgatatcaagcttatcgataccgtcgacctcgagggggggcccggtacccagcttttgttccctttagtgagggttaattgcgcgcttggcgtaatcatggtcatagctgtattcctgtgtgaaatttgttatccgctcacaattccacacaacatacgagccgggagcataaagtgtaaagcctggggtgcctaatgagtgagctaactcacattaaattgcgttgcgctcactgcccgctttccagtcgggaaacctgtcgtgccagctgcattaatgaatcggccaacgcgcggggagaggcgggtttgcgtattgggcgctcttcccgctttnctcggctcactgactcgcttgngctcgggtcgttttggctgcnggcgagccggtantcaagctnaacttcaaaaggcgggtaataacggtttattccaccagaaattcagg

SEQ ID NO: 6569 - DNA, 792 bp, Homo sapiens
  misc_feature 3, 6, 7, 12, 13, 27, 29, 30, 31, 37, 39, 43, 52, 53, 60,63, 65, 68, 72, 75, 78, 83, 84, 85, 95, 97, 98, 99, 101,104, 105, 139, 151, 408, 410, 434, 443, 463, 465, 564, 635,651, 669, 678, 681, 705, 746, 758, 792: n = A,T,C or G
ccnccnncgttnnaatttctttatctngnnntttttntntttntggatcatnnttattgnttntntantttnacnccnaaccnnntgtggtcatncnnncntanncgactcactatagggcgaattggagctccaccgnggtggcggccgnccgggcaggtactttaggagacccaggcgggcagattgcctgaggtcaggagtttgagaccagcctggctaacatggtgaaaccctgtctctactaaaaatacaaaaattagccgggcatggtggctcacgcctgtagtcccaactgcttgggaggttgaggcaagagaatcgcttgaacccagggaggtggaggttgcagtgagccgagatcgcgccactgcactccagcatgggccgacagagcaagactccatntnaaaataaagaaagaaagaaacaanagaaaaganaaagcttatattgaacttcntntaaaaaaagaaaaaaaaagaaagcctgatgcacacaaattctaaattttggcaaggtcgatcaatttaaagggatatttatttgcatcaccaaaaatanattcttttactccccccaaaaaattaaataaaaaaggtttcaaaataggcaacctttttccttaaatggtngttttaaaatggtaanccaccaaattacatgtgntccccaacnttntttccaagttataattctattggngtaaaggtgaggtattcctgaaagtgaagcaataaagagantttgagctttanaccctgcctgggagaagagcgtgttttttttttn

SEQ ID NO: 6570 - DNA, 850 bp, Homo sapiens
  misc_feature 466, 468, 478, 501, 551, 562, 631, 670, 674, 681, 684, 686,688, 692, 702, 704, 713, 718, 719, 736, 738, 744, 745, 752,764, 768, 771, 773, 785, 794, 796, 799, 808, 818, 825, 831,834, 837, 842, 846: n = A,T,C or G
gaattggagctccccgcggtggcggccgcccgggcaggtacttaagccaatttctttgaataatttttttttttacatttttattttaaaaatgagacagagactgggcgcggtggctcacgcctgtaatcccagcactttgggaggctgaggcaggcgcatcacttgaggtcaggagtttgagaccagcctggccggcatggtgaaggcctgtctctactaaagatacaaaaaaaaaaaaattggctgggcatggtggtgcatgcctgtggtctgattctcctgcttcagcccctggagtggctgggactgcaggcacacaccaccttgcctggctatttaagctaatttcttttggcactctgtagcctcccacattcagttcctcacatttattttacctataatttcttctaccaattctcctgtattttcccttttcttttgctttcctgttctctggggngncttcctttgnctctctttgcctcctcttgcctnccctatcttttttttcttttagggtgggtttcctttttttccctttaggnttttcccttangtctttcatgggcgttggctttgccctcactaacaagttaacataaaagacgtatttctgtttctttgnacctcggccgctctaaaaatagtgggatccccccggctngcangaaattnganantnaaancttatcggananccgtccgancctcnnaaggggggggccccggnancccaanntttttgnttccctttaaangaanggntnaattgggggggnttggccccnanccnacggccaanagcgggtttnctggggngaaaantgntantcccnctancaaa

SEQ ID NO: 6571 - DNA, 1189 bp, Homo sapiens
  misc_feature 15, 16, 17, 19, 20, 25, 27, 29, 30, 40, 41, 44, 46, 49, 51,52, 56, 57, 58, 61, 65, 66, 68, 69, 70, 71, 76, 77, 84,87, 91, 92, 93, 106, 110, 111, 135, 138, 141, 147, 159,259, 527, 581, 591, 601, 609, 615, 617, 620, 627, 630, 640: n = A,T,C or G
  misc_feature 643, 649, 651, 652, 679, 697, 701, 718, 730, 739, 748, 766,767, 774, 788, 802, 807, 814, 821, 832, 840, 857, 862, 883,897, 907, 913, 914, 918, 922, 926, 933, 934, 940, 965, 971,972, 983, 986, 989, 992, 995, 1008, 1012, 1013, 1017: n = A,T,C or G
  misc_feature 1032, 1046, 1050, 1051, 1054, 1067, 1069, 1073, 1090, 1095,1100, 1101, 1107, 1108, 1114, 1115, 1121, 1122, 1123, 1124,1125, 1128, 1130, 1147, 1148, 1149, 1151, 1157, 1162, 1165,1172, 1174, 1180, 1181: n = A,T,C or G
ataatacggattttnnntnntattngntnnttttatcaannccntntantnnttannnttncttnnannnnttttnntttttcnttntctnnntttatgggggttnactnnctttcaacttattactatttgganctncancgcttntggcggccggcngggcaggtactggaaacaattcttttttggatttaaccttcctctactttccttatatttttcactaaaataaatgaataaatagacataaataaatgantaaatgtaggaagaaggtcatatttcaacactaattttagtaatgctttacataggagctcttataaaatatttacttaaaatttcacaatttactagatgtagtcatatagatctaacacagcgcttagagacaaacttttattggggccttaatggatttataggaatataaaggttatacaaccaagaacagggatgtcaccaaaaaagagttcaccttggtcccggctgcctgccagggaccattcttcaccaagggcaattgnttttggctttttggggtaaaggtttccacccaatggatccccagggggccaatnggccctttanaattctccangaagggtnctttancnaanccccgantcnttggccccantgntctttnannaaatttccaattcggaaaaattttcangggaacggtggaaaaatncggnggccttggaatttaccnttccattaaagnaacctttanaaaaaaagnccccaaactttttcccannggtttcnaggggaaccacccnaggaaaaaagcccnggggnttagccnatttggnaaaaataaaanacttttcntttggtttttttcaccnggggnggaaacctattttatttatgnaaatggcccccaangggaaaaatngggaanntccntacntggncaaattnnccctcnaaaagaaacttggttttagggggtnggggannaaaaattaaanttnccnctnacnttcttcccggaangganngaanggttgcccacctttnatggccccggcttngttnncangaaggaaggcttncngaangggttaaaaagatcccnccgtnccctnngggccnnttcttnnaaactnnnnnggngntcccccccggggccttnnncnggaaanttttntanttcccancncttttnnggataccg

SEQ ID NO: 6572 - DNA, 921 bp, Homo sapiens
  misc_feature 469, 474, 522, 525, 549, 557, 574, 576, 583, 586, 603, 622,624, 633, 637, 639, 640, 654, 661, 685, 688, 689, 703, 709,743, 746, 747, 749, 750, 753, 760, 761, 765, 778, 779, 780,783, 784, 787, 793, 801, 804, 805, 814, 818, 819, 822: n = A,T,C or G
  misc_feature 829, 834, 835, 841, 847, 849, 858, 862, 863, 868, 873, 874,878, 882, 887, 901, 902, 905, 907: n = A,T,C or G
tccaccgcggtggcggccgcccgggcaggtactttaggagacccaggcgggcagattgcctgaggtcaggagtttgagaccagcctggctaacatggtgaaaccctgtctctactaaaaatacaaaaattagccgggcatggtggctcacgcctgtagtcccaactgcttgggaggttgaggcaagagaatcgcttgaacccaggaggtggaggttgcagtgagccgagatcgcgccactgcactccagcatgggcgacagagcaagaccccatctcaaaataaagaaagaaagaaacaaagaaaagaaaagcttatattgaacttctctaaaaaaagaaaaaaaagaaagcctgatgcacacaaatctaaatttggcaagtcgatcaattaaaggatattttattttgcatcacaaaataatttctttactcccccccaaaaaatcaataaaaaaagtttcaaaatangcaancttttcctaaatggtggttttaaaaaatggtaaattcaaccaaaatancantggtgtcccccaaccttcttttcnaggtttantaaattcctaatttggngntaaaggnggngggtataccctgaaagntgaggggcaaattaagaanantttggagcntttnannaccttgcctgggangagaagnggtggttcctttctttagaagttntgnngggaaatgggtttnggggcncaaaaaatctttttaaatcttttttttttttttnccnncnnccncggggcnntttntttttctttgggnnnaannggntttttngggaaaanttnntttaacctngggnnctntgggcgnctttnnaaaacnaggggntnccccccggnctgnnggggnatttnntttntagnctttntggtattcccgccnnccntnggggggggggggcc

SEQ ID NO: 6573 - DNA, 1182 bp, Homo sapiens
  misc_feature 1, 4, 9, 10, 11, 26, 27, 28, 33, 37, 39, 41, 42, 46, 48,50, 51, 53, 54, 55, 58, 60, 65, 66, 67, 74, 77, 85, 87,88, 93, 116, 319, 375, 420, 437, 471, 531, 534, 543, 566,568, 581, 623, 652, 676, 686, 688, 694, 723, 741, 743, 749: n = A,T,C or G
  misc_feature 770, 793, 802, 824, 826, 829, 834, 861, 877, 905, 907, 908,910, 911, 912, 923, 938, 940, 948, 954, 955, 956, 961, 964,972, 986, 997, 1015, 1027, 1040, 1055, 1056, 1062, 1069,1071, 1074, 1083, 1093, 1097, 1102, 1105, 1114, 1115: n = A,T,C or G
  misc_feature 1118, 1128, 1151, 1156, 1165, 1166, 1168, 1181: n = A,T,C or G
ntcnttttnnngatgtttattaatannntattntttnanannttcntnannannngangngtcgnnntattaanttnttttaaantnnttgtnttctcattctactcctattgggntaattggagctccaccgcggtggcggccgcccgggcaggtactttaggagacccaggcgggcagattgcctgaggtcaggagtttgagaccagcctggctaacatggtgaaaccctgtctctactaaaaatacaaaaattagccgggcatggtggctcacgcctgtagtcccaactgcttgggaggttgaggcaagagaatcncttgaacccaggaggtggaggttgcagtgagccgagatcgcaccactgcactccancatgggccgacagagcaagactccatctttaaaataaagtaaagnaaaggaaacaaaggaanaagaaaagccttatattgaacctttctctaaaanagaaggaaaaaaaaagaaagccctggaatgcacacaaattctaaattttggccaaggtcngantcaaattanaaggggattatttttaattttgncnttcaaccaaaaantaaatttctttttaccttccccccccaaaaagattcaaattnaaaaaaagttttcaaaaattagccaaccnttttttccctaaatggtggttttnaaaaaattgntnaattcnaccccaaaattaccattgttgttcccccnaaacctttcttttttccnangtttantaaatttcctaattggggggnaaaaaggtaggagggttatttanccttgtaangttgggaaggccaaattaaagnantanttttnaagccttttcaagaaacccttggcccntggaaaaaaagaaccnttgttttccttttcttttaaaaaatccntnnannnggaaaaaatgnggttttggggggggncnccaaaaanttactnnntcaanacntttttttntttttttccccctnaataccccggngggcccttttaatttttnttgggggccaanactggcttttttngggtaaaaaattttnnttaaancctgggntnccnccggccgcntttttaaaantacntgggnttncccccgggnnttngggggatttnttatttttaaggttttttttatntcccntttcccccnntnggggggggggggnc

SEQ ID NO: 6574 - DNA, 1164 bp, Homo sapiens
  misc_feature 2, 4, 5, 7, 9, 10, 12, 13, 16, 21, 22, 24, 25, 26, 27, 28,30, 32, 33, 35, 36, 39, 40, 41, 43, 44, 45, 46, 48, 49,50, 53, 54, 55, 59, 60, 65, 66, 70, 71, 73, 78, 81, 83,84, 85, 88, 90, 101, 110, 111, 112, 124, 128, 172, 220,301: n = A,T,C or G
  misc_feature 355, 374, 392, 414, 431, 497, 509, 530, 533, 572, 573, 584,586, 600, 610, 621, 629, 632, 647, 650, 658, 660, 678, 680,685, 705, 707, 712, 723, 726, 749, 751, 761, 768, 769, 771,784, 790, 798, 803, 816, 818, 857, 863, 879, 880, 887: n = A,T,C or G
  misc_feature 891, 913, 919, 930, 940, 947, 950, 951, 957, 966, 969, 982,984, 988, 990, 996, 1017, 1027, 1032, 1035, 1043, 1050,1061, 1062, 1065, 1081, 1084, 1088, 1095, 1096, 1108, 1109,1111, 1112, 1124, 1125, 1129, 1133, 1135, 1136, 1143, 1153: n = A,T,C or G
  misc_feature 1157, 1158, 1159, 1160: n = A,T,C or G
cncnntntnntnnttnttttnntnnnnntnanntnnttnnntnnnncnnnatnnnttcnnatttnntatnntntgggnttncnnnttntntcaaaaggggnggtttggcnnntcctcactatanggcnaattggagctccaccgcggtggcgccgcccgggcaggtactttnttttttttttttttttttttgagtaatattagagtcactgacaatganaaaaatggaacagtggatttaaaacatgaaatggcccattaaatgggtcctgaacttgttttaaaactccagataatatancttggctgtttcttgtctttccaaaaatgtcaaaatttgtctaggattaatggntctctaaatcaataggatnttcatgtttataaaatgngtttaccggttccactggtttntaaaatgttatggagcncatgcattattcattcaacgcctgagcccttttactgaaaattttactgaccatttaagtctggcntccaggacccanaccatgggaagggaggacaanagncgggaatcctttccaagggcctgggccccaaaaacgcannaggtccccaangnagggtacaggggtngagttggggnaaagggggaancccaaaanctncctccaattgccagnggnatccattnancagaaaaaaaaccgattncnatggnaccccgggggggtcccctantncccangccttgcccanagnccaaaccccttgttttgggaacntnccaaagtttnaggaaannantcaaaaattggtnggcccnttttttcnaaaanaaccatttgggangnaccaaaaaaggggccttcttaaaaccaaagtttggaccnagccanattttttttccgggannaaaattncttnttaaaagaaaaataaacattangttttnaaaaaaaattnattttttttnaaccacnccnntctttnttaaatggncanaaacaattttttncnctgncnttgggncaaaaattgttgcctttcccncatttgggcnttttnggnttttgccnccccctnggggctttggnngtngaatggggaaattttnacntttntgggggnnggggcttttacnngnnaccccttccccnncccntttntnnccaaaanaaaacctggngggnnnngggg

SEQ ID NO: 6575 - DNA, 954 bp, Homo sapiens
  misc_feature 17, 62, 119, 245, 279, 353, 356, 360, 371, 394, 400, 415,423, 438, 447, 454, 461, 465, 466, 467, 482, 484, 492, 530,533, 544, 550, 553, 557, 574, 583, 585, 596, 627, 628, 629,638, 643, 645, 650, 651, 659, 668, 669, 670, 677, 678: n = A,T,C or G
  misc_feature 681, 683, 688, 689, 692, 694, 699, 701, 707, 708, 713, 717,726, 732, 733, 735, 738, 743, 744, 745, 754, 756, 757, 767,768, 769, 782, 783, 786, 803, 804, 807, 809, 812, 813, 822,823, 828, 829, 836, 838, 843, 846, 851, 862, 863, 870: n = A,T,C or G
  misc_feature 871, 873, 879, 883, 893, 896, 897, 898, 899, 903, 909, 911,912, 913, 920, 923, 925, 926, 928, 934, 936, 940, 941, 943,945, 946, 949, 951: n = A,T,C or G
ttggagctccaccgcgntggcggccgaggtacttatttttttttttttttttttttttcccngaatcgggttttacaatgaatgttaacttgcaccaggaggctaccttgggcccccanagccttcttaaaaccctggcaccctgccaggggagctccaactttgcagcccaaaaaaagtcatgttggcagcttatcaggagccagggagttacatggcgccctgggggtaataatattttccanaacgctcaagctaatagtcccatgaatgggcgantgaaaggactgcaggtatgctcttccttgtcctcagccttggaagtctcatccatctttgcaaagggccacatnaanactntgcttgacctntaatgggcaaaaatttggggganacttgnctttttgttttcacnttaccctnactgccagacagaanttgttatantttcaangcccaangttnnngctttttacttattnancgggggcnttttgaatttccatttttttttaaaaaaaaaaaaaaantcntggcaatattnaaaccnttnagangggcaatttttgggccncttgaaccncnattttttttanttttcttttttttttaaaaaacaaccccccnnnaattttgtnttttncnttaannaaaccctngccccgggnnngggccgnnttntnaaaanntangngggantncccccnngggcnttgngggaaattngaaatnntnaangcttnnnttatatacncnntccaaccccnnngggggggggggcnnggnccccaaaattttttttnnccntntgnnggggggggnnaaaanngcccccntngggcnatnatagngggaacaaaannatgtttnngntggggnaaanaattgtttantgnnnntaanattatncnnnaaaaaanatngnntngggggngntatnntntnntantnccg

SEQ ID NO: 6576 - DNA, 1187 bp, Homo sapiens
  misc_feature 8, 10, 11, 13, 14, 15, 17, 18, 21, 23, 30, 31, 33, 35, 38,39, 43, 44, 49, 52, 54, 56, 57, 60, 67, 68, 76, 78, 82,85, 88, 90, 97, 102, 106, 128, 352, 363, 440, 462, 469,493, 499, 518, 542, 583, 611, 621, 659, 678, 684, 696, 702: n = A,T,C or G
  misc_feature 712, 720, 726, 740, 743, 745, 758, 766, 767, 777, 780, 801,834, 838, 848, 856, 867, 868, 869, 871, 873, 877, 878, 881,882, 885, 888, 903, 909, 913, 914, 929, 932, 933, 936, 938,950, 956, 957, 958, 960, 968, 974, 975, 978, 984, 986: n = A,T,C or G
  misc_feature 990, 991, 996, 998, 1007, 1008, 1012, 1023, 1024, 1025, 1026,1031, 1038, 1042, 1043, 1054, 1055, 1058, 1059, 1068, 1072,1078, 1079, 1080, 1081, 1088, 1093, 1099, 1100, 1102, 1104,1108, 1127, 1131, 1141, 1143, 1146, 1148, 1152, 1155: n = A,T,C or G
  misc_feature 1156, 1157, 1163, 1164, 1176: n = A,T,C or G
actatgtnannannntnnaanancgatgcnntnanaannacgnncattncgntnannttntcgactnnatattatnanatantanatnanagtattnattcnttgnaaaccctcatattgggcgaatnggagctccaccgcggtggcggccgcccgggcaggtactttatgagacccaggcgggcagattgcctgaggtcaggagtttgagaccagcccggctaacatggtgaaaccctgtctctactaaaaatacaaaaattagccggcatggtggctcacgcctgtagtcccaactgcttgggaggttgaggcaagagaatcgcttgaacccaggaggtggaggttgcantgtagccgagnatcgcgccactgcactccagcatgggcgacagagcaagactccatcttcaaaataacagtaaagaaaggaaaacaanagaaaagaaaaagcttatattnaaccttnttttaaaaaaagaaaaaaataagnaaaggnctggatgcaccaccaaaantcttaaaatttggcaaggttcgantcaaatttaaaaggatattttttattttggcattcaaccanaaaattaaatttctttttaccctccccncccaaaaaantccaaattaaaaaaaaggtttcaaaagtaagccaaaanctttttctctaaaatggangttttnaaaaaaatggtnaaattncaacccaacnattaccanttgttnatcccccccaaacnttncntttttcccagatnatttaaanntttctaattnggnggaaaaaaggcggaggggaantaacccttgaaatgttgaaggggaaaattaaanaagnaggtttgtanaccttttnagaaacccttnnncnantgannaannaanccnttgtttcattttttnttaacnaagnntcatgaagggaaaanggnnttngngggggtcaaccnaaaatnnncnttcaaaancctttnnttncatttntncccnnaaatncnggagacctnnttanattttgatggnnnncaaanccgggcntttnnttggggaaaannttnntgttcaacntggngaaccnnnnggaccgnttatnaaaaannantngggnatcccccgatcatggtagngaantttccgttantnaanancttnatnnntacccnngtctacctccanggggggggggg

SEQ ID NO: 6577 - DNA, 1225 bp, Homo sapiens
  misc_feature 4, 7, 13, 14, 15, 16, 22, 23, 30, 33, 50, 51, 53, 54, 59,68, 71, 90, 93, 99, 101, 106, 107, 113, 120, 130, 171, 180,364, 384, 398, 437, 440, 445, 462, 476, 490, 495, 527, 543,545, 547, 565, 584, 675, 684, 721, 726, 735, 758, 769: n = A,T,C or G
  misc_feature 775, 777, 778, 779, 787, 791, 801, 821, 849, 871, 876, 878,889, 890, 904, 915, 928, 933, 939, 942, 943, 950, 951, 956,968, 977, 989, 992, 998, 1000, 1006, 1007, 1021, 1028, 1030,1031, 1032, 1033, 1038, 1050, 1052, 1057, 1059, 1061: n = A,T,C or G
  misc_feature 1065, 1072, 1073, 1075, 1086, 1090, 1096, 1099, 1104, 1108,1111, 1112, 1145, 1146, 1152, 1153, 1158, 1161, 1167, 1176,1183, 1184, 1186, 1190, 1193, 1202, 1204, 1207, 1211, 1214,1216, 1224: n = A,T,C or G
ttanctnaaaatnnnnatgttnnaatgtanttnataattaaatccctatnncnngattntgatattanttntttatttatttaatatttnagntaggtnancttanntttatnggggagncgctataggncgaattggagctccaccgcggtggcggccgaggtactttangagacccangcgggcagattgcctgaggtcaggagtttgagaccagcctggctaacatggtgaaaccctgtctctactaaaaatacaaaaattagccgggcatggtggctcacgcctgtagtcccaactgcttgggaggtttgaggcaagagaatcgcttgaacccaggaggtggaggttgcagtgagccganatcgcgccactgcactccangcatgggcgacagnagcaagactccatctcaaaataaaggaaaggaaagtaancanagaanaaggaaaaagctttatnattggaacttcttnttaaaaaaaagganaaaanaaagaaaaggccttggatgcacacaaaattcntaaaattttgggcaangntngaattcaaattttataangggaatatttttatttttngcaatccaccaaaaaattaaattttcttttaactttctccccccccaaaaaaattacaaaataaaaaaaaaggttttcaaaaattaaggcncaacctttntttcccttaattggtggtttttaaaaaaatgtttaanttcancccataaanttaccattgtttgtttccccccnaaacctttttntttttncnnngttgttantaanaatttcttantttggttgttaaaaagtggnagggttaattacccttgaaaagttgganggaccaaattaaattaagaagntttgntnggccttttaannacccttgcccttgngtaataagaantccattggtctcnttttntttaanaanntcctggnnggaanaattggtttggnggggccccnaaaaatttctcnttncaatcntnttttcnnttttttccctcaantccttgngnnnntttantttttttggggntnataanangntctntttttgnnanaaaatttattntaanaatatngtnaattnttgncgnngttggggggagttttttaaaataataaagaggnntccccnncggcntgntgtggnattttttanttttaannantttnttnttaacaccntntantttnatngnggggggcnc

SEQ ID NO: 6578 - DNA, 942 bp, Homo sapiens
  misc_feature 325, 393, 415, 458, 478, 506, 511, 518, 520, 525, 529, 531,534, 539, 552, 567, 575, 593, 594, 596, 598, 600, 601, 602,603, 608, 613, 618, 625, 631, 633, 635, 641, 643, 644, 645,652, 653, 658, 660, 666, 669, 676, 693, 694, 699, 700: n = A,T,C or G
  misc_feature 703, 705, 707, 714, 715, 719, 721, 722, 725, 726, 736, 737,741, 753, 760, 761, 762, 772, 773, 775, 783, 785, 804, 805,807, 809, 816, 817, 822, 826, 835, 838, 847, 848, 849, 850,853, 854, 855, 856, 857, 863, 868, 869, 872, 875, 876: n = A,T,C or G
  misc_feature 883, 885, 888, 889, 897, 899, 901, 904, 905, 908, 912, 915,921, 923, 930, 937, 940: n = A,T,C or G
ggagctccccgcggtggcggccgaggtacgcggggggcggtggttgggtggtaagatggcggctgtgagtctgcggctcggcgacttggtgtgggggaaactcggccgctctagaactagtggatcccccgggctgcaggaattcgatatcaagcttatcgataccgtcgacctcgagggggggcccggtacccagcttttgttccctttagtgagggttaattgcgcgcttggcgtaatcatggtcataagctgtttcctgtgtgaaattgttatccgctcacaattccacacaacatacgagccgggagcataaagtgtaaangcctggggtgcctaatgagtgagctaactcacattaattgccgttgcgctcactgcccgctttccagncgggaaaccctgtccgtgccancttgcattaaatgaatcggccaacgcgcggggaagaggcggtntggcgtaatatgggcgcctntttcgcttcctacgcataaacttgactngctgngtcttcngngcgtnttcngnctncaggngcagccgttattnaatctcaatccaaangggatggngaattattggcatatttnnananannnnagtgngcatntactnaaagcanattatncntntataancnnncatgggnnaaggnanaatggncanggaaccngtttaaaaaggccccgnntttgnntgnantnttttacnnatangnntanncccccctggnncagnccatttataaanaaatttnnnccttcaaatnnangagggtgngncacaaacccgcacaggganntntncaaatanncacgngcgncttatcccntgngaaacatcnnnntgnnnnntttatntgttnnganccnntaccatnancgnntaccgtgncncncgnnttnaccnatntgggtncngatgtgngattttntanag

SEQ ID NO: 6579 - DNA, 1222 bp, Homo sapiens
  misc_feature 3, 5, 12, 18, 20, 21, 22, 26, 27, 32, 33, 36, 37, 38, 39,40, 48, 49, 50, 53, 54, 55, 59, 62, 64, 65, 70, 80, 81,84, 90, 91, 94, 98, 105, 159, 180, 219, 249, 307, 310, 313,318, 325, 330, 349, 351, 367, 371, 449, 462, 466, 468, 470: n = A,T,C or G
  misc_feature 479, 480, 482, 483, 508, 509, 512, 514, 531, 534, 547, 554,562, 565, 568, 587, 612, 625, 632, 657, 661, 673, 674, 678,698, 699, 703, 706, 711, 714, 717, 718, 720, 721, 726, 731,745, 758, 761, 763, 766, 769, 776, 777, 781, 782, 784: n = A,T,C or G
  misc_feature 785, 790, 796, 801, 806, 808, 811, 813, 815, 836, 839, 840,842, 845, 846, 850, 856, 857, 859, 861, 874, 875, 876, 877,878, 881, 888, 899, 900, 901, 905, 908, 917, 919, 928, 929,934, 937, 941, 943, 944, 953, 960, 962, 968, 971, 980: n = A,T,C or G
  misc_feature 986, 989, 990, 992, 1000, 1002, 1011, 1025, 1026, 1027, 1029,1031, 1033, 1034, 1041, 1043, 1053, 1054, 1061, 1063, 1065,1071, 1083, 1084, 1093, 1101, 1111, 1112, 1116, 1124, 1128,1136, 1138, 1139, 1140, 1147, 1158, 1159, 1160, 1170: n = A,T,C or G
  misc_feature 1174, 1179, 1180, 1183, 1184, 1187, 1189, 1193, 1202, 1215,1217, 1219, 1220: n = A,T,C or G
ccncnatatatntttatntnnnatannccatnntannnnnacttaaannnttnnngatnttntnntattnttatattttnnatnaagatnnggnggtnggttgancacttatataggcgaatcgtagctccaccgcggtggcggccgcccgggcaggtnccaagcaaaacacttgggttntgtcgttgctaaataaagaacccaggaggggctaattanccactttatataaagtaaaagtcacacctntagagcagcttttagggtagctgtgttagccaaggaggtgtttctctttggaggcttntgnganctcantaaatcnacagnttgaggaggaaagtttttnancccttttttctggaanggtnggagatatccctgaactatatgtcggtattgacttgggggtgcaagtcgcaggggaaagatgcctgggtaaaataaanggcacatgttccnctgngntnaaaagcctnnannccctttggggcctgttgaccccacnngancncttaagttgaagggacnagnacactttaatggnttttaanccgccccnaanaanggtttggcaatttttttcncaaaggaaccccacttcctttggcnccttgccccaatnaacttcncccccattcacattttggcctttantttnataaaacccttnntggnggaccccctaaaaaaggggnnaccnccnccaanaanagnngnngcttngggantccggccaattaanggaagccaccaanatngnccnatntaatttnncgcnncnnggtcngagggntttcnccccngnggncncntgggtcccttatatggaaatntgnntnttnncccntccccnnancntgacatttttggnnnnnaangggtcanatttttttttnnngaanaantcccccctngnattttaatnngggcnggncccncnnatggtaaanaaaaacncntttttnccnttttacctncccccnttnnanggggtttntnatatgaatnttaattaaaaaaannncncncnntgtgcanancctttgtttnnaaaaaanantntttttnccccttggtccnnaaaagaaantaaaaatngttgttcttnntttntatataanggtnaaccccangnnnctttctntaaaaaatatnnntgttatcccnccgncctcnnccnnganantttntataattcnatactttctctcncncnncg

SEQ ID NO: 6580 - DNA, 1409 bp, Homo sapiens
  misc_feature 5, 8, 12, 15, 18, 19, 33, 34, 40, 45, 48, 62, 66, 74, 80,83, 86, 88, 92, 93, 97, 103, 108, 113, 116, 117, 119, 126,139, 193, 210, 286, 303, 308, 309, 345, 348, 370, 378, 381,382, 385, 394, 423, 426, 432, 446, 452, 455, 457, 459: n = A,T,C or G
  misc_feature 465, 477, 478, 484, 493, 496, 499, 504, 517, 518, 524, 527,528, 529, 533, 544, 548, 571, 581, 583, 584, 597, 599, 609,610, 619, 621, 622, 623, 631, 632, 638, 639, 640, 642, 654,656, 668, 670, 673, 679, 681, 682, 685, 690, 691, 692: n = A,T,C or G
  misc_feature 706, 711, 714, 715, 725, 727, 731, 735, 746, 761, 770, 771,776, 785, 787, 793, 796, 799, 800, 805, 810, 812, 813, 814,821, 830, 831, 832, 836, 840, 849, 852, 859, 867, 868, 870,876, 877, 886, 887, 888, 889, 894, 903, 906, 908, 910: n = A,T,C or G
  misc_feature 912, 915, 920, 933, 940, 948, 951, 952, 956, 965, 970, 977,979, 980, 982, 984, 994, 999, 1005, 1006, 1010, 1013, 1021,1022, 1025, 1027, 1028, 1029, 1031, 1036, 1041, 1043, 1044,1046, 1048, 1049, 1057, 1062, 1065, 1069, 1071, 1074: n = A,T,C or G
  misc_feature 1078, 1080, 1086, 1094, 1097, 1100, 1103, 1106, 1118, 1125,1133, 1135, 1136, 1138, 1141, 1142, 1143, 1148, 1151, 1152,1154, 1166, 1171, 1176, 1182, 1187, 1191, 1193, 1194, 1198,1199, 1202, 1205, 1213, 1214, 1218, 1222, 1232, 1234: n = A,T,C or G
  misc_feature 1237, 1239, 1240, 1242-1244, 1246, 1254, 1255, 1257,1264-1266, 1270-1272, 1278, 1282, 1283, 1287, 1300, 1311-1313,1317, 1324, 1326, 1327, 1331, 1332, 1337-1340, 1341, 1343, 1345,1357, 1360, 1362, 1369, 1372, 1376, 1379, 1385, 1387, 1389: n = A,T,C or G
  misc_feature 1393, 1401, 1404, 1405, 1409: n = A,T,C or G
atgtnacncatntangtnnatatatatatttanntacacncattntcncgtatatacatacntatncatatttncatgtntanttntnatanntagngtacgngttgnacgcntanncncattcantatagggcgaatnggtagctccacccgcggtggcggccgaggtacaggtcatggtaagtagacacanaaccacactgctgaggncttctaaagtgccttccttttcttcacagcctggcttagcaggtagatcaaatcgaatggtgggggggaggaggantacaactccttataaantggcnntacaactagggttaactatggactattgtgtccatntgncgaagcttcttaccactgctanatttcttnatnngcntatacacgnactcttaaaataagaaataaatagttgantancacttntagcatctaagatntgcacnatntnangtgtgncttcgcacaaannggttanaaacacggnttnttntttanagacactatatgnncatganacnnngatntgagataaacnagcnccacttcgcattacatatcgtgnggcttaaaanannaaatatgtaattntnaaaaaacgcnnatgattttngnnnaagaaatnntgggannntngacatgataagncncccagaaaattntnatngccctnannttngcacnnngggcacacttgccntaatntanngaatttaaananttgncacncgcttgacccntcattaaccagtctnttcaacccnntttangctttgtanantatgcnttnccnnatggnaggantnnntaacacnaggatcttnnngacntgcngaagttctnttntttcacntgtgacanntnttatanntacaccttnnnnggttntaatttatnacnancnanccnttgtngaaaaattccctntttaacnccctaagnggnncagnaaactcgcnattcnccttatntnnantncccttacttngtaancccctnnttgntantttaaaannccncnnncnaaaanatttngnntnanngaattaanaattngtngaantnttncccntngaattnaatacacnaanatntgntanggaaaagaaaantcaattntttttctntnnanatnnnaatantcnntntcgctcccattnaatantagantccctnttctnccgntnnaagnnacnctngcggcccnnactnctcncgtttttaantnatntnntnnntnttttttgnngngtatttnnnagcnnntgacantaannaaancctttttgttctnataatcattannncctnatcatgngnngggnntgttnnnnncncnacatttattcantcncnttttcantcntagnatnaaattntntntccntcatctgnaanncttn

SEQ ID NO: 6581 - DNA, 1206 bp, Homo sapiens
  misc_feature 2, 6, 8, 9, 11, 13, 14, 15, 16, 18, 19, 22, 24, 25, 26, 28,29, 30, 33, 34, 36, 37, 38, 40, 42, 43, 44, 48, 49, 50,53, 55, 61, 62, 63, 66, 71, 83, 85, 89, 91, 94, 95, 97,99, 101, 104, 105, 112, 116, 338, 439, 464, 497, 526, 629: n = A,T,C or G
  misc_feature 631, 676, 677, 687, 690, 695, 701, 707, 709, 710, 713, 735,749, 751, 757, 759, 760, 761, 785, 793, 794, 795, 802, 811,812, 826, 828, 834, 835, 839, 844, 850, 859, 871, 874, 889,902, 909, 927, 940, 944, 948, 950, 956, 972, 979, 980: n = A,T,C or G
  misc_feature 985, 987, 988, 996, 997, 999, 1001, 1014, 1020, 1032, 1038,1052, 1054, 1059, 1066, 1070, 1073, 1075, 1076, 1082, 1083,1086, 1088, 1096, 1097, 1102, 1106, 1108, 1116, 1117, 1119,1120, 1128, 1143, 1147, 1149, 1151, 1153, 1160, 1166: n = A,T,C or G
  misc_feature 1170, 1171, 1182, 1185, 1190, 1196, 1200, 1203, 1205: n = A,T,C or G
tnatananntntnnnnannttntnnntnnntanntnnntnannnctannntcntnattttnnnttnattangataattatttntntttntnttnngnangngannacttganttcnacttcactatagggcgaattggagctccaccgcggtggcggccgaggtactttaggagacccaggcgggcagattgcctgaggtcaggagtttgagaccagcctggctaacatggtgaaaccctgtctctactaaaaatacaaaaattagccgggcatggtggctcacgcctgtagtcccaactgcttgggaggttgaggcaagagaatcgcttgaacccangaggtggaggttgcagtgagccgagatcgcgccactgcactccagcatggggcgacagagcaagactccatctcaaaataaaggaaagaaaggaaacaaantaaaaaggaaaaaagccttatattngaaccttctctaaaaaaaaaagaaaaaaaaagnaaagccctgatgcaccaccaaaattcttnaattttgggccaagttcggatccaatttaaaggggatatttttattttggcattcacaaaaaataaatttcctttttacctccccccccaaaaaatttccaantnaaaaaaagtttccaaaaattagccaaaccttttttccttaaatgnnggttttatanaantgggnagattncccccnannttnccatggttgttccccccaaaanattttttttttcangntaattnannntcctaatttggggggtaaaaaggnggaagggnnntttaccnttggaaagnnggagggccaattananaaaganntttnaggcntttcanaaacccttngcccctggggangangaagccgtggttttntttttttttaaanaaattcntgtagggggaaaaatggntttgggggggccnccanaaantntcattnttaaatattttttttnttttttnnccctnannaccggggnngncnttaatttttttgntggatnaaaaacatgtgntttttngtgggataattttntntttancttggtnattntcncnngggggnngcncnttaaaaanngaagntggncnccctcgcnngnncttgggantgatttttgttgatntctntnantntgatcgncgtccntccnntatgggggggnggngggcnccaccnaccnctntnc

SEQ ID NO: 6582 - DNA, 1134 bp, Homo sapiens
  misc_feature 2, 3, 4, 8, 9, 18, 23, 26, 30, 31, 34, 36, 37, 38, 39, 43,44, 46, 49, 51, 52, 55, 56, 57, 62, 63, 66, 68, 70, 73,74, 75, 77, 78, 79, 80, 98, 115, 119, 155, 397, 482, 483,513, 544, 620, 631, 689, 712, 715, 747, 749, 761, 770, 772: n = A,T,C or G
  misc_feature 779, 781, 788, 796, 813, 823, 824, 829, 839, 851, 854, 857,883, 898, 902, 930, 938, 939, 940, 944, 960, 967, 972, 974,1003, 1005, 1022, 1025, 1036, 1040, 1045, 1050, 1055, 1058,1072, 1079, 1084, 1088, 1089, 1090, 1094, 1103, 1105: n = A,T,C or G
  misc_feature 1109, 1112, 1116, 1117, 1120, 1125, 1126, 1130, 1132: n = A,T,C or G
tnnnactnncatatttanattanttnatgnntcnannnnattnngnttnanntannnataanntantngngannncnnnnacaagtgagttgtagccntccacccattcatatanggcnaattggagctccaccgcggtggcggccggggtacanaccacagcaccacgtctgctacggggagttcattcccagcgagccaagggctcttcccaagagcagagttcatggagcggaaaacagcggctttttctttactgcttccctcttttaactgaaaaatcgcaatatctacccagctatctataagggttgcgttgacagcattatgcttctggccaaacagagagaacaaggaacgtgcaatgttcccttcgccttcgatggggcacatccgnctgggatgctgaatttcatctgcgtcttcggcacattcttccaaattaaaggtgaaatcccagctgataagtcttgggcgagggnntgtttttttattctgttctccaaaagcacnttgaagaaggttttcagggcaccgcctcttngacccgagggagtgcgtggtgcaccgtgggacagggacccctgaaaggtgcttcacaagaagcaagtccttggtgncagccaacaangcaaggggaagaaaggggggaggggggaggcccccgggtttttgccggttttggattncaccggaatggttcttttttcanacngccccccggtaaaattccctttcccccaaagncnaccttggaaaanttccaaagntncccaagncngcatttncccccggnggttacccttggccccnggggccgggnnccggntttctttagnaaacctaagganggnaantccccccccggggcccttggcaaggngaaatttccgaatanttcnaaggcctttaatccgattaacccggtcngaaccctnnncaangggggggggggccccngggttanccccnanactttttttggtttccccttttaattggnangggttaaaatttggcgnccnctttgggccgnaaantcaantgggncaatnagncttgggtttccctnggggtgnaaaantagnnnaatncccggttcnanaaanttncccnnaanaaaannatancnag

SEQ ID NO: 6583 - DNA, 847 bp, Homo sapiens
  misc_feature 163, 194, 274, 333, 355, 378, 400, 467, 482, 494, 500, 503,508, 513, 516, 528, 536, 540, 560, 571, 575, 583, 593, 608,616, 630, 635, 681, 694, 706, 719, 753, 769, 776, 777, 782,785, 789, 790, 791, 806, 809, 810, 826, 827, 829, 833: n = A,T,C or G
tccaccgcggtggcggccgaggtacttttttttttttttttttttttttttgggctgagtgggatttgcgtggctgcagactgggccccgggcagtcactagcctagaggcttggcagatatgcctgccgcaaattgcaagaattacgccttttcacctcctntgctctcctcccggagccggtgcccaccctntttttcacaaaccgcagggctggggagagggacttaacctttggcctgcctgcctggctgtttggctctgcgcttgctgnttttggtttctttctcttctactggtctttcctttgtctttgccagccacctatgctgntgttttctcctctgcttccctntcccctaggggagggaccggcangagtggagctactgtttttttncctgagaagaaagaaaaggggagttcttgaatatttttcttactactggaggttttgtgtgaggttnaaacccccccaacantagggatttttnaccttnaanacatnctaanggnatacttttaccnccccctgngggntttttctctctttggtttgncccaacccaangaantgcttttnccatcccggntttttcccctaagtncccgaacncccaaaggggaaantaacnttttacccgggcttcctgggggggatttctccttttcctttgggtncttggtgccacangttggtcatttnccattttccttgngggaatcttttaaacttaggttgcttgggccaantttttttttttttttnccccccnnattgnttngaannncccaagttttttttntcnnacacccgggggggggnntnaaanttttttaacttttg

SEQ ID NO: 6584 - DNA, 822 bp, Homo sapiens
  misc_feature 557, 592, 607, 615, 616, 618, 629, 631, 639, 642, 660, 662,663, 664, 668, 676, 682, 683, 693, 697, 699, 707, 717, 721,726, 746, 747, 753, 754, 757, 759, 766, 770, 771, 772, 775,776, 778, 780, 782, 783, 787, 793, 798, 801, 807, 810: n = A,T,C or G
  misc_feature 811, 821: n = A,T,C or G
tactatagggcgaattggagctccaccgcggtggcggccgaggtacaactaaggaggttatttagacctattggcaatccataggaaaataaaataatcaaaaaattgctgcttatcttcagtgaacagaaccacaagattaggactcaaagccatctgaagcactttcatgctggcaacgttaaggaacaacatccatgtgattaacaagagcagcctagtccaggagggttgccaacagcaggcagaagtgtggcatatctggataggcagttattgttttaacagggtcaagattaatgggcaggtgttccgcgataatccggctcccggcccaggctcccagcgcacccgcctccccgcgtacctgcccgggcggccgctctagaactagtggatcccccgggctgcaggaattcgatatcaagcttatcgataccgtcgacctcgagggggggcccggtacccagcttttgttccctttagtgagggttaattgcgcgcttggcgtaatcatggtcatagctgtttcctgtgtgaaattgtttttcccttanaaattcccacaaaatacgagcccggagcataaaantgttaaacctggggngccttatnngnggggctacccnanttattggnttngggctcctgccccttttncnnngggnaaacttgngggccnncttgtttaanaaantngccccccnccggggggangggnggttngggttttggggcctttttcnntttccnnggntnaaaaaanaaannnccnngncntnnggtngggggnaaagnggnttttanctnncttaaagggng

SEQ ID NO: 6585 - DNA, 832 bp, Homo sapiens
  misc_feature 165, 236, 250, 257, 292, 337, 351, 362, 394, 408, 432, 463,465, 486, 497, 505, 542, 547, 560, 695, 700, 729, 758, 771,775, 782, 792, 798, 799, 800, 801, 803, 806, 812, 815, 817,818, 819, 821: n = A,T,C or G
gggcgaattggagctccaccgcggtggcggccgaggtactttttttttttttttttttttttttatttttttacttggggaaatttattaaaaaaaaaaaaaagaaaaacaataatttatgcccttggcaaaataaaagatcttatcaatataaatgtttcttanaaaatgtatgaaaagataatatatattaataaatcaatattaacattacagcaaaagtaataatgattatntaacaatgacaagngaagatntttctggcccttacacagtagtatttctggaaggnctctgattcctgcttgctctagtacaggcgtgctctcactttaanaaagcctgatgccnctgggcgaggnggctcacgcctgtaatcccagtactttagganacccaggcgggcanattgcctgaggtcaggagtttganaccagcctggctaacatggtgaaaccctgtntntactaaaaatacaaaaattanccgggcatggnggctcacncctgtagtcccaactgcttgggaggttgaggcaaganaatcncttgacccaaganggggaggttgcaatgagcccaaatcgcgccactgcactccagcatgggcgacagagccagacttcctttttaaattaaggaaaggaaaggaaacccaaggaaaaggaaaagcttttttttggaactttttttaanaaaanaggaaaaaaaaaagaaaggttcctgcccnggcggggccgttttaaaacctaagggggncccccccgggctngcgngaaaatncgtttttaancctttnnnntnacngggttnccntnnngnggggggggccg

SEQ ID NO: 6586 - DNA, 839 bp, Homo sapiens
  misc_feature 65, 241, 306, 513, 661, 693, 716, 733, 739, 771, 790, 809,811, 813, 816, 817, 820, 824: n = A,T,C or G
ggcgaattggagctccaccgcggtggcggccgaggtactttttttttttttttttttttttttgnttttttccagacacggagtcttgttctgccaccaggctggagtgcagcggcgcgatctcggctcactacaaccttcgactccgtggttcaagcaattctcctgcctcagcctcctgggtagctgggattacaggcacgtgccaccacgcccagctaattatttgtatttttaatanaaacagcgtttctccatgttggccaggatagtctcgatctcctgacctcatgatccgcccgcctnggcctcccaaagtgctgggattacaggcgtgagcccccacaccgggccaactggctgatgatttaagtgatctgggcaagaggtagacacacaaatttttaccagctctttgggtaagtctgaggttaaagactgttttctaaattaatcattcttaaagtgtggtccctggtttagcagcatcgccatcatttaggaactaattanaagtgaaaattatttgacctgcgctaaaacatgctgaattagaaacgttgggatatggggcccagtaacttgtgttgtaacaaagcattttgagtaattccaatgaaatgcttgttttgagaaacactgctcttaagtgatatgggangctttactggggggggggccccttatttaatnttgggggattttggggtcacaantcttaaatggaaaaccnaaaccnaaccccccaaaggctcctttttgaattctttnggaaaaaaaattggggaanacttttttgaacctttgcnananttnnaanaacntttttttttttcccc

SEQ ID NO: 6587 - DNA, 818 bp, Homo sapiens
  misc_feature 373, 430, 454, 491, 496, 722, 734, 744, 753, 755, 758, 772,773, 796, 802, 806, 814: n = A,T,C or G
atagggcgaattggagctccaccgcggtggcggccgcccgggcaggtacacagtgggcgctggggaccagggccagagagtggccacctgttagagctgcatgtgtgtcttgggcctggtcttctttctctgctcactaatgacagctgtcccagcctcttgcaggctctggcccaccaccttgcttgctgtgatttttttttttttcctcacacatgataagctgaggcaggagaatccgcttgaacccgggaggcggaggttgcagtgagccaagattacgccactgcattccagcctgggcgacagagcaagactccgtctcaaaaaaaaaaaaaaaaaaaaaaaaggtgacaagcagagcaagcgcatntaggtgacacccggagatggaatcgggacggcaggatgagcatgggtttgtggcganaaaacccggggcaataatgacatncaatgcaaatttgccagagtcagcaaaaagcctatgnggtanaaattgccaaagaacagaaaaagagggaagggtcagcacctagtgcaggctactctgctactgacaagcagcccggcacataaggagtgtttcactggaagtgaaggaaggaggaagcaggaggggagatgctgggagccttcaaatccacactttccttggaacacgaaataaatcccatgggtctacttctttttttttaccttcatggatacaggggagcttntacacttggctntttaaccttntgtgctagngnccntgaaaacaaaattnntccggggtcctggggggggaaantaaaanccanaatttctntttt

SEQ ID NO: 6588 - DNA, 825 bp, Homo sapiens
  misc_feature 544, 558, 561, 599, 615, 619, 652, 663, 664, 666, 675, 700,715, 716, 723, 724, 731, 739, 750, 773, 780, 784, 789, 795,809, 811, 812, 818, 822, 823, 824, 825: n = A,T,C or G
tccaccgcggtggcggccgaggtacttccttggtggtccagatactctggaagttgaaagtgtgtgtgaatggtctcaagccatgcggtgttgcttgtgtggatggtgacaagtcctgctggacggagtgggtgggtgctacctgtggttccatggccacctcatacagcttagggcagatcctgacgtgggtttatatcagcatgccaatgctaagaggagcctaaatttccattagggaagcagccaggtaggacgaagtgagtgaagagtgtaagaaagctccaggggtgggggaagaggagttaagatcctccccagggaaaatgaaacctcaagtgcgtgaggttaggaatttaagcaagctagggaaaaacaggatagacaagaagtctctagaattaagaagttgagtctacccagcattcagtatgggaaatgtttctagtaaattgggagcgaagaaagatgcaagtgatcaagattccccctaataatcctttagggtttatgtttaaagattggtaagataatgaaacaactnaattcaaaaagaangtntagatgaattaagttattgttgcttcattttggaactnaagaacccaaatcctnccanccagccatttggtttgggcccaaaaatttgggntcaagatgaannantggaagtcntttcaactttttaaaaaaattggtntgtttaattgaccannccttgtnntttgagnggactttntttaaagattnggcctgttttgaaaccttttttnttccccnttcnaatcntcccantttttctgcccttncnnagaaanaaannnn

SEQ ID NO: 6589 - DNA, 1150 bp, Homo sapiens
  misc_feature 4, 6, 10, 13, 16, 21, 23, 24, 25, 26, 28, 29, 31, 32, 33,35, 36, 37, 40, 42, 43, 45, 46, 47, 48, 50, 51, 52, 53,57, 62, 64, 65, 71, 72, 73, 74, 79, 81, 82, 84, 85, 86,87, 88, 89, 90, 91, 92, 95, 96, 103, 109, 115, 116, 127,128: n = A,T,C or G
  misc_feature 133, 137, 149, 175, 176, 286, 370, 385, 413, 415, 421, 423,456, 590, 597, 598, 611, 619, 627, 648, 661, 670, 681, 691,694, 734, 735, 738, 743, 763, 780, 792, 793, 797, 804, 812,832, 837, 843, 853, 854, 857, 858, 862, 871, 872, 883: n = A,T,C or G
  misc_feature 887, 894, 899, 904, 905, 921, 922, 926, 943, 976, 979, 986,989, 991, 998, 1009, 1013, 1017, 1022, 1023, 1032, 1035,1052, 1058, 1059, 1063, 1065, 1068, 1070, 1075, 1095, 1112,1113, 1117, 1118, 1134, 1135, 1139, 1140, 1141, 1142: n = A,T,C or G
  misc_feature 1147: n = A,T,C or G
cgcncngaanganaanaaaanannnnanntnnngnnntangnnannnnannnngcangcagngnncgtaannnngatanannannnnnnnnncannaatgatncattgnaaaacnncacattttggnnaaatnccanctccaccgcggnggcggccgcccgggcaggtacactgnncaggcaaagcgtccgggcagcagtaggcgggcgactcagatcccagccagtggacttagcccctgtttgctcctccgataactggggtgaccttggttaatattcaccancagcctcccccgttgcccctctggatccactgcttaaatacggacgaggacagggccctgtctcctcagcttcaggcaccaccnctgacctgggacagngaatcgacaatgcccgtcttctgttctngnggggcnanactcctgcttggcaggccctgtgcctgcctggnaccctgtcctccctggctggagggatccccccaaggggaagatggcctgccccaagaaagacaggattacattccccacccatggatacagggatcaccccaaccttcaaacaaggatcaacccccaacctggnctggaanntccgccctttcangcccttanacccggcncaggcgtggccacaacccagntcccaaaccaagncacccaaanattcttccttnctccccaagnggnagccaatccggcttaccaggcccttttggccaaatggctnnctnccccngggggggaacccaaaagggnttggaacaaccttcaancgaatgaaaaannaccncgggaanggggcccncgaaaaattttcaaaacccncaaancggggngaattccccnnggnnggcntccaagaannccatgggaaangggnctttacnagggnaaaannccttaccgggaccctnngggncggggttttaaaaaaantaaagtgggaatcccccccggggccttgggcanggnaaatttncananattaaancctttatatgnaaanaccngcgcnngaaacccancanagggggggggggccccncggganncccngncanantatgngtcccccttttaaggggggngggtgaaaattgggggnncccnnggggagggaaaaacanngggnnnnaaaanccg

SEQ ID NO: 6590 - DNA, 886 bp, Homo sapiens
  misc_feature 2, 3, 8, 13, 23, 26, 29, 42, 59, 73, 114, 162, 175, 199,244, 267, 281, 304, 345, 363, 369, 396, 429, 433, 449, 457,463, 484, 487, 501, 537, 547, 567, 591, 604, 618, 621, 625,643, 652, 655, 657, 668, 669, 677, 682, 683, 687, 696: n = A,T,C or G
  misc_feature 699, 701, 715, 718, 731, 742, 743, 744, 747, 748, 749, 752,754, 756, 762, 766, 772, 773, 776, 777, 780, 784, 787, 791,794, 800, 801, 804, 805, 806, 814, 816, 820, 825, 827, 828,840, 841, 848, 850, 856, 860, 861, 862, 864, 866, 868: n = A,T,C or G
  misc_feature 871, 878: n = A,T,C or G
gnnaaggnttaancctttgaaanccnccnttttggaaaattnccctccaccgcggtggntgccgcccgggctngtactttttttttttttttttttttttttggagatggagtntcgctctgtcacccaggctgcagtgcagtccgcaatcgtggctcatancaacctccacctnccaggttcaagcaattctcctatntcagcctcccgaatagcagggactacagacgctcaccaccacggntggccaacttttttttttttganacggagtctcactntgtcacccaggctggagtgaagnggcatgatcttggttcactgcaacctccgcctcccaggctnaagcgattctcctgcctnagcctnccaaatagctgggattacaggcatgcnccaccatgcctggttaatttttttatttttagngganacggggtttcaccatnttggccangctggnttctttctttttttttttttnganacaaacttttgctnttattgcccaggttaaaagtgcagtgggagacaaancaagactttntcaaaacaaaaacaaaaacnaaaacaaacccaaccaaacaaacnaaaaataattacncccaaaaaataccnccnttgnatttttgggccatttttnccaaacttnaangngggttaacttnntttggaanttccnnaaanttttttttnagncnccggggtttttttnccncaaaaaaaaaaanttttttttttnnnaannnttncncnaccgcngggntggggnnctnntantatnggngggntgngggggnncannntttttttnantaanggggngnnggggggattaannttttttngngggggngggnnncncngnggnggccttnaaaaaaag

SEQ ID NO: 6591 - DNA, 1134 bp, Homo sapiens
  misc_feature 1, 6, 7, 9, 10, 11, 13, 14, 16, 18, 19, 20, 22, 23, 25, 26,28, 29, 30, 32, 33, 34, 38, 44, 45, 47, 50, 53, 55, 57,59, 60, 61, 62, 66, 69, 72, 79, 82, 86, 87, 88, 89, 92,93, 96, 122, 156, 177, 393, 400, 402, 403, 411, 424, 434,446: n = A,T,C or G
  misc_feature 456, 459, 497, 499, 537, 545, 549, 579, 640, 706, 767, 768,781, 786, 789, 790, 805, 808, 810, 812, 815, 818, 824, 827,829, 835, 840, 844, 851, 860, 863, 865, 866, 871, 874, 877,885, 888, 900, 902, 903, 917, 918, 920, 927, 943, 952: n = A,T,C or G
  misc_feature 960, 962, 964, 971, 972, 976, 980, 991, 998, 1001, 1006,1014, 1016, 1034, 1036, 1046, 1048, 1058, 1062, 1075, 1083,1092, 1103, 1105, 1110, 1114, 1117, 1118, 1134: n = A,T,C or G
ncctgnntnnntnntntnnntnntnntnnncnnnattnatggtnntntcntgntntntnnnntatnttnctnttatttngantaannnnagnnagngttagtgggttggactacttatggcnaattggagctccaccgcggtggcggccgcccggncaggtactttaggagacccangcgggcattattgcctgaggtcaggagtttgagaccagcctggctaacatggtgaaaccctgtctctactaaaaatacaaaaattagccgggcatggtggctcacgcctgtagtcccaactgcttgggaggttgaggcaagagaatcgcttgaacccaggaggtggaggtttgcagtgagccgagatcgcgccactgcactccagcatgggcgacnagtagcnannactccatntcaagaatattantaacagaaanggaatccaaagnaaaagaaaanagncttatattggaacttcctcctaaaaaaaaaggaaattnanaggaaagccctgatggccacaccaaatcctaaaatttngggcaagntcgnatccaatttaagagggatatttttatttgncatccacaaaaataattctttacttccccccaaaaaatcaattaaaaaagttcaaaatagncaaaccttttccttaatgtgtttctaaaaatgtaaatcacccaaataccattggtgttccccaacnttcttttcccaggtttataatttctattttggtgtaaaaaggtgaggggtatacccctggnnaggtggaaggccnttttnaannaagtttgggagcttnacnananacnttnggcccnggngnaaaaanacccnggantgtgttntttttttanaanannctctnttnaanaacacggnttntttttttttttnannaaaaacccccccannanttttttngttgggggggttttanaagggaaanttaacctntncnaattttnnattncccncccccctgganaaaacanccntttgnggggaaantnccccggggggccccggtncnctttaaaaantnttttttgggntttnggtctgggacccntgaaagtntaatttttnttttgggatantnccccntatnccnngggcccggggggggcn

SEQ ID NO: 6592 - DNA, 814 bp, Homo sapiens
  misc_feature 575, 591, 597, 619, 624, 625, 631, 634, 643, 645, 648, 654,659, 682, 690, 691, 695, 707, 708, 709, 711, 712, 715, 717,718, 729, 738, 739, 748, 762, 771, 780, 785, 786, 788, 793,797, 800, 802, 804, 805, 806: n = A,T,C or G
gaattggagctccccgcggtggcggccgcccgggcaggtacttaaaagctaaggattttggactataccctttaaagtgatacgaagagaatgtgacataggcaaatgattaaggaagattaatatagaagttaatggccggatgtggtggctcacgcctgtggtcccagcactttgggaggccaaggcgaatgggtcacctgaggtcaggagtttgagaccagcctgaccagcatggtgaaaccccatatctactaaaaatacaaagttaactgggtgtggtggcacaaactccgttttaaaaaaaaaattcagagtatgtagactctggaggaagtctgggtgggatgtaatgaggacctgctagaatttggatcactttcaattgaagtcagggtattgtgcataatagaaagtattggactgagatatttggttaccatggaggccaatgcttttttcatcttattaaatgtgatgtgacttttttctttgtacctcggccgctctagaactagtggatcccccgggctgcaggaattcgatatcaagcttatcgatacccgtccaccccnagggggggggcccgtnccccancttttgttcccttttaaggggngggtnntttgcnccnctggggctnantcntgggtnaaaancttttttcctggggtgaaattgntttttcgnntccnaattttcccccnnnannttngnngcggggggggnttataaagnnttaaccccnggggggcccttttnggggggggnccccccccnttttnntnggggngggnccncncnnngccctttt

SEQ ID NO: 6593 - DNA, 1148 bp, Homo sapiens
  misc_feature 3, 11, 16, 17, 19, 23, 24, 26, 27, 28, 29, 34, 36, 38, 40,42, 44, 45, 55, 66, 67, 68, 69, 72, 74, 76, 78, 79, 80,81, 83, 84, 85, 86, 87, 90, 94, 96, 97, 98, 100, 102, 104,106, 108, 117, 121, 125, 356, 360, 386, 389, 409, 450, 453: n = A,T,C or G
  misc_feature 499, 502, 525, 566, 574, 584, 627, 703, 712, 743, 745, 768,773, 776, 787, 797, 843, 848, 862, 866, 887, 894, 910, 915,916, 952, 984, 995, 1022, 1031, 1052, 1067, 1073, 1078,1080, 1081, 1083, 1085, 1086, 1087, 1096, 1098, 1102, 1103: n = A,T,C or G
  misc_feature 1105, 1107, 1113, 1115, 1126, 1127, 1130, 1131, 1134, 1146: n = A,T,C or G
ccnccctattnttatnnanattnntnnnntttcntntnanantnngtttcagttntatttttatannnnttntntnannnntnnnnnggngggngnnntncntntncnattctttcngtcnaatnggactccaccgcggtggcggccgcccgggcaggtacgcgggcgacttcacttatgtgcgtgtctcttctgaggaactggatcgtgccctgcgcaaggttgttggggagttcaaggatgcactgcgcaactctggtggcgatgggctggggcagatgtccttggagttctaccagaagaagaagtctcgctggccattctcagacgagtgcatcccatgggaagtgtggacnggtnaaagtgcattgtggtagccctggccnctngaatccagggagccggcagnatcttgccgaggtagtaaggtgggtgaagaaaactctgcgnagnaaagatcatcaacatccttggggaggttgattgaatccggccatgnagntacccctcgggcccgctcttagnaacttagttgggatccccccgggccttgcaagggaaattcnaatattcnaaagccttantccgattacccgtccgaccttcgaagggggggggcccccgggnacccaagccttttttgtttcccctttagctggaaggggttaaatttgccgccgctttgggcgttaaatcatggggncaattaagnctggttttccctggtgttggaaaattggttnantcccgccttccaccaaatttccnccacnaancattaaccgangcccgggggnaggccattaaaaaagtggtttaaaagcccttgggggggttggcccnttaanttggaggttgaggncttnaacctccaccattttaaattntggcggntttggccggccttcancttgnnccccgcctttttcccaaatcccggggaaaaaacccntgttccgtgccccaatatttgtgattttaaantgggaaatccngccccaaccccctccgggggggaaaanggccgggtntttgctgttattttggggggncgccttcttttccgncttttnccttngnntncnnnttgaaattntntttnngnanttgggngnggttttatccnnttnngcntaaacgtaattnct

SEQ ID NO: 6594 - DNA, 831 bp, Homo sapiens
  misc_feature 592, 602, 621, 646, 647, 649, 653, 654, 657, 671, 674, 686,697, 705, 728, 733, 739, 742, 747, 749, 750, 763, 765, 769,775, 776, 777, 778, 779, 788, 796, 802, 807, 808, 813, 814,824, 830: n = A,T,C or G
ggcgaattggagctccaccgcggtggcggccgaggtacgcgggaacatcaaactgttaatcgaatgcaggctccagggagaagcaacttcctgggcatgcgtgttaagagacaaaaaatgatgacgtttgatgaccactccaccagaaaagggaagaaagcctgaggggcctacgtggacctccctaaacacactgcgcatgctccattccaaacggtatggtgagcactgcgcatgcgggaaacccaccctgtaagggaagaatcctgggaaagaggcaagcctatgaagtcccaggatcaaggttaaagaccctttttttactgtcttcttgtgctctcttttctctcttggaccttcaggcgcctgcttgggtctctttcaagcgaattttgctttctttcctgttctaaagccttttaactaaacttccactcctgctctgaaacttgctctctttttctgccttaacgcccctcagtcgaattctttcttctgaggaggcaaggactgaagttgctgtggacccatagggattcgccattggtaactcggggtaactcggctcttcttccactgctgacgtatgtancaaaggtcangcctttgggggttgggcangcaccacgggttgacccaacatgcnncnaaanngangggggaaaagaccnaanaagggggacttnatggacattcncccctcgnctttttgaaagaaaaaaaaagtngggtnttcctnaanggggncnnggcaaccctttantnggtngggttnnnnncccacaagnccctgctnttgcanaaccnnggaannagggggaaancccctng

SEQ ID NO: 6595 - DNA, 524 bp, Homo sapiens
  misc_feature 377, 399, 456, 508, 512, 524: n = A,T,C or G
gcgcgtaatacgactcactatagggcgaattggagctccaccgcggtggcggccgaggtacccgccttcactcagtttccccaatggtaacatctcgcagaactactgggcgccatcacagccggggtctgactgctcttgctcaggtttccccggttttccgtatcctcacgtgtgtgtatttacttctgtgcaattttatcgcaggccaaggcaggcggatcacctggccccatctttctacaactgggaaaattctgagttctggaaccatctgcccagggatttggggtcagagatggtgggcctttctgatcctggtctttgccatggttatgattgtggcatccctgcctgtcttctatcatgtgcctcancctgttttttttcctttgccangctgcaagcccctgatatcagactaacagggagcacaacatttgcacggtcttaaanacactacatttaggggtgaaattttgttcttctatcttccccccttggcatngganagggacccctcn

SEQ ID NO: 6596 - DNA, 526 bp, Homo sapiens
  misc_feature 2, 3, 4, 5, 6, 9, 10, 13, 14, 22, 24: n = A,T,C or G
gnnnnnttnncgnntcgactancnctcactatagggcgaattggagctccaccgcggtggcggccgcccgggcaggtacgcggggacactgttagttgcaaactggcacaaaggtgaatgcggttcatgaggctcgcttgattaagaagagctgaaacaggagcaaagagcaaaaggcaacctgcagcgaaagcaaggactcagggaaccggcagacacaagcagcctctgcaggtgtgcgagcaggattgcttctgcaacaaaagcctccacccagccacatcttgtgaaaagaatggccacttcttggggcacagtctttttcatgctggtggtatcctgtgtttgcagcgctgtctcccacaggaaccagcagacttggtttgagggtatcttcctgtcttccatgtgccccatcaatgtcagcgccagcaccttgtatggaattatgtttgatgcagggagcactggaactcgaattcatgtttacacctttgtgcagaaaatgccaggacagcttccaatt

SEQ ID NO: 6597 - DNA, 486 bp, Homo sapiens
  misc_feature 31, 43, 171, 183, 191, 200, 202, 231, 243, 254, 269, 272,283, 292, 297, 314, 336, 339, 357, 362, 381, 436, 460, 462: n = A,T,C or G
attggagctcccccgcggtggcggccgcccnggcaggtactanataaacatgcatgtaacgcaggacccatgttcactgagaggtgagatttcacatttacatgtaagacaattaggccctatatggccaaaggtgaggcgcggcccgggagtcactccagtcacatcctncatagaccagcngaaccagnccgtggccngnggtgtcttatcaggaggaagttatggaangtgacgctgtanttatggccggnaaatggggggtcagntantgcctggcagngagccatcnctgtntccataccgcttgtctnaggccagtgcctgcttaactgntanaggaaaaagaaaacccangcctnattctttaactgtaagggnggcgtgacttaaccccggcctggcacggccttaggtcctgattataactcggcgncttattgccgcaaagtctgtcaancncgggatctccactttaacactaat

SEQ ID NO: 6598 - DNA, 725 bp, Homo sapiens
  misc_feature 3, 7, 10, 13, 16, 17, 18, 19, 20, 24, 25, 26, 30, 33, 38,40, 43, 48, 49, 50, 51, 52, 53, 55, 60, 61, 63, 66, 69,73, 77, 78, 82, 87, 91, 92, 95, 101, 116, 117, 122, 126,129, 169, 170, 179, 180, 197, 201, 210, 298, 302, 325, 326: n = A,T,C or G
  misc_feature 366, 388, 429, 494, 498, 526, 544, 560, 575, 580, 605, 611,631, 643, 663, 680, 682, 702, 711, 717: n = A,T,C or G
cancttnaantanaannnnnttannnttgnctncttgnanganataannnnnnancttgnnanacnaangtanttannactnactcntatnnggngggggntgagcgcattcgccnnctatngggntanttggagctccaccgcggtggcggccgaggtacatcaatannaataaaatnntttttcctatttacttnacanctgggaatnacttgccacaagaaatgtatttctattatggtcattcagatttacaaagaattaagcctatgaaataaagcaaacccaatatattctntagncatatttacagcagaatctcagnnggcatttttaaaatatcccaaggaagaagaattaaacttntgagcataaatgaccatacttnagttgacagcagcactgacattaaaatttgtcctacaccanaaatgtgtagaaaaaccccaaaaaagggtatggctttatttcttgccaccctgaacctaattaantcanttttaaaccttttttttaaatttttaanaaaatggcaattggaagnagttgggccatttttngttttaaaaggcctncaaanatgggtttccaaaaagtgtctttgnaggccncacccccaattggggccctnattattaaaatntggcagacccccttttgctnaattttttttgcttttnancttaatgtacctaattttantaaaatttnggtgcnaagtttct

SEQ ID NO: 6599 - DNA, 736 bp, Homo sapiens
  misc_feature 4, 7, 9, 13, 15, 18, 20, 21, 22, 28, 31, 32, 33, 36, 41,45, 48, 49, 52, 54, 55, 56, 57, 62, 63, 64, 67, 69, 71,73, 74, 76, 78, 80, 81, 83, 88, 89, 96, 98, 99, 100, 103,112, 114, 115, 116, 117, 120, 121, 127, 128, 133, 141, 145: n = A,T,C or G
  misc_feature 153, 168, 169, 175, 203, 249, 255, 284, 290, 298, 350, 367,402, 403, 424, 427, 442, 482, 483, 489, 504, 506, 539, 556,558, 569, 571, 573, 583, 586, 590, 602, 624, 648, 680, 686,695, 730, 735: n = A,T,C or G
cccnctncnaacnanganannntgtttntannnaanaactnattnaannaantnnnnaacannnatnanantnntnancnnanaaaannttagaangnnnttngttaatttnannnncgnntttttnnaatgnaactccancgcngtggcggncggggggacctactnntccaangaagggaagaccttgtcggcaccattgngaggcgtgttctcttctggctgccgctcgagcaccgagagctccangctcgnctactggctgaagagggtatgggccaggnccatgntgccggcngggaaagtctccccgcgtacctgcccgggcggccgctctagaactagtggancccccgggctgcagganttcgatatcaaagcttatcgataccgtcgaccttnnaggggggggcccggtacccangcnttttgttccctttantgagggttaaatatgcgccgcttggcggtaaatcaatggnncatagntgttttcctgtggtngnaaaaatttgtttatttcccgccttccaacaaantttcccaaccaccaaancnattaaccgaangncnccggggaagncanttanaaaaggttgctnaaaaaagccccctggggggggnggccccttaaaatggaaggttggnaagccttaaaccttcaaccaattttaaatttngccggntttggccgncctttcaactttggcgcccggcctttttcccaagntgccng

SEQ ID NO: 6600 - DNA, 487 bp, Homo sapiens
  misc_feature 34, 200, 263, 276, 307, 318, 446, 481, 482: n = A,T,C or G
ggagctccccgcggtggcggccgaggtactttangagacccaggcgggcagattgcctgaggtcaggagtttgagaccagcctggctaacatggtgaaaccctgtctctactaaaaatacaaaaattagccgggcatggtggctcacgcctgtagtcccaactgcttgggaggttgaggcaagagaatcgcttgaacccntgaggtggaggttgcagtgagccgagatcgcgccactgcactccagcatgggcgacagagcanggactccatctcnaaataaagaaagaaagaaacaaagaaaagangagcttatatngaacttctctaaaaaaagaaaaaaaagaaagcctgatgcacacaaatctaaatttggcaagtccgatcaattaaaggatatttatttgcatcacaaaataattctttactcccccccaaaaaatcaantaaaaagttcaaatagcaacttttcctaatgtggnntaaaa

SEQ ID NO: 6601 - DNA, 491 bp, Homo sapiens
  misc_feature 7, 404: n = A,T,C or G
ggagctncaccgcggtggcggccgaggtactttaggagacccaggcgggcagattgcctgaggtcaggagtttgagaccagcctggctaacatggtgaaaccctgtctctactaaaaatacaaaaattagccgggcatggtggctcacgcctgtagtcccaactgcttgggaggttgaggcaagagaatcgcttgaacccaggaggtggaggttgcagtgagccgagatcgcgccactgcactccagcatgggcgacagagcaagactccatctcaaaataaagaaagaaagaaacaaagaaaagaaaagcttatattgaacttctctaaaaaaagaaaaaaaagaaagcctgatgcacacaaaatctaaatttggcaagtccgatcaattaaaggatatttanttgcatcacaaaataattctttactccccccaaaaaatcaataaaaaagttcaaatagcaacttttcctaatgtgtttaaaatgtaa

SEQ ID NO: 6602 - DNA, 660 bp, Homo sapiens
  misc_feature 4, 5, 7, 8, 9, 11, 12, 16, 17, 18, 19, 20, 23, 24, 26, 28,29, 30, 31, 37, 40, 41, 43, 45, 48, 49, 51, 53, 54, 59,63, 64, 65, 70, 74, 76, 77, 78, 79, 81, 86, 87, 88, 89,101, 105, 111, 113, 114, 119, 120, 202, 203, 252, 381, 391: n = A,T,C or G
  misc_feature 411, 446, 458, 541, 615, 630, 640, 656: n = A,T,C or G
ctcnncnnntnntagnnnnnaanntngnnnnaccgantannananatnnananntaaantagnnnaaatntatntnnnnantaccnnnnagaaaagggggntttnacgccntnnaaacnntcactttaggcgaattggagctccaccgcggtggcggccgaggtacgttttctgcttacctgataaccacttgccaggtagnnctccaccatcctttctacctttgtcttttcttcaaaagggcagattggntccctggaaaaaaaccctagtggaaaagtaagaaggcatgagaagccagagctgcccatccttcccacattctcatgcctagaagtcattccatcctagcttgaaattccgatatgctcctacacactnggagaaaacnacacacacaaacacttgcanggaaaatgccatagtaaggtcctgtgtcaggctangacacaaaaagngggacttgggccaaactgcctgttgggtaaaaggggtaatagttttcattttttcaagggaaacttacaccctgaaaaaatgntgacctctcgtccagggtgccggtgcccttcatggccttgtaaatccccaagccacttttgggggaggcccaanggccggggtgggatncatggaaggnccaagggaggaaccgnagac

SEQ ID NO: 6603 - DNA, 488 bp, Homo sapiens
  misc_feature 2, 300, 449: n = A,T,C or G
tnattggagctccccgcggtggcggccgaggtacccaacagaggtatgcatcagcagcaggccggcgcccaggaggggcagcagcctcacgcggggctttctggtctcggccgctctagaactagtggatcccccgggctgcaggaattcgatatcaagcttatcgataccgtcgacctcgagggggggcccggtacccagcttttgttccctttagtgagggttaattgcgcgcttggcgtaatcatggtcatagctgtttcctgtgtgaaattgttatccgctcacaattccacacancatacgagccgggagcataaagtgtaaagcctggggtgcctaatgaagtgagctaactcacattaattgcgttgcgctcactgcccgctttccagtcggggaaacctgtcgtgccagctgcattaatgaatcggccaacgcccgggganaggcggtttgcgtattgggccgctcttccgcttcctcgc

SEQ ID NO: 6604 - DNA, 796 bp, Homo sapiens
  misc_feature 475, 528, 531, 574, 610, 633, 642, 647, 665, 686, 728, 738,755, 756, 769, 781, 786, 792, 795: n = A,T,C or G
cgaattggagctccccgcggtggcggccgggcacagtggctcatgcctgtaattccaacacttgggaggctgaggcgggtggatcacctgaggtccggagttcgagaccagcctgaccaacatggagaaaccctgtctctactaaaaatacaaaattagctgggcgtggtggtgcacacctgtaatcccagctactcgggaggctgaggcaggagaatcgcctgaacccgggagacagaggttgtggtgagccgagatcgtaccactgcactccagcactccagcctgggcaatgacagcgaaactctgtctcaaaaattatatacatatatattttttggccaggcgcagtggctcacgcctgtaatcccagcactttgggaggccgaggcaggcagatcatgaggtcaggagatggagaccctcctggctaacacggtgaaaccccgtttctactaaaaatacaaaaaattanccaggcgtgttggcgggcgcctgtagtcccagctactggggaggctgaggcanganaatggcgtgaacccaggagaggcggagcttgcaatgagcttanatcgcgccactgcactccaacctgggggacacagcnagactccgtctcaaaccctaaanaaaaggccnaaaanagtgccttggcccgcttntaaaacttagtggatcccccnggctgcagggaattccaaattcaaagctttatgggatcccgnccgacctttnagggggggggccccggnncccaacttttttnttcccttttaantgganggggtnaant

SEQ ID NO: 6605 - DNA, 818 bp, Homo sapiens
  misc_feature 2, 10, 12, 15, 16, 580, 646, 671, 725, 734, 745, 748, 756,761, 765, 769, 774, 807, 817: n = A,T,C or G
gnagtttacntnttnnaacgactcactatagggcgaattggagctccccgcggtggcggccgaggtacgcgggaacatcaaactgttaatcgaatgcaggctccagggagaagcaacttcctgggcatgcgtgttaagagacaaaaaatgatgacgtttgatgaccactccaccagaaaagggaagaaagcctgaggggcctacgtggacctccctaaacacactgcgcatgctccattccaaacggtatggcgagcactgcgcatgcgggaaacccaccctgtaagggaagaatcctgggaaagaggcaagcctatgaagtcccaggatcaaggttaaagacccttttttttactgtcttcttgtgctctcttttctctcttggaccttcaggcgcctgcttgggtctctttcaagcgaattttgctttctttcctgttctaaagccttttaactaaacttccactcctgctctgaaacttgctctctttttctgccttaacgcccctcagtcgaattctttcttctgaggaggcaaggactgaagttgctgtggacccatagggattcgccattggtnactcggggtaactcggctctctttcactgctgacgtatgtagcaagtccagtcttcgggttggcangcacccacggctgacaccacatgcncagagagaggggaaagaccaagaagtgacttcatgaacatcacccctcgtcttnttaaagaanagaatgttggnctncttaaggngccgngcangtcnttaantggttgggttgcaaacacaagccccttgtaatnggaaaaacang

SEQ ID NO: 6606 - DNA, 493 bp, Homo sapiens
  misc_feature 292: n = A,T,C or G
ggagctccaccgcggtggcggccgcccgggcaggtacgcgggggccattccgctactgcgcaaagatggtggaggaggagaacatccgcgtggttcgttgtggcggcagcgagttgaactttaggagagctgtgttctctgcagattctaagtatatcttctgtgtctctggagactttgttaaagtttacagcacagttacagaagagtgtgtacctcggccgctctagaactagtggatcccccgggctgcaggaattcgatatcaagcttatcgataccgtcgacctcnagggggggcccggtacccagcttttgttccctttagtgagggttaattgcgcgcttggcgtaatcatggtcatagctgtttcctgtgtgaaattgttatccgctcacaattccacacaacataccgagccgggagcataaagtgtaaagcctggggtgcctaatgagtgagctaactcacattaattgcgttgcgctcact

SEQ ID NO: 6607 - DNA, 552 bp, Homo sapiens
  misc_feature 8, 17, 25, 29, 40, 49, 52, 56, 92, 102, 106, 107, 115, 121,122, 124, 134, 136, 148, 181, 184, 189, 323, 433, 450, 466,475, 478, 492: n = A,T,C or G
gctttaancctttgaancccccccntttnggaaaattccngctcaccgnggnggcngccgactttcccccacaccattttgccgagccgcanactcacgggngggnngggggccncccaannanaaaacttttntntttttcgctctngaactagtggatcccccgggctgcaggaattcnatntcaancttatcgataccgtcgacctcgagggggggcccggtacccagcttttgttccctttagtgagggttaattgcgcgcttggcgtaatcatggccatagctgtttcctgtgtgaaattgttatccgctcacaattncacacaacataccgagccgggagcataaagtgtaaaagcctggggtgcctaatgagtgagctaactcacatttaattgcgtttgcgctcactgcccgctttccagtcggngaaacctgtcgagccanctgcatttaatgaatngggccaacnccncgggggagaggccngtttgcgttattgggcgctctttcccgcttttctcggctcaactggacctcgccttgcgc

SEQ ID NO: 6608 - DNA, 513 bp, Homo sapiens
actcctatagggcgaattggagctccaccgcggtggcggccgcccgggcaggtacgcgggctgtcattcatttacccatgcagaaaaaatggtaacttgaagagagtggcatgtgcctgctgccttagaggttatagaatccccacagtcaacaaaaaagcctctagagacatgactgttgccatggaaaccagagaaaatgtgtcttctcatccctcatttgtaaatgagggggtggagcagatcatctgtctctaaggtctttttcagtgctaaaatgtggtgattctttgggaaaaactttttgcatcaagtatgattaaatattctgaaagacgagtgtagcttaaaatttgttttgtttttaaattctgttcatgggtcttcttaaaatggacccttgccgaaaggcggcctgtgacggcctcaggtgggaagatggatgtccttccaagggtgtggctggcagtggggtttgcatgactgcttcttgtctgtgtttcaagtgctctc

SEQ ID NO: 6609 - DNA, 815 bp, Homo sapiens
  misc_feature 314, 456, 477, 519, 522, 631, 648, 656, 678, 682, 687, 693,694, 725, 734, 737, 738, 743, 745, 755, 756, 757, 758, 759,763, 768, 774, 776, 781, 782, 784, 789, 792, 808, 810, 813: n = A,T,C or G
gaattggagctccaccgcggtggcggccgaggtactgctgcagagaaaaagcatccatgtcaaaaagtaaaaattctcattctaccttgcttccgttcccaggccttgtcttaccttcctgaactttttatattcctggattatcttgtcttccaggaccttgtattctggagttcctcgccgaactcttttaatctctgctcccagctctatgaacctttggcttgcagtcccaacacgggcatgcaggatgcggtattcagcataatctgtctcaaagtcctgctcataggcatgttgctgttctgcactgnggatggccctgtattgcaggaggtagtctggtatatcttcaggacttggggattcagaatcttcttgaactgaggaactgtgttctaatctggggtccatgtcctcatcttcttgctcccaatcttctccctcttgtaaatnctgattggtcaggccttgtanggggcttggcactaaaggcagagttctgaacctcttttcttncanttctacagtggctaccaggcactgaacgtttcttgtccagacgttttccgctggcaacaaggaaaggcagttccctgaacaggttcttctggtttgggaacaaggggtntggctttttcactttcnccactggngcccatggtgctccccttggangganccctngggaanngaactgggccttgggtttggtttggccaagnggaattttnaanncttgncnccctttcttnnnnnggcnatctngggggntnggggnnanctggnatnttccttttaaaaaaangnccncc

SEQ ID NO: 6610 - DNA, 835 bp, Homo sapiens
  misc_feature 5, 7, 15, 28, 104, 107, 141, 146, 161, 176, 196, 218, 220,238, 244, 252, 268, 270, 273, 295, 326, 330, 399, 402, 408,430, 457, 463, 496, 533, 546, 553, 555, 559, 563, 599, 621,636, 663, 676, 690, 698, 704, 710, 746, 751, 764, 778: n = A,T,C or G
  misc_feature 783, 792, 794, 797, 830: n = A,T,C or G
gtatncnttgtttcnactcactataggncgaattggagctccccgcggtggcggccgaggtactttcttttttttttttttttttttttttttttctttgtttnganagacggagtcttgctgtgtcactcaggctggagngcagngatgcaatcttggcncactgcaacatccgnctcccaggtttaactgattntcctgcctcagcctcccaagtngntgggattataggagtgcnccaccncacccggntaatttttgtattttnanaanaaacagggttttgccacgttanacaggctggtcttgaactcctgacctcaggngatntgcccacctaggccttccaaagtgctgggattacaggcgtgagccacatgcctaacccatgtgagtttnttntggaanatcaagttcactaataactccngaaaaattttaaaagtaactcaaaatntaaatntctaactctaccctttggaccaacccaaaaatnttacatatggtattctatatggcctattcctaaaacntttaaagacaatnttgtttntncagncttntccaagggaaatatgcctatcaatctttagcatttntacgggacatattgattctttnctcaaaaatcctggngcacactgaccttttttaattttcctntttttggggcaangagggggtttttanaaaaccangattgngtgtanccttcccccggggggggccgcttttaaaaactaagnggatnccccccgggctgngagggaatttcganttttnaagctttancnaanaccgcccgaccccccagggggggggccccgggncccct

SEQ ID NO: 6611 - DNA, 808 bp, Homo sapiens
  misc_feature 344, 466, 481, 513, 592, 643, 667, 679, 684, 701, 731, 734,762, 770, 792, 798, 802: n = A,T,C or G
gtttacctcgttacgactcctataggtcgaattggagctccccgcggtggtcgagcggccgcccgggcaggtacgcgggaaggagggctgtgtggagaagattgggggctggctgaggaaaaatgtgctggtggtagctgcagcagcccttggaattgcttttgtcgaggttttgggaattgtctttgcctgctgcctcgtgaagagtatcagaagtggctacgaggtgatgtaggggtctggtctcctcagcctcctcatctgggggagtggaatagtatcctccaggtttttcaattaaacggattattttttcagaccaaaaaaaaaaaaaaaaaaaaaangttcaaatagcaacttttcctaatgtgtttaaaatgtaatcaccaaatacatgtgtccccaacttctttccagttataattctattgtgtaaagtgaggtatacctgaagtgaggcaataanagagttgagcttcanacctgcctggaaagagcgtgttctttcttaanagtctgagggaaatggttgggggcacaaaattctctcaatctttttcttttccctcatcctgagctcttattttcttgnctcaactgctttctggtaaactttgttcacctggtacctcggccgctctanaactagtggatccccccggctgcngggaattcgatntcaancttatcgatccctccanctcagggggggccccggtccccactttttnttncctttagtgaggggttaaatttgccccncctggcgnaaacatggggcataaactgttnccttgngggnaaattt

SEQ ID NO: 6612 - DNA, 1144 bp, Homo sapiens
  misc_feature 1, 2, 3, 4, 5, 6, 7, 12, 13, 14, 15, 16, 19, 24, 25, 26,27, 28, 29, 31, 34, 35, 36, 37, 39, 40, 41, 45, 47, 49,50, 52, 53, 55, 56, 57, 60, 61, 63, 65, 67, 68, 71, 75,79, 80, 104, 105, 119, 139, 219, 224, 299, 476, 496, 521,600: n = A,T,C or G
  misc_feature 673, 682, 696, 727, 730, 735, 747, 766, 777, 791, 792, 811,835, 843, 844, 847, 859, 881, 887, 892, 897, 905, 907, 914,916, 919, 922, 927, 929, 931, 932, 934, 937, 950, 968, 974,975, 985, 995, 997, 1001, 1006, 1014, 1017, 1022, 1028: n = A,T,C or G
  misc_feature 1030, 1032, 1041, 1044, 1045, 1048, 1053, 1058, 1069, 1079,1083, 1090, 1092, 1096, 1102, 1103, 1109, 1121, 1127, 1129,1130, 1139, 1142, 1143: n = A,T,C or G
nnnnnnntttannnnnatnattannnnnncnttnnnntnnntatnantnntnntnnnatnntntntnnttntttntttnnttcttttttttcaggggggtgggnnctttctcactatanggcgaattggagctccaccnctgtggcggccgaggtacgcggggatttttttttaactgtgctatggagtagaagcaggaggttttcaacctaatcacanaacancacctaccccctcctcctttccacacctgcaaactcttttacttgggctgaatatttagtgtaattacatctcanctttgagggctcctgtggcaaattcccggattaaaaggttccctggttgtgaaaatacatgagataaatcatgaaggccactatcatcctccttctgcttgcacaagtttcctgggctggaccgtttcaacagaagaggcttattttggactttatgctagaaagaatgaggctttntggggataaggcccagaagntccctggatggaccgccgactttcnaagccctccctaaggcccaaatggtggcccctttcccgcttgtcaatgccatctttcagagtgggtccaagtggttctngaatttggggtcttgggaccaaagttgccaaagggaatcttttccccccttgaccacaaacttcttggcttangaacccctngcaaaaaaaccaanccaaaaaattaaccccggaaaattaaaaagnatnggggnggacctttttanaagaaaacccttggaaaanaaacccctttnaaccgccatttggnntttcttttgttcaaaccanattaaaaaaatttaagccaaaaangtttaggnnccnttgggaagccanttttaacaccctttttgggggngaaaanttggnaaacncacccttntntttttgngnccnaangaaantnanncnttnaaaggggaaattngcccagaaaaaaaaaatngccccnnaaaaactttnttttaaggangncttncgggngccccctngangaaantggggnancnccccaaaantgnncgnaaaangtttnatttttttaantgggaattgnaaancaaaatngnttgntctttnnaaactngggccacccaantccccntnnaaaagactnaanng

SEQ ID NO: 6613 - DNA, 908 bp, Homo sapiens
  misc_feature 229, 446, 463, 471, 474, 496, 508, 517, 528, 529, 531, 532,536, 542, 543, 560, 600, 605, 608, 609, 613, 616, 623, 628,640, 651, 655, 660, 664, 671, 674, 713, 728, 733, 737, 740,742, 745, 746, 753, 755, 756, 767, 768, 769, 774, 775: n = A,T,C or G
  misc_feature 776, 780, 781, 786, 790, 808, 809, 819, 829, 834, 836, 841,843, 860, 863, 864, 866, 868, 870, 880, 882, 885, 887, 894,897, 898, 900: n = A,T,C or G
ggcgaattggagctccaccgcggtggcggccgcccgggcaggtacattcctaattatgcagaacgtaaagtctgaatgcaaaaacttttgcaggagatggagttgtagagattaagatggcgagtaggaggcaggactagcttgcagctcctgctcagacagacagagtagcatgtgaagactcacatcatgaacttttgctccaagaaataccgcaggaacataccangaaaggcgagagaatccacagaccctttgaaggaactggattgctgccgcaggctccctgagatgccaaaaaactgagtcagcttgctttctcaggtggtggtctggggcaagttcttcagccctggtcacaggctgcctggaaatagactccatgctgttggtcgggcatggcgggagtaagaccagccttttatgactgctggcttgtatggaantgggggtaagccctttnacttggcnggntttcccccccactttcccttgngggaccttgttntgaaattcnacaaaaggcanncnntaanttcccnncctggggaaccattaangtcccaattgggctttgggggaaacccaccaaatcccccnccccnccnnaagnaantcaacancggtnaaaggccttaancccaagggganaaanttttnagcntaaaaanaanaccccatttcccttccccccaacctgggaagaatttttntctaacccacttttngggangccnggnanaannaaaaggnannttaaacccccnnnggggnnnctcnnatggncccngggcccccccactttggnnaaaaccttanttatttaaancaagncnccccntnggggcaaaattagaatnctnncntntnccttggggcngnttnanaaataanggnntncccgggcc

SEQ ID NO: 6614 - DNA, 1218 bp, Homo sapiens
  misc_feature 2, 4, 5, 6, 7, 8, 9, 14, 15, 17, 19, 21, 22, 24, 26, 27,28, 30, 32, 39, 43, 44, 45, 46, 47, 48, 52, 53, 54, 55,57, 59, 63, 66, 67, 68, 69, 72, 73, 74, 75, 77, 79, 80,81, 82, 83, 88, 91, 100, 102, 105, 109, 118, 130, 135, 179,196: n = A,T,C or G
  misc_feature 228, 247, 286, 344, 352, 375, 422, 430, 437, 438, 480, 494,517, 519, 538, 553, 560, 564, 566, 567, 569, 570, 602, 625,627, 633, 634, 636, 646, 654, 660, 662, 671, 673, 679, 681,686, 704, 707, 709, 720, 731, 736, 744, 750, 752, 785: n = A,T,C or G
  misc_feature 786, 812, 813, 824, 832, 840, 843, 844, 855, 867, 869, 872,884, 900, 915, 917, 922, 927, 949, 950, 954, 958, 960, 963,964, 969, 982, 988, 990, 991, 1007, 1027, 1031, 1035, 1037,1038, 1045, 1049, 1058, 1061, 1073, 1075, 1078, 1080: n = A,T,C or G
  misc_feature 1084, 1087, 1090, 1093, 1100, 1107, 1118, 1124, 1128, 1130,1133, 1143, 1147, 1148, 1149, 1150, 1151, 1165, 1168, 1177,1180, 1183, 1185, 1189, 1191, 1195, 1196, 1197, 1198, 1209,1212: n = A,T,C or G
cngnnnnnnttttnntnananntncnnnantnttatttntatnnnnnnatannnnananattntcnnnnggnnnntncnnnnnagaangtnaagtttgananccncacntttggctanatggcgaattgnagctncaccggggtggcggccggctaaaaattttttgtatttttagtanagatggggtttcatcangttggccaggctggtctggcactcctgacctnaggtgatccacccgcctcngcctcccaaagtgctggggttacaggcgtgagccaccgngcccagactcaaatcacattttttaatgatgttgcaaaccgaatgtcgattttctcgnatgtgatnctcagttacagaaacttacaganctttgcttatcaaccctagacaataaaaactattctacctagaggcntctagganagctttnnctttactccacttgtaccctcgggccccgctctagaaactangtgggatccccccngggccttggcaaaggaaatttcnantgattcaaagcctttaatncggaataaacccggngcggacncctncnnannggggggggggggcccccgggttaaccccccangcctttttttggatttccccctntntaaacnngnaagggggttnaaaatttnccgccncnttttgggcngnttaaantncattnggggccaataaggccttnggntnccctggggggnggaaaaaattngggtnattccccngcttcnancaaattttccccccaccaaaccaattaccgaanncccgggggaagccattaaaaaggggnngaaaagggccntggggggntgcccctnaannggaaggtgganccctaaccttcncnaantaaaattttggncggtttgcccccttcnaccttgggccccggntnttttnccaanttccgggggaaaaacccttggnncggnggcncnaanncttgncaatttttaattngaaaantnnggcccaaacccccccnggggggaaaagggccgggtntttncccnanntttgggnccgnctcttttcnggnttttccttcggntngangngganttnccnttngggcctncggggtnccgtttccggncttgcncggncnaanccggtgtttnaagnnnnnacttaaaaaagggnggngaataaccnggnttntncccnanaaannnngggggaataanccnccggga

SEQ ID NO: 6615 - DNA, 1279 bp, Homo sapiens
  misc_feature 3, 5, 9, 10, 11, 13, 14, 15, 19, 20, 21, 27, 30, 32, 40,45, 47, 56, 57, 62, 65, 66, 67, 69, 70, 71, 74, 75, 76,77, 79, 82, 84, 95, 98, 99, 108, 113, 124, 126, 154, 167,176, 185, 189, 196, 200, 228, 263, 265, 337, 342, 361, 363: n = A,T,C or G
  misc_feature 364, 367, 383, 384, 391, 396, 405, 408, 433, 441, 446, 471,487, 495, 498, 502, 513, 517, 519, 529, 546, 548, 570, 579,580, 583, 586, 589, 596, 603, 604, 613, 616, 618, 621, 622,635, 639, 656, 662, 663, 665, 672, 677, 680, 688, 689: n = A,T,C or G
  misc_feature 692, 694, 695, 703, 705, 707, 708, 713, 715, 721, 733, 735,741, 742, 752, 757, 760, 761, 762, 771, 772, 774, 777, 779,780, 785, 786, 787, 794, 813, 818, 827, 832, 834, 837, 844,858, 859, 860, 863, 866, 869, 884, 892, 903, 908, 909: n = A,T,C or G
  misc_feature 915, 922, 924, 932, 939, 941, 948, 953, 954, 959, 961, 966,970, 971, 973, 980, 987, 995, 996, 998, 999, 1002, 1003,1004, 1005, 1009, 1010, 1014, 1015, 1018, 1020, 1021, 1025,1028, 1034, 1040, 1042, 1048, 1054, 1057, 1064, 1071: n = A,T,C or G
  misc_feature 1078, 1082, 1088, 1089, 1091, 1096, 1107, 1116, 1117, 1118,1121, 1131, 1135, 1139, 1143, 1146, 1149, 1157, 1161, 1164,1170, 1171, 1182, 1184, 1185, 1186, 1200, 1201, 1208, 1210,1212, 1216, 1217, 1218, 1219, 1220, 1223, 1224, 1226: n = A,T,C or G
  misc_feature 1227, 1231, 1236, 1243, 1250, 1252, 1254, 1256, 1259, 1264,1267, 1268, 1275, 1276, 1279: n = A,T,C or G
ccnancttnnntnnncttnnntatctnatntntttttaantctangnaaattaatnnctaantannntnnntcnnnntnttntnttttttagggnggnntgttttctnctatntatatcctatntncgggtaaacagggggggggggggggggnggaactacaacanatatcttanaaattcacncaanggggctnactntcattccaaacttttaacttttaataancatccatcacatgatctgtttttcaccacttcacntnaaagacaccatttatatacccaagggcagaaagtagaacttactattcattaaatgtttgacacaatttggnaattngtccttttaatttctgtcncnnaangctatttgaaagaatnntgaatcngccantgaccttgntancccatattacttttcctgcaaaaantaggaccntaatntaaaccattgcctttatcgtaccanagtggacctggtggcntacatggncantttnggaaaaaaatngttntngtcctcaagntttgggaaaaattatantnaaaaaggaatttccaacccttnattaacccnnatnacnaantcttggnggaatgnnactaacatnganancgnnttacccttaccgngccncggttttcttaaaaaanctatgnngnttttacnccccncgngccccttnnaancnnaaaattcncnannaattncnaaggtnttttaatccagnantatccnngtctcaaccnctccnaannnggggggggnncnccnanntggannnccaaacntttttttgttccccccttntttanataggaagnggttntnaanggggccnccccctttgggtcnnntanaancanttgggtttccataantctttganctaaccctggnagtannaaaatnttaatgnanattccccncataaantnaatttcncaacnnacaanantatancccnnanccccggngaagccnataaaaanntnntgnnnnatanntctnnggngnnggcncanaaattnaacttnanagcctnaaaatncanctttaancttttanaggatcncttnggaatnnanttttncaaaagtattncccattttnnngtnaaaccttttntttntatngacnagnatntggcttcnaatnganatctanntctcaaacccncnnngattttaattcccnncccccancnanattnnnnncannannattntaatnttttttntattaantnancntcnctctnccnncctgganntcn

SEQ ID NO: 6616 - DNA, 986 bp, Homo sapiens
  misc_feature 102, 109, 111, 136, 146, 157, 164, 176, 178, 232, 254, 260,266, 273, 283, 289, 290, 303, 336, 349, 350, 374, 381, 393,404, 407, 416, 463, 468, 489, 495, 497, 498, 513, 515, 523,526, 536, 541, 542, 550, 552, 553, 555, 560, 567, 570: n = A,T,C or G
  misc_feature 576, 583, 592, 600, 625, 633, 648, 649, 654, 662, 678, 682,688, 698, 705, 708, 712, 720, 727, 745, 755, 756, 760, 763,769, 770, 771, 774, 775, 779, 780, 786, 792, 795, 796, 803,804, 812, 823, 830, 831, 844, 856, 857, 860, 861, 862: n = A,T,C or G
  misc_feature 865, 869, 877, 880, 897, 898, 905, 906, 908, 911, 912, 913,923, 925, 931, 933, 934, 939, 942, 946, 947, 951, 958, 960,961, 963, 965, 966, 971, 972, 975, 977, 979: n = A,T,C or G
ggcgaattggagctccaccgcggtggcggccgaggtacttttttttttttttttttttggtttgagacggagtctcgctgtgtcccccaggttggagtgcantggcacnanctcagctcactgcaagctccgcctntcctgtgttnacgccattctnctgcctnagcctccccagnanctgggactacaggcgcccgccaacacgcctggcttaattttttgtatttttagnagaaacggggtttcaccgggtnagccangagggnctccatntcctgacctnatgaanngcctggcttcggnctcccaaaagtgctgggattacaaggcggtgangccacttgcgccnnggccaaaaaaaatataattttgtntataaantttttggagacnagaagttttcnctnggcccattngccccaaagcctgggaattgctgggaaattccaaatgggcccccaanttttnggggtttaaacccaaaaaccntttttntnnttccccgggggtttnangggggganttnttcctggccnttaanncttccctnannanagcgnggggaantancaaggngggggcncccaaccanccccccanggttaaaattttggaaattttttangtaaaaanaaccggggggttccnncccanttttgggnaaaggcttgggttttnaaancctccngggaaccttnaaggggnaantccnaccccgcntttaaanccttaccccaaaggggtngggaaattanncaanggnctttgnnnccnntttnngccccnggcccnttnntaaaaannaaaggggnacccccccggngcggggnnggaaatttaatantaaaaaaccttnntgnnnaancccngcgaaccntanagggggggggccccggnnccccccnntnttnnnttccctttangngagggntnnaaatnccncccnngggngaaaaananngngnnaaaannttntntncctgggg

SEQ ID NO: 6617 - DNA, 824 bp, Homo sapiens
  misc_feature 372, 420, 423, 534, 541, 559, 580, 584, 596, 598, 642, 648,660, 666, 670, 680, 690, 692, 700, 704, 710, 714, 722, 726,733, 735, 738, 747, 759, 762, 776, 787, 796, 801, 806, 807,812, 817, 819, 821: n = A,T,C or G
tatagggcgaattggagctccaccgcggtggcggccgcccgggcaggtacttttttttttttttttttttttttttgggacggagtctcgctctgtcgccaggctggagtgcagtggtgccatctcggctcaccgtaacctccgcctcccgggttcaagcaattctcctgcctcagcctcctgagtagctgggactataggcgtgcgccaccatgcccagcttagtagagatggggtttcaccatgttggccaggatggtctcaatctcctgacctcatgatctgctcgcctcagcctcccaaagtgctgggattacaggcatgagccactgcgcctggacacatacattcttataaggaaacatacccacncatataaaacgttttgagaagtggaaagagcatggttctgagtcagcntgngtgttatctctaacctcccaattcctaatctttaaaatgaaaattcatgtaatacccatgttagggaggggtttcaaatcaggtaacagatgtacctcgggcccgctctanaactagnggatcccccgggctgcangaattcgatatcaagcttatngatnccgtcgacctcnangggggggcccggtccccagcttttgttccctttagtgaggggtnattgcncccttgggggtnaatcantggncataagcttngtttcctggngnggaaaatngttntccggntcancaaatttncccncaacatncngangcccggggngccataaaaagngtnaaagcccggggggnggccttatagnaggggagcntaacntcccnnttaanttggngngnggg

SEQ ID NO: 6618 - DNA, 853 bp, Homo sapiens
  misc_feature 2, 3, 4, 5, 9, 13, 15, 17, 18, 19, 23, 31, 35, 502, 584,594, 605, 637, 650, 654, 657, 659, 660, 661, 662, 663, 664,665, 668, 669, 670, 671, 672, 673, 674, 675, 676, 677, 678,680, 681, 682, 683, 684, 685, 686, 687, 688, 689, 690: n = A,T,C or G
  misc_feature 691, 692, 694, 695, 696, 698, 699, 700, 705, 706, 707, 708,709, 710, 712, 714, 715, 716, 718, 720, 722, 723, 725, 726,727, 728, 729, 730, 732, 733, 736, 737, 738, 739, 743, 744,745, 747, 749, 750, 751, 752, 754, 755, 756, 757, 758: n = A,T,C or G
  misc_feature 759, 762, 764, 765, 766, 767, 768, 771, 772, 773, 774, 775,777, 778, 779, 780, 781, 784, 785, 786, 787, 791, 793, 794,797, 798, 800, 801, 802, 803, 805, 808, 810, 811, 812, 813,814, 815, 817, 818, 819, 820, 821, 822, 823, 824, 825: n = A,T,C or G
  misc_feature 826, 827, 828, 831, 832, 833, 834, 835, 836, 837, 838, 840,841, 842, 844, 845, 847, 848, 849, 850, 851, 852, 853: n = A,T,C or G
gnnnngacncgcntnannngacntactatanggcnaattggagctccaccgcggtggcggccgcccgggcaggtactttgaatttctacttcatgccatgcaaaattactttaccccttttaacctcagttttcttctgtgtgaaacaggaacaatagtttcattcgtcattcagtttctctcaagatttcacgagatcatacctataaaacatccaagtcatttaaatgtatcatcatttctgtcataattagtgggatccatttcactattaccccgtaccgacaccatcttgatttgtatcagttcacccgtgtggcaaggcctgggagcctggaggcccaatgctgctgggaggggcaggggatggagggtccagtgaccacagagccttcttgcaaagtttccaggagggtctgcaaactagacgagagcagcgcacgtctgcacacgtgaatcaaggtctggggtggttgtcaccttgtacctcggccgctctaanaactagtggatcccccgggctgcaaggaattcgatatcaagcttatcgataccgtcgactctagggggggcccggtacccanctttttgttncctttaatganggttaaattgcgccgcttggcgtaatcatggncatagctggtttnctgnggnannnnnnnacnnnnnnnnnnnannnnnnnnnnnnntnnnannntattnnnnnnantnnnanantnntnnnnnncnnttnnnnaaannnantnnnnannnnnnatntnnnnncannnnncnnnnnaannnngaantnntannannnntnttnannnnnntnnnnnnnnnnnnttnnnnnnnnannntnntnnnnnnn

SEQ ID NO: 6619 - DNA, 942 bp, Homo sapiens
  misc_feature 2, 7, 14, 20, 21, 23, 29, 32, 36, 493, 539, 541, 550, 558,560, 561, 570, 576, 600, 622, 633, 637, 644, 645, 664, 696,699, 704, 712, 715, 716, 719, 722, 723, 729, 734, 739, 742,745, 746, 747, 767, 769, 771, 772, 779, 780, 785, 788: n = A,T,C or G
  misc_feature 789, 792, 803, 828, 829, 833, 834, 839, 859, 860, 865, 883,885, 889, 893, 896, 901, 909, 919, 923, 926, 927, 930, 942: n = A,T,C or G
gnaagtngatcgantccgcnntntggacntanttgntggctgattggagctccaccgcggtggcggccgcccgggcaggtacagtgtgatgttttgatacatgtatacattgcgtaataaccgaaccagggtaattagcatatccatcacctcaaatatgtgtcatttctttgtgttgagaactttcaaaatcctctcttctagctatttcaaaatatatgcaataggttattgttaactctagtcaccctactatgcaataaaacattagcacttatttaatgtgaagtttttaatacaaaaattattttaagaaaataagcacaggctgggcgccgtggctcacgcctgtaatcccagcactttgggaggcccgaggcgggtggatcacctgaggtcagaggttctagacgaagcctaaccaacattggggaaaccccgtctctactgaaaatacaaatttagccaggggtggtggtgggcacctgtaatncccagctcttgggaggctgaggcaaggagaatttgctttgaatctnanaggtggaangtttgcantnnaacccgaanaatcgngcccatttggcacttccagccctngggggaaccaagaaccaaaaantttcattctcntttntaaaaannaggaaataatggaaaatgnaaaagggggattttccccccccgccctttttnaanttttngttttttncannaanttnncccctngttgnttttnttnggnnnaaaacaggggaattttgaancntnnaaattcnnttttnatnntanaaaaaaccttntttttttttaaaaaagttttccccnntttnntaaantttttcctttttttaccccnnaaaantaaggggctttcgagggngnaaantggnacnagggnctaagggnctttattttntttnggnnganaaaaattattan

SEQ ID NO: 6620 - DNA, 890 bp, Homo sapiens
  misc_feature 2, 3, 4, 11, 19, 26, 33, 36, 40, 630, 668, 686, 697, 717,721, 726, 730, 738, 761, 799, 810, 811, 819, 822, 832, 840,841, 855, 868, 870, 873, 878, 886: n = A,T,C or G
gnnngaaccgnggatccgnaatcatngacatanttntttnctgattggagctccaccgcggtggcggccgcccgggcaggtaccctactccaggccctggctcccaagtggcatctctgaacctggccaggaccagggttggggggtgggggagattcatcgccctgaagggaaagacaatactggctggatttgctacatgctgatagcagagtccatgggccttaagggaatacaggcagtagccaggcagtgaccaccacaggtcttgggcaaaacccagtgctgttctggttcaagtctgattcagtgcaataccaacggtggtggccacagaggtgcctgtgttacctctctcccagctctaggcagctcagcaaagagagagagactcactttatttgtgggaaagtaaggaaagagaacaagagtctctggtaatccatggaattcatccatatcttaccaccaagaccaccaaggtggaacaaatacaggtctgcaagagccacagcattactgggcctggggtgccccataatgtgggtatggctactgtgaccaaagacttggatcacaacacctgagtccctttcgaatattgtggaacaaacttaaattacacacttnttggaccaattcccagagaaaaccagagacattttganaagaattcaaaaatattntacatttgaanaaaacctcaaaagaaaattncaangaatnaccncacgaagnaagggaaatttcagaattcttantcaaaataaaatttaaccaaaatttttgaaattgtttnccaagggaaannaaagccanaanttttttggangtttgaannatgccaagttgaanaattacttgaaananatnttttnaaaaattntttt

SEQ ID NO: 6621 - DNA, 896 bp, Homo sapiens
  misc_feature 2, 3, 4, 14, 19, 20, 23, 25, 32, 35, 36, 39, 42, 513, 515,519, 525, 526, 527, 533, 535, 536, 538, 545, 546, 549, 550,555, 562, 569, 574, 579, 583, 585, 586, 595, 596, 597, 598,601, 622, 630, 643, 645, 651, 673, 683, 686, 689, 691: n = A,T,C or G
  misc_feature 697, 703, 711, 716, 719, 723, 735, 736, 737, 738, 740, 741,742, 743, 744, 745, 746, 747, 748, 749, 750, 751, 754, 756,757, 758, 759, 761, 762, 763, 764, 765, 766, 767, 768, 769,773, 774, 775, 777, 780, 781, 782, 783, 784, 785, 786: n = A,T,C or G
  misc_feature 787, 791, 794, 795, 797, 798, 799, 800, 801, 803, 804, 805,806, 807, 808, 809, 810, 812, 813, 814, 816, 817, 820, 821,823, 824, 825, 826, 827, 828, 829, 830, 831, 832, 833, 834,840, 841, 842, 845, 846, 847, 849, 852, 853, 854, 855: n = A,T,C or G
  misc_feature 856, 857, 858, 859, 860, 861, 864, 867, 868, 869, 872, 873,874, 876, 877, 878, 879, 880, 882, 883, 887, 891, 896: n = A,T,C or G
gnnngacccgcganccgcnntcntngacatanttnntgnctnattggagctccaccgcggtggcggccgcccgggcaggtacggatcctccgcatattatctcaacagaggacagtagctcaggaggcagcttcaaacggtgacctgtggcctgggccatctcttcgtcatgtgcttcacttttccctgtttccctgtgaactggcttccatggttctgtagggtagtgagtcggggttgtggctgcagcagagcaggagatgcttgcccgagtgggagcaacccacccccgtgtccccaatgcctcactcctggcttctagtgcagccctttgtagactcacctcgcaagaaggaagatctgcctggagacctgatcccagtccagctttttgaccataggtcatctttgtccccttgctcctttgcatcatgtcataaaatttgaggatatcaactgattattttttcttccaagaatgaaaatcaagcagaattgattcctacacgaaananaaanataaannnaaaaananngnccccccnnccnnctttnaaaaaangggggtnccccnggggncggngnnaaatttttnnnntanaaattttttttaacccccccnccccttgngggggggggcccncncccccnaattttttttcccctttttaanaagggggganaanatngncccccngggggnaaaaaaanagggnaanaaangtttttttctgnnnnannnnnnnnnnnnacncnnnnannnnnnnnnaaannnanaannnnnnnnatantannannnnnannnnnnnnannncnnttnntnnnnnnnnnnnnataaannnaannntnaannnnnnnnnnttngtnnnatnnnannnnnanntatntaanataan

SEQ ID NO: 6622 - DNA, 916 bp, Homo sapiens
  misc_feature 4, 7, 19, 21, 22, 24, 28, 31, 41, 424, 609, 724, 726, 740,751, 757, 758, 760, 763, 764, 765, 766, 775, 777, 780, 785,795, 803, 804, 805, 812, 814, 821, 824, 825, 826, 830, 831,832, 850, 854, 856, 857, 875, 876, 878, 880, 886, 893: n = A,T,C or G
  misc_feature 900, 901, 904, 914: n = A,T,C or G
gttnganccgaatgcgcgntnntngacntantttttggctnattggagctccaccgcggtggcggccgaggtacagagcatagtgaagcatgatgggtggtagtattaggagaaaaacatcagtcaaattaaatttagcagagtttatttgagcaaagaagtgactcatgaatcggacaactccctaaaccaggagagacaccacacggcagtatgggcaagcagtattcacaggcagaaaaaggaggtgacatacagaaacagcctggctggccacagatcacagcttgccttacttggtcacagtctgaggagctagcagcctgtggtggactgaaagcccagctgctctgattagccaacatttggctacttgtcgcaagaatctattcatctgggccgggtgcagtggctcacgcctgtnatcccagcactttgggaggccaaggcggtggatcgcctgaggtcgggagtttgagaccagccctcgccatcatggggaaactgtgtctcttattaaaaatacaaaaattagctgggcatggtggtgtgtgccctgtagtccccagcttccccgggaaggctgaagcaggaaaatcactttgaatncaaggaagcgaaagttgcagtgagccaaaaatgtgccacttgcacttccaaccttggggcgaacagaagcaaggagttccattcccaaaaaaaaaaaaaaaaaaaaaaaatttcntngcccgggggggggngcctttttttnaaaaanngnggnnnnccccccggncnttngaggngaatttttanttttaaannnttttttntntcccccnccnnncttnnnggggggggggccccgggncccnannttttttgttccctttttnngngngggttnaattggnccccttnnggngtaaaaaatngg

SEQ ID NO: 6623 - DNA, 874 bp, Homo sapiens
  misc_feature 3, 4, 5, 7, 19, 23, 561, 562, 563, 564, 565, 566, 567, 568,569, 570, 571, 572, 573, 574, 575, 576, 577, 578, 579, 580,581, 582, 583, 584, 585, 586, 587, 588, 589, 590, 591, 592,593, 594, 595, 596, 597, 598, 599, 600, 601, 602, 603: n = A,T,C or G
  misc_feature 604, 605, 606, 607, 608, 609, 610, 611, 612, 613, 614, 615,616, 617, 618, 619, 620, 621, 622, 623, 624, 625, 626, 627,628, 629, 630, 631, 632, 633, 634, 635, 636, 637, 638, 639,640, 641, 642, 643, 644, 645, 646, 647, 648, 649, 650: n = A,T,C or G
  misc_feature 651, 652, 653, 654, 655, 656, 657, 658, 659, 660, 661, 662,663, 664, 665, 666, 667, 668, 669, 670, 671, 672, 673, 674,675, 676, 677, 678, 679, 680, 681, 682, 683, 684, 685, 686,687, 688, 689, 690, 691, 692, 693, 694, 695, 696, 697: n = A,T,C or G
  misc_feature 698, 699, 700, 701, 702, 703, 704, 705, 706, 707, 708, 709,711, 714, 717, 721, 722, 724, 738, 743, 744, 747, 751, 756,763, 767, 768, 769, 771, 774, 775, 776, 777, 778, 781, 782,783, 784, 785, 786, 787, 788, 792, 793, 798, 799, 810: n = A,T,C or G
  misc_feature 811, 812, 816, 818, 819, 820, 821, 822, 826, 827, 828, 829,830, 831, 834, 845, 846, 851, 852, 858, 859, 862, 863, 865,866, 867, 872, 874: n = A,T,C or G
agnnngncgcgcgcgcgtnatangacttactatagggcgaattggagctccaccgcggtggcggccgaggtactcatgccgattcatcacctccacgatgttgatgatcttctcgcagagtttctcacccaccttctcccggcagatctgccgctcctgctccgtggccagggctaccacatgcaccttgaccgtccacacttcccatgggatgcactcgtctgagaatggccagcgagacttcttcttctggtagaactccaaggacatctgccccagcccatcgccaccagagttgcgcagtgcatccttgaactccccaacaaccttgcgcagggcacgatccagttcctcagaagagacacgcacataagtgaagtcgcccgcgtacctgcccgggcggccgctctagaactagtggatcccccgggctgcaggaattcgatatcaagcttatcgataccgtcgacctcgagggggggcccggtacccagcttttgttccctttagtgagggttaattgcgcgcttggcgtaatcatggtcatagctgttttctggnnnnnnnnnnnnnnnnnnnnnnnnnnnnnnnnnnnnnnnnnnnnnnnnnnnnnnnnnnnnnnnnnnnnnnnnnnnnnnnnnnnnnnnnnnnnnnnnnnnnnnnnnnnnnnnnnnnnnnnnnnnnnnnnnnnnnnnnnnnnnnnnnnnnncnctnaantttnnangggaaaaatttttnggggnnccnaaanttggnttttttnaaannnanaannnnnttnnnnnnnngggnnttttnnaaaaaaaaaannngggntnnnnncccnnnnnnctntttaaaaaaannggggnncccccnnggnngnnnaaatntn

SEQ ID NO: 6624 - DNA, 901 bp, Homo sapiens
  misc_feature 3, 4, 11, 13, 14, 33, 298, 299, 300, 301, 302, 303, 304,305, 306, 307, 308, 309, 310, 311, 312, 313, 314, 315, 316,317, 318, 319, 320, 321, 322, 323, 324, 325, 326, 327, 328,329, 330, 331, 332, 334, 335, 336, 337, 338, 339, 340: n = A,T,C or G
  misc_feature 341, 342, 343, 344, 345, 346, 347, 348, 349, 350, 351, 352,353, 354, 355, 356, 357, 358, 359, 360, 361, 362, 363, 364,365, 366, 367, 368, 369, 370, 371, 372, 373, 374, 375, 376,377, 378, 379, 380, 381, 382, 383, 384, 385, 386, 387: n = A,T,C or G
  misc_feature 388, 389, 390, 391, 392, 393, 394, 395, 396, 397, 398, 399,400, 401, 402, 403, 404, 405, 406, 407, 408, 409, 410, 411,412, 413, 414, 415, 416, 417, 418, 419, 420, 421, 422, 423,424, 425, 426, 427, 428, 429, 430, 431, 432, 433, 434: n = A,T,C or G
  misc_feature 435, 436, 437, 438, 439, 440, 441, 442, 443, 444, 445, 446,447, 448, 449, 450, 451, 452, 453, 454, 455, 456, 457, 458,459, 460, 461, 462, 463, 464, 465, 466, 467, 468, 469, 470,471, 472, 473, 474, 475, 476, 477, 478, 479, 480, 481: n = A,T,C or G
  misc_feature 482, 483, 484, 485, 486, 487, 488, 489, 490, 491, 492, 493,494, 495, 496, 497, 498, 499, 500, 501, 502, 503, 504, 505,506, 507, 508, 509, 510, 511, 512, 513, 514, 515, 516, 517,518, 519, 520, 521, 522, 523, 524, 525, 526, 527, 528: n = A,T,C or G
  misc_feature 529, 530, 531, 532, 533, 534, 535, 536, 537, 538, 539, 540,541, 542, 543, 544, 545, 546, 547, 548, 549, 550, 551, 552,553, 554, 555, 556, 557, 558, 559, 560, 561, 562, 563, 564,565-778, 780-851, 855-900: n = A,T,C or G
agnngacgccntnntacgacttactatatggcnaattggagctccccgcggtggcggccgaggtacgcggggggtggttgggtggtaagatggcggctgtgagtctgcggctcggcgacttggtgtgggggaaactcggccgctctagaactagtggatcccccgggctgcaggaattcgatatcaagcttatcgataccgtcgacctcgagggggggcccggtacccagcttttgttccctttagtgagggttaattgcgcgcttggcgtaatcatggtcatagctgtttcctgaannnnnnnnnnnnnnnnnnnnnnnnnnnnnnnnnnntnnnnnnnnnnnnnnnnnnnnnnnnnnnnnnnnnnnnnnnnnnnnnnnnnnnnnnnnnnnnnnnnnnnnnnnnnnnnnnnnnnnnnnnnnnnnnnnnnnnnnnnnnnnnnnnnnnnnnnnnnnnnnnnnnnnnnnnnnnnnnnnnnnnnnnnnnnnnnnnnnnnnnnnnnnnnnnnnnnnnnnnnnnnnnnnnnnnnnnnnnnnnnnnnnnnnnnnnnnnnnnnnnnnnnnnnnnnnnnnnnnnnnnnnnnnnnnnnnnnnnnnnnnnnnnnnnnnnnnnnnnnnnnnnnnnnnnnnnnnnnnnnnnnnnnnnnnnnnnnnnnnnnnnnnnnnnnnnnnnnnnnnnnnnnnnnnnnnnnnnnnnnnnnnnnnnnnnnnnnnnnnnnnnnnnnnnnnnnnnnnnnnnnnnnnnnnnnnnnnnnnnnnnnnnnnnnnnnnnnnnnnnnannnnnnnnnnnnnnnnnnnnnnnnnnnnnnnnnnnnnnnnnnnnnnnnnnnnnnnnnnnnnnnnnnnnnnnnatannnnnnnnnnnnnnnnnnnnnnnnnnnnnnnnnnnnnnnnnnnnnna

SEQ ID NO: 6625 - DNA, 950 bp, Homo sapiens
  misc_feature 2, 14, 15, 16, 20, 27, 28, 29, 30, 33, 34, 153, 174, 177,186, 188, 208, 211, 241, 244, 246, 250, 251, 253, 254, 279,288, 289, 290, 292, 293, 294, 295, 296, 298, 312, 318, 321,322, 335, 336, 338, 339, 340, 341, 343, 372, 374, 376: n = A,T,C or G
  misc_feature 378, 388, 391, 409, 414, 415, 419, 428, 435, 437, 440, 441,443, 444, 448, 452, 455, 460, 461, 467, 471, 473, 475, 478,488, 492, 496, 498, 506, 516, 526, 528, 530, 531, 544, 545,551, 554, 557, 561, 562, 572, 573, 575, 583, 584, 586: n = A,T,C or G
  misc_feature 591, 592, 597, 627, 628, 629, 630, 632, 641, 644, 649, 651,652, 653, 655, 660, 668, 669, 678, 679, 685, 706, 709, 719,724, 725, 729, 732, 746, 747, 758, 773, 774, 775, 788, 791,794, 797, 801, 802, 808, 838, 839, 848, 850, 857, 859: n = A,T,C or G
  misc_feature 863, 864, 866, 867, 868, 869, 870, 871, 872, 876, 878, 881,882, 883, 886, 888, 891, 893, 894, 895, 896, 897, 898, 899,900, 902, 903, 904, 907, 917, 924, 925, 927, 928, 930, 931,932, 934, 938, 942, 946, 949: n = A,T,C or G
gnagacccgcaaannngacntactatnnnngcnnattggagctccaccgcggtggcggccgcccgggcaggtacttttttttttttttttttttttttttttttttttttttttttttttttttttttttttttttttttttttttttttttnttttttttttttttttttttnttnttttttttnangggaaaaaaaaaaaaaaaanttntttttttttaaaaaaaaaaaaaaaaacaancancntttnntnnttaaaaaaaaaaaaaaaaaaggggncccccccannngnnnnntntaaaaaaaaaaaancaaccnccnntaaaaaaaaaacnncnnnncnaaaaaaaaggattccaaaaaaaaaaccantncnanggggggatanaanaaaaaaaaaaaaaatttnttttnnaacnaaaacggangaaggcnancanncnnaaanaggnganagganncgagancaancntnccncccccccaanaccnaaananaaaaaacnaccccccccncaaaaatcananannaaaaaaaaaaaanngggggnggnggngggnncccccacccnntnttaaaccnnanaaaannaaaanggaaaaaaaaaaaaaaaaaaaaaaaaaaannnnantgaactttnccntttcntnnncnagtgnggggaaannaaccccccnncccccncaaaaaaaaaaaaaaaaaaanccnaccccccccnccggnngggnaanaaaaaaaaaaaatnntaatttttttnccccccccccccccnnnggggggggggggnccnccnccnaaanntataantttttttttttaaaaaaaaaaaaaaaaaannccccccccncncaaaaananaaannannnnnnnaaananaannnacnanaanannnnnnnnannnaanaaaaaaaaanaaaaaannannannnanaaanaaanaaanaana

SEQ ID NO: 6626 - DNA, 876 bp, Homo sapiens
  misc_feature 4, 8, 10, 14, 19, 20, 27, 30, 36, 275, 316, 347, 376, 382,383, 387, 389, 395, 399, 406, 412, 413, 420, 424, 426, 429,431, 438, 441, 449, 452, 458, 459, 461, 462, 463, 467, 478,482, 483, 484, 488, 490, 505, 513, 520, 534, 545, 550: n = A,T,C or G
  misc_feature 551, 557, 583, 592, 601, 621, 667, 668, 669, 678, 692, 693,707, 712, 721, 744, 747, 753, 756, 758, 759, 771, 774, 788,789, 803, 817, 833, 844, 862, 863, 869, 872, 873: n = A,T,C or G
cgtngcgncncgcnttatnngacttanttnttggcngattggagctccaccgcggtggcggccgcccgggcaggtaccaccacacctggctaatttggtatttttagcagagacggtgtttcaccgtgttggctaggctggtgtcaaattcctgacctcaggtgatccaccggcctcagcctcccaaagtgctgggatttcaggtgtgagccaccatgcttttaaaattactatttgaataatgcttctgataatttttctttttttttcttganaatcgcttgaacccgggaggcggaggttgcagtgagccganatggcaccattgtcctctagcttgggtgacnagcaaaactccatctcaaaaaaaaaaaangtttanntttncntttgtncccnaaacctntttttnngggtttntttnanaantnaggcaanggnaacctttnccntagganntnnntctnaaaaaaatttnaaannncggnancctcctttaagggcngcttttanttttttngccttgaacaaatnccttttttaanttttnngttttntaaaaaaaaaaatttggacaaaatgnttcaccatntcctaaatntaacgttttttgctcgtaangggaactttttgggactgttggggaatttttagggaaaaaaattcnnngtttttaanattcaagccttttnntttccgggttttanaattnaaccccccngttttggaattttaaaaaaattnctngaattnggnannttttttaaaatncangggggggggttttnnttgggggggggggngcccaaaagggganagggaatttttaaacnttttttttttnaaaaaaaggggttttttnnaaattnccnntcg

SEQ ID NO: 6627 - DNA, 822 bp, Homo sapiens
  misc_feature 2, 3, 13, 16, 17, 29, 33, 538, 545, 605, 616, 623, 628, 645,655, 659, 661, 662, 663, 664, 665, 666, 667, 668, 669, 670,671, 672, 673, 674, 675, 676, 677, 678, 679, 680, 681, 682,683, 684, 685, 686, 687, 688, 689, 690, 691, 692: n = A,T,C or G
  misc_feature 693, 694, 695, 696, 697, 698, 699, 700, 701, 702, 703, 704,705, 706, 707, 708, 709, 710, 711, 712, 713, 714, 715, 716,717, 718, 719, 720, 721, 722, 723, 724, 725, 726, 727, 728,729, 730, 731, 732, 733, 734, 735, 736, 737, 738, 739: n = A,T,C or G
  misc_feature 740, 741, 742, 743, 744, 745, 746, 747, 748, 749, 750, 751,752, 753, 754, 755, 756, 757, 758, 759, 760, 761, 762, 763,764, 765, 766, 767, 768, 769, 770, 771, 772, 773, 774, 775,776, 777, 778, 779, 780, 781, 782, 783, 784, 785, 786: n = A,T,C or G
  misc_feature 787, 788, 789, 790, 791, 792, 793, 794, 795, 796, 797, 798,799, 800, 801, 802, 803, 804, 805, 806, 807, 808, 809, 810,811, 812, 813, 814, 815, 816, 817, 818, 819, 820, 821, 822: n = A,T,C or G
gnngacccgcgtnatnngacttactatanggcnaattggagctccaccgcggtggcggccgcccgggcaggtacgcggggggcaccagctgggttctccagggagcaggagttggacctccatggagccactaggcctggcctcctctacacatccccagggctatctggttaattccatcaagctcagagttaaaaagcatatcagcctggagtatttgggagagactggctgcagatccccgccagccaagatgcaagccactcgggacctgatgtcggcagctgtgcctctactgccctgaggacttaccagagggagccctactggccttcccccaccacagcagccctgcctgtgaagctcttgtttctgacatttcacaggcagagaggtgccatcagttcgcctccattccttgccaccatgaccagcctcttcctgaactctctcttgctcgggacctgcctgagggctccctgctgcagttcgccgtaccttggccgctctaaaactagtggatccccccggcttgcangaattcnatatcaagcttatcgataccgtcgacctccaaggggggccccggtacccaacttttgttnccttttatgangggtaantgccncttggcgtaatcatggncatagcttgntttncnnnnnnnnnnnnnnnnnnnnnnnnnnnnnnnnnnnnnnnnnnnnnnnnnnnnnnnnnnnnnnnnnnnnnnnnnnnnnnnnnnnnnnnnnnnnnnnnnnnnnnnnnnnnnnnnnnnnnnnnnnnnnnnnnnnnnnnnnnnnnnnnnnnnnnnnnnnnnnnnnn

SEQ ID NO: 6628 - DNA, 850 bp, Homo sapiens
  misc_feature 4, 6, 7, 14, 16, 17, 27, 28, 33, 34, 399, 504, 540, 544,554, 576, 595, 597, 617, 634, 637, 639, 644, 652, 658, 659,662, 679, 680, 682, 687, 688, 708, 727, 738, 739, 754, 760,761, 763, 765, 766, 767, 768, 769, 770, 771, 772, 773: n = A,T,C or G
  misc_feature 774, 778, 780, 782, 783, 784, 785, 786, 787, 788, 789, 790,791, 792, 793, 794, 795, 796, 797, 798, 799, 800, 801, 802,803, 804, 805, 806, 807, 808, 809, 810, 811, 813, 814, 815,816, 817, 818, 819, 820, 821, 822, 823, 824, 825, 826: n = A,T,C or G
  misc_feature 827, 828, 829, 830, 831, 832, 833, 834, 835, 836, 837, 838,839, 840, 841, 842, 843, 844, 845, 846, 847, 848, 849: n = A,T,C or G
agtngnncgcgttntnngacttacttnntggcnnattggagctccaccgcggtggcggccgaggtacaggaagcatggctagggaggcctcaggaaacttacaatcatggcagaaggcgaaggggaagcgtgtatgtcctacatgtttggagcaggaggaagagagtgaaggggaaggcgccacacacttttaaacagccaaggctaatgagaattcactcaccatcatgagaacagcaaagggaaaatccgctctcatgacccagtcgccttccaccaggcccctcctccaacactggggattacgattcgtcatgagatttgggtggggacacaaagccaaaccgtatcaggctgttttccctgctgtcaaactcaatcctgacctatgacccttanctgtctccaggaggtcttcactagcactcccgtcatcgtattaatctggcaggataattgtagttacctaaaaactgaagcattgtgcgcctcaattcttgtgcnaaaaaagaaatgctgatttttttttttttttgaaanaaantccccctttntccccctttgaatttaaacccngggcctttggaaaaaaaanantccccgtttctttcccgggnggcgttttaaaacttgnggntnccccnggctgcgngaattnnatnttaacctttttttcccnncncctcnngggggggccccggccccccntttttttcccttttttgangggttaatttnnccccttggggtaaanatgggnnanannnnnnnnnntttngngnnnnnnnnnnnnnnnnnnnnnnnnnnnnnntnnnnnnnnnnnnnnnnnnnnnnnnnnnnnnnnnnnnng

SEQ ID NO: 6629 - DNA, 886 bp, Homo sapiens
  misc_feature 2, 3, 4, 7, 12, 13, 15, 32, 189, 191, 195, 196, 197, 198,202, 205, 212, 213, 216, 217, 223, 226, 227, 228, 229, 230,231, 232, 235, 239, 240, 241, 243, 244, 248, 253, 254, 261,262, 263, 267, 268, 277, 281, 282, 289, 297, 303, 304: n = A,T,C or G
  misc_feature 307, 308, 311, 313, 316, 318, 328, 329, 338, 344, 357, 358,371, 377, 381, 397, 411, 418, 419, 424, 425, 430, 446, 447,452, 453, 455, 458, 475, 477, 480, 483, 485, 492, 502, 503,504, 505, 508, 509, 510, 511, 512, 520, 521, 524, 526: n = A,T,C or G
  misc_feature 529, 530, 536, 537, 543, 544, 545, 546, 547, 552, 553, 554,555, 566, 567, 571, 574, 575, 580, 583, 589, 590, 591, 592,595, 597, 600, 603, 604, 605, 606, 607, 609, 614, 616, 617,619, 620, 621, 622, 623, 624, 625, 627, 628, 629, 631: n = A,T,C or G
  misc_feature 632, 633, 634, 635, 636, 637, 640, 641, 642, 643, 644, 645,646, 647, 648, 649, 650, 651, 652, 653, 654, 655, 656, 657,659, 660, 661, 662, 663, 665, 666, 667, 668, 669, 670, 671,672, 674, 675, 677, 678, 679, 680, 681, 682, 683, 684: n = A,T,C or G
  misc_feature 685, 686, 687, 688, 689, 690, 691, 692, 693, 694, 695, 696,698, 700, 701, 702, 703, 704, 705, 706, 707, 708, 709, 710,711, 712, 713, 714, 715, 716, 717, 718, 719, 720, 721, 723,724, 725, 726, 727, 728, 729, 730, 731, 732, 733, 734: n = A,T,C or G
  misc_feature 735, 736, 737, 738, 739, 740, 741, 743, 744, 745, 746, 749,750, 751, 752, 753, 754, 755, 756, 757, 758, 759, 760, 761,762, 765, 766, 767, 768, 769, 770, 772, 773, 774, 775, 776,777, 778, 779, 780, 781, 782, 784, 785, 786, 787, 788-792: n = A,T,C or G
  misc_feature 795-796, 801-803, 809-810, 812-822, 824-826, 828, 834-843,845-850, 853-856, 859-864, 867, 869-871, 874, 876, 878, 880-881,883-884, 886: n = A,T,C or G
gnnnacnccgtnntncgacttactatatggcnaattggagctccccgcggtggcggccgggtgcagtggctcatgcctgtaatcccaggactttgggaggccaaggcgggcggatcacgaggtcagatcgagaccatcctgccaacacggtgaaaccgtctctacaaaaaaaaaaaaaaaaaaaaaaantncccnnnncccnttnaaaaatnnggnncccccnggnnnnnnnaantttnnntnnaacnttttnnatccccnnncccnnggggggggncccnnccccccntttttttncctttnnaannggntnaantncccccttggnnaaaaaaggnaaaaanttttttcctgaannttaaaaataaaanaacacnttanatgttactgtgtgaanaataatgccttgtntggtgtnnatacnngtgtnaaaaatttcttattgnntttgnntnacnaacttttgtgtaccttngnccnttntntaactantggatccccnnnnctnnnnngaaatttnnatntnaanncttatnnataccnnnnnacctnnnnggggggccccnntaancannttttnatncctttnnnnaangnttnaannnnncnccttngnntnnnnnnngnnntnnnnnnnttnnnnnnnnnnnnnnnnnntnnnnntnnnnnnnntnntnnnnnnnnnnnnnnnnnnnnanannnnnnnnnnnnnnnnnnnnnntnnnnnnnnnnnnnnnnnnntnnnnttnnnnnnnnnnnnnnttnnnnnntnnnnnnnnnnncnnnnnnnnnttnnaaaannncttttnntnnnnnnnnnnntnnntngttttnnnnnnnnnntnnnnnnttnnnnttnnnnnnttnannnttncncncnnanntn

SEQ ID NO: 6630 - DNA, 920 bp, Homo sapiens
  misc_feature 2, 3, 4, 5, 6, 9, 10, 18, 22, 23, 24, 35, 36, 40, 72, 77,80, 82, 93, 96, 98, 101, 115, 116, 124, 125, 126, 130, 133,134, 136, 139, 141, 143, 145, 156, 160, 166, 181, 182, 185,188, 189, 193, 194, 202, 206, 215, 217, 221, 238, 274: n = A,T,C or G
  misc_feature 349, 379, 392, 413, 434, 436, 444, 449, 502, 503, 504, 513,528, 536, 560, 569, 600, 632, 651, 654, 663, 666, 672, 686,687, 688, 697, 698, 700, 701, 705, 709, 715, 717, 719, 724,725, 732, 738, 754, 756, 760, 761, 770, 781, 786, 818: n = A,T,C or G
  misc_feature 823, 826, 830, 831, 832, 833, 834, 835, 836, 837, 841, 842,843, 844, 845, 846, 847, 848, 849, 850, 851, 852, 853, 854,855, 856, 857, 858, 859, 861, 863, 864, 865, 866, 867, 868,869, 870, 871, 872, 873, 874, 875, 876, 877, 878, 879: n = A,T,C or G
  misc_feature 880, 881, 882, 883, 884, 885, 886, 887, 888, 889, 890, 891,892, 893, 894, 895, 896, 897, 898, 899, 900, 901, 902, 903,904, 905, 906, 907, 908, 909, 910, 911, 912, 913, 914, 915,916, 917, 918, 919, 920: n = A,T,C or G
gnnnnnccnngacccgcnttcnnngacttactttnnggcnaattggagctccccgcggtggcggccgacgtncctgngcnanctgatggctcncancnagnggggcacacactcnntggccttnnnattntgnncngtnanananaaggtaatgtntacnttcccnaataattcataatanncanggnntatnnttaacatntttnttgaatgtntntttnccaacaaaagacatttnctcatctattgtttaaattaaaattcccaggctctnctttgacctgaagtattttatctatcctcagtctcaggacactgttgatggaattaaggtataatgtgttaaagnctgtgtggctttctcttgtttactttgggngaaaggatgccangaacatgtatagagtcttcantgctaatactctatgatggantnactcaaancctcnggagatgactcatattatcttaacatgcttcttttattgaaaagtggaaggcnnntggtggtanaaagtaattctacanaaatgggnccacgtttttcaaaaatgttcttnctggacacnttttatttttgggggcaaaatgtgcctcaanttttggtcctcaattccaacctttggaagttnttggggcccttgggccggnttntaaaaactnagngggatnccccccgggcttgnnngggaatttnnanntttnaaancttttntnanaaccnnccaaccntttaanggggggggcccccggntncccnnacttttttnttcccctttantgaanggttaaattgcccccccttgggggtaaaaaantgggncanaaannnnnnnntctnnnnnnnnnnnnnnnnnnnangnnnnnnnnnnnnnnnnnnnnnnnnnnnnnnnnnnnnnnnnnnnnnnnnnnnnnnnnnn

SEQ ID NO: 6631 - DNA, 860 bp, Homo sapiens
  misc_feature 2, 3, 4, 13, 14, 19, 26, 28, 36, 515, 548, 563, 615, 626,637, 639, 644, 657, 661, 680, 729, 733, 752, 809, 813, 825,860: n = A,T,C or G
gnnngacccgcgnnctcgnactcatngncttacttnttggctgattggagctccacccgcggtggcggccgcccgggcaggtactagaagtccccctaccacacacacagacagtagccacctagaaatatccctgcatagggtcattattgtgtcaaaagagagagagggacaaagttactattatgggttggactgtgtcctcttaaaattcatatgttaaagtcctaacccccaggacctcagaatgtgacctaatttggaaataggtttgttgcagatataactagttaagataaggtcatcaaggagtagggtagacctccaacatgactggtatccttataaaaaggaaaaatgtggacacagaaacacgcacacagggagaatgccacatgcggatgaaggcagaaattggggtattgtttctataagccaaggaatgccaaatatggccagtgacccccagaagttcagggagaggcctggaacagattcttctgcacagtcctcanaaggaaccagctgtgctgacaccttgatctcanactgccggcctccanactgaaaataaattcctgttatgtaagctgcccatgtgtggtgctttatttnggcagccttancaaattaatananacacngcctggaaaaagnccanattttttcttaaaagcatnggctgtggtgcattctgcttccccttctttgcctggggcttacttaagnctcncctttgattactccctgcncaaaaaacttaacctgccccctaaatcaatgtgatttttcaaacctggtgtttttcncccnttttttttcccnaaaaaattttcccttggggaaaagggggtggattn

SEQ ID NO: 6632 - DNA, 857 bp, Homo sapiens
  misc_feature 2, 3, 4, 7, 9, 15, 16, 18, 35, 71, 90, 96, 97, 111, 113,129, 144, 151, 164, 197, 216, 223, 236, 242, 244, 246, 249,251, 390, 391, 418, 421, 426, 428, 430, 438, 444, 450, 462,465, 467, 469, 470, 471, 483, 485, 491, 494, 502, 506: n = A,T,C or G
  misc_feature 515, 520, 522, 528, 533, 564, 567, 570, 572, 578, 582, 583,584, 585, 586, 587, 588, 595, 596, 597, 598, 599, 600, 601,602, 603, 604, 605, 606, 607, 608, 609, 610, 611, 612, 613,614, 615, 616, 617, 618, 619, 620, 621, 622, 623, 624: n = A,T,C or G
  misc_feature 625, 626, 627, 628, 629, 630, 631, 632, 633, 634, 635, 636,637, 638, 639, 640, 641, 642, 643, 644, 645, 646, 647, 648,649, 650, 651, 652, 653, 654, 655, 656, 657, 658, 659, 660,661, 662, 663, 664, 665, 666, 667, 668, 669, 670, 671: n = A,T,C or G
  misc_feature 672, 673, 674, 675, 676, 677, 678, 679, 680, 681, 682, 683,684, 685, 686, 687, 688, 689, 690, 691, 692, 693, 694, 695,696, 697, 698, 699, 700, 701, 708, 711, 712, 713, 714, 715,716, 717, 718, 719, 720, 721, 722, 723, 725, 726, 727: n = A,T,C or G
  misc_feature 728, 729, 730, 731, 734, 735, 736, 737, 738, 739, 740, 743,744, 745, 746, 747, 748, 749, 750, 751, 752, 753, 754, 755,756, 757, 758, 759, 760, 761, 762, 763, 764, 765, 766, 767,768, 769, 770, 771, 772, 773, 774, 775, 776, 777, 778: n = A,T,C or G
  misc_feature 779, 780, 782, 783, 784, 785, 786, 788, 790, 791, 792, 793,794, 795, 796, 797, 798, 799, 800, 801, 802, 803, 804, 805,806, 807, 808, 809, 810, 811, 812, 813, 814, 815, 816, 817,818, 819, 820, 821, 822, 823, 824, 825, 826, 827, 828-856: n = A,T,C or G
gnnngancncgcgtnntncgacttactatatggcnaattggagctccccgcggtggcggccgaggtacccnggagaagaggtggggaccncaatannggtcacctggaccntnaacatgtgacctgcanatctggcatcagcangctcatnagttcaaatgtanactccacctcttaaaaactcgtgatttctagcntattgacttcacccctgtntcagggntttaacaaaatcntagccntncntcncntcaggcctgtaatctcacccctttgggaggccgatgcggatggaaggtttgaggccaggagttcaagaccagccagggcaacatggtgagacctcatctctacaaaaactgaaaaataaaaaacttttaaaaaatgttnnaaaaaaaaaaaaaaaaaaaaaaaaaanatnttccntncngggggggngttttnaaaaanggggatcccccnggntngnnnaatttttttttnantttttntancccccccncccnagggggggnccccncncccacnctttngcccctttaagggggggttttttgccccttnggnaananaggggnaaannnnnnnttcgggnnnnnnnnnnnnnnnnnnnnnnnnnnnnnnnnnnnnnnnnnnnnnnnnnnnnnnnnnnnnnnnnnnnnnnnnnnnnnnnnnnnnnnnnnnnnnnnnnnnnnnnnnnnggggggnccnnnnnnnnnnnnntnnnnnnnttnnnnnnnggnnnnnnnnnnnnnnnnnnnnnnnnnnnnnnnnnnnnnncnnnnntntnnnnnnnnnnnnnnnnnnnnnnnnnnnnnnnnnnnnnnnnnnnnnnnnnnnnnnnnnnnnnnnnnnnc

SEQ ID NO: 6633 - DNA, 830 bp, Homo sapiens
  misc_feature 2, 3, 11, 13, 16, 22, 23, 25, 27, 28, 36, 67, 68, 72, 73,76, 79, 80, 81, 82, 90, 92, 99, 100, 101, 102, 103, 107,110, 114, 115, 119, 121, 123, 125, 128, 136, 137, 141, 143,147, 148, 149, 151, 152, 155, 156, 161, 163, 164, 166, 168: n = A,T,C or G
  misc_feature 169, 171, 174, 179, 181, 182, 184, 185, 186, 189, 190, 191,192, 193, 196, 197, 202, 203, 204, 206, 208, 209, 279, 463,464, 465, 466, 467, 468, 469, 470, 471, 472, 473, 474, 475,476, 477, 478, 479, 480, 481, 482, 483, 484, 485, 486: n = A,T,C or G
  misc_feature 487, 488, 489, 490, 491, 492, 493, 494, 495, 496, 497, 498,499, 500, 501, 502, 503, 504, 505, 506, 507, 508, 509, 510,511, 512, 513, 514, 515, 516, 517, 518, 519, 520, 521, 522,523, 524, 525, 526, 527, 528, 529, 530, 531, 532, 533: n = A,T,C or G
  misc_feature 534, 535, 536, 537, 538, 539, 540, 541, 542, 543, 544, 545,546, 547, 548, 549, 550, 551, 552, 553, 554, 555, 556, 557,558, 559, 560, 561, 562, 563, 564, 565, 566, 567, 568, 569,570, 571, 572, 573, 574, 575, 576, 577, 578, 579, 580: n = A,T,C or G
  misc_feature 581, 582, 583, 584, 585, 586, 587, 588, 589, 590, 591, 592,593, 594, 595, 596, 597, 598, 599, 600, 601, 602, 603, 604,605, 606, 607, 608, 609, 610, 611, 612, 613, 614, 615, 616,617, 618, 619, 620, 621, 622, 623, 624, 625, 626, 627: n = A,T,C or G
  misc_feature 628, 629, 630, 631, 632, 633, 634, 635, 636, 638, 639, 640,641, 642, 643, 644, 645, 646, 647, 648, 649, 650, 651, 652,653, 654, 655, 656, 657, 658, 659, 660, 661, 662, 663, 664,665, 666, 667, 668, 669, 670, 671, 672, 673, 674, 675-830: n = A,T,C or G
gnngacgccgnanacnactacnntntnnctaattgnagctccaccgcggtggcggccgatgtacaannaaannatnccnnnngctgcaananttctatnnnnncctnatngatnncgtncncntntanggggggcnntgtncncatnnntnnttnnctttncnnangnnanatngatcncnngnnnaannnnnggnnatacnnntncnntgttggctgcaagagcctcgatgtagccggccagcgccaaggcaggcgccgtgagccccaccagcagcanaagccccgcgtacctgcccgggcggccgctctagaactagtggatcccccgggctgcaggaattcgatatcaagcttatcgataccgtcgacctcgagggggggcccggtacccagcttttgttccctttagtgagggttaattgcgcgcttggcgtaatcatggtcatagctgtttcctggannnnnnnnnnnnnnnnnnnnnnnnnnnnnnnnnnnnnnnnnnnnnnnnnnnnnnnnnnnnnnnnnnnnnnnnnnnnnnnnnnnnnnnnnnnnnnnnnnnnnnnnnnnnnnnnnnnnnnnnnnnnnnnnnnnnnnnnnnnnnnnnnnnnnnnnnnnnnnnnnnnnnnnnnnnnnncnnnnnnnnnnnnnnnnnnnnnnnnnnnnnnnnnnnnnnnnnnnnnnnnnnnnnnnnnnnnnnnnnnnnnnnnnnnnnnnnnnnnnnnnnnnnnnnnnnnnnnnnnnnnnnnnnnnnnnnnnnnnnnnnnnnnnnnnnnnnnnnnnnnnnnnnnnnnnnnnnnnnnnnnnnnnnnnnnnnnnnnnnnnnnnnnn

SEQ ID NO: 6634 - DNA, 879 bp, Homo sapiens
  misc_feature 4, 5, 6, 7, 9, 21, 24, 25, 36, 41, 542, 701, 703, 740, 744,758, 761, 784, 785, 786, 787, 788, 789, 790, 791, 792, 793,799, 801, 802, 803, 804, 805, 806, 807, 808, 809, 810, 811,812, 813, 814, 815, 816, 817, 818, 819, 820, 823, 824: n = A,T,C or G
  misc_feature 825, 826, 827, 828, 829, 830, 831, 832, 833, 834, 835, 836,837, 838, 839, 840, 841, 842, 843, 844, 845, 846, 847, 848,849, 850, 851, 852, 853, 854, 855, 856, 857, 858, 859, 860,861, 862, 863, 864, 865, 866, 867, 868, 869, 870, 871: n = A,T,C or G
  misc_feature 872, 873, 874, 875, 876, 877, 878, 879: n = A,T,C or G
ggtnnnncnttgacgcgcgtnatnngacttactatngggcnaattggagctccaccgcggtggcggccgcccgggcaggtacgcgggggcccttgctcactagaaggagccccctgaccccttcttccaaaaatactttttgtctttgtcttcgtttctgcattcatcccccttcgttcactcccataacaaccaacagcgacaactggcacctaggacagggacgtgagtgaaggtctgctggagcagagaaactgacactgacaagaagaacgagaatgagaaaccctgcgacgagtctgctgacagctgatataagtctgcaaaatcagctggaccaccaaacggcaattgagagctgcacaacctgcaattacctttattcaattaatgcaaaaacaaaaatggggagatgttacaggccgaaagaatgaaggtcgtgaccaactcagtataccactgaaggctatatgagcaaacagaaaactgttctcatgaaagcaggatgttggaaaactaacaactgtgtcttgcgccagaanggtttgctgaaggcagtcatgccccaagcgcagtgttcctttgtgattatctatagtaacatcttgaagcctgttgtacctcggccgcttttaaaactagtggatcccccggctgcaggaatttcgattttcaagcttatcgattacccgccaacctcnanggggggggcccggtaccccaccttttgttccctttantgangggttaattgcgcnccntggcgtaatcatgggcattaacnnnnnnnnnntttctngnnnnnnnnnnnnnnnnnnnnaannnnnnnnnnnnnnnnnnnnnnnnnnnnnnnnnnnnnnnnnnnnnnnnnnnnnnnnn

SEQ ID NO: 6635 - DNA, 903 bp, Homo sapiens
  misc_feature 2, 3, 4, 5, 6, 9, 10, 14, 18, 22, 23, 24, 544, 553, 591,613, 663, 681, 686, 691, 708, 713, 715, 729, 761, 762, 763,764, 772, 773, 774, 775, 776, 777, 791, 802, 805, 827, 830,832, 859, 865, 867, 868, 869, 879, 893, 902, 903: n = A,T,C or G
gnnnnnccnngacncgcnttcnnngacttactttttggctgattggagctccaccgcggtggcggccgcccgggcaggtacgcgggatccagaaggagtcgaccctgcacctggtcctgcgtctgagaggtggtatgcagatcttcgtgaagaccctgaccggcaagaccatcaccctggaagtggagcccagtgacaccatcgaaaatgtgaaggccaagatccaggataaagaaggcatccctcccgaccagcagaggctcatctttgcaggcaagcagctggaagatggccgcactctttctgactacaacatccagaaggagtcgaccctgcacctggtcccgcgtctgagaggtggtatgcagatcttcgtgaagaccctgaccggcaagaccatcactctggaggtggagcccagtgacaccatcgaaaatgtgaaggccaagatccaagataaagaaggcatcccccccgaccagcagaggcttatcttttgcaggcaaagcagcttggaaaatggcccgcactttttttgactacnacattccanaaagagttcgaccctgcaccctggtccttgcccttgangggtggcttgttaattcttcantcattggcatttcccaatggcccaagtggatggcattacttttgcccttntacccttttgccccaacntaaantttanaaaattacaagtttcantaatnancttgaaacctttcnaaaaagttaataaaaggtttcgtttgcctggnnnnaaaccccnnnnnnaaaaaaaaaaaaanaaaaaaaaaanccncccggcccccctttaaaaaaanttngngtcccccccgggggggggggaaatttntttttnannntttttttttncccccccccccccnggggggggnn

SEQ ID NO: 6636 - DNA, 815 bp, Homo sapiens
  misc_feature 2, 3, 6, 7, 8, 9, 10, 11, 565, 585, 601, 604, 628, 659, 671,675, 697, 733, 735, 740, 750, 768, 791, 796, 798, 812, 815: n = A,T,C or G
gnnagnnnnnnggcgcgcgtaatacgactcctatagggcgaattggagctccaccgcggtggcggccgaggtacttcttgttagattaattaaataccaattatcagtataagaaaatggcaataaattgtcaaagtggaattggaaagtgtttttaggatttggatatgaagcaggcttcccatgtgaccattctcacttcttattctgaagtctaacactctgcttttctttctctccctctcttcattgattcttctagtggctggtgtttgggtattgtgggaactgagctttcatctcctatgttagccatagagatgaaggctttgagggcaccatggaatccgattgctggaaataaatcaatcttaaaggaaaggaaaatttaaaaatcaggtgcaacaaaagcaaaatgagaaaactgctaaactctacaattctataaagaagaattgcataaaaaggaaataacaggaaaaggtaagaaaatttaaaaggatatcagaaaatatagcatacagggtcagaaagatttgagaatatgacgagatggttttagaangcaggatggggcccggcacngtggctcatgcctatnatnccacacttttgggaagctgagcanaccgatcacgaggcaggagatcgagaccatnctggcttacacngggnaaccccggctcttcttaaaatncaaaaaaaaaaaaaaaaaatttatacctgcccggcngncgttntaaacctagnggatcccccggcctgcanggaatcgatttaagctttcgatnccgcnanccccaagggggggnccn

SEQ ID NO: 6637 - DNA, 919 bp, Homo sapiens
  misc_feature 373, 380, 388, 487, 535, 545, 552, 562, 580, 599, 615, 616,619, 622, 630, 640, 650, 664, 665, 672, 680, 689, 696, 704,711, 717, 726, 733, 750, 751, 764, 766, 774, 775, 790, 799,804, 813, 819, 823, 838, 841, 842, 846, 847, 855, 857: n = A,T,C or G
  misc_feature 858, 862, 866, 880, 881, 883, 890, 891, 896, 899, 907, 912: n = A,T,C or G
gaattggagctccacccgcggtggcggccgaggtacttccctgtggcacgttaccatggaagccgctccagggtgggtcagggtgcaagctgctggtgaggtttggaagcatcaggctcacgggtgttcatgtgtgttcgtgcgtgtgtgtgcgtacctgcccgggcggccgctctagaactagtggatcccccgggctgcaggaattcgatatcaagcttatcgataccgtcgacctcgagggggggcccggtacccaagcttttgttccctttaagtgagggttaattgcgcgcttggcgtaatcatggtcataagctggtttcctgtgtggaaattgttatcccgctcacaattccacacaacatacaanccgggangcataaangtggtaaagcctggggtgcctaaatgagtgaagctaacctcacatttaattgcggttgccgctcacttggcccgcttttcccagtccggggaaaacctntccgtgcccagctgcattaatgaaatccggccaaccgcccccgggganaaggcggttntgccttntttggggccncttctttcccctttcctngcttcacttggactccgcntggcgcttcggtccgnntcnggnttgcgggngaagccggtnttcaagcttnacttcaaaaaggcnnggtaatnccgggttnttccaccangaattcnaggggganaaaaccnccaggnaaaagaaanattttgnagccaaaaaagggcccnngcaaaaagggccnangaaacccnntaaaaaaagggcccnggtttgctnggctntttttccantagggntccncccccccttggccangcnnttannaaaaaatngnncccncaanttcaaaaggggggnnanaaccccnncaggnacnttaaaaanaccangcctttc

SEQ ID NO: 6638 - DNA, 870 bp, Homo sapiens
  misc_feature 37, 48, 108, 113, 137, 165, 167, 178, 180, 182, 183, 184,187, 194, 200, 227, 230, 231, 239, 246, 249, 266, 272, 273,278, 281, 286, 288, 289, 292, 295, 297, 298, 303, 306, 316,326, 362, 367, 370, 371, 381, 392, 417, 421, 428, 432: n = A,T,C or G
  misc_feature 436, 451, 464, 476, 486, 497, 520, 548, 593, 594, 625, 635,650, 651, 655, 688, 697, 706, 738, 746, 760, 770, 778, 780,790, 801, 803, 804, 818, 820, 828, 831, 836, 847, 851, 852,855, 863, 867: n = A,T,C or G
ggcggccgcccgggcaggtactcggggagaccgactnggacgagacangagggacagggaggcttcgcggaaccctacgcccacccgacgcgttcgcccgtccgtttntattntgatttttattttggtttttttgntgttgttctcttcttttgtctttttttncnttagacacggngncnnnctntgagtgncctctngtctcgagtccccgggctcaagcaatnctnncgactcanccttcgnaanatgtgggactacaggcncgcatnntcgcnccnggccnannccngtntnnatccnttnccttaaaatnagcaaaagtnggtgtctttttcctggcagatggaccctcccttgancaggnggnngaaaaaggangacagacacangggaggataagcacctgcaccgcancctnaaaggcnaganattnggaatgacacccttntgcaaggcccaanggaaacaccggngccatttggnttggggaaccnacccgggaagaaaagcccagaangaccaggccttgggagcctgggcttttnccttcacaagccccccaggaaagggaaccccacccctgggggccnncccttgatttccggacttttgggccttccanaactgggganaaaaaaaaaaatctnntggntgcttttaaaaaaaaaaaaaaaaaaaaaaaaangttccctcngggcccctntaaaaactagggggatcccccccgggcttganggaatttnaattttaagctttnttgatcccgncgaccctngngggggggggncccggggcccnannttttgttccctttnangggggggnaanattgncccccttggcntaannatnggccatanttgnttc

SEQ ID NO: 6639 - DNA, 1128 bp, Homo sapiens
  misc_feature 4, 5, 6, 7, 10, 11, 15, 16, 20, 21, 22, 23, 25, 26, 28, 29,30, 31, 33, 34, 35, 36, 37, 38, 39, 40, 42, 43, 44, 52,53, 55, 56, 57, 58, 61, 62, 64, 66, 69, 71, 72, 73, 74,75, 76, 77, 78, 79, 80, 81, 82, 83, 84, 85, 86, 87, 88,90: n = A,T,C or G
  misc_feature 92, 94, 95, 99, 100, 104, 105, 107, 108, 110, 113, 116, 173,465, 490, 559, 628, 647, 657, 670, 672, 711, 715, 743, 744,747, 748, 756, 758, 761, 764, 770, 772, 774, 779, 780, 806,810, 863, 865, 877, 883, 893, 894, 895, 905, 906: n = A,T,C or G
  misc_feature 932, 941, 943, 950, 957, 960, 963, 970, 980, 995, 996, 998,1002, 1005, 1010, 1021, 1029, 1035, 1041, 1046, 1048, 1054,1065, 1069, 1078, 1083, 1084, 1089, 1091, 1094, 1104, 1107,1117, 1118, 1128: n = A,T,C or G
cccnnnntanntatnnaatnnnnannannnntnnnnnnnntnnngaatattnnannnnatnntntnaantnnnnnnnnnnnnnnnnnntnangnngggnnattnntnncntcntantacgactcactatagggcgaattggagctccaccgcggtggcggccgaggtactgtnaatgtcactgtatatactctttattttacgctttgtctcatatccaaaatcaaacaaaaaaggatgtcttcagaaatgtagaattgtgcagtttggtgctgtgcccacaccactctaaaattaatgattaattgaatcatttgaggtcgctcaaattaaactaatttggcattgtgtgggtgacaaccagttgaaatgttttctttttatcaagctatgtgggcccatatttttggagacagccagaagtcttctggtctctttttctaccctggtaattctattccaaggngcctaagaactggggaaagtcccancttggggtaatgtaggtgaggaccctgtctctacaaaaaaggtaaaaaaattaagcccaggtgccagtnggccacaccgccctggaggcccccagctactttggggaagggcttgaggtttgggagggatcacttttnagcctggggaagttttganggcttgtaantggaagcctgcgnantttgcacccactgccactttcaagccctggggccacctngganggggaggaacccgtattccccaaaaatnnagnntattatgntncanttnacaaanantnagggnnccctggcccccggggccggggcccgncttnttaagaaacctaaggggggattcccccccgggcctggcaagggaaattccgantntccaaagccttnattcgnataaccccgnnngacccctcgnnggggggggggcccccgggtaccccangcttttttngnttccccnttttaangtnggnggggttnaaatttgccnccccctttgggcggnnanaccnatnggggnccataagcctngggttttncctggngggggnaaaantngggttntccccgttcancaantttccccanccaannattancnaanccccggggancantaaaaggggnnaaaagccccn

SEQ ID NO: 6640 - DNA, 854 bp, Homo sapiens
  misc_feature 462, 626, 630, 672, 682, 683, 690, 691, 701, 709, 727, 733,736, 737, 738, 745, 750, 752, 754, 759, 776, 778, 779, 783,789, 794, 795, 796, 802, 803, 804, 811, 815, 817, 820, 821,827, 836, 842, 843, 854: n = A,T,C or G
tatagggcgaattggagctccaccgcggtggcggccgcccgggcaggtacgcggggaaggcagcgatggcgatttttagtgtgtatgtggtgaacaaagctggcggcttgatttaccagttggacagctacgcgccacgggctgaggctgagaaaactttcagttatccgctggatctgctgctcaagctacacgatgagcgtgtgttggttgctttcggccagcgggacggcatccgagtgggtcatgcagtgctggccatcaatggcatggacgtgaatggcaggtactgagaatcaagacagagtagccattcatataacccacttggccttttatgaatgtttttcaaagaggctatttaactcaggttattctactctatgggtaatattgcatttggtaaggggaaaacccccacaccctaaaacttaaagattcacggtacctcggccgctctanaactagtggatcccccgggctgcaagaattcgatatcaagcttatcgatccgtcgacctcgaggggggggcccggtacccaagcttttgttcccttttagtgagggttaatttgccccgcttggcgtaatcatgggtcatagctggtttcctggtgtggaaaanttgntatcccctcacaaatttcccaaaaacataccaaccccggganccttaaaagnngtaaaannccttgggggngccctaantgaaggggaggctaaccntaccanttnnntgggcgnttggngncncaatnttccgggtttttttatntnngggnaaaccnttctnnncccccnnngcttttnatgnanttnngcccanccccccccnggggannaaaaatttttn

SEQ ID NO: 6641 - DNA, 873 bp, Homo sapiens
  misc_feature 479, 540, 550, 593, 600, 602, 610, 614, 621, 624, 634, 641,653, 660, 661, 664, 665, 667, 675, 687, 693, 700, 701, 703,706, 709, 717, 719, 729, 734, 745, 751, 754, 755, 757, 771,776, 778, 788, 789, 809, 810, 811, 818, 819, 820, 824: n = A,T,C or G
  misc_feature 827, 840, 843, 847, 853, 860, 861, 866, 869, 873: n = A,T,C or G
tatagggcgaattggagctccaccgcggtggcggccgcccgggcaggtacacagagtaaagaggacaaataggtgaaagaataaatgaaaggctggaatcccacttcccccgctgtcccagggcattggatattgacggataggaggcagcaaaccactcacagagccaggaagaaatgaatgcgttggtattgtcaggaggggaagccggcccgactgaaatacgctatgaccatagccaggagatactgatggagagaaaggaacacagagagggagaggtcacatcttggaagaggaagattgtggagagggggaatgagggtctggggaggggctgcccatcaagagaagggacctcagtgttggggtgactactcatttggaaattgcgggatggaggggtattcgaaggtcgggatgcaaatcctagaagccagaggaagggttttgggtgatgctcccaggatggtgggctncgatgggatctttggagggggtgtgtctaggtcggcttggtgtcaggagggtctttttgtnttccaggcanaaaaacttgtcccgaagagctttatagtttaaggggcccatgnaactttnanggcttgcnggcnaaacttnttnggcccaaaangctttantattccccaaanggacccnnttnntnaaagccangggggccccttntatttnacttttnncnagnaanaccaagcnanatttcctttnagggnaagaattttgncccaanttnntnaaaaaggccccaanaattntntcccgggaanntgggcggggttaaaaccttnnnattcccnnnaccnttnggccggtttttanaancttnttgggnttccccnngggtnttnaaan

SEQ ID NO: 6642 - DNA, 872 bp, Homo sapiens
  misc_feature 2, 3, 4, 5, 9, 14, 45, 63, 84, 175, 581, 611, 646, 660, 674,686, 690, 694, 695, 696, 701, 702, 703, 704, 705, 706, 707,708, 711, 712, 713, 714, 716, 739, 746, 765, 766, 770, 779,780, 788, 792, 794, 796, 799, 804, 806, 807, 831: n = A,T,C or G
  misc_feature 836, 844, 851, 859, 866, 867: n = A,T,C or G
gnnnnaagnttaantcttttaaactcctataggttaataggagcnccaccgcggtggcggccncccgggcaggttccagctctnttcatccccagggtttatgctcaccggtcagtgctggtgtgacatgatggctgagcaccggcactgtgtccagcgcattgctaggcactanacacgtgctctttcatttattcctcaaattgctttgtgctgtaaacgctacccagaaaggctcatgttcattactcaagtcacttcaccagaaagtgacagagccagaattcaaacccaggtctgccagattccaggtcccttgcttcttctgttgttgctcattgcaagggagtcttcttcaaggttattctcaggactttgattaagatacaggctcacagctgggcatggtgtctcatgctgtaatctcagcactttgggaggccaaggtgggtggatcacttgagctcagaagttcgagaccagcctggccaacatggtgaaaccctgtctctactaaaaatacaaaaattaaccaggcctggggacgggcatctatgatcccagctactttgaaagctgangcaggagaatcacttggacttcaggaaggngagtttgcaagtgagcccaagaatcacaccacttnacttgtactccaancctggggcaacaanaatgagactttnattncccnnnaaaannnnnnnnaannnntngggttcctttgggccgggttctnaaaaacnaattgggattcccccgggnngganggaattccnnttttaaancttntntnaanacccncnnccccctaaggggggggccccgganccccncctttttntttcctnttaattanggggttnnttgcc

SEQ ID NO: 6643 - DNA, 635 bp, Homo sapiens
  misc_feature 145, 184, 213, 234, 256, 274, 279, 292, 293, 300, 426, 494,524, 535, 567, 586, 601, 624, 626, 629, 632, 635: n = A,T,C or G
ggcgaattggagctccaccgcggtggcggccgcccgggcaggtacactgggtgatgagggcatcaggtaatgcccactaaggcctcagtgcactgcccatcaggagggatgggagctgcagaccaacgttactgacttgacgcanacacaaagcaaaagtggaggacggtggaggaagaagcancccaagggaggcgcggccagaccactgcntgagactcgtacctcggccgntctagaactagtggatcccccnggctgcaggaattcgatntcaancttatcgataccnncgacctngagggggggcccggtacccagcttttgttccctttagtgagggttaattgcgcgcttggcgtaatcatggtcatagctgtttcctgtgtgaaattgttatccgctcacaattccacacaacatacnagccggggagcataaagtgtaaaagcctggggtgcctaatgaagtgagctaactcacattaattgcgntgcgctcactggccccttttcaagtcgggnaaacctgttgngcccagcctgcatttaatgaatcggcccaacncctccgggggaaaagggcngttttgccgtatttngggcgctctttccgctttcctcngnttnaantgn

SEQ ID NO: 6644 - DNA, 874 bp, Homo sapiens
  misc_feature 170, 173, 196, 200, 303, 311, 372, 399, 447, 481, 521, 574,609, 626, 657, 662, 663, 676, 684, 712, 716, 723, 725, 736,761, 764, 768, 770, 772, 778, 779, 783, 790, 800, 801, 814,820, 824, 829, 839, 849, 855, 859, 860, 869, 874: n = A,T,C or G
gactactatagggcgaattggagctccaccgcggtggcggccgaggtactttttttttttttttttttttttttttttattttctgcaaatgctgatgtttaatgacctattctacttgaggaacctggacaatgaggattttctaaaatgccaagtcataaaacctcanacncttgcaaaataagagaacaaatntgcncggagctgctcagccactgatatgtcaactcctgggaacagctggtgtccacgggggagggggcagcatgtggccaggcatgtgagtggcttccactcagganagcccctntgagcaggtcttgttcaggagttcaaaatatgtcttccagggcatggtttcaacagtgaanaagcaggttgttcagctccaggctttnttgaaaagggcagttgtcaatgtcatcttcaaatttcctacatacggnttggcgcagttgcagattcatggagaacaccatnttaccccgccactttctgtccatgctatcctccctccatnaactcaggacgcccaacagcctgtaggcatgctcctccttgctctgcacgttnaaagtgttcaaaggcaaactccactgtgggcgaanaaacataggatcctggnctatttttattattaccaccccatttttctnttcannaacacccaggctntaagtcanccaggaagctggaagccccattgagaanccantgacagngncccaagggcantaaccttttctttcttttggggggnctnccanantngggggnngggntcccacnaagccccttnncttttgcccttanaaaaancccnggggnaaaaaagggnaacccccccntttacnttgnngggggggtngtttn

SEQ ID NO: 6645 - DNA, 876 bp, Homo sapiens
  misc_feature 74, 77, 81, 164, 199, 258, 265, 279, 289, 303, 360, 405,431, 436, 486, 497, 528, 591, 599, 606, 609, 631, 637, 652,655, 664, 675, 681, 682, 686, 687, 688, 708, 719, 721, 734,735, 746, 753, 756, 780, 799, 811, 818, 821, 822, 824: n = A,T,C or G
  misc_feature 827, 829, 835, 844, 846, 847, 848, 851, 856, 864, 865, 868,872: n = A,T,C or G
ggcgaattggagctccaccgcggtggcggccgcccgggcaggtacttttttttttttttttttttttttttttnganatanagtcttgctgttgcccaggctggagtgcagtggcatgatctcggctgactgcaacctccgcctcccaggttcaagtgattctntggcctcagcctcccaggtagctgggactacaggngcacaccaccacacccagctaatttttgtatttgtagtaaatacagggtttcaccacgngggccanatggtctcaatctnttgtccttgngatccacccacctntgcctcccaaagtgctgggattacaggtatgagccacttgcgcccagcctataaatnattaaagctagacaggcaaaatttaccaatcttaaaaaaatgctntatagcatttatttagttaatagtcnggggncaaacatttctgctaactgatatgcttatattacctcattttaatcctcncaacaattctntggaataatttactatttattccccttttgnacctcggccggtctaaaactaggtggatcccccgggctgcaggaattcgatatcaagcttatnggatccgntcgaccntgngggggggggccccggttcccancttttnttccctttaagtggnggntaaattgcncccttgggcgnaaatcnntggnnnataagcctgttttccctggngggaaaaattngnttattccgcttcnnaaatttccacncaaacantanaaaccggggaggcttaaaaggggnaaaaccctggggggggccntaatgggggggncctaccnccnntnttnanttgggnttggggccnannnggncccgnctttcacnngangggnaaag

SEQ ID NO: 6646 - DNA, 877 bp, Homo sapiens
  misc_feature 3, 8, 21, 22, 58, 237, 272, 293, 322, 362, 371, 393, 399,462, 498, 508, 517, 531, 581, 587, 591, 593, 602, 603, 612,617, 629, 656, 670, 680, 687, 692, 734, 739, 745, 754, 762,772, 775, 778, 779, 784, 788, 802, 803, 804, 811, 812: n = A,T,C or G
  misc_feature 813, 814, 815, 823, 825, 826, 834, 837, 838, 839, 841, 844,866, 867, 869, 870: n = A,T,C or G
ccngcttncccctttgaaacnnctatagtttgaattggagctccccgcggtggcggtngcccgggcaggtacttttttttttttttttttttttttttatcataagataatgcagaacagagagatggctacagccatgcagatgagaagaagaaaagaaatttcaaatcttggatgtttcttttgcccctaaggcttgaggacagggaacaaaaaatgagaaacacttaccctatntaaagcacccagttcagcaggcctgtgcggaacanaaatgactcctgaggaaaggngggggccggtcctgaatagttgatttctntctttaatgaaaaagaacatgaggccggatgcggtggctnacgcctgtnatcccaacactttgggaggccnaggcangtggattgcttaagctcaggagttcaagaccagtctgggcaacatggtgaaaccccgcctttncaaaaaaatacaaaaaattattcaggcgtggtggtntgcccttgtngtcccactncttgaggggcttangcaagaaaatcctttgaacctgggaggttgaggctgcaatgagccccaanattganccantncactttctnnctgggcganaaaangggagaaccttntcaaaaaaaaaaaaaaagttaagcccngagggaaaatttgnaatttgtaanggaaaanggganttaaaagggtttccttgtaaaaaaaaaaaaaagtttttgganttttnggtttnaaaaaattngaaccttnattttttttnganaannggggntttntttttccccgcccnnntttaaannnnnaaaacctngnnttttttcnaannntnaanggggggagccaaaaagggggcnncnnccccttt

SEQ ID NO: 6647 - DNA, 1275 bp, Homo sapiens
  misc_feature 4, 6, 8, 10, 14, 16, 17, 22, 23, 28, 39, 40, 43, 48, 52,53, 54, 56, 57, 59, 63, 64, 69, 70, 73, 84, 92, 105, 117,160, 174, 215, 218, 226, 242, 245, 287, 327, 338, 339, 351,356, 365, 367, 426, 445, 457, 461, 473, 477, 480, 488, 496: n = A,T,C or G
  misc_feature 502, 514, 519, 528, 567, 569, 578, 580, 585, 586, 591, 599,602, 604, 608, 620, 621, 622, 626, 633, 643, 645, 663, 676,681, 703, 704, 705, 717, 755, 765, 771, 779, 791, 792, 793,799, 801, 803, 812, 817, 820, 822, 829, 832, 835, 848: n = A,T,C or G
  misc_feature 849, 852, 855, 856, 860, 863, 868, 871, 887, 893, 894, 896,897, 898, 904, 908, 912, 927, 928, 929, 931, 934, 942, 948,950, 951, 954, 956, 967, 968, 972, 975, 983, 984, 986, 987,996, 1009, 1010, 1014, 1015, 1016, 1019, 1022, 1028: n = A,T,C or G
  misc_feature 1029, 1030, 1036, 1037, 1041, 1044, 1046, 1054, 1057, 1058,1059, 1060, 1068, 1070, 1074, 1075, 1082, 1092, 1100, 1107,1108, 1110, 1111, 1112, 1114, 1120, 1125, 1126, 1129, 1132,1135, 1137, 1140, 1142, 1150, 1152, 1159, 1162, 1164: n = A,T,C or G
  misc_feature 1170, 1171, 1174, 1176, 1177, 1178, 1179, 1180, 1185, 1186,1195, 1204, 1206, 1212, 1215, 1220, 1222, 1223, 1226, 1231,1240, 1243, 1246, 1248, 1250, 1251, 1254, 1255, 1257, 1259,1261, 1265, 1268, 1269, 1270, 1271, 1274: n = A,T,C or G
cccntntngncttngnntatcnntattntgcaattattnnatnttatnaggnnnannanatgnntttcnnacngttactcatanccacaggnggtgtgcttcttnacaactcctatnggcgaattggactccaccgcggtggcggccgcccgggcaggtncgcggggggcggcngctggcggaaagagctggctcagggcgtccgctaggctcgnacnacctgctngagcctcccaaaccgnttncataaggctttgcctttccaacttcagctacagtgttagctnagtttggaaagaaggaaaaaaagaaaatccctgggccccnttttcttttgnntctttgccaaanttcgncgcttgtangnctttttttgcccaagggctgtatggtgtttttttaagaaggtggcctattctaccaagnttcctttggccatcttccntggtttaaacanaagncacccccttcanccgnagnagggcaanccaagccnagtcgnattaagcccagncccgncaataaaangaaagccccaatgcctggggggggtccgcccttaagatngntgcaattgnancccannggggnccgggggnagntnatcnaacaaaaacacnnncccnaagaaanaaggggaatngncctgggtggggattcccntttgggccccggnacttnaccccccggaaccctttttggnnnaaaaaaatatcnccttttcgttctttaccccttgggggtgccaaataccntccttccttnttaccnttgggggnggtttaagggannngggtcnananaatttttanccccnaananaaaaacntcnagngtgggcccacccnnggnggnncttngtntcccntangggaggggatattctnattggnncnnnctggtngcanattnaaaaacggggacccnnncnatncaaaaagngggggnannccnanagtcctttctnnccanacnttgttttnntnnttttagtcnaaagggtaaaaannaaannnccnccntttggnnngataannttanagngngtaaaacngannnntgttcccntngggnnagagaanatgtgttatnttcggggnttcacannannntnccccgncaganncanttntcnanccncnggggagancntaaaaangantnaaaaannccngnnnnntttcnnttcactcantgggtgggnanattcanatntttcnannctnttcgntgcgggagntgnctntnannttnntncncntacnatnnnnacng

SEQ ID NO: 6648 - DNA, 1207 bp, Homo sapiens
  misc_feature 4, 7, 9, 10, 11, 12, 13, 14, 20, 21, 22, 23, 24, 28, 29,30, 31, 32, 33, 37, 39, 40, 43, 46, 47, 48, 50, 51, 55,58, 60, 61, 66, 67, 68, 72, 73, 74, 77, 80, 81, 91, 99,105, 106, 113, 116, 118, 146, 168, 304, 359, 362, 365, 400,407: n = A,T,C or G
  misc_feature 421, 436, 437, 441, 443, 463, 467, 488, 503, 508, 520, 535,536, 542, 548, 564, 566, 575, 584, 587, 609, 612, 614, 615,621, 629, 639, 642, 649, 668, 671, 682, 683, 706, 709, 716,721, 727, 728, 732, 736, 751, 756, 760, 763, 768, 770: n = A,T,C or G
  misc_feature 774, 776, 814, 815, 818, 825, 826, 830, 836, 838, 847, 860,863, 869, 876, 880, 882, 886, 888, 899, 900, 906, 909, 915,917, 922, 923, 928, 937, 938, 940, 941, 951, 954, 957, 964,967, 974, 983, 984, 985, 995, 1001, 1008, 1009, 1011: n = A,T,C or G
  misc_feature 1012, 1017, 1019, 1020, 1033, 1034, 1035, 1037, 1039, 1041,1043, 1045, 1049, 1057, 1059, 1063, 1069, 1073, 1074, 1077,1083, 1084, 1092, 1093, 1106, 1108, 1111, 1116, 1117, 1128,1135, 1138, 1142, 1149, 1158, 1161, 1165, 1167, 1168: n = A,T,C or G
  misc_feature 1169, 1180, 1196, 1205: n = A,T,C or G
cacnccncnnnnnnttaagnnnnnattnnnnnntcgnanntantgnnntnnttcnganannaaaannncaannnaanaannccacaagaangattaaanctttcnnccccctnagntngaattggagctccaccgcggtggcgcangaagcacaccatgccttccctncatgttccatcacggcgccacaatctgtgtcccttaacttctcagggtcaaagacaaaggcaagcgttgctgaattttctctttaatggccattggaagagtctggttcagtttttcccaactctcttcccactcntatttggggcctctgggttttatgaaggcacaaggaactgtgactttgtacctcngcncgntctaggaactagtggatcccccgggcctgcatggnaattcanatatcaactctttntccgattacccgtcnnaccntnataggggggggggggccccngggnacccccaaactttttggtttnccttttaacttgcanggggnataaatatggcngccggccttggggcnnaataantaccanttgagtttcaataagncntggttttanacatcggtngcnggaaaaaattttgttttattanccngnnttcacnaaattttnccaacaaccnaancattaancgtaaaaccccggggggangcnattaaataaanngggttaaaaaggctcttgggggnggnaggcccntaaantggaanngtgngaancctttaaactttcanaccantttnaantttgncngatntnccggcttcaacctggaaacccgcctttttcccaagatnncgnggaaaanncctnttttgntngcccaaacncggcacattaaanganaaattngggcccnaccncnaccngngagaaaaaagnncaaggntcnacgctntnttttnngggcnccttcttannannttttcttccnctnaancttgganttnctctttncgacttatnnngacttttttncagganatagaanngnngaagncnngggtatttaaggnnngnancntnanaaangggcccgngnaaantatccngggnntanaccccnnaagaaaanncacgggggggaananacnccccnnaaaaaaaaacncattttntanccanaaaaggnccctcctanaangggncnnnagaaacacccnaaaaaaaggggccccnttttttttncg

SEQ ID NO: 6649 - DNA, 908 bp, Homo sapiens
  misc_feature 142, 215, 271, 299, 313, 314, 320, 340, 344, 346, 363, 369,383, 398, 412, 413, 461, 467, 477, 480, 486, 494, 495, 503,525, 531, 532, 533, 538, 543, 544, 564, 565, 566, 567, 568,582, 605, 608, 622, 623, 626, 628, 633, 640, 643, 653: n = A,T,C or G
  misc_feature 655, 679, 681, 682, 684, 699, 704, 710, 711, 714, 721, 726,728, 736, 745, 763, 765, 768, 770, 771, 775, 778, 779, 783,791, 796, 800, 806, 809, 811, 812, 818, 820, 821, 822, 827,838, 841, 855, 857, 858, 871, 874, 875, 876, 883, 884: n = A,T,C or G
  misc_feature 895, 902, 903, 905, 907: n = A,T,C or G
gaattggagctccaccgcggtggcggccgcccgggcaggtactttaggagacccaggcgggcagattgcctgaggtcaggagtttgagaccagcctggctaacatggtgaaaccctgtctctactaaaaatacaaaaattanccgggcatggtggctcacgcctgtagtcccaactgcttgggaggttgaggcaaagagaatcgcttgaacccangagggggaggttgcattgagccgagatcgcgccactggctccaacatggggcgacngagcatgactccatctcaataataaaanaaagaaagaaacanngaaaanaaaagcttatattgaacttnttgngngaaagaaaaaaaagaangcctgntgcacacaaatctnaatttgggaaggtcntccaattaaagggnntttttttttgcattcacaaaataattcttttactcccccccaaaaatncaaatnaaaaaggtcnaantcgccnaccttttnnctaaatgngggttttaaaaaatggttaatncacccnnntaccnttggnnttcccccaaccttttttttnnnnngttttattaaattnctattggggggtaaaaggtgganggntttaacccttgganntgnanggcgngttttanaanaaggtttgtngntttttaaaccttgcccctgggaanannangggtgggttcttttnttttngaagtnntgnagaaaantgggntngggggggnccccaaaanttttttttaaacttttantnctntnncccnccnncccnggagcccnttaantttntttttngtnannaacccngnnnttttnggggaaaattnggnccccgggggggccncnngggggcctttttnaannnatggggnnacccccggggnccccggnntntnt

SEQ ID NO: 6650 - DNA, 837 bp, Homo sapiens
  misc_feature 370, 575, 599, 608, 615, 627, 665, 667, 668, 670, 677, 678,680, 687, 688, 689, 692, 725, 728, 742, 743, 751, 758, 759,761, 781, 785, 788, 795, 799, 805, 808, 811, 812, 822, 829,830, 832, 834, 837: n = A,T,C or G
gggcgaattggagctccccgcggtggcggccgaggtacgcgggctattcaccctttctaacattctttcttcttgccacctgtatgccacaaatataagaatgaaataggccaggtgcagtggctcatgcctgtaatcccagcactttgggaggctgaggtgggtggatcgcctgaggtcaggagttcgagaccagtctggccaacatggtgaaaccctgtctttacttaaaaaaaatacaaaaattagccaggtgtgatggcaggcacctatgtataatcctagctactcagtaggctgaggcaggagaatagcttgaacctgggaggcggaggttgcagtgagccaagattgtgccattgcactccanctggggtgacaagagcgagacttagtctcaaaaaaaaaagaatgaaataaaattggcccgggcgctgtggctgacgcctgtaatcccagcactttgggaggccaaggcgggcagatcacttggggtcaggagttcaagaccagcctggccaacatggtgaaaactcgtctttactaaaaatacaaaaaattagcccgggtgtggngggcaacaggccctattagtctcngcttcttcnggaagcntggagggcaagnaaaaattgctttgaaccctgggaaaaccggaaggttgnanntnaagcccnntntaaaaannnagngggaatccccccgggcttgcaaggaaatttcanatntaaaagcttttttnnttacccgnccaaccnntnaggggggggggccccgggancccnaanctttttngttncccttntanganngggtaaaatnggccccnntngngcn

SEQ ID NO: 6651 - DNA, 895 bp, Homo sapiens
  misc_feature 3, 4, 5, 11, 74, 260, 555, 578, 674, 716, 780, 783, 788,797, 802, 827, 839, 847, 850, 851, 861, 863, 864, 867, 869,887, 894: n = A,T,C or G
agnnnatagtngcgcgtaatacgactcactatagggcgaattggagctccaccgcggtggcggccgaggtacanaagaacttcccaggatcctccatgccgtgactttcatcctggcccccacctgtgtgtgtgtttcctgcctgtccctgcaccacatacggaccccttacagggcgctgtggaagcaggaattcctgggctggaatgccagttctccacttggagctgtgtgacctcaggctggtgacttgacctctntgatacacatctatattgaatgtgtatctattgaatgtgtgtcacctgtaaaatggaaatctgacccacatttcagggctatgtgaaggataaacagttatgtgaagtacctgcccgggcggccgctctagaactagtggatcccccgggctgcaggaattcgatatcaagcttatcgataccgtcgacctcgagggggggcccggtacccagcttttgttccctttagtgagggttaattgcgcgcttggcgtaatcatggtcatagctgtttcctgtgtgaaattgttatccnctcacaattccacacaacatacnaacccgggagcataaagtgtaaagcctggggtgcctaatgagtgagctaactcacattaattgcgtttgcgcttactgcccgcttttcaatccggnaaaactgtcgtgcccacttgcatttaatgaattcggcccacncccccggggagaaggcggtttgcgtatttgggcgctttttccgctttccttcgctttaaatganttncttgngccttgggncgttncgcctggggggccaagccgggtttnaaacttaactcnaaaagggnggnnaaataccggntnnttncnaaaaaattaagggggganaaccccng

SEQ ID NO: 6652 - DNA, 872 bp, Homo sapiens
  misc_feature 455, 590, 626, 634, 702, 703, 766, 772, 775, 787, 803, 810,814, 821, 828, 835, 850, 852, 855, 872: n = A,T,C or G
gaattggagctccccgcggtggcggccgaggtacgcggggggtggttgggtggtaagatggcggctgtgagtctgcggctcggcgacttggtgtgggggaaactcggccgctctagaactagtggatcccccgggctgcaggaattcgatatcaagcttatcgataccgtcgacctcgagggggggcccggtacccagcttttgttccctttagtgagggttaattgcgcgcttggcgtaatcatggtcatagctgtttcctgtgtgaaattgttatccgctcacaattccacacaacataccgagccgggagcataaagtgtaaagcctggggtgcctaatgagtgagctaactcacattaattgcgttgcgctcactgcccgctttccagtcgggaaacctgtcgtgccagctgcattaatgaatcggccaacgcgcggggagaggcggtttncgtattgggcgctcttccgcttccttcgctcacttacttcgctgcgctcggtcgttcggctgcggcgagcggtatcagctcactcaaaagggccggtaatacggttatccacagaatcagggggataacgccaangaaagaacatgtgaagccaaaaagccatgcaaaaanggccaggnacccgtaaaaaaaaggcccccgtttgcttggccgttttttttccataggcctcccgccccccttgacnnagcattacaaaaaaatttgacgcttcaaagtcaagaggtggcgaaaaccccgaccaggacttnttaaanatnccaagccgtttncccccttggaagcctnccttcgngccncttttcntgtttcngaccctntccgtttaccccggntnccntttcccgcctttttccn

SEQ ID NO: 6653 - DNA, 897 bp, Homo sapiens
  misc_feature 64, 598, 612, 615, 623, 626, 627, 632, 636, 647, 652, 654,655, 657, 658, 659, 664, 667, 671, 672, 676, 681, 694, 701,706, 707, 708, 710, 712, 716, 719, 720, 721, 735, 742, 743,748, 752, 756, 760, 762, 767, 769, 771, 778, 788, 791: n = A,T,C or G
  misc_feature 792, 796, 798, 800, 802, 809, 811, 814, 815, 818, 823, 829,830, 832, 835, 841, 843, 850, 851, 861, 863, 865, 872, 876,880, 881, 882, 888, 889, 891: n = A,T,C or G
tactatagggcgaattggagctccaccgcggtggcggccgaggtacctcagcacagcacagccncgctacaaaaacgtggccagactcttgtttacgtcagtccctgatcacatttctagttagcgggtgaagtctttcaaccggggtctctggctaccttgactgctgttctctggccgacagaggtctcaggcctccctgagtcagagctcccagggggaggaccagattgtcatctgtgctgggggttcacttttgagagagttctcctctgagacctgatctctggaggctgggcagtcttgcacttgaggtggggctggtctgatctcagcactccttagtctgctcgcctctcccatggccccagcctggccacacctgcttacggggcactcgtagatgcccacaccatagcttccatgctagtggactgtacctgcccgggcggccgctctagaactagtggatcccccgggctgcaggaattcgatatcaagcttatcgataccgtcgacctcgagggggggcccggtacccagcttttgttccctttagtgagggttaattggagccctttgccgtaatcatggtcantagctgtttcctgnggngaaaattnttnntccgntttnacaatttcccncaaanannannnccaanccngggnncatntaaangggaaaaaccccnggggggnccaannngngngggngcnnnactcccctttaaanttggggnntgggnccanactngccncnttttnanantgggganaaaaatttgntgnncccnangntntttttananaannttncccancccccnngnganaggggngngttttgnntttttggggnantntttttgntttnctgnnntaaagnncngggggc

SEQ ID NO: 6654 - DNA, 895 bp, Homo sapiens
  misc_feature 544, 594, 597, 615, 638, 649, 650, 663, 664, 668, 676, 680,681, 688, 697, 700, 704, 705, 713, 720, 721, 722, 726, 737,739, 748, 750, 754, 762, 765, 767, 785, 787, 796, 800, 806,814, 815, 816, 818, 824, 825, 833, 837, 840, 849, 859: n = A,T,C or G
  misc_feature 867, 874, 885, 888, 893: n = A,T,C or G
tcactatagggcgaattggagctccaccgcggtggcggccgaggtacattaggaaataagtcctctaaaaagaaatcatgatcctgctatccaggattcactgatatcaattaggagctttcattcttgatgccttccaagctgataaccaaatgtccctgctctcagagaatcaccactgtgactccaatgaatggcagtgcgccaacaaacgttgcatcccagaatcctggcagtgtgacacatttaacgactgtgaggataactcagatgaagacagttcccactgtgccagcaggacctgccggccgctctagaactagtggatcccccgggctgcaggaattcgatatcaagcttatcgataccgtcgacctcgagggggggcccggtacccagcttttgttccctttagtgagggttaattgcgcgcttggcgtaatcatggtcatagctgtttcctgtgtgaaattgttatccgctcacaattccacacaacatacgagccgggagcataaagtgtaaagcctgggggtgcctaatnagtgagctaacttcacattaattgcgttgcgctcactgcccgctttccantcnggaaaacctgtctgcccngctgcattaatgaatcggcccancccccggggannaggccgggtttgnngttntttggggncccnntttcccntttctttgnttnaatnnaaacttgntttggcnnngggnctttttcgggntnggggggganancggnttttaaanttnantaaaaagggggggttaantncgggttttncccncaaaancacggggnnnancccggnnaaaaaaancttntancaaaaaagncccacaaaanggcccagnaccccgnaaaaggggccngcntttgngg

SEQ ID NO: 6655 - DNA, 950 bp, Homo sapiens
  misc_feature 140, 145, 186, 189, 210, 212, 218, 263, 286, 303, 308, 311,332, 383, 412, 440, 447, 455, 472, 473, 491, 522, 525, 526,536, 541, 542, 551, 557, 559, 561, 563, 565, 569, 571, 576,581, 585, 586, 587, 589, 599, 600, 610, 613, 617, 621: n = A,T,C or G
  misc_feature 624, 629, 630, 637, 640, 646, 653, 655, 657, 658, 661, 663,671, 674, 675, 678, 685, 691, 693, 700, 704, 707, 708, 711,715, 722, 725, 726, 729, 740, 742, 744, 750, 755, 756, 760,761, 762, 763, 766, 767, 769, 771, 773, 774, 776, 777: n = A,T,C or G
  misc_feature 778, 782, 787, 788, 793, 795, 797, 804, 807, 809, 812, 813,816, 820, 825, 830, 831, 835, 840, 845, 846, 849, 850, 855,858, 860, 863, 864, 865, 866, 874, 875, 876, 878, 879, 880,886, 889, 890, 892, 893, 898, 909, 910, 914, 919, 921: n = A,T,C or G
  misc_feature 925, 935, 942, 943, 945: n = A,T,C or G
gtaatacgactcactatagggcgaattggagctccaccgcggtggcggccgaggtactttttttttttttttttttttttttttttttccttataaaccacacaggcccactcagcacatcggattgctgcatggtatgnggagngtccaatgcataccaagggggttgtgtggctgccaggctgnganccccctcggcctcagcacggntntgctanacaaagtagttttccaagctaggtcctattgcatcaattatttgnaacctgtcatctgcccccatggngagcgattcacttgganagggnggnggtgaccctgtttgctggtcnccatcaggaagcgagccctgttcttgctgatcccagtccacttacattgtnaagcttgtagtaaagcccacaggcattgnaaacagggtccccattggcattcctccnccaaagngtggttgngggggtctgacagttcnnacaggacgtcccttgctntcctggcttgaaaactgaaaagtggggaaanagnnaaaagggttnaatannaaaacaganggtctnanangntntttncntatangtttnaaannnangttttttccnnatatatgcgngtntgtntatnaanatgcnnagacagncanaactcnagccccncnannagnanccctagtncanntcnttagaangactgngngataatnagtntgnnggntcancaaaatntcnnttntaatccttttntncntgagcnccttnnttcnnnnacnntnananntnnnattnacacnncacangngnttttttntgnanaannttngttnttccncgggnnactntatgngtgcnnttnntaaanacntnagnnnntccccgcnnntnnngagaanttnnannttttnctttttttttnncccnccacnancctntggggggggnctccctnncnccccc

SEQ ID NO: 6656 - DNA, 992 bp, Homo sapiens
  misc_feature 11, 217, 219, 229, 243, 266, 284, 293, 303, 306, 310, 330,364, 404, 418, 480, 490, 499, 510, 514, 525, 546, 560, 561,567, 572, 573, 584, 590, 599, 607, 617, 621, 633, 636, 643,650, 652, 655, 662, 672, 676, 679, 698, 700, 722, 726: n = A,T,C or G
  misc_feature 728, 737, 738, 755, 756, 783, 796, 806, 816, 820, 831, 832,834, 846, 847, 849, 855, 856, 858, 863, 864, 865, 869, 877,881, 890, 899, 902, 907, 915, 916, 920, 929, 933, 941, 943,947, 948, 949, 952, 954, 963, 968, 979, 981, 982: n = A,T,C or G
ttaggggggangagcgcgcgtaatacgactcactatagggcgaattggagctccaccgcggtggcggccgcccgggcaggtacggtggtgcgatctcagctcattttgacctccgcctctcaagagttcaagcaattcttgtgcctcagcctcctgagtagctggaactacaggcatgtggccaccacacctggctaatttttgtgttttttagtananatggggtttnaccatgttggccanaatggtctcgaactcctggcctnaagtgatccacccacctnggccttccnaagtgctganatnccanccttaaccaatgtggcctgnggccaagaaccatacttttaaaacaccaaaatanttaggccaagattgctcttttttaaagcaaaagagatatntagttaaagacatnaagaataaaaattaggcactcttcctcttttccaaatctttggaattctttatttaaaatanattaaatttnaaacccttnacaagtttttngganggaaaaaaccncattttaaagggggaccatanaaattatttaattnnaccccnctttnnttccaaaattnaaattngacaaaaanaagaacancccttttttnttanattttaaacccncangttaaanaattggngnttnaaaagangcaagttttngcangtngggaaaattgaaaccaggntngggcaaaaccaaagccaaaaangaangnttttttggnnaggaagccaaagaaaannaaaaaccttgggattcttgaaggcctngaaaaaactttcnaaccccctcnttaaaaaaanatanttttttttttnntnaaaaaaaaaatnntnttaaannanagggnnngaancccccccntttnaactattantttttttangtntcccncggcccgnntaanaaaaaaaangganaccccccncncggnnnggnanatttttttnaaaantttttttcccncnnccccccccgg

SEQ ID NO: 6657 - DNA, 863 bp, Homo sapiens
  misc_feature 2, 4, 5, 7, 8, 9, 10, 11, 12, 166, 171, 172, 174, 176, 178,182, 185, 186, 189, 200, 205, 210, 212, 213, 216, 221, 226,232, 235, 240, 251, 255, 259, 261, 263, 265, 275, 282, 284,291, 303, 316, 323, 329, 345, 350, 353, 359, 363, 368: n = A,T,C or G
  misc_feature 379, 382, 385, 387, 393, 396, 397, 399, 401, 403, 410, 421,433, 435, 437, 440, 442, 455, 457, 471, 472, 483, 490, 493,494, 496, 499, 502, 505, 507, 508, 509, 520, 529, 530, 541,543, 544, 545, 559, 560, 565, 576, 591, 607, 608, 614: n = A,T,C or G
  misc_feature 620, 629, 630, 635, 644, 652, 662, 666, 668, 674, 676, 687,698, 700, 701, 703, 707, 715, 723, 727, 728, 739, 744, 747,748, 751, 758, 759, 762, 767, 771, 776, 782, 786, 787, 788,789, 790, 791, 810, 816, 819, 828, 842, 854, 861: n = A,T,C or G
gnanngnnnnnngacgcgcgtaatacgactcactatagggcgaattggagctccaccgcggtggcggccgcccgggcaggtacttttttttttttttttttttttttttttctttttttttttttttttttttttttttttttttttttttttttttttttttttnttctnnanananaaanatnnaangggtttttttnttttnaaaanannagnaaaanacccntttccnttnaaagnaaaaaaaaaantttntttntngntnaacccaaacnccagggngnaaggggnggccctttgggnaaagtaaaggganggggatntttggnggaaaatggccccccnttaanaancccttnaggnggaangaattgcaggnggntcntngggganagnnananantttcccnaaccttgcccntttcctaaatgnanantgntnaccggggtaaaananggggacttggccannctttttttaanaaagggnaanncnttnacnttngnnntttttaaaaantttttgcanngcttaaaaaancnnnttttgggggggggnnttttncccggaaaatnaaatttccagggttnggggttggaacttggnntcctcntgggcncgggtcccnngggcnttttaaaantagggganccccccgggntggngnaaatcnanttaaaagcttnttagaacccgncnncntgangggggggnccccggancccnnttttttttccnttttnagnnggntaaattnnccnccttngggnaaaanaggggnaaannnnnntttccctggggaaaaattnttttcnccntcaaaattncccaaaaaaaaaanaacccggggacnaaaaagnga

SEQ ID NO: 6658 - DNA, 1226 bp, Homo sapiens
  misc_feature 1, 4, 5, 8, 14, 19, 21, 23, 25, 36, 39, 43, 49, 50, 56, 57,60, 61, 66, 68, 70, 71, 72, 73, 74, 75, 79, 84, 86, 89,90, 91, 98, 101, 104, 106, 107, 108, 109, 110, 122, 123,127, 132, 133, 141, 148, 158, 187, 216, 217, 218, 220, 233: n = A,T,C or G
  misc_feature 237, 239, 245, 246, 252, 256, 270, 355, 385, 423, 513, 536,555, 576, 578, 595, 610, 622, 633, 658, 705, 718, 729, 733,752, 755, 776, 781, 823, 826, 836, 847, 858, 860, 867, 869,873, 874, 880, 889, 894, 925, 933, 938, 940, 946, 955: n = A,T,C or G
  misc_feature 963, 973, 979, 985, 987, 997, 1003, 1010, 1012, 1019, 1021,1022, 1024, 1026, 1027, 1030, 1031, 1050, 1058, 1064, 1070,1080, 1087, 1091, 1094, 1095, 1105, 1111, 1114, 1117, 1118,1119, 1120, 1123, 1126, 1132, 1133, 1136, 1137, 1145: n = A,T,C or G
  misc_feature 1161, 1163, 1184, 1185, 1186, 1189, 1190, 1195, 1210, 1215,1221, 1223: n = A,T,C or G
ncgnnctnacaatntcttnantntntctgtctactnacnattntttcanntatttnnctnntaatntnannnnnnatgntagtntntcnnntcaagtnagnggngnnnnnaatcgtagactnnatanttctnntagggcgnattggcnctccacccgnggttggcaggctcgcccgggcaggtactngggttttaccacgtgggtcaggctgggannngnaactcctgacctnaaananatttanntgcctngggnctcccaaagtgctnggattacaggtgtgagccaccatgcctggcctcatctctctttttttgaagacagggtcttgctctgtcacccaggctggacctnagttggcatgatcatgtctcaagggcagcnctcggaccttctgggctcaaatggatcctcccaccctnttgccttccgagctagcgtggccacttacccgggccacatgcccacccataattcttggcttaaattttttaaattcttttttggtaggnaggaccacggaaatcttcccctnatggtttaccccaagggcntggttcttgaaaaaccttccntngaggggcaaaggccaantcccctgttaggtcnttcggggacttnccaaaatgggntttgggggaatttaataaggggccntgggggcccacccacaacccttgggccttcaaaaaaagccattcttnttatttggtccantttttttgggntggntccaattggtaattaccanggntaaaaaaaaggaaacctccanttttngggattcctgggtttcccaaaacccaaaaaaccaaacccttnggnaaaaaaccangggactttaanaaatcaaaccncnaaggccnantccnngcgttnggctttagntaatnggggtccttcttaaaacatttttttatgaancctccccnccagnantttaantttttaggnggaacctnaaaatcccangccccnattttncnatttttttantggggnaaccccngnaaaaccntnnancnnacnncctttaaaaaattttgganggggggancctttnttttcnaaaaaggccncaacaancccnggnntttaagttancctttnggngcnnnnttntanaaaacnnaanntgggaatnccccccggggccttgncntgggaaatttccttaatttcnnnagnntttanttgtattacccggtngaaancccttnanggg

SEQ ID NO: 6659 - DNA, 1201 bp, Homo sapiens
  misc_feature 2, 4, 6, 7, 10, 14, 20, 21, 22, 23, 24, 26, 27, 31, 32, 33,34, 36, 38, 40, 44, 46, 47, 52, 54, 59, 82, 87, 90, 91,95, 96, 107, 108, 111, 113, 115, 116, 118, 125, 134, 135,378, 379, 399, 419, 428, 435, 441, 458, 460, 534, 541, 542: n = A,T,C or G
  misc_feature 548, 560, 581, 586, 589, 596, 599, 611, 622, 628, 689, 695,699, 729, 734, 741, 759, 761, 763, 780, 788, 811, 818, 824,827, 842, 853, 861, 862, 863, 872, 880, 883, 897, 905, 907,909, 917, 932, 933, 939, 942, 945, 959, 965, 973, 975: n = A,T,C or G
  misc_feature 978, 980, 981, 986, 995, 1002, 1014, 1024, 1025, 1042, 1045,1048, 1052, 1054, 1068, 1071, 1073, 1075, 1077, 1081, 1082,1087, 1089, 1090, 1091, 1092, 1102, 1113, 1114, 1117, 1118,1131, 1134, 1143, 1154, 1156, 1157, 1158, 1168, 1169: n = A,T,C or G
  misc_feature 1171, 1178, 1180, 1190, 1191, 1192, 1193, 1194, 1195, 1200: n = A,T,C or G
cntncnnccnctcnttgaannnnntnntccnnnntntncnactntnntactntnttttnaattatttgcttctctgcattcntgacnatnntctnncttttaggagnngcngngnntnttctctnttcactttnnggcgaattggagctccaccgcggtggcggcacgcccgggcaggtactttaggagacccaggcgggcagattgcctgaggtcaggagtttgagaccagcctggctaacatggtgaaaccctgtctctactaaaaatacaaaaattagccgggcatggtggctcacgcctgtagtcccaactgcttgggaggttgaggcaagagaatcgcttgaacccaggaggtggaggttgcagtgagccgannatcgcgccactgcactccancatgggcgaccagagcaagnactccattnttcaaantaaagnaaaagaaaagaaaacananagtaaataggaaaaaggccttataattggaaactttcttcttaaaaaaaaaaggaaaatataataggggaaagncccttgnnttgccncaaccaaaaatncttaaaaatttctttgccaangttcngtntttccanatnttataaggggantttttttttantttttngccatttcaacaaaaaaattaaatttctttttaacttctcccccccccaaaaaaaattcanattaantaanagggttctaaaaatttggccaaaccttttntcccntaaaatngttgttttaaaaaattgntnanattcatccccaaattancattgttngttctcccaaacttttttttttncccaagntttatnaanttctcttaatttggngttaaaaaggnggagggtnnntacccttgnaaatttgntgncccattttaagaantaagttgntngncttattanaacccttgtcccttnnaaaaanganccnattttttttttttnttttanaaagttantnagngnnaaaantgttttggnggggccncaaaaatttccnttttaaaatnnttttttttttttttccntcntantccntntacctcttaaaatnttncntngnaccnnaaacngnnnntttcttggtngaaatacattnngannaaccatggggtanccntctgtgccntgcttcttaanannnatagtggggnntnctccccncngtgggttggnnnnnnaatang

SEQ ID NO: 6660 - DNA, 839 bp, Homo sapiens
  misc_feature 456, 569, 583, 653, 760, 762, 776, 793, 796, 808, 822, 823,826, 827, 828, 829: n = A,T,C or G
ggagctccaccgcggtggcggccgcccgggcaggtactgcggctgaactggcactcaaaccacaagactacagtccttcccatacttccctcccctttccataggaagaggagcctcaccctgtggtaaccaccaccacagacccatagggactactgccaggctactgccaatgttctcttgaagcccaagggctgcctgtaatcccaacactttgagaggtcaaggtgggcagaacccttgaagccaggagttcaagaccagcctggccaacatggtgaaactccgtctctactaaaaatataaaaattagccaggtgtggttgcacatgcctgtaatcccagctactcaggaggctgagacagaatcacttgaacctgggagacggaggttgcagtgcaccaagaccgcgccactgcactccagcctgggccacaagagcaaaacttcgtctnaaagataataaaaattaatgacattggtttttcaacttttagaatcaccctattagaccaagcatagaatgatataattttttaaattatagggaaaataaaacttgggactnaaaaaaagggaggntggggaaatggttaaatgagcttgggttttttctttgccataagcaagggctttaaaacaaaaagttggnttaaaaccaaggaaaatagcccgtttttaggaaaattacccttgggcccgggccccaaatgggcttcattgcccttgtaaatcccaacccctttttggaaaggcccnangccggggcgggttnacccctaaagggtcaanggngtttaaagaacnagccttgggccaannatnnnngaaaaccccg

SEQ ID NO: 6661 - DNA, 1120 bp, Homo sapiens
  misc_feature 6, 7, 9, 13, 14, 17, 18, 21, 22, 23, 27, 29, 30, 31, 33,34, 35, 39, 40, 41, 43, 44, 54, 56, 57, 58, 59, 63, 65,68, 69, 70, 71, 73, 74, 77, 78, 80, 81, 83, 85, 86, 92,98, 103, 106, 107, 108, 115, 172, 206, 208, 265, 277, 351,400: n = A,T,C or G
  misc_feature 403, 437, 441, 460, 491, 505, 531, 543, 572, 573, 614, 615,632, 661, 663, 666, 670, 677, 689, 700, 707, 723, 724, 733,758, 767, 774, 788, 801, 811, 816, 818, 823, 826, 830, 833,835, 836, 840, 843, 853, 854, 858, 869, 873, 904, 910: n = A,T,C or G
  misc_feature 911, 922, 923, 928, 933, 936, 937, 944, 947, 950, 954, 957,974, 978, 988, 992, 995, 1009, 1013, 1017, 1021, 1022, 1023,1025, 1026, 1030, 1035, 1036, 1037, 1049, 1058, 1065, 1088,1092, 1097, 1100, 1101, 1102, 1115: n = A,T,C or G
cccctnntntcannatnntannnattntnnntnnnttannntnncttattgttntnnnncatntntannnntnntanngnntntnntcttcngttggnggtgnatnnnaattctntatccactcactatagggcgaattggagctccaccgcggtggcggccgaggtacttnttttttttttttttttttttttttttttaggttngntctttaacctcattactttcctttgctcacagaacctggaagcaacgttgacatttntttggacagctntgaccgggttttaatcccaaaaagaatcccttaacactgtggcacatgaggcacagggcacagtcacaggtctnagggactcatgatcctacttcagggagagctcaaaagggtaacatcatnttnagaaggaacactggtttcccagggggcaaaaatnacantggcttggggcagtccaanaaaaggacagcccgggagggaggttgggacnttgaacttgacttnttgaagggagaagggtaaaaatcttngaaatcgggcanaaaaagcaaggcatgggaaggcccaaatnnggggggtaaacccaaacaaaggggacaggggtgccccttgnngaccagggacctttaanggaaagcctggactttttggcgggggccntnttntggnccccttngtttcagctaancattttacttngggcacncccttggcagtcactnntagcccatncttgggggcaaaggttttaaaagangaaattccnaaagccnaaccccaccccttnggggggggaaccnccccaatttnttccncncgggngtntttnaangnngacnttngaactttccnnttangggcccaaggncttngcccccgggttttaaaaaattccttgggtanaccttnncccccgggggnnggccngtttnttnnaaaaacntanggngggnatncccccccgggggctttngaanggaattttcntatnttncaaagcctttattngcgnattncccnnncnnaccnttttnnngggggggggggnccccggtancccccancttttttgtttcccccttttaangggnggggnttnnntttgccccccttntgccg

SEQ ID NO: 6662 - DNA, 1078 bp, Homo sapiens
  misc_feature 2, 4, 5, 6, 8, 9, 10, 11, 12, 13, 15, 19, 20, 21, 22, 23,26, 29, 30, 31, 33, 36, 37, 39, 40, 41, 43, 48, 49, 51,52, 53, 55, 56, 58, 64, 65, 66, 68, 70, 72, 73, 76, 79,80, 82, 83, 84, 85, 88, 89, 90, 95, 98, 104, 105, 111, 503,655: n = A,T,C or G
  misc_feature 668, 679, 748, 754, 769, 782, 799, 801, 802, 805, 816, 823,830, 831, 832, 844, 856, 878, 890, 895, 896, 910, 946, 951,959, 963, 983, 992, 1012, 1013, 1014, 1018, 1022, 1025,1028, 1034, 1035, 1039, 1053, 1055, 1057, 1062, 1065, 1067: n = A,T,C or G
  misc_feature 1076, 1078: n = A,T,C or G
cncnnngnnnnnntntttnnnnnttnctnnnanatnntnnntnatggnntnnnanntntttttnnnantnannatnatnntnnnnagnnnggcgnagnccttannctcctntaggcgaattggagctccaccgcggtggcggccgcccgggcaggtacgcggggattccccagaccttctgcagattctgtggttatactcactcctcatcccaaagaatgaaatttaccactctcctcttcttggcagctgtagcaggggccctggtctatgctgaagatgcctcctctgactcgacgggtgctgatcctgcccaggaagctgggacctctaagcctaatgaagagatctcaggtccagcagaaccagcttcacccccagagacaaccacaacagcccgggagacttcggcggcagcagttcagggggacagccaaaggtcacctcaaggcaggcaggaactaaaaccccctggaaatcccatagtgggaagaaaaagtatnttttactaacaggaacaagcccttggcaaaaaggcagggaaaaagggaatgccaccgggagggcgttgccaaggtgggaaaaacaatttcattcgaaaatgggaagttggaaattttgcacaaaaaattacttgaaggaaatttaagttctntttaaaaaccatngggcattgaanaaagcttggaaaaaagaaatgggggatccattttgggaacttttaaaagccctttaaaatacccctttngtaagnccccaaaaagctttntttaaaaaaccgnaaaagccatttccaaantnnaanaaaaaaaaaanttttaanaaataannngggttccccttnggggccgctttnttaaaaaacttaggtgggaatncccccccggggncttgnnaaggggaaattttngaattatttaaaagccttttatttcggattaacccnggttngaaccctncaanggggggggggccccgggtanccccaaacntttttggttccccttttaannngggngggnttnaanttgggnncccntttgggcgggaaantnanggggncananccttgtttncn

SEQ ID NO: 6663 - DNA, 1071 bp, Homo sapiens
  misc_feature 2, 4, 5, 8, 9, 10, 11, 12, 13, 14, 16, 17, 18, 19, 20, 21,22, 24, 25, 28, 31, 32, 33, 34, 35, 37, 39, 41, 42, 43,44, 45, 46, 49, 50, 51, 52, 55, 56, 57, 58, 59, 60, 65,67, 68, 69, 70, 71, 75, 76, 77, 78, 79, 81, 83, 85, 90,91: n = A,T,C or G
  misc_feature 92, 94, 96, 98, 100, 108, 418, 441, 472, 473, 482, 570, 617,727, 767, 773, 789, 805, 832, 851, 857, 868, 886, 891, 903,905, 916, 925, 943, 1001, 1010, 1020, 1032, 1035, 1036,1037, 1039, 1042, 1051, 1060, 1062, 1069, 1070: n = A,T,C or G
cncnntcnnnnnnntnnnnnnngnnttnttnnnnntntnannnnnntannnnatnnnnnnttttnannnnntttnnnnntnanangggannngngntntnaaacgatnatatagggcgaattggactccaccgcggtggcggccgcccgggcaggtacgcgggatacagcatcggggccaggtgtggtggctcacgcctgtgatctcggcattttgggaggctgaggtgggcagatcacaggatcaggaaatcaagatcatcctggcaaacatggtgaaacccgtctctactaaaaatacaaaaattagccgagtgtggtggcatgtgcctgtaatcccagctactcgggaggctgaggcaggagaatcgcttgagcccaggtaggtggaggttgcagtgagccaagatcgttgccantgcactccagcctgggcaacagnagcggagactccatctcaaaaaaaaaaaatnnaagaaggtncctcggcccgctctagaaactaggtgggatccccccggggctgcagggaatttccgatatcaaggcttatcggattacccgtccgacnctcgaggggggggccccggtacccaagcttttgttcccttttaggtngaaggggttaaattggccgccgcctttggccgttaaatcaatgggggcaataagcctggttttcccttgggggtgaaaaattggtttaattccgccttcaccaaaatttnccaccaccaaaacattaccgaagccccgggggagccattnaaaaanttgtaaaaagcccctnggggggtggcccctanaatggaagttggaggcttaaaccttcnacattttaaatttggcggnttgcgnccttcacttgncccccccttttttccaangtccnggggaaaaaccntnttccgtgcccnaccctggcnatttaaaatggaaattcnggccccaaccccccccgggggaaaaaaggccggttttgccgttatttgggggccgctnttttccgcntttccttcgntttcaattgaantcnnntngcncccttgggntccgtttcngnttgcggnng

SEQ ID NO: 6664 - DNA, 1133 bp, Homo sapiens
  misc_feature 1, 2, 7, 11, 14, 15, 16, 19, 22, 25, 27, 28, 30, 32, 35,36, 37, 41, 42, 46, 50, 51, 52, 55, 57, 58, 60, 61, 62,64, 65, 66, 69, 70, 71, 74, 82, 83, 84, 85, 86, 89, 92,93, 96, 99, 101, 102, 104, 112, 115, 117, 164, 195, 196,224: n = A,T,C or G
  misc_feature 231, 247, 249, 263, 344, 377, 391, 393, 398, 412, 421, 438,472, 490, 506, 594, 601, 604, 642, 648, 657, 669, 675, 683,684, 730, 733, 752, 790, 805, 812, 820, 831, 834, 841, 858,861, 865, 869, 877, 886, 907, 912, 919, 925, 926, 938: n = A,T,C or G
  misc_feature 945, 952, 954, 956, 957, 963, 965, 966, 970, 977, 978, 980,981, 988, 994, 1002, 1004, 1008, 1009, 1011, 1022, 1025,1032, 1035, 1037, 1046, 1052, 1054, 1058, 1063, 1064, 1068,1071, 1072, 1073, 1082, 1088, 1089, 1090, 1092, 1095: n = A,T,C or G
  misc_feature 1098, 1100, 1105, 1111, 1115, 1118, 1127, 1129: n = A,T,C or G
nncttcntcgnatnnnttntgngtntnntntngcnnntttnntctntttnnnttncnntnnngnnnttnnngcnagattttnnnnnacnagnnagnggntnnangtcttaanacncncatatatggcgaattggagctccaccgcggtggcggccgaggtactntttttttttttttttttttttttttttgagnngagacgggggtttcaccatgttggccanactggtnttgaactcctgacctngngatccgcccgcctnagcctcccaaactgctgggattacaggaatgagccactgcgcccggcctcttttttttccttttttctttttttttttganatggagtctcgctgttgttgcccaggctggagngcaatggcacaatntntgttnacgacaacctttgnttcccgcancccaggtttatttcaanaagccaattttccctttaggggaaagttaccaanaaatcagcccaggggaanaagggaatgggggagngatggggcttggaatgaatccctgttcaggccctaaatccggctgggcctcccccggcggttaccttgcccgggccggcccgttctanaaactanggngggaatccccccgggcctgcaagggaaatttcgaatantcaaangctttattncggaataacccngtgccnaacccttnngagggggggggggggcccccggggtacccccaaaacctttttttgnttncccctttttaaggggggangggggtttaaaatttggccccccgcctttgggccggtnaaatacaatgggggnccaatangccttggntttcccctggnggnggaaaanttggttttattcccggnttncaanaaanttttcccncaccaaacnatttccggaagccccgggggnggcantaaaaangtggtnnaaaaggcccctnggggggnggccctnantnngagggngnngccntaaaccnncnnccaattnaaattngcgggttngngccnncnacttgggcccngcnttttccnagntnggggaaaanaccttngntcgnggccnnaacnttnnnatttaaatnaaaaannngnccnaancnccccngggganaaangcngggttttgngntatt

SEQ ID NO: 6665 - DNA, 1039 bp, Homo sapiens
  misc_feature 1, 2, 3, 4, 5, 6, 7, 8, 9, 10, 11, 13, 14, 15, 16, 18, 19,20, 21, 22, 23, 24, 25, 26, 28, 29, 30, 31, 32, 34, 36,37, 38, 40, 42, 43, 44, 45, 46, 47, 48, 49, 50, 51, 52,53, 54, 55, 56, 57, 58, 59, 60, 61, 63, 64, 65, 66, 67,68: n = A,T,C or G
  misc_feature 69, 72, 73, 80, 81, 82, 83, 84, 85, 88, 89, 90, 92, 95, 96,97, 100, 104, 106, 128, 419, 612, 671, 741, 744, 747, 778,783, 810, 818, 821, 833, 845, 848, 850, 882, 893, 898, 906,908, 929, 941, 943, 946, 947, 964, 969, 980, 990, 1000: n = A,T,C or G
  misc_feature 1011, 1018, 1027, 1030, 1032, 1034, 1038: n = A,T,C or G
nnnnnnnnnnnannnnannnnnnnnntnnnnntntnnngngnnnnnnnnnnnnnnnnnnnntnnnnnnnagnnagggtgnnnnnngcnnntntannnctntctntngggcgaattggagctccaccgnggtggcggccgaggtacagagggatcagagtccaggctccttctatagggttgaatatcagaggggaatagcaaatgaccccgatgagagagagagaccaaaggctagattctttctgcaaggtggaggacggctagaaggcagtggccacagatgagcaggactttttctagactggtttctacaatttttggctttgttcagggcccacccaagaagaaaatactcctggatccttcaactagccctcaggtagacacatgttagaacagcccgtcacgtccttgaagncatcactccccttgcctagagggagtgaggcaggggagactcccaggcaggtggccccttagtgcctgggggtcccaaaagaaatattcttctcagggcttttgaagcacccaccgtgaaacctgattctactcatggaataccaatctggggggaaaggggattagtacctgcccggggccggccgctctangaaactagtgggatccccccggggctgcagggaaattcgattatcaaagcctttattcngattacccgtccgaccctcggaagggggggggcccccgggtaccccaagctttttggtttccccttttangtnganggggttaaatttggccgcccctttgggccgntaaantcaatgggtccaataaggcttgggttncccttggnggngggaaaatttgnttaattcccgcnttncnaaatttttccaccaccaaaccaattaccgaangccccgggggngccantaaaagtngnttaaaaggccccttggggggnggcccttaaatngnggnnggagccttaaccttcancattnaattggcgttngcgccttcanttgggcccgntttttccaagntcggggnaaaccctgntcntngncaanc

SEQ ID NO: 6666 - DNA, 1118 bp, Homo sapiens
  misc_feature 2, 6, 7, 8, 9, 11, 12, 13, 14, 15, 17, 18, 19, 20, 21, 22,24, 25, 26, 28, 31, 32, 33, 34, 35, 36, 37, 38, 40, 41,42, 43, 45, 48, 49, 50, 52, 53, 54, 55, 57, 59, 60, 62,63, 65, 67, 68, 70, 71, 72, 73, 75, 76, 77, 78, 79, 80,81: n = A,T,C or G
  misc_feature 82, 83, 85, 86, 88, 90, 91, 92, 93, 94, 95, 96, 97, 98, 101,107, 108, 110, 111, 117, 123, 138, 182, 425, 536, 591, 650,684, 705, 720, 732, 764, 767, 768, 812, 817, 818, 828, 834,839, 843, 864, 872, 882, 884, 885, 886, 887, 890: n = A,T,C or G
  misc_feature 892, 897, 902, 912, 937, 940, 961, 972, 973, 991, 998, 999,1000, 1014, 1029, 1033, 1038, 1041, 1044, 1047, 1048, 1053,1074, 1084, 1086, 1098, 1108, 1109, 1113: n = A,T,C or G
cncctnnnncnnnnntnnnnnngnnntnttnnnnnnnntnnnntntannnannnntntnngnnantnntnnnnannnnnnnnntnntntnnnnnnnnngtnaggggnngnngccgcnattacnactcactatatgtanggcgaattggagctccaccgcggtggcggccgcccgggcaggtncagtttagtcaggaagcagacattaaacacacatatacactcacaatgctaaaataaaataaagctgttaatttgatcaatgccaagaagaaaaagaatggggcttataagagaatacaacaagcggtgcaacttaaatgagggggcaggggagtatctgagaagccctctgtgagtgagtgactttttttttttttttttttaggagatggtgtcacactttgtctccaggctgaagtgcanaggtgccgatcccagctcacctgcaattatcctcctcaagcaattcccctgcctcagcctccccgaagttaacctggggaccttcaggcaacatgccacccacgcctggcntaaaatttttttttggtatttttttaatagaagaccgggggtttccgcccatgcntggcccaggaatggggtcttcgaatctcttggacctccgtggggttccaccttgccttnggcgttcccgaaaagtgccttgggaatttaccangggcggtgaagcccacccgcngcccaaggcccgganggggagtggacnattttaattcttcaaaaacttaaaaataaaanttnngccaatttttagccccagggaaaaaaaaaagttttgggggaaanaagtnnttgcccaaanaaaaanaaaanaaanaattgccgtttttggggggtnttttgggnaaaaccccantnnnnaantntaganaaaanaaaaaaaaanttgctttttgaaggggcccccgcgnttncctttgggggccgctttttanaaaacttaagnnggggattcccccccgggnccttgcnnnggaaattttcgcantttcaaagccttttntccnaattnccnccnccnnctttnaagggggggggggccccgggnaaaccccaancntttttttgtttncccttttaanngggnggggg

SEQ ID NO: 6667 - DNA, 906 bp, Homo sapiens
  misc_feature 440, 448, 455, 506, 510, 515, 518, 523, 525, 537, 547, 556,567, 576, 581, 585, 586, 591, 597, 598, 600, 602, 604, 608,609, 612, 615, 617, 624, 626, 629, 631, 633, 636, 641, 643,646, 647, 650, 656, 669, 671, 674, 676, 677, 680, 681: n = A,T,C or G
  misc_feature 688, 697, 698, 702, 706, 716, 731, 732, 734, 736, 738, 740,747, 748, 749, 756, 759, 763, 765, 767, 770, 771, 772, 774,775, 776, 778, 781, 782, 784, 790, 798, 803, 804, 806, 807,812, 815, 818, 822, 825, 826, 828, 833, 835, 837, 838: n = A,T,C or G
  misc_feature 840, 843, 844, 847, 849, 853, 855, 859, 860, 861, 864, 874,875, 878, 879, 885, 886, 897, 904, 906: n = A,T,C or G
ggagctccccgcggtggcggccgaggtactttaggagacccaggcgggcagattgcctgaggtcaggagtttgagaccagcctggctaacatggtgaaaccctgtctctactaaaaatacaaaaattagccgggcatggtggctcacgcctgtagtcccaactgcttgggaggttgaggcaagagaatcgcttgaacccaggaggtggaggttgcagtgagccgagatcgcgccactgcactccagcatgggcgacagagcaagactccatctcaaaataaagaaagaaagaaacaaagaaaagaaaagcttatattgaacttctctaaaaaaagaaaaaaaagaaagcctgatgcacacaaatttaaattttggcaagtcgatcaattaaaggatatttatttgcatcacaaaaataattctttactccccccaaaaantcaataanaaagttnaaataagcaacttttcctaatgttgttttaaaatggtaattcaccaaaatncatnttgtnccncaacntntctttttccagnttaataaatntactatttngggtaaaagcntgatgggtnttacnctgnnaagtngatggnnantnangaannagnttngngcatttntngancntnccnttggnangannaanccgtgnttctttttttttnanaancnntgnncgaaaanatggtttgnngggncgcncacactctcnccagttgtttttgcnntntntncntgatttnnnggagccnttntttntntnttnnntnnnanacnngntttcgnggtgcaanttttnntnntcctnttngcnggtnacnngngcccnancnntnccnnttnanatantntatnnnatnccccacgcgnntgnntgtggnntgttaatttangagtttntn

SEQ ID NO: 6668 - DNA, 1176 bp, Homo sapiens
  misc_feature 4, 5, 6, 8, 9, 10, 11, 14, 16, 19, 20, 21, 23, 25, 26, 27,28, 29, 30, 31, 33, 34, 35, 37, 38, 41, 46, 47, 48, 49,50, 51, 53, 54, 58, 60, 61, 68, 69, 70, 72, 73, 74, 75,76, 77, 78, 86, 91, 94, 95, 96, 98, 99, 101, 104, 106, 108: n = A,T,C or G
  misc_feature 109, 112, 413, 438, 471, 484, 506, 547, 560, 571, 573, 575,585, 587, 616, 633, 638, 646, 651, 660, 661, 666, 669, 679,692, 695, 702, 707, 726, 727, 744, 747, 753, 763, 765, 793,795, 810, 822, 829, 835, 845, 850, 853, 863, 870, 894: n = A,T,C or G
  misc_feature 896, 903, 907, 912, 916, 922, 924, 928, 930, 933, 940, 945,947, 961, 964, 974, 985, 990, 999, 1003, 1005, 1019, 1042,1043, 1044, 1047, 1054, 1055, 1059, 1065, 1073, 1080, 1087,1088, 1089, 1091, 1095, 1148, 1162, 1168: n = A,T,C or G
ctannntnnnngtntnatnnntntnnnnnnnannntnnttnggggnnnnnnanntatntnnttttatnnntnnnnnnntttagatntggtnatnnntnnanttnantnntanctactcactatagggcgaattggagctccaccgcggtggcggccgaggtacatctcagcaaaagtaacaaaccaatccactcttgaaccccctaaaccccagctccacccactccagacagacctgtttaacaatgtcagtgcagggccaggtgcaggggctcatgcctgtaatcccagcactttggggggacgaagtggggcggatcacgaggttaggagatcgaaaccatcctggctaacacggtgaaaccctgactctacctaaaaatacaaaaaattagccaaggcatggtggcgcncacctgtagtcccacctacttgggnaggcttgaggcaggaagaattcacttggaattnttgggaagggcantaggttgccagtggagcctgangatctaaccacctgcacttccaagcctggggcccacaagangcaaaggacttcngttcttaagananantaaaaaaatnanagttcaagcggcgcattgccagccttgtnccctttggcttttgctngggtnccccaaangccancccaagctnnccttnggntccttcttangggaaacaaaacnacngttggantttgntggtggccaacaaccgggnnttccttaatttcccacnaantggggntttttttttngnttggaatggtttttccccaatttatttntnggccaaaggggaagnaacttctttaanaaatccntttcanattggaaaanaaacntgncggtttttcnattgganttgggaattgccgttcttccccanancgccttnaatnaattnttgntggaancncttntnttntttaaangccangntaaaaaaggggtgntgngtaaaacaanggtttaaaaancgggngcctttttnttgntntggggaaaaggganaacaatatttggaaaattcccgnnnttnaccttgnncccnggggcngggtccgnttttttnaaaactnnngnggantccctcccgggctttgaaaggaaatttctattttcaaagcctttattccgatncccggtctgacccntcttangggggggg

SEQ ID NO: 6669 - DNA, 860 bp, Homo sapiens
  misc_feature 547, 604, 615, 624, 629, 642, 648, 649, 664, 668, 686, 687,695, 712, 718, 719, 720, 721, 723, 727, 729, 732, 747, 748,775, 777, 782, 788, 791, 795, 797, 808, 809, 817, 822, 831,833, 838, 839, 840, 848, 855, 859, 860: n = A,T,C or G
ggagctccaccgcggtggcggccgaggtactggatttctctccagttccagcccaccctccacaaaatggtatactatttgaaagcagagactgttgatcttattcactgaagtatttctatgtctagaattgtgccctgcacttagttgctactcaataaatgtttgcagagggacagattgacacatagtagatgtaaatgttaccagctctctgcaatgcagtacattgaccttccctagtcctatccaagaagtagattctagacatatcatgtcatgttatactttgcatatctctgttacccaggtaacaagcaggtttctttgtatttgacatccctgcaaacttgggtgggcagcagagaaccatagcatagagggctgaggaagaagacgtctcgcagaaggcactgggaccagggggactgctgttgtcttttgctcactgtgtggcttagaaagcaaaagaggatcccagacactgtgcacagttatgatgtgaagctcaaccaagggggaattggagcagatgaatgaccaaatnttgaaaggcccagcccagttgggggaggggggtttcccaagcccatggggggctttntggtccccagngaaaggggngctcngtccctggggatncaggtnnggaaccaaagccagnaatngcccgggcctacaaaaanngaaaaccnattgttgggtttttccnaaaaannnnantatntntgnaacatagggtacctnncccggggcgggccgctttaaaaactangnggatncccccnggncttncngggaattcaannttaaagcnttttncatccctcncnccttnnngggggggncccgggncccnn

SEQ ID NO: 6670 - DNA, 1259 bp, Homo sapiens
  misc_feature 5, 9, 11, 12, 16, 17, 18, 20, 28, 32, 34, 36, 38, 40, 42,44, 54, 55, 58, 60, 61, 63, 65, 68, 74, 76, 78, 81, 82,83, 90, 92, 97, 98, 99, 101, 104, 106, 107, 110, 115, 118,120, 124, 125, 126, 130, 131, 153, 154, 171, 192, 204, 209: n = A,T,C or G
  misc_feature 211, 222, 237, 240, 242, 247, 307, 380, 416, 420, 422, 426,427, 430, 444, 450, 452, 472, 486, 495, 500, 507, 508, 510,522, 524, 527, 537, 560, 571, 572, 579, 586, 588, 604, 607,614, 667, 673, 677, 686, 698, 703, 709, 711, 714, 718: n = A,T,C or G
  misc_feature 724, 743, 745, 756, 762, 765, 775, 777, 780, 786, 788, 790,791, 798, 806, 816, 818, 819, 828, 834, 836, 838, 856, 857,858, 860, 865, 873, 874, 882, 884, 886, 893, 897, 901, 904,905, 907, 913, 915, 917, 924, 926, 927, 928, 934, 945: n = A,T,C or G
  misc_feature 947, 952, 954, 958, 962, 970, 972, 976, 977, 978, 982, 983,986, 988, 990, 993, 995, 1010, 1011, 1013, 1021, 1022, 1025,1026, 1031, 1036, 1038, 1045, 1047, 1053, 1077, 1080, 1084,1087, 1088, 1094, 1096, 1097, 1101, 1103, 1108, 1111: n = A,T,C or G
  misc_feature 1112, 1114, 1116, 1120, 1121, 1122, 1135, 1138, 1141, 1144,1149, 1157, 1158, 1169, 1172, 1176, 1181, 1183, 1188, 1192,1199, 1221, 1236, 1238, 1239, 1240, 1241, 1243, 1246, 1252,1253, 1255, 1256, 1257: n = A,T,C or G
ccgtntatncnnttcnnncnataaatanactncntnangngntntatttactcnngtncnntncnatntacatntntntannntactttngngaggnnngngancnngcntcgtntcnantcannngatnnggcgtattggtagctacaccgnngtgcgcggccgcccggncaggtacaaaatacatgaccncagcttgacatngcctngnccaaagccctngagtgggcccctcantcntnttggntctggccttacattctactttgtccttccctgcacccgggccttgggtctatgaactggnttatttctccctgagcgatgattccactcctttgtcccactggctgcctctcacctgcccattggtgctgcantggcattatctttccctccttcttaccataggtcanctcncnaatnnagntcttaaaaacatanagggtntntaaaaaccggggtatttaanccctttgggggaangcccaaagnttggnggggtanntngccccctttaancntanaagccccaanccaagtgcctgttgtttttcccntcccctttgtnncctttgnaatccancnaccttaaagaaattanaanaaagttnggctttaatttctacctttttattccttggctttgaaggaaggtttatttttnctttancggngtaaattgnggaactttgggngcccnttgggntnaangtancttggnccttcccctggggttgggncncccacaaaaangggtgnggncctttgggcnanagnaaccantnanngcccccncttgaaanaaattttggnanngggaaatgncctggngntnggtgttattggggattannnanttggnaatttgtnnaggggggncntngcgaccntgtngaantanntntttttncnanggtatcncnnnatcttngaaattgcctngngactntncaanctgnaaaaattncnaccnnntctnnttnangnggntnatatggcgaattttnntntatataannggnnggacncaagntnttccccngnggtaanggtgtgactagcatctcctatcanggnctcnggnnttatgnannaccntnccccnagnncntnagtnnncccccctacaatnatnatnttncccgnttgctccnncttctctaganacntaanggggnanacccncctnggcggtnttcagggaaacttctttatatnttatgacgttttatntnnnntntcnctgctnntnnncg

SEQ ID NO: 6671 - DNA, 1171 bp, Homo sapiens
  misc_feature 3, 4, 12, 14, 15, 17, 19, 20, 22, 24, 25, 26, 27, 29, 30,32, 34, 35, 38, 42, 44, 45, 47, 48, 51, 52, 53, 54, 56,59, 63, 65, 66, 67, 68, 74, 75, 76, 77, 78, 84, 86, 87,89, 92, 94, 95, 96, 100, 101, 105, 106, 112, 119, 125, 192,300: n = A,T,C or G
  misc_feature 312, 373, 451, 492, 558, 577, 597, 599, 603, 617, 644, 658,665, 684, 741, 745, 760, 784, 786, 787, 795, 801, 816, 825,831, 832, 835, 837, 842, 852, 854, 855, 858, 861, 865, 873,874, 894, 898, 906, 910, 918, 924, 934, 940, 943, 945: n = A,T,C or G
  misc_feature 964, 975, 980, 988, 990, 992, 993, 996, 998, 1000, 1024,1028, 1053, 1058, 1065, 1072, 1075, 1078, 1087, 1094, 1108,1112, 1122, 1130, 1134, 1135, 1136, 1137, 1147, 1151, 1153,1163, 1165, 1170: n = A,T,C or G
tcnnactctttnanntntnngntnnnnanntntnntcngctntnntnntcnnnncnttnctgntnnnnttttcnnnnnttcagntnngnggntnnnttanngatnntcactnctgcggnttgganctccaccgcggtggcggccgaggtacgcgggatcccaaagaatgaaatttaccactctcctcttctnggcagctgtagcaggggccctggtctatgctgaagatgcctcctctgactcgacgggtgctgatcctgcccaggaagctgggacctctaagcctaatgaagagatctnaggtccagcagnaaccagcttcacccccagagacaaccacaacagcccaggagacttcggcggcagcagtttnaggggacagccaaggtcaccttcaagcagggcaagggaactaaaaccccccttgaaaattcccattaagttgggaagnaaaaaggtattctttacttaaaccaggaaacaaaggccccnttggcaaaaaaaggccagggaaaaaaggggaattgccacggggagggccgttgccccaagggtttnggaaaaaaaccaaattttnaattcggaaaaaattggggnangttngaaaatttttgcanccaaaaaaaattttaccttggaaaagnaaaaaatttccagntccttantttaaaaaaaaccccattngggggccattggaggaaaggccttggaaaaaagggaaattggggggattcaattttngggnacctttaaaaaggcncttttaaaattacccccctttggntnngcccccangaaggngtttttaaaaaaccnaaaaaggcncttccnnttntnttttnagaggggggngnntcnaanttanaaaaactnnagttacccttggcccggggncggncccgtttntaanaaacttangtgggntttccccccnggggcnttncnggggaaatttggattttcnaagcctttttncgaantacccgtncngnnccntntnaggggggggggggccccggggttncccnaaactttttggttccccctttaagnggggnggggttnaaattgncgnccncttgggggnttaaatnaaatggggcaaaangctnggtttccctngggggganaaannnnttttttccgntttncnaatttccccnanaaaang

SEQ ID NO: 6672 - DNA, 816 bp, Homo sapiens
  misc_feature 584, 585, 592, 614, 627, 660, 673, 676, 683, 685, 715, 731,740, 751, 754, 762, 785, 796, 798, 806, 815, 816: n = A,T,C or G
aattggagctccaccgcggtggcggccgcccgggcaggtaccttcccctgagcaggagagatccttgaaccactgagtggcttacataccctcaggctggtagagtggctatgtgtctgtgcccaggtccggagaaacagcccactgggtgacttctggtagacacagccccaggctgaccgagcatctgtgtgtctgcatcccctgcctgagaaacagctccataggctgcccctggcaaatacatccccaggctgacctagcaactgtgcatccttgtcttaggtctgagaaacagccccatgggctgcccctaccaaatatcctcctaggctagccatcaatattctgggtctgagaaacaaccctgcaagccacctctggcagaaatgcccctaggccagctgagcagctgtgtgcacctgtccaggcctgagaaatagccctgtgggctacctccagcagacacacccaggccagctgagaagctgtgtagccatgtacctcggccgctctagaactagtggatcccccgggctgcaggaattcgatatcaaagcttatcgatacccgtcgaacctcgnnggggggnccggtacccaactttttggttnccctttaagtganggggttaattggcgccgctttggcgtaatcatnggtcataagctgnttnctggggngnaaaatggtattccgcttcaacaattttccncaacaaacataaccangcccggggngcattaaaagnggnaaagcctngggggggccttaatgagggggcntaacttaaaantnaatggggntggggcttnn

SEQ ID NO: 6673 - DNA, 849 bp, Homo sapiens
  misc_feature 1, 3, 4, 6, 9, 11, 170, 323, 329, 461, 490, 517, 623, 624,661, 708, 744, 750, 756, 761, 765, 771, 804, 805, 821, 828,838, 839: n = A,T,C or G
ngnngncgncntaataccgactcactatagggcgaattggagctccaccgcggtggcggccgcccgggcaggtactttttttttttttttttttttttttggaacaaacacaaaaaagttttatttaaaaaaagagtttgacatttaaaagtttgaaataatattaaagngacaccctgtttccttggaaacacaatgcagaaccacaaactctgagacttattatagcgaaagtattgtcattcagttcaatctaatggtatgaggttagctttgaaggccaaaagaaactagtttctaattcttattcttctccccactanacttgnggcctaggtaattttgtaatctttctgagtctgttttctcatcaggagcaggataattcctaagtaatagatcatatgtagaagtgaatatgatctcatggcagtggacatcaaccatagttaattattaanaatatatttacattgagctatcctttatntactttaaaattgcagacaaacaacanttgacaaagaatagataaaatgttctaacataaacattcttccattctttctaggaagaagtccacatacaggaaaaataattagaggagggcccagttcatattnnacaacctttcccaaaccctgaaaacaggtctgctttntaacatcagaaatgaaagcagtctatttccaacaaaagggcttgtangggttggaccccctgcagcctgtctacctggaatanctaaanaaattntgctncaanccttanacaagcatggggctgccaagcgtttcccaaaanngctttttgacttcaanctttaanatgggcctgnnggaaaaacct

SEQ ID NO: 6674 - DNA, 848 bp, Homo sapiens
  misc_feature 578, 642, 661, 671, 695, 697, 698, 704, 724, 739, 750, 759,773, 793, 809, 826, 827, 828, 836, 838: n = A,T,C or G
tcactatagggcgaattggagctccaccgcggtggcggccgcccgggcaggtactcttcctggacagagatctgattgtttcctgagcaggataataaagatattgacttactccagggcaaagttagggcagatttgctagtagtcccttgtaagagtaggggtttcctaagatcagagttcctcagctatgacacagacccacagggctgctccaaaccacccctatgggactcacggagcaagggggatggatgtgaataagaggctcacgctgtctgctgtgttgtggtcacaaagtcctttgtctctgaccaggagccccgtgtctctgctagtatctgtgaaactgcagcaggctgttagcttgtaagcagaactttcacagttcttgacacagaggagccaaagatctcatttcatatctaagtcagatcaagtccctcctttactcaaaatcctacaatcactcccatttcagagaaaaatccaaagttcttacgatggccacaaaactctgactgatcactcccatcctcctgcacactctggcatctcatcctgtctctgaccccatncctgctcttttccctatttcctcacttctttttcagccatatgggccctccctgcagtttcttnaaaacacgcttgggcacangccctactgnggacctttttatacttgctctttntnntttggngggactttttctttccttanaccctttgggccccnctttggctcanctttttttnggctttggttcaanaatgcccctttttacctggncctcgaaacccccttntttaaaaattgcattcnnnggtggggnancctccggccc

SEQ ID NO: 6675 - DNA, 1217 bp, Homo sapiens
  misc_feature 3, 4, 7, 10, 11, 15, 16, 17, 20, 21, 22, 24, 27, 36, 39,40, 41, 42, 43, 47, 50, 52, 53, 54, 57, 58, 59, 60, 61,65, 67, 68, 69, 71, 72, 75, 76, 77, 78, 79, 80, 81, 82,83, 84, 85, 88, 91, 101, 103, 113, 115, 124, 165, 186, 189,190: n = A,T,C or G
  misc_feature 199, 204, 209, 212, 219, 228, 241, 254, 255, 278, 283, 329,330, 348, 354, 367, 370, 372, 397, 422, 426, 440, 473, 477,487, 490, 504, 517, 518, 528, 532, 538, 541, 543, 552, 559,560, 563, 565, 572, 575, 576, 589, 608, 609, 613, 614: n = A,T,C or G
  misc_feature 623, 625, 633, 635, 636, 637, 639, 651, 660, 662, 666, 672,677, 678, 689, 692, 695, 698, 702, 711, 714, 723, 725, 729,732, 734, 740, 749, 761, 763, 772, 776, 786, 787, 794, 796,798, 806, 817, 830, 833, 838, 840, 852, 854, 856, 861: n = A,T,C or G
  misc_feature 876, 879, 888, 889, 891, 905, 912, 932, 936, 937, 943, 944,945, 967, 970, 974, 981, 983, 984, 985, 987, 989, 990, 992,1004, 1005, 1008, 1013, 1019, 1021, 1022, 1023, 1024, 1025,1026, 1030, 1037, 1044, 1047, 1050, 1066, 1070, 1075: n = A,T,C or G
  misc_feature 1076, 1079, 1084, 1091, 1092, 1097, 1100, 1110, 1114, 1117,1122, 1126, 1129, 1130, 1131, 1140, 1142, 1143, 1144, 1149,1158, 1161, 1169, 1172, 1173, 1178, 1182, 1190, 1195, 1196,1204, 1208, 1213: n = A,T,C or G
ccnnctncgnntccnnnatnnngnctnttccccccnacnnnnnctcngcntnnncannnnncctntnnncnntcnnnnnnnnnnnagnagngctggacctngntccgcctacnantcactatanggcgaattggagctccaccgcggtggcggccgcccgggcangtaccgggaagaggaggcggnggnnggggggganggacntgagnaanaaaaaanatttttttnttttttttcgcgncactcagactacnngtgcacctctgcagcaggtgcangcccngtttgggcacccctccagaacatctccccatggattctggcggtanntgactcttcagattcaanagcctnatctcctgttggngcntnctggacaactttggacccagtgcgngttcttcaaatgcccctttcccccnagcnctgcccagccctgngaggcagcttccccagcagggtcctaccccacnaaanggacccccangtnttccctttacccanggccctccccccnntttcttcctnggcncaagtngtngnggaccgttncaatacnngcncncaaatgnccnnggggaaagccccntcttaaattggaaacctcnnatcnnccgcttttngnaccccccnannntnattacccaaagncccccctangncccntacgangaatnncccccctcctnggngtnccncgantaggcccanatncctcacctngngggngtntnacgaanaaaataccngagggggaaagncncgccccttnttcnaggccccccnnccaaggnananactgaaancccaccccccntgaaactttccanttnggtcncnaaccggcaaggngnanggaancccctgtttcaaaanacntggaccccnncncatccccggcgagncctcggnggcaatctcttcaaaaaacnctgnnttttcnnntcccaacccccacttggccccnaanaagncccattntnnncncnngncccaacccgggnnagnccatncccagnannnnnnggcnggatacncgggggnggngtnccccctttcccccccnatcnagagnnacncggcnccccccnncgcgnctnggtgggaaancccnctnccttngggnccnnnacctccttntnnnccaanataacaacnttntcccccgnccnntattncgcnctcacggnaaagnnacccccantccngtttncccc

SEQ ID NO: 6676 - DNA, 1124 bp, Homo sapiens
  misc_feature 2, 3, 8, 9, 10, 11, 12, 13, 15, 16, 17, 18, 19, 20, 22, 25,27, 28, 30, 32, 34, 38, 40, 41, 43, 47, 49, 50, 51, 52,53, 55, 69, 70, 72, 74, 75, 77, 78, 79, 80, 81, 82, 85,88, 94, 97, 430, 530, 541, 588, 594, 605, 610, 613, 620,673: n = A,T,C or G
  misc_feature 679, 704, 706, 727, 748, 754, 793, 800, 819, 829, 839, 852,855, 859, 885, 906, 907, 908, 910, 912, 932, 935, 944, 954,956, 960, 971, 976, 977, 978, 979, 984, 1014, 1019, 1021,1023, 1039, 1043, 1052, 1053, 1058, 1061, 1063, 1066: n = A,T,C or G
  misc_feature 1085, 1086, 1088, 1091, 1092, 1093, 1094, 1095, 1099, 1100,1107, 1109, 1110, 1117: n = A,T,C or G
cnntgctnnnnnncnnnnnntncgntnnancnancgantnntnctcngnnnnntncttttatttttgtnntnanntnnnnnnagnagngagganttnacgtcttcgactcactatagggcgaattggagctccaccgcggtggcggccgcccgggcaggtacgcgggatgctgagaaactgatgaagctgcagaaccaacgaggtggccgaatcttccttcaggatatcaagaaaccagactgtgatgactgggagagcgggctgaatgcaatggagtgtgcattacatttggaaaaaaatgtgaatcagtcactactggaactgcacaaactggccactgacaaaaatgacccccattttgtgtgacttcattgagacacattacctgaatgagcaggtgaaagccatcaaagaattgggtgaccacgntgaccaactttgcgcaagatggggagcgccccgaatctggcttggcggaatatctctttttgacaagccaccgcccttggggagacaagtgaataaatgnaaagcttaaancctcgggggcctaattttccccatagccggtggggggtggacctttnccttgngtcacccaaanggcangtngcattgncatggttgggggggttttccctttttaccctttttcttattaaggtttggtanccctcngggccccggctttttagaaacttangntgggaatcccccccccggggncttgggaaagggaaattttcngaattntcaaagccctttatttcggaataccccggcccgaccccntcgaaanggggggggggccccccggnttaccccaanctttttttgnttcccccttttangtngaangggtttaaaatttggcggccgccttnggccgttaattccattggggnnnantnagacttgttttccttgtggnggnaaaaatggnttttcccgcntnacanattttcccacnccaannnnttacngagccccggggagcccttaaaagatggtanaaagncntngggggtggccctaatngagnggtggcctnntcttntcnanttnaatttggggtggggggccnnanccnnnnncccnnttttttnanngttgggnaaaaacc

SEQ ID NO: 6677 - DNA, 512 bp, Homo sapiens
  misc_feature 2, 4, 6, 7, 9, 10, 12, 14, 15, 16, 17, 18, 19, 20, 22, 23,24, 26, 28, 31, 33, 34, 35, 37, 39, 40, 41, 44, 45, 47,48, 52, 54, 56, 58, 60, 61, 64, 65, 68, 70, 71, 72, 73,74, 75, 77, 79, 80, 81, 83, 87, 89, 93, 94, 97, 103, 189,447: n = A,T,C or G
  misc_feature 469: n = A,T,C or G
antntnntnntngnnnnnnntnnntntntgngnnntntnnnacnnanngagngngnananntanntanannnnnntntnnntntagngntgcnntgnctatcnatcatatagggcgaattggactccaccgcggtggcggccgaggtaccttcaatacctttagttgtctcccacacacgcgtgtgtgngtgaaatcttctacaatatcttcccttttttagaccatgttcactgtcaaaaaggtgctttaagagcagtctttggctgggcacggtggctcacacctgtaatcccagcactttgggaggcccgaggcaggcggatcacgaggtcaggagatcaagaccatcttggctaacaggatggtcttaagggacagtgaaaccctgtctcaactaaaaatacaaaaaattagctgggccgtggtggcaccgccgccttgtaantcccagcctactcaggaggctnaggcaggataatcacttggaacctggggaggtagaggctgcag

SEQ ID NO: 6678 - DNA, 881 bp, Homo sapiens
  misc_feature 425, 436, 441, 473, 499, 526, 559, 562, 578, 604, 610, 615,619, 621, 625, 627, 641, 652, 661, 682, 686, 687, 692, 693,711, 714, 728, 730, 740, 741, 745, 754, 757, 758, 759, 766,768, 775, 776, 779, 785, 787, 790, 796, 797, 802, 803: n = A,T,C or G
  misc_feature 808, 818, 819, 829, 830, 840, 848, 849, 851, 864, 865, 866,869, 875, 878: n = A,T,C or G
attggagctccaccgcggtggcggccgaggtacacaaatcattagcgtcaaactggaattgccgactgctcccccacccttcgtcttcgcttggctgacttccatcacagcctctccctctatgtctgaaacatactttagaaaagaggggtgaaacaagacagtgaggaagagagaagaatcaataaagaaaaaaataggtcacctgtctgtggttactgccgcaaatagattccatcttgggcggggtctgacccaggagcccccaagctccgtgaaaacctctctgggggacacacagcagcttatcttccttgtttacaaattaactgccttctgttggtgactgagtcttgaagaggcagagggatggtgcaaagaaggcctggctaccagggaataggcactcagcccacaccgaaggnccaaactttgntctgnattcactgcctaaatccatgtgcattttacantggagaagatctcgcagggaaattcnctggggtgagggagagaccaagcgtgntcccttcccttaacatttggtgggagccccaangcnaagaattgccatattnttaccttggccccggggcgggccgcnttttanaaacntaantnggantnccccccgggctgcngggaaatttcngataattcnaaggctttattcgattccccngccnnccccnngaagggggggggcccccngtncccccacctttttngnttcccttttnntggnggggttaanttnnnccccttngnggaaatnnatngggccntnagncggggnnttccnnggggngaaaattgtnnattcccgttnncaattccccncaaaatannanacccgggggggcnnnaangtggtnaanccc

SEQ ID NO: 6679 - DNA, 1113 bp, Homo sapiens
  misc_feature 1, 3, 5, 9, 10, 12, 20, 25, 35, 40, 41, 42, 50, 58, 60, 62,70, 71, 73, 75, 81, 83, 86, 87, 88, 90, 92, 102, 188, 191,198, 206, 211, 213, 214, 215, 267, 327, 339, 384, 423, 427,432, 436, 462, 497, 500, 503, 505, 529, 533, 535, 571: n = A,T,C or G
  misc_feature 574, 583, 586, 591, 605, 607, 616, 626, 627, 636, 642, 644,652, 659, 668, 680, 688, 696, 703, 719, 745, 746, 752, 754,759, 769, 782, 791, 792, 795, 799, 802, 805, 807, 808, 824,827, 828, 829, 830, 832, 835, 840, 846, 847, 856, 861: n = A,T,C or G
  misc_feature 865, 867, 875, 877, 880, 881, 885, 886, 897, 904, 905, 909,915, 921, 933, 947, 948, 954, 955, 966, 970, 976, 982, 994,1002, 1007, 1020, 1029, 1033, 1036, 1038, 1045, 1055, 1058,1066, 1072, 1080, 1084, 1087, 1088, 1089, 1090, 1102: n = A,T,C or G
  misc_feature 1109, 1110, 1111: n = A,T,C or G
ntntntacnncnatttttgncgtanttttgttccnacctnnntgcatttnattgattntntntttctttnntntnatcttntnagnnngngnggcgtcgtcntacgactcactatagggcgaattggagctccaccgcggtggcggccgaggtactttttttttttttttttttttttttttttgcanaangataaanatttttanaattnannngataatttatgtttccctgctttttactctgaattgttcactttgaactganaactataaacccataaaaaatattttattttaactgatttttctcacatggacaatgctntgttagacatanaactccacaaatcatccattcccaaccccttgttttatacataanaatctgatacaggaagggggcagggtaagtgctgtgtangagnaaagnatgngggtccctggcctagggctccacccntggggccctgtgcccattgggacctagttgagggncanggncntttttggtttttcatgcccaaatngttncnatttgtctaaagaccacccctgggccccacacaccnttncccattctngtngcctntaaaaaaacccccngngacctttancagggccaannaccaaaaantgggcntnggacctcnggaaganggaaacccncctgggcggggnaggaaccnccaccaanccggggnttgggacttttctganaaggggaaccacatttttccccgggnntgggancnttccntaaaaggggnaacccaccccccnccccctganncgnaggnacnacntnntaaccagggccccccnttnnnntnaanccccngggagnnaacccaatntgaancttntntaaaaacncnacnnttgnngacccccccgnggggggnnaatnttttancccccngggggggggccnaaaagaagaaaatnnttttgnnttttttgtggncggncccaancctccngaaaggaaaaanttcccccntttcnccccctttttggngttcccccntccnttntnggtgganaaagggaccntgncccggggngggggnggttttanaaanatnnnngggtcccccccnggctttnnnaa

SEQ ID NO: 6680 - DNA, 1122 bp, Homo sapiens
  misc_feature 5, 6, 10, 12, 14, 19, 21, 22, 23, 26, 30, 32, 36, 37, 38,39, 41, 42, 46, 47, 49, 50, 52, 53, 55, 57, 66, 68, 71,73, 77, 78, 80, 83, 86, 87, 89, 192, 193, 206, 207, 211,215, 269, 384, 462, 472, 477, 483, 486, 536, 580, 596, 623: n = A,T,C or G
  misc_feature 625, 697, 698, 703, 721, 738, 740, 771, 794, 841, 846, 851,857, 863, 865, 878, 904, 905, 910, 911, 922, 928, 931, 936,955, 960, 979, 990, 1004, 1021, 1026, 1031, 1039, 1044,1045, 1057, 1063, 1070, 1071, 1072, 1077, 1078, 1103, 1105: n = A,T,C or G
  misc_feature 1109, 1113, 1115: n = A,T,C or G
ctctnnacgntntnctttntnnntcntcangnttcnnnncnntganncnngnngntnatttttttnanttncntttnntnttnggnngncgcgcgtaatacgactcactatagggcgaattggagctccaccgcggtggcggccgcccgggcaggtacgcggggaattcgcagtgatgtgaaactggcctannaagccctgataannaaantaanttagagtaggagtcaggagggaggttctttactcttgaattaagagaagggganctggaggtggctcaggtagagtgcgtaggtttgcagaactgggcctgtgtgtgtaaagtggctaaggcaaaggagtggaagtttgagagaagtttaagagaagaaatggacatgnattgccctaaatcagccaaatacaggggtctctacagggagaagaccgaagatccgcccccgatagtttggagaagtnaatggggttncccangagggnagnagcttaaagcaaccatggcccaacgcccctggccagcgccacttgccganccgccttgccaaggggccgggctttgccgccccgcctgaggaangatccgtgaaacagtnaaatggggggaagccttgttacccttntngcccgcctcttagaaacctaagttgggatttcccccccggggccttgccaggggaaattttcctaataattnnaaagnctttatccgatttccccngttccgtacccttcttnangggggggggggcccccgggttacccccaaanctttttttgttttcccccttttnagttgaagggggttttaaatttgccgcccgcttttgggcggttaaantcaantgggngccatnaagccntngttttccctttgnggtggaaaaatttggttttttcccgnnttcannaattttccacnacaaanatntccanagccccgggagccctttanaagtngtaaaagcccctggggggnccttaattgangtggagccttaacnttccaatttaatttggngtttngcgcntttacttngcccnntttttccaattncggggnaaacccnnnttctnngccccccctttattttaaatttaantnctgncccntnccccccg

SEQ ID NO: 6681 - DNA, 869 bp, Homo sapiens
  misc_feature 3, 6, 688, 756, 758, 766, 791, 828, 830: n = A,T,C or G
agnggnccgcgtaatacgactcactatagggcgaattggagctccaccgcggtggcggccgcccgggcaggtaccccgggagcctcacatgactctctcagcccctccctgctctgagtgactgagagaacttccttagctgcagggctgcaggcaggtgcttctgctcctgagctcctaaacacaccaaggggtgcttgaaggtccaggcccgcccctctctagaggaaaaacctactcatttgagactacaaacctcttctagaagctgtaacctgaaatgctagaatgagcttatattaatcatgcttttttataatgtataatgttttcacatcttggggacctcactgactggggagagactgcccttcccagggcaggccaattcttagagatagcaaaggggtcccttgggagtgcacctttgcacactaaccaactcagagtccatctcctcgatttgactcttccaccgcagaaggcagtatcccctcaccctgatcacccagggcctggcaccaggcagctggagaccacccctgtagctactgcccaagacattcaaacctgccaatcctacactctgcccccgcccatcttcgcctttgccatggaaacacaatggaaagctgctcgcctagtttctcccgcgtaccttggccggtctagaactagtggatccccnggctgcaggaatttcgatatcaagcttatcgataccgtcgacctcgaggggggggccccggtacccancnttttggtncctttaatgaggggtaattggcgcnccttggcggaaaacatgggcaatagctggtttcccgngngaaaattgttatccgcttacaatttccacaacaacatat

SEQ ID NO: 6682 - DNA, 554 bp, Homo sapiens
  misc_feature 1, 2, 5, 8, 10, 11, 13, 23, 26, 28, 30, 34, 37, 38, 39, 41,42, 44, 50, 54, 56, 61, 65, 66, 67, 69, 70, 76, 83, 85,88, 89, 91, 93, 95, 96, 97, 98, 99, 100, 105, 210, 274,327, 394, 402, 408, 414, 419, 427, 444, 449, 455, 461, 465: n = A,T,C or G
  misc_feature 472, 478, 482, 486, 494, 497, 506, 514, 520, 537, 543, 548,551: n = A,T,C or G
nnganaantnncnttaagtctanctntncncttntgnnnanntntctatngtananacacnttannngnnttatanttttttncntanngngntnnnnnnttttncgatcatatagggcgaattggactccaccgcggtggcggccgcccgggcaggtacttttttttttttttttttttttgcctatttattcactatggcaattccantgccttgagtgatgcctggcttatcatgggagctcagcacataacaaatgcatacatgaatacngattctccctctcaccccaatcccttgggatatgctctagtatccactgactnctactctcctggctgcctgcaaaggtaggcatgcccaccgatgtcgctgatcagcatgaccttggtntttggcanaggatntgcttnctttnaagactgngaaccgcttgctccttnttccnaattangccgtnttcngtgagtnccacanaaanccantcccaaanaancctttgggncagggggngtccangggttcaaaaaactaanatgganactcncanggc

SEQ ID NO: 6683 - DNA, 905 bp, Homo sapiens
  misc_feature 492, 533, 654, 659, 721, 758, 764, 765, 783, 785, 799, 800,825, 840, 847, 858, 861, 866, 868, 870, 874, 876, 877, 878,879, 880, 884, 885, 887, 893, 897, 903: n = A,T,C or G
cgtgagccgcgtaatcgactcctatagggcgaattggagctcccccgcggtggcggccgaggtaccttcccattttggctggaaagaattttataaacaagttagtctcaaacactgttaataagaaaaagctggccgggtgcgatggctcgcacctgtaatcgcagcactttgggaggctgagatgggtgaattacttgaggccagaggttcgagatcaacctggccaacaagacaaaaccccatctctactaaaaatacaaaaattagctgggcatgatggcatgcttgtgatcccagctacacaggaggctgaggcatgaagatcgcttggacctgggaggctgagattgcagtgagccaagatcgtgccactgcactccagcctaggtgacatagcgagactgtctcaaaaaaaaaaaaagaaagaaaaagaaaaaagaaaagaaaaaggtaagatgtcttggtatttaggaaaaactttatgggcangagatttcttagctaaactgaatgctgttaacataaaattntatacccacgtgtattacagatttaatatggtagcttattagtaacattaattaaatggcagatatgggtgatagggaaattttttaacaggctcctttttttttttttccccaccaatantggtngaaattataaagtttaaattttttttctaagtttattatttggattttttaccgaaaaattntaaaagactggaaagaaatttgccctgtttttgcaanttctannaaaaaccctcagcccccntnccaattttacccannttaaccaaaccctgttaacccccantttaaaaataaaaanttgaaanttttaggaaanaanaaaantncntcantnnnnnaaanntnccctgncccnggcggnct

SEQ ID NO: 6684 - DNA, 618 bp, Homo sapiens
  misc_feature 2, 5, 9, 12, 26, 29, 31, 32, 35, 36, 47, 48, 49, 59, 61,63, 69, 76, 83, 85, 89, 91, 93, 94, 97, 114, 117, 121, 172,194, 206, 209, 211, 212, 213, 217, 218, 220, 229, 230, 232,234, 235, 240, 248, 284, 318, 395, 430, 446, 453, 459: n = A,T,C or G
  misc_feature 462, 467, 470, 471, 482, 496, 507, 515, 517, 528, 539, 545,558, 561, 569, 571, 579, 589, 592, 593, 612, 614, 616, 617: n = A,T,C or G
cnatnatgncanatttaattcatttnatntnnctnntctcatacttnnntattctatcntntnatctcncttcctnctttatncntatntntnnacngggggggggcggggganccntatnctacttactcactatagggcgaattggagctccaccgcggtggcggccgangtacgcggggagggacccgcanctcaactacagngcngnnnagcnncntgaagcttnnananngaacntggttttntgctccttggtcctgggtgtcagcagccgaagcttnttttcgttccttggcgaggcttttgatggggctngggacatgtggagagcctacttttgacatgaaagaagccaaatacatcggctcaagacaaaatactttccatgcctnggggggaaactattgatgcctgccaaaaaaggggnaccctggggggggttntcttggngcctgnaanaaaanccnnattccaagccngtaattgcccaagnaagtaagaaantattcccnangaagtaatttnttttttgggcncaattngggttggccgggnagnggaacttntngctttggncccggaatcnaanngcctttctccaaaatgtanantnng

SEQ ID NO: 6685 - DNA, 619 bp, Homo sapiens
  misc_feature 1, 2, 8, 9, 10, 12, 13, 21, 27, 28, 38, 43, 44, 53, 57, 61,64, 70, 75, 76, 77, 80, 82, 83, 84, 85, 88, 97, 98, 99,100, 101, 102, 103, 106, 109, 110, 113, 118, 119, 120, 125,126, 127, 130, 138, 150, 152, 165, 185, 200, 248, 345: n = A,T,C or G
  misc_feature 348, 385, 391, 420, 423, 427, 433, 440, 446, 447, 458, 468,469, 478, 481, 486, 487, 514, 515, 523, 530, 533, 534, 545,554, 563, 566, 575, 576, 579, 583, 594, 596, 603, 604, 605,618: n = A,T,C or G
nnaccaannnanntttgattntgttcnntcctcttccnttttnntttatgaantaancttnatntttttnttacnnnatntnnnnttnttttttatnnnnnnnctnagnnagnggggnnnggatnnncgnctcactanagggcgaattgncngctccaccgcggnggcggccgcccgggcaggtnctttaggagacccangcgggcagattgcctgaggtcaggagtttgagaccagcctggctaacntggtgaaaccctgtctctactaaaaatacaaaaattagccgggcatggtggctcacgcctgtagtcccaactgcttgggaggttgaggcaagagagntcntcttgaacccaggaggtggaggttgcattgagccganatcgcngccactgcactttcagcatggttcgaccngancatnggactncattctnaaaatnntggaaagatangcaaacaatnntaaaatagnaanaaggnnttaattatttggaaacctttctttttnntaaataangaaatcnttnntaatgtaatangcccttganttgccaccnacnatataattnntanaaantctttgggcananggttcgnnntccaaatttaaang

SEQ ID NO: 6686 - DNA, 399 bp, Homo sapiens
  misc_feature 198, 200, 346: n = A,T,C or G
ggcgaattggagctccaccgcggtggcggccgaggtacaaagatggtcgatacgattatttttcatcatatattacagaaaatactactcttgaaaaatactctgagaaatatgttctatggtcagataagtttgggaaacagtgaattattgttcctcctttgcagaatcacaatgcactgttagctaattaaagantntcagatgtcccactggaaagaatcatgtttagctttgtttaacctagcatttcccaaacttattagagcataaaactttgtttttgtttttttttaataagataggtagctatttccttagaacacagtttgggaaactttttggntcatttgttttaataagataccttaggtagctatttccttagaacacgagccg

SEQ ID NO: 6687 - DNA, 426 bp, Homo sapiens
  misc_feature 2, 3, 13, 18, 22, 146: n = A,T,C or G
gnnatagggggcngcgtntacnactactatagggcgaattggagctccaccgcggtggcggcccgaggtacgcgggggcctcagcctccaggaggcacagcagattctcaacgtgtccaagctgagccctgaggaggtccattaanaactatgaacacttatttaaggtgaatgataaatccgtgggtggctccttctacctgcagtcaaaggtggtccgcgcaaaggagcgcctggatgaggaactcaaaatccaggcccaggaggacagagaaaaagggcagatgcctaattcccgaataacatcaacgacggctgcaatttgcacagttctgttggtgtaaaagtcccagtagaaggtttttggattgtcgtcacataggcaggcagtatacttatagttaaatgcaccttgtagagggatgc

SEQ ID NO: 6688 - DNA, 563 bp, Homo sapiens
  misc_feature 3, 8, 10, 14, 24, 26, 29, 30, 31, 35, 36, 37, 40, 42, 46,49, 50, 51, 52, 55, 60, 62, 65, 66, 68, 71, 78, 80, 83,84, 85, 93, 99, 116, 117, 119, 120, 132, 224, 227, 234,253, 386, 395, 396, 475, 476, 529, 532, 545, 552, 554, 562: n = A,T,C or G
ccncgacncnattntttaatattntnttnnntaannnccncncatntannnnttncattntnatnncnctnctgttantntannnttttagtnagaganaaaaccattaatacganngnntatatggcgaangggagctccaccgcggtggcggccgcccgggcaggtacgcgggattggccaatgagccaaggctggagtctgagacctttggaagaaaaaanaangcacctnctgccactttctccctcanaaggcacaaacactttgtgttccccgtcagtttgaggggacggtggggggatgatatgaatgtcacaggaggagacaccttctgtctttgtttcaaagaaagtgatgtgccatttgttaaatattacaagcanaaatattgnnaaatatatttgaaaaagaggcaaatttttaaattattttttggctttattgtttgccaaaaattttaatttttccttgnnattaagaaaagatttccctttttgttacgaagaaaaaaaaaattgttattttnttntcaatttaaccgnccaaaangnacccttant

SEQ ID NO: 6689 - DNA, 382 bp, Homo sapiens
gaattggagctccccgcggtggcggccgaggtacccaacagaggtagcatcagcaagcaggccggcgcccaggaggggcagcagcctcacgcggggctttctggtctcggccgctctagaactagtggatcccccgggctgcaggaattcgatatcaagcttatcgataccgtcgacctcgagggggggcccggtacccagcttttgttccctttagtgagggttaattgcgcgcttggcgtaatcatggtcatagctgtttcctgtgtgaaattgttatccgctcacaattccacacaacatacgagccgggagcataaagtgtaaagcctggggtgcctaatgagtgagctaactcacattaattgcgttgcgctcactg

SEQ ID NO: 6690 - DNA, 389 bp, Homo sapiens
ttgggcgaattggagctccccgcggtggcggccgcccgggcaggtacgcgggagatgtagctgtgtagtctccttccatagctgctctaagggggctggcaacatggctcagcagacttgccccagagccatggcaaagaatggacttgtaatttgcatcctggtgatcaccttactcctggaccagaccaccagccacacattcagattaaaagccaggaagcacagcaaacgtcgagtgagagacaaggatggagatctgaagactcaaattgaaaagctctggacagaagtcaatgccttgaaggaaattcaagccctgcagacagtctgtctccgaggcactaaagttcacaagaaatgctaccttgcttcagaaggtttgaagc

SEQ ID NO: 6691 - DNA, 569 bp, Homo sapiens
  misc_feature 4, 6, 10, 15, 19, 20, 21, 26, 27, 28, 32, 33, 35, 36, 41,47, 48, 52, 54, 55, 58, 59, 61, 62, 64, 65, 69, 74, 75,79, 82, 90, 95, 98, 101, 103, 112, 117, 125, 132, 135, 139,161, 167, 171, 187, 220, 227, 299, 375, 408, 455, 472, 481: n = A,T,C or G
  misc_feature 494, 503, 509, 525, 526, 528, 531, 549, 552, 553, 554: n = A,T,C or G
ccgncntgcnataantacnnnctccnnnttanntnnttttnttgatnncatngnntcnntnntnnaaanttttnnattnttncttactantaagntangananaccctcttntacgnctcactanggggggngtngctnctccaccgcggtggccgccgangtacangcancaaaagcaaaaatatncaaacgagattccataaaactaagaagcttctntgcacancaaaaggaacagttatagagtgaagagacaacccacaaatgggaagagaatgttttttaaaccatacctcangtaaggggttcataccaataatatgtaaggtaactcaacccagaaatgagaaaacaagcttactaaaaaataagtnaaggacttgtataagacatttttctaaaaaacngacataccagaagggtcagcattttttatttaaaaaatgtttgaatnaaaaataacattcaacnatttccccnaatttatttagcngaaaaatangaaagntccaaaaaccccaccnnanaanaataatttacccctccantannnaatggtataccttgg

SEQ ID NO: 6692 - DNA, 886 bp, Homo sapiens
  misc_feature 2, 3, 603, 608, 632, 634, 716, 739, 748, 767, 795, 805, 814,818, 819, 836, 838, 853, 860, 864, 866, 870, 876, 884, 885: n = A,T,C or G
gnngaccgcgtaatacgactcactatagggcgaattggagctccaccgcggtggcggccgcccgggcaggtacctgttttgtttcctgattattccaggattctctcactagaccctaagcctctcattctgctgtaggtcagattctctattccttctccctagcccagagccttgccagcacttgcgaaagttacggttagaatgttcccttgcctagtcacctctttgaaaaaacactgtgatgttacatgactgcgattcaaatcagacactgtctgcttcccacatgtatctcagacaggttttatttaatgtttcttgtcagaatattgtaaattcaaaaggatgactttaaataaatgtaaacaaagacaaacttgtggtctttttgtctggaattactttcacaagagatggagcttgcaggggaatttactgtctgaccagttactaatgtgagcccttgccccaccctctccttttcttaatttcttctgtaggcctcttctcggttattagtccgccccaccagctccgaaacccgagtgcagccgagctcgtcagtgcaattgaggaactcgtgaaaagcaagatggtgangcctnccagagaaagtctgactttttggnanctgctctgtggtactacttggcaagaatggatttgccctttggtcttttggaattgctcttgggcctggcaaaaatgtggcntgtggcttatgggcaccattttnaaggagttnccccatggacccacccttngggttcacttgatttggaagggactcanaaaaactcanggaaagccntttnnttcccacattttgcagngnttttcccctgggaangggcccngatnanaaanttggcngggggggnna

SEQ ID NO: 6693 - DNA, 912 bp, Homo sapiens
  misc_feature 1, 4, 6, 7, 177, 181, 186, 187, 188, 190, 197, 198, 199,204, 209, 227, 232, 241, 243, 245, 246, 250, 251, 252, 256,257, 262, 264, 268, 269, 270, 271, 272, 273, 274, 275, 282,283, 285, 287, 292, 293, 294, 295, 299, 305, 306, 307: n = A,T,C or G
  misc_feature 309, 314, 317, 322, 325, 334, 338, 341, 344, 345, 346, 362,363, 364, 366, 368, 369, 371, 373, 374, 375, 376, 377, 384,385, 393, 395, 396, 397, 402, 404, 409, 410, 414, 415, 417,419, 432, 437, 439, 440, 441, 442, 443, 444, 446, 447: n = A,T,C or G
  misc_feature 461, 465, 468, 469, 475, 478, 485, 486, 491, 492, 497, 500,504, 506, 507, 518, 526, 527, 541, 547, 548, 550, 551, 552,555, 556, 560, 561, 564, 570, 575, 577, 587, 588, 591, 593,616, 629, 634, 637, 639, 640, 646, 653, 656, 657, 671: n = A,T,C or G
  misc_feature 672, 673, 676, 679, 686, 690, 696, 705, 707, 708, 711, 712,713, 714, 717, 718, 724, 750, 754, 755, 758, 766, 767, 771,777, 786, 787, 799, 800, 802, 804, 806, 812, 813, 816, 822,824, 830, 832, 848, 852, 860, 862, 863, 865, 866, 870: n = A,T,C or G
  misc_feature 880, 884, 889, 891, 892, 900, 901, 906, 907, 908: n = A,T,C or G
naangnngaccgcgtaatacgactactatagggcgaattggagctccccgcggtggcggccgcccgggcaggtactttttttttttttttttttatttttttttttttttttttttttttttttttttttttttttttttttttttttttttttttttttttttttttttttttttngganttttnnncnaaaattnnnggggnggttnaaaaaaaaaaggaaaaangggtntttaaaaanangnntttnnnaaannttttntnaaannnnnnnnaaatttnncncnaaaannnngganggccannntnggggnaanaaaanaanggttttttnaaanatnaannntaaaaaattttttttnnnancnntntnnnnnaaaaaanngggggggnannnaaaananttttnnaaanncntnaaaaatttttggnaaaanannnnnntnnaaaaaatttaaaancccntcnncaaaanggnttttttnnccccnnaaaanccnaaananngggccccaaantttaaccnnaggccaaaaaaaangggggnnannnccnnggannccngggggnggctntnaaaaaaaaannggnancccccggggcggggggagaaatntaaaaaaaaaaancgttnatnannaccccncaacccntgnngggggggggccccnnnccnccnttttttntccncttttnggggggggntnnaannnnccnngggggnaaaaaaagggggaaaaaaattgtcanccgnnggnaaaaaatnnttanccctcnaaaaataanncaaaaaaaatannanancngggggnnaantaaaantnaaaaangngggggggggcccaaanaagngggggccnanncnncaanaaatgtgggngggnccaananngccctttnnaaagnnnaaaa

SEQ ID NO: 6694 - DNA, 1234 bp, Homo sapiens
  misc_feature 2, 6, 7, 13, 18, 19, 22, 29, 31, 36, 40, 42, 55, 59, 63,66, 72, 74, 77, 82, 84, 85, 87, 92, 94, 95, 96, 97, 101,104, 113, 114, 116, 117, 118, 121, 396, 398, 424, 450, 469,535, 536, 555, 572, 578, 583, 589, 590, 603, 609, 624, 629: n = A,T,C or G
  misc_feature 635, 641, 664, 678, 699, 710, 713, 729, 741, 763, 770, 831,834, 847, 850, 854, 866, 887, 893, 909, 911, 912, 920, 953,957, 967, 981, 982, 1001, 1002, 1005, 1008, 1017, 1036,1044, 1058, 1063, 1073, 1081, 1093, 1095, 1115, 1141, 1143: n = A,T,C or G
  misc_feature 1150, 1161, 1162, 1163, 1170, 1172, 1180, 1184, 1187, 1208,1209, 1211, 1213, 1219, 1223, 1229: n = A,T,C or G
tnctcnntatatnattanntgncatatangntttancatnanaaatttactaggnatanatanatnaaatantnaantatananncnaatancnnnnaccnttngtaagaggnnannngantcgcgtatacgactcactatagggcgaattggagctccaccgcggtggcggccgcccgggcaggtaccaaaatgtggccaatcgaggcttcgagtaagtcacagcagcgttcaccagcgccggggtcttctccacaaggttacggacaaattgggccatggttctggaatggagagtccgtcgccccgaaccgccggctgaatgtcacccgccggaaggccccgcgtacctcggccgctctagaactagtggatcccccgggctgcaggaattcnantatcaagcttattcgatacccgtcgnacctcgagggggggggcccggtaccncagcttttgttccctttantggaggggttaaattggcgccgccttggccgtaaatcatgggtcaataagcctgtttttccttgtnntgaaaaatttggttattcncgcctcaacaaatttcncaacancaacnataacnnaagccccgggggnagccanttaaaaaggtgttanaaagncccctngggggntggcccttaaatggaaggtggangccttaaaaccttncaccaatttaattttggcggntttggccggcntcnaccttggcccccggcntttttcccaagntccgggggaaaaaaccttgggntccgttngccccaagcctggccaatttaaattgaaaatccgggcccaaaaccgccgccgggggggaanaangggccgggttttngcnggtnatttggggggcngccttcttttcccggcttttncttcgncttcaacttgactttngnnttggcggncttcgggttccggtttccgggctttgccggggngaancccggggtantttcagacttcaannttcaaaaaggggccgggcnnaantancggggtttntcccacaagaaattcaaanggggggantaaacgccatgggnaaaantaaaccattntgggagcnaaaaaagggccnanccaaaaaggcccattgaaanccgttaaaaaaggggcccccgtttcncnttgggcnttttttacatnnngcttccngncccccccntttncgnaggcttttataaaaaattggnntncntttaantttnagaggngggcg

SEQ ID NO: 6695 - DNA, 1178 bp, Homo sapiens
  misc_feature 2, 3, 7, 8, 9, 12, 16, 17, 20, 21, 22, 24, 25, 27, 28, 31,35, 37, 41, 42, 45, 49, 56, 59, 60, 62, 63, 66, 68, 79,80, 81, 85, 88, 90, 93, 95, 97, 101, 381, 398, 507, 509,566, 573, 587, 599, 628, 635, 640, 660, 668, 677, 682, 693: n = A,T,C or G
  misc_feature 694, 711, 721, 724, 730, 732, 742, 743, 751, 766, 782, 784,806, 813, 835, 841, 846, 856, 858, 863, 870, 891, 892, 906,912, 914, 916, 922, 923, 929, 931, 935, 939, 954, 959, 963,966, 973, 978, 981, 984, 1013, 1018, 1019, 1032, 1034: n = A,T,C or G
  misc_feature 1035, 1041, 1046, 1047, 1058, 1060, 1066, 1068, 1069, 1082,1087, 1092, 1108, 1113, 1115, 1119, 1125, 1132, 1135, 1138,1156, 1157, 1159: n = A,T,C or G
anntatnnnttntgannttnnntnntnnacnatantngtgnntanatangagggtntannannttntnataacaatttnnntttngtngnggngnanaatntttcgcgtatacgatcatatagggcgaattggagctccaccgcggtggcggccgcccgggcaggtacttttttttttgagatgaagtcttgcttgttgccccggctagagcgtagtggcgcaatcttggctcactgcaaccttcaccaccccagttcaagcgattctcctgcctcagcctcccgagtagctgggattacaggcacacaccaccacacccaactaatttttgtatttttagtaggagacgggcttttaccatgttggccgggctggcctcnaactcctgacctcaagntgatccgcccgccttggcctcccaaagttgctgggattacaggttgtgagccaccacgcccagggagacatttctttattttaaagggtagcctggtttatccccgggnanaactggtggactttcctaactgagacaaagccaagtgtctttaaggtttttggtgtnggtcaangaagtaaaccaagnaaccccaccacnagggaaggacctttaaatttgatgaattnattattnattantaattttagggttccccttngggcccgncttcttaanaaaanctaagttgggnnattcccccccgggggcntggcaggggnaanttttcnanttattccaanngcttttanttccgattaacccgntgcgaaacccttctgnanggggggggggcccccgggtaancccaagnctttttggtttcccctttttangtgganggggntaaatttgtncnccccntttgggngttaaaatcattgggtccatnnagacttggtttccnttgtgntngnaaaatnngttatntnccgncttnaaaaattttccacancaaanatanccnagacccngggangcnatnaaaagggttaaaaccctggggggggcctnaatgnnggggaggcctaancnnccaccnttatnnttggggtttgncngccttnannttggccccctttnttcantaacngaaaaaaaccttgtcnatgcnanttgnaaattnaatgaanttncgnccccatctccccgggggnnanaagcgcggttttgtgtttt

SEQ ID NO: 6696 - DNA, 1248 bp, Homo sapiens
  misc_feature 2, 6, 9, 12, 15, 19, 26, 30, 36, 40, 41, 42, 45, 51, 55,66, 75, 76, 80, 82, 87, 94, 101, 103, 108, 159, 239, 316,358, 376, 379, 381, 406, 411, 420, 525, 542, 545, 554, 557,569, 576, 591, 632, 638, 640, 654, 668, 674, 686, 695, 706: n = A,T,C or G
  misc_feature 714, 715, 724, 727, 742, 745, 757, 758, 763, 767, 768, 774,782, 794, 795, 800, 808, 831, 833, 834, 843, 850, 853, 858,863, 877, 878, 890, 892, 897, 922, 924, 947, 954, 956, 965,966, 974, 980, 989, 1000, 1002, 1003, 1014, 1024, 1025: n = A,T,C or G
  misc_feature 1026, 1033, 1035, 1039, 1045, 1050, 1060, 1061, 1062, 1079,1089, 1090, 1091, 1092, 1100, 1102, 1104, 1105, 1109, 1114,1115, 1116, 1118, 1125, 1126, 1131, 1141, 1148, 1158, 1159,1166, 1183, 1185, 1186, 1195, 1196, 1199, 1203, 1216: n = A,T,C or G
  misc_feature 1219, 1223, 1225: n = A,T,C or G
tntttntcntgncgnatanttttgtngatntttttnggtnnnatntcgganaatntttctgtcttnattttgctnnattntnggggngattttntacgctnantactnactatagggcgaattggagctccaccgcggtggcggccgcccgggcaggtnctttaggagacccaggcgggcagattgcctgaggtcaggagtttgagaccagcctggctaacatggtgaaaccctgtctntactaaaaatacaaaaattagccgggcatggtggctcacgcctgtagtcccaactgcttgggaggttgaggcaaganaatcgcttgaacccaggaggtggaggttgcagttgagccganatcgcgccactgcactcncancntgggctgaccagagcatagactccntcttnaaaataaanaaagaaagaaacaaaggaaaaggaaaagctttatattggaacctttccttcttaaaaaaaaagtaaaaataaaataggaaaagccctggattgccccaccaaaantcttaaaattttgggcnaangttccgtantcnaaatttaaaaangggaatnttttattttggccantccacaaataaattaaattttttttaacttccccccccaanaaaaantncaaattaaaaaaanaggtttcaaaaatnccccgncggttacccttnggggcccgntcttcttaagnaaacttanntgggaattnccncccgggggccttggnatngggaaattttcnnaaatntttnnaaagcnttttattngggataacccgnntcganaccctttnaatgggggggggggcccccgggntnnccccaaggnctttttngtntcccnttttnaattggatgggggnnaaatattggcgncnccttnggcctgttatttcaattggttccantnggccttgtttttccctggtgggngaaaaantntgttaaatnnccgcctcnacaaantttccacancaaacaatttntnngccccgggttngcctttaaannngtttaangncctngggggnggccntaaatgaagnnngggcttaaccttaacanttaaatttgnnnnttggggcntnanntggngcccnnnantttccanntcggngaaaaacctntgggttncccacccttnntttttantttaaatgggcccaaangnncccgggggnngangggngggtagtaacttnttngggngnctattttccccctccccccccct

SEQ ID NO: 6697 - DNA, 893 bp, Homo sapiens
  misc_feature 4, 5, 7, 8, 74, 75, 152, 303, 344, 375, 396, 411, 461, 468,536, 563, 573, 609, 618, 624, 625, 631, 644, 649, 663, 686,695, 699, 702, 711, 726, 733, 763, 764, 766, 767, 771, 773,775, 777, 778, 783, 803, 804, 815, 816, 820, 821, 826: n = A,T,C or G
  misc_feature 839, 841, 842, 852, 865, 873, 874, 875, 876, 878, 886, 890,891: n = A,T,C or G
aggnncnncgtaatcgactcactatagggcgaattggagctccaccgcggtggcggccgcccgggcaggtactnnttttttttttttttttttttttttggagagacagggtcttgttatgccatccaggtggctagcgaattcctggcttnaagcaatcctcctgctttggcctccgaaagtgttgggactacaggtataagtaacgtcgccccagccccagcatgcatttataaagcacaaatgggacaggctcatgcaagggtcttacaagaccacgtggacagataggaagttatctanacatcaggaaacttttgaatttcactccatgtaacattctnaggaaagaaaaaaattaatattacacattgntttccaaactattttctacanaaccccagttcaaanaagcactttgtgtgtcacccaaaaagcgcaggaccagttgatgtcatctnccaactnaacactctgctccattaacatggacgactctaaacacctgatataagatcagccaccaccaccaccgnatttaccacgcagccactgcctacctnggccaagctntagggccagttcttttttttttttttcctgaaaaanaatttttgntttttnncccaanctgggaatgcaangggcncaatcggggggttnaaatggaaaacctttggcctccngggttaaancctnggncccaaaatngggggaaaacccccnttttttncttaaaaaaaacaaaaaattaagggggggnngnntttnanangnnccccntttttttccccccccctttnngggggggtttnngggnnggggnaaaaatccctccntnntggggggggncaaaaaattggcngggggttnnnnancccccccncggnncg

SEQ ID NO: 6698 - DNA, 882 bp, Homo sapiens
  misc_feature 434, 558, 585, 602, 603, 662, 678, 684, 686, 694, 697, 702,711, 719, 728, 729, 734, 742, 746, 769, 771, 774, 796, 800,831, 844, 846, 855, 860, 863, 864, 868, 875: n = A,T,C or G
ctatagggcgaattggagctccccgcggtggccggccgcccgggcaggtacaacatgctcttgtagttcatctaaggcacctttaagtcacagagttatttttaaagtatatgagttacttctgattataaaagtaattcaggttcactgtaacaattggaaaagagcaaaaagaaatgaatagctcataatgccaccaatcaagataagctctagtaacagactgcatatttataaaattgggatcatcctctatatattgtttttatatacttgtttttcagttaacatatgaaaattttcttatgacattaactcctcttcagaactatgtggttttttgttttgttttgttttgagacggagtttcactcttgttgcccaggctggagtgcaatggcgtgatctcggctcactgctgcaacctccacctnccaggttcaagcgattctcctgcctcagcctcccaagtagctgggattacaggcatgcaccaccatgcccggctaattttgtatttttagtagagataggggtttctccatgttggggaggctnggtcttgaaactcccaaccctcagggngatcccgccacctcagnnttcccaaagtgctggggattacaggcatgaagatgctatttaaataagttaaaaacagntaaaaaacaaaccccntttggntncttcccancanggggntccccttgncttgattntgccccctnntcccnaaaagaantcanaattggcccggccccggggccananccncttaaggcgggggggccggggnttcntttgaaaaaaggggggggggggaggtggggncctttctttcccngnttcccctgnggggngcnntttnaaaaatnaggggag

SEQ ID NO: 6699 - DNA, 894 bp, Homo sapiens
  misc_feature 259, 314, 343, 461, 550, 575, 579, 591, 592, 604, 612, 632,639, 650, 652, 655, 666, 681, 682, 687, 696, 697, 702, 731,733, 735, 763, 764, 769, 773, 780, 782, 784, 793, 796, 797,798, 800, 801, 805, 810, 813, 817, 819, 820, 831, 833: n = A,T,C or G
  misc_feature 837, 838, 842, 850, 851, 852, 856, 858, 862, 865, 868, 877,888, 889, 894: n = A,T,C or G
ggcgaattggagctccaccgcggtggcggccgcccgggcaggttctttaggagacccaggcgggcagattgcctgaggtcaggagtttgagaccagcctggctaacatggtgaaaccctgtctctactaaaaatacaaaaattagccgggcatggtggctcacgcctgtagtcccaactgcttgggaggttgaggcaagagaatcgcttgaacccaggaggtggaggttgcagtgagccgagatcgcgccactgcactncagcatgggccgacagagcaagactccatctcaaaataaagaaagaaagaaacanagaaaagaaaagcttatattgaacttctntaaaaaaagaaaaaaaagaaagcctgatgcacacaaatctaaatttggcaagtcgatcaattaaaggatattttatttgcatcacaaaataattctttactccccccaaaaatcaatnaaaaagttcaaatagcaactttttcctaaatgtgtttaaaaatggtaatcaccaaaatacattgttgtccccaacttcttttccagttnttaattctatttgggtaaagtgganggtnttaccctggagnngagggcaattanggaagagnttgggcctttaaaaccttcnctgggangagaggcggtngntcntttttttaaangtcttgaagggaaannggttnggggggccnnaaaantcttttccaaaacttttttttttttcccncntnccccggggccccttttttttcttttggnncaaanaggntttttgngngnaaaaatttnttnnncnngggnacccnctngccntnnttttgaatttntngggnnaccncccggggnnngtcngngaanttnggntttttaacntctttttggcnnctgtn

SEQ ID NO: 6700 - DNA, 978 bp, Homo sapiens
  misc_feature 2, 12, 13, 18, 38, 42, 64, 66, 67, 69, 79, 80, 85, 87, 99,108, 112, 113, 118, 122, 128, 139, 141, 192, 254, 264, 309,352, 353, 358, 359, 361, 417, 457, 458, 496, 517, 518, 549,555, 557, 559, 566, 580, 590, 602, 610, 614, 625, 641: n = A,T,C or G
  misc_feature 648, 652, 653, 661, 665, 678, 680, 681, 683, 684, 690, 700,705, 706, 707, 708, 713, 718, 720, 721, 730, 742, 743, 751,752, 754, 755, 762, 764, 765, 766, 767, 770, 771, 772, 779,781, 785, 786, 791, 794, 802, 811, 812, 813, 816, 818: n = A,T,C or G
  misc_feature 821, 822, 825, 828, 833, 841, 842, 843, 846, 855, 856, 875,880, 881, 882, 894, 898, 900, 901, 912, 922, 923, 927, 928,941, 943, 944, 947, 950, 957, 961, 963, 966, 967, 975, 978: n = A,T,C or G
gnaagggttgannccttngaactacccggcgatatggnaaanctccccggcggcggccgaggtncnngnggagatttanncgggntnaaagcccgaggncaggagttngagnncagcntggnaaacanggggaaacccngnccctactaaaaatacaaaaattagccgggcatggtggctcacgcctgtagncccaactgcttgggaggttgaggcaagagaatcgcttgaacccaggaggtggaggttgcagngagccgagancgcgccactgcactccagcatgggcgacagagcaagactccatcncaaaataaagaaagaaagaaacaaagaaaagaaaagcttatanngaacnncnctaaaaaaaagaaaaaaaaagaaagcctgatgcacacaaatctaaatttggcaagncgatcaattaaaggatattaatttgcatcacaaaaataannctttactccccccaaaaatcaaaaaaaaaggtcaaaanagcaactttgcctaaaggggnnaaaaaaaaagggaatcccccaaaaaaaacangggggngncnccaaacntctttaccaagggnaaaaaaaggnctaatggggggnaaaaaggnggangggaatacccnggaaagggggagggcnaaaaaangagnnggggggangccntcaaaaaacctgncnngnnagaaangagcgggggnctatnnnnaaaanaaggnannaaaaaaaangggggggggggnnaaaaaaanngnnaaaaaanannnngtnnnaagccancncgcnngaaanatnaaaaatangggggggannnacnanccnnggnggnggggnaaaaaaannngancacctgganncccgggccggggggggggncaggnnnaaaaaaaaaagngggncnnccccccccggncggggggagnnaaannaaaaaaaaaaaanannaanaanccccccnaaananggnngggggggnccn

SEQ ID NO: 6701 - DNA, 939 bp, Homo sapiens
  misc_feature 1, 342, 398, 535, 603, 618, 623, 635, 644, 647, 665, 672,698, 706, 711, 712, 714, 723, 725, 735, 736, 741, 749, 756,758, 760, 763, 766, 770, 772, 774, 780, 781, 785, 787, 788,789, 790, 792, 804, 815, 819, 822, 825, 833, 834, 842: n = A,T,C or G
  misc_feature 843, 845, 849, 850, 852, 853, 856, 866, 867, 872, 883, 884,886, 887, 889, 894, 896, 897, 898, 899, 900, 904, 906, 908,909, 912, 919, 925, 930, 939: n = A,T,C or G
ncgtaatacgactcactatagggcgaattggagctccccgcggtggcggccgaggtacggatgctacttgtccaatgatggtaaaagggtagcttactggttgtcctccgattcaggttagaatgaggaggtctgcgttcccttacggaattacatcttgatggcaacaaaatcagcagagttgatgcagctagcctgaaaggactgaataatttggctaagttgggattgagtttcaacagcatctctgctgttgacaatggctctctggccaacacgcctcatctgagggagcttcacttggacaacaacaagcttaccagagtacctcggccgctctanaactagtggatcccccgggctgcaggaattcgatatcaagcttatcgataccgtcnacctcgagggggggcccggtacccagcttttgttccctttagtgagggttaattgcgcgcttggcgtaatcatggtcatagctgttttcctgtgtggaaattgttatccgctcacaattccacaccaacatacgaanccgggagcataaagtgtaaaagcctgggggtgcctaaatgagtgagctaaacttcaaattaaatttgngttgcgcctcacttnccccntttttccagttngggtaaaanccnttattttgccaacttgcntttaatnaaatcggcccaaccccccgggggganaagggcgnttttnncntattttggncncccttttccnnttttnttagttanaataaantncnctngtncttngngncatttnngctntnnnntnaatgcgggtttntttgtttattnaaanggnggnaataactnngttattcnnantganntnntgngttttaatcnnggaanaatatattttnntnntnaaagncnnnnntaanangnncgnatacctnttaaangaccngttttattn

SEQ ID NO: 6702 - DNA, 973 bp, Homo sapiens
  misc_feature 223, 458, 463, 464, 472, 474, 476, 477, 499, 502, 505, 506,515, 520, 527, 546, 552, 553, 558, 561, 574, 579, 580, 591,595, 596, 607, 619, 629, 650, 653, 654, 655, 657, 658, 672,673, 686, 706, 708, 713, 716, 717, 718, 731, 734, 737: n = A,T,C or G
  misc_feature 738, 740, 742, 746, 750, 753, 760, 761, 764, 766, 770, 772,774, 781, 785, 795, 799, 800, 801, 802, 803, 810, 813, 821,836, 839, 842, 845, 846, 847, 851, 859, 861, 862, 863, 866,874, 879, 880, 888, 889, 892, 894, 898, 899, 903, 907: n = A,T,C or G
  misc_feature 909, 910, 920, 922, 923, 932, 934, 937, 942, 943, 946, 951,952, 953, 956, 961, 962, 963: n = A,T,C or G
gactactatagggcgaattggagctccccgcggtggcggccgaggtacaaaagaagaaacaaactcaaaatttgatatacaggtcttagatttttttttttttttctgaggcagggtcttgctctctcacccaggctggagtgcagtggtgccatcttagcccactgcaacctccacctcccaggttcaagcaattctcctgcctcagccccccaccacgtancagggactacaggcgtgcaccaccatgcacggctaatttttgtatttttagtagagatggggtctcgccatgttgcccaggctggtcttgaactcttgaactctggtgattcgccagccttagcctccaaagtgctgggattacaggtgtgagccaccatggccagatttctctctttaagcaaatttctgaccaggacctgcccggggcggccgctcttagaaactagtgggantcccnncggggctngnannggaatttctaattttcaaagcnttnttnngattaccgntcttnccttttnaggggggggggccccggcntcccannaattntgnctcccttttttgncgccnngggttccgttncgcnnccccccccccncccccgtttcgntcattgtttngtttccccccccccccgtttnaannntnncccccccccccccnngtctttttttccncccccgcccccgtttttctncnccccnccnnncttttttttttcnctntanngncncccngctncgnacaacannaantntttngnanttttttntttnttttccgtantttnnnnnggggggnaanccttacanccccccggggggagnaanganaannnggtnaatttttntnnnggnaggggggntttgnntttttgtnnacntntttnnaatnttgngnntcgggagctngnnttactttananttnttgtnntcnattgnnnagntgttnnnaataaatatg

SEQ ID NO: 6703 - DNA, 949 bp, Homo sapiens
  misc_feature 40, 43, 44, 56, 78, 87, 93, 95, 149, 352, 389, 438, 440,469, 542, 574, 588, 589, 593, 595, 623, 624, 653, 668, 670,700, 704, 732, 734, 737, 761, 763, 764, 778, 785, 787, 796,801, 805, 806, 807, 808, 813, 814, 815, 822, 825, 828: n = A,T,C or G
  misc_feature 830, 849, 851, 856, 857, 859, 862, 865, 866, 870, 876, 881,882, 888, 890, 891, 892, 895, 899, 900, 905, 908, 915, 917,918, 924, 925, 928, 929, 930, 936, 938, 949: n = A,T,C or G
ctactataggtatagggcgaattggagctccaccgcggtngcnngcgcagggaccngggcctgacatggcaggcttgngtgaccttntgtggntncatcacgagttgaactcccctactgtctggtttgataacagactttaatattgncttttttatttgcatgcatttcaatcagtcacagatccagcccatctccccttcctcttccctaggaaaggctgttttagtttgtggggctttcctctttaacacaatttggctgggtgaatggacaggaacaatattgttacgtaaagccaatagctctgataacaccagccctaaacccatctgttccgggtttgggtggnaaattctgaaattagatcctggggggaccagcttttngaatcaatttatcatccgtccatgaattttgctatgtgttcagcaaaancnttttatttggaaacaaaccaccagatttntagaaacaccataacctggattattgtaaaggggaacaccatgatagcttttgagttcatattggcaataagnctctttcccttttggtttttgaattttttttncctcttttggatgnnccangncttttttcaaaaaaaaatttaaccaaanncccccaaaagccctttttttccccctcanaatcataaaagtttncncccccccccttgtttaaaaaaacccaaaanaaanggggtgggggggggttttttttttgggntnggnttttgggtttttggggggggtttntnnctttttttaaaaanttttttncnttttttggnggggngggnnnnttttnnnttttttnccnaantnaaaccaaaaaaaaaaaaantngtttnnanttnaanntttnaaaaanatttnnaaaaantnnnttngggnnttttnggnaaaaagnanncccctnnaannntttttncntttttaaaaan

SEQ ID NO: 6704 - DNA, 1018 bp, Homo sapiens
  misc_feature 3, 4, 5, 6, 7, 8, 9, 60, 141, 146, 153, 158, 183, 201, 328,391, 452, 515, 537, 552, 562, 571, 616, 619, 636, 639, 678,692, 695, 710, 711, 714, 727, 730, 760, 777, 779, 800, 820,839, 847, 850, 858, 877, 882, 883, 886, 887, 889, 892: n = A,T,C or G
  misc_feature 911, 915, 928, 940, 941, 945, 957, 958, 959, 967, 973, 980,984, 985, 987, 991, 993, 998, 1001, 1003, 1004: n = A,T,C or G
agnnnnnnncgcgcgtaatacgactcactatagggccgaattggagcctccacccgcggnggcggccgcccgggcaggtactttttttttttttttttttttttgagagtctcactgtgtcacccaagatggaagtggtangggcnccatttnggttnactgaagcttccacctcctgggttnaatcagttatcctgcctnagtctcccaaggagctgaggattacaggcgccgtgcctaatcctggctaatttttgtagttttagtagaaatgaaggtttcgccacgttagccagcctggtcttgcttcgaaactcccaaccctcanggtaatccaccctgccttgggccttcccaaagtgcctgggattaaaaggcatgagcccaccantgcctggcaccaaggtcttcttttcatttgtatactaaaaaaaatgtttggttttgaacanaaccctccgagatgaatagaagtcaccgcccttctggcttctcggggttctcaagcttgcccntatctacccttgcaagtttgcntgctgcctgctgganccccacccangtcatgttnccaactgtggcatttcctaaaaaacttctttccccttaaaaggtnggnacccccattgccccaantcnacaatttttttttcaaaaaatgtccccaaaaagggaaangaaatcccccattnttntttccctttaaacannttnttgtccccttttngtnccaatttttgaaaaaaaaaaaaaaaaaaancccttttaattcccccntntttaccctttggggccgcttnttaaaaaaaaaaatgggggnttccccccgggggtttggnagggaaanttntttttttnaaaaccttttttttgtttnccccnncanncnttnaaggggggggggcccccgnttcnccaaaattttttntttcccctttanngggnggggggtaattnnncccccctngggggnaaaaaangggnnanaaantnttttnctngnnggaaaaaaattttt

SEQ ID NO: 6705 - DNA, 890 bp, Homo sapiens
  misc_feature 532, 601, 687, 698, 701, 706, 707, 713, 719, 741, 744, 752,766, 767, 768, 771, 778, 781, 812, 813, 817, 820, 821, 825,828, 830, 838, 841, 844, 847, 854, 857, 860, 861, 862, 865,867, 870, 878, 888, 890: n = A,T,C or G
tagggcgaattggagctccaccgcggtggcggccgcccgggcaggtacacacactcaggcttcagatcttgttgaaagctgcgatatcgacactctgcacgtgctcctcaaacttggtgatctcctcctccagcaagtctgtccccaccttgtcgtcctccaccacacactgaatctgtagcttccggataccgtagcccacggccccacagacccagcacgtatctcccatgcgccaagtggagcccccagccaagaagccagccacaccagcagaggatgacgaggatgatgacattgacctgtttggcagttgacaatgaggaggaggacaaggaggcggcacagctgcgggaggagcggctacggcagtacctcggccgctctagaactagtggatcccccgggctgcaggaattcgatatcaagcttatcgataccgtccgacctcgagggggggcccggtacccagcttttgttccctttagtgagggttaattggcgcgcttggcgtaatcatggtcatagctgnttcctgtgtgaaattgttatcccgcttacaatttccacacaacattaccgagcccggggagcaataaantgttaaaagcctggggtggcctaattgaggtgagctaacttcaacaatttaatttgggttgcgcttcactgccccgttttttcagntcggggaaaanctnttcgnngccagnttgcanttaattgaatcgggcccaaacnccncgggggangaaggccggttttnnnttnttgggcnctnttttccgctttttcttggttaacttgaactnngttnggnncttnggncngttcgggnttntgncgnagcggtnttnaannnttnanctnaaaagggngggggaatanan

SEQ ID NO: 6706 - DNA, 917 bp, Homo sapiens
  misc_feature 306, 329, 385, 403, 473, 477, 485, 524, 525, 534, 562, 581,616, 619, 634, 635, 636, 643, 650, 660, 662, 666, 670, 674,689, 705, 715, 717, 718, 729, 730, 731, 737, 745, 746, 761,787, 790, 797, 815, 816, 831, 833, 836, 845, 847, 851: n = A,T,C or G
  misc_feature 858, 859, 862, 866, 872, 880, 882, 883, 884, 901, 911: n = A,T,C or G
ggcgaattggagctccaccgcggtggcggccgaggtacgcggagaggcagatgatatgcagcttgatcgttgatttttgatttagatgatcaatgatgttcagaatagtgtttgtatgtgtgagcatggatgtgtatgtcgtgtgtgtgtctgtgtatgtggtgtgtgtgtctgtgtatattgtgtgtgtgtgtgtgtgcatgcgtgtgtgcagggtaggtatcaccacattccctgtggtggtgtgtctcttctctgggattggttcttctagaatctcccaccttttagaaccactttaagatntttatttattctctccaaccatnctggcaatctttttatccttaaacaggaataaattcctacagctgaatctattcangatttctgtgtgtatgtntgaaaatttatatgatgctcaatcctttaaaaatcttttattcaagtaacttttaaaaagtaaaaacacnaggngtttttantcataaaaaaagtgaagagatgtttaggtcccacttaannttctctgcnttgcttttctttttggtggtccctaganttaccttaagccctcttgntttcccagccccggcaggttggaaaacaagcaatnggntggaggggtccttannnaagtccnaccatgntaaacacccnanttancttncccnttttgaaggttccanaaacccaatttttagnagttttaagnanncccacgaagannncccccnaattgggnnaatccttattttccngctttttattacttgataaaaacccntcntgggagnaattgtggtttttaaaannttggggtggcaaaantnggntttgcttcnanaacncccccgnnttngganttaatntggatttnannncccccccccccttggancacctctttnggccat

SEQ ID NO: 6707 - DNA, 923 bp, Homo sapiens
  misc_feature 420, 444, 506, 514, 521, 557, 583, 588, 600, 609, 611, 614,625, 631, 632, 639, 642, 645, 649, 652, 656, 658, 673, 676,681, 685, 688, 690, 700, 704, 705, 714, 719, 720, 725, 728,729, 731, 736, 738, 742, 748, 751, 759, 760, 771, 772: n = A,T,C or G
  misc_feature 776, 779, 780, 781, 786, 791, 799, 800, 807, 810, 822, 828,841, 843, 844, 851, 856, 857, 859, 860, 863, 870, 871, 872,874, 880, 898, 905, 907, 908, 910, 913, 914, 919, 922, 923: n = A,T,C or G
gcgaattggagctccaccgcggtggcggccgaggtacttttattacagtattttttatttgtttcggagacagggtcttgctctgttgcccaagctgaagtgcagtggtgcaatcacagcctgctgcagccttggcctcgcaggctcaatcaatcctcctgcttcagcctcctaagcagctgggaacacaggctcatgccaccacatctagctaatttttattttttgatagagatgaggtctcactgtgttgtccaggctggtctcaaattcctggactcaagcaatcctcccacctcggcctcccgaagtgctgggattacaggcatgagccaccacgcccggccacagtattttttaaatgccagttaggttttataagatgtagaattctataactccaacacaagaatgacaggngatgcttgcatgacttttggcaantaacttccaggaagccctagggatttacaaagatgcttttgagtgacatttaagtcacaagnagaattgnttgcaanctaaaacagaaacaccagggattgattaaaagaaantggaatggaggggaaagaattgaaanacccnccttggtgggangattgggcncnttntttgacccagngggccnntactttnttnggngggntcnaagntnctttgggggccccanttnggggngggnggngntaaaaccccntccnnttccccaantaaanngtttnaanngngcctngnaaancccccncanggggaacnnaaaaaaaaaanntaanttnnnccctnttttngggaaaannaaaaagnacntggccgggttancccctngggaaaaaatccntnnccggggnggggnngnnttnaaaaatnnngnggaaanccccccggcctggccggnaatacananntntannctttnttnn

SEQ ID NO: 6708 - DNA, 903 bp, Homo sapiens
  misc_feature 5, 39, 43, 74, 76, 84, 115, 117, 457, 577, 639, 651, 693,704, 744, 775, 781, 797, 804, 808, 818, 825, 826, 829, 833,845, 854, 865, 866, 870, 880, 884, 885: n = A,T,C or G
agaanttacgcgcatttgactcctatagggtttttgttnaagntccaccgcggtggcggccttccgggcaggtntnatatgctnttcataatttgtcaggccaaccttcacaccntnttttggcagttcgtgtgcatacgctgcgcagactatcatatccccctctatcccgcgtacccaggctttggcattattggatgtcaatagcattgtttttgtcatgtagctgttttaagaaatctggcccagggtgtttgcagctgtgagaagtcactcacactggccacaaggacgctggctactgtctattaaaattctgatgtttctgtgaaattctcagagtgtttaattgtacctcggccgctctagaactagtggatcccccgggctgcaggaattcgatatcaagcttatcgataccgtcgacctcgagggggggcccggtacccagcttttnttccctttagtgagggttaattgcgcgcttggcgtaatcatggtcatagctgtttcctgtgtgaaattgttatccgctcacaatttcacacaacatacgagccgggagcataaaagtgtnaagcctggggtgccctaatgagtgagctaactcacattaaatttgcgttgcgctcaacttgnccgctttccagntcggggaaaccctgtcgggcccagcttgcattaatgaatccnggccaaacccnccggggaagaagcgggtttggcggtatttggggccgcctntttccgcctttcctctgcttcaactgaactnggttgnggcttcggtccgtttnggcttgngggnaaaccgggtnttcaaanntcnactnaaaaggcgggtnaattcccgnttattccccannaaancacggggatnaacnncccgggaaaaaacatttt

SEQ ID NO: 6709 - DNA, 1314 bp, Homo sapiens
  misc_feature 1, 7, 13, 15, 16, 20, 22, 25, 40, 44, 45, 66, 71, 73, 78,80, 81, 83, 84, 86, 89, 92, 96, 97, 99, 103, 105, 110, 120,205, 299, 347, 352, 360, 362, 363, 370, 372, 374, 388, 399,412, 416, 423, 435, 441, 449, 455, 460, 465, 471, 473: n = A,T,C or G
  misc_feature 495, 496, 499, 500, 504, 508, 510, 516, 523, 527, 528, 543,544, 548, 555, 559, 563, 570, 572, 576, 577, 578, 583, 584,585, 587, 599, 601, 609, 610, 613, 614, 619, 623, 626, 635,642, 645, 659, 663, 664, 679, 690, 693, 697, 704, 707: n = A,T,C or G
  misc_feature 708, 717, 719, 729, 730, 731, 737, 740, 742, 744, 749, 750,756, 757, 759, 760, 770, 774, 775, 780, 783, 784, 788, 792,795, 802, 803, 810, 814, 815, 818, 823, 824, 827, 829, 830,832, 839, 849, 859, 864, 868, 872, 873, 881, 888, 894: n = A,T,C or G
  misc_feature 895, 898, 899, 900, 901, 904, 906, 914, 917, 926, 935, 938,946, 952, 953, 954, 957, 959, 961, 972, 977, 979, 982, 987,988, 990, 992, 998, 999, 1001, 1003, 1011, 1012, 1014, 1019,1020, 1021, 1023, 1029, 1030, 1031, 1040, 1044, 1045: n = A,T,C or G
  misc_feature 1046, 1047, 1048, 1054, 1057, 1059, 1060, 1067, 1070, 1076,1081, 1082, 1085, 1088, 1092, 1101, 1102, 1104, 1106, 1109,1111, 1114, 1118, 1121, 1122, 1125, 1129, 1130, 1132, 1134,1139, 1154, 1160, 1168, 1171, 1176, 1182, 1186, 1187: n = A,T,C or G
  misc_feature 1194, 1195, 1197, 1205, 1206, 1208, 1210, 1212, 1216, 1218,1232, 1238, 1239, 1241, 1243, 1245, 1248, 1251, 1258, 1260,1261, 1263, 1267, 1271, 1272, 1274, 1276, 1277, 1279, 1289,1297, 1301, 1302, 1305, 1306, 1307, 1308, 1310, 1312-1313: n = A,T,C or G
ncccacnaactantnntcgntnatnttgatcattttgatntcgnngattatgattttaatattttnattgncncatcncnnanntnatnttnttannangatngngagancgaggttganctctcactatagggcgaattggagctccaccgcggatggcggccgaggtacgcggggacagttccggtgggagaacgcggctgcnaggttttcggctttggctcctgatatgcagcgacagaattttcggcccccgactcctccttaccctggtccgggtggaggaggttggggtagcnggaagcagcttccggtggaaccccgggcgggggcggaccacggccgtntctantaacatantnngatcccncngnctgcaggtaattcnatatgcaagcnttaacatataccngtcncactctnagagggggtggngccccngttacccnaacatnatagnatacncttaantntggaggggtttaaaatttgctnncgnntttntgcngntaaatntcaatgnggtnncaataagactaggtnnttcncttggtngtangaanaattagngnttannnccccnnntnaactaatttttncnacaacaannccnntatcntgantcncggggaagnccaattnatngttggttaaaaagnctcnntggttggatggcctntaaatggaagntgnatgnccttatnacnnccaacattntnaaattttggnnnttgtgntgncnancaacnntggacnntnncattatttcnaaanntaccntgnntatnaaancantgttccnnttccatnggtnntgnctatnntananntnaaaattnaagttccaangactatgccntttgnaagnaacnnccttgatnaattgcntgatanntgnnnnacnancttttttntcnacatttaantaatgattntanatttaatnttcatnnnttntnanctatctttaanttatnantgnttgcnntntnttaacnntnantattcaanntnttaannncnatcaannnaggggaaancgannnnntgtatnttnannaaaatanatnagggtntaatnnccntcntccnattattatnncntntantnctnatanatnntcnacgnntnantattnaacgattgtatggcncgaatnaacacagntcntggtntttttntaanncgaattnntntgtcgatnngnantnctcntngactacataaatcntctatnntntnanctnatnaatgttntnncngacnaccnntntnngnattatacgangaaacacnatgnntcnnnntnanng

SEQ ID NO: 6710 - DNA, 885 bp, Homo sapiens
  misc_feature 15, 274, 308, 362, 371, 538, 557, 573, 612, 633, 639, 666,693, 695, 702, 727, 738, 753, 766, 769, 770, 779, 785, 793,794, 797, 800, 812, 816, 821, 826, 827, 830, 833, 842, 847,858, 859, 861, 867, 871, 874, 875, 877: n = A,T,C or G
gactactatagggcngaattggagctccaccgcggtggcggccgcccgggcaggtactttaggagacccaggcgggcagattgcctgaggtcaggagtttgagaccagcctggctaacatggtgaaaccctgtctctactaaaaatacaaaaattagccgggcatggtggctcacgcctgtagtcccaactgcttgggaggttgaggcaagagaatcgcttgaacccaggaggtggaggttgcagtgagccgagatcgcgccactgcactccancatgggcgacagagcaagactccatctcaaaatnaagaaagaaagaaacaaagaaaagaaaagcttatattgaacttctctaaaaaangaaaaaaangaaagcctgatgcacacaaaatttaaatttggcaagtccgatcaattaaagggatatttatttgcatcacaaaaataattctttactccccccaaaaatcaataaaaagttcaaatagccaacttttcctaatgtgttttaaaatgtaatcaccaaatacatgtgtncccaaactttcttttccangttataatttctattngggttaaaagtgagggtattacccttgaagttggaggcnaaataaaggagaagttttgangctttnaaaaccctgccttggaaaggagccggngtttcttttctttaagaagttcttggnangaaaatnggtttgggggggccaccaaaaattntttttaaaatnctttttttttttttncccctaaataccntgnngcctttttnattttnctttggtnnttnaantgggtttttttngggnaaaanctttnnttnaanctggggtanctttnggccggttttnnanaaaatnaatnggnntnccccgggg

SEQ ID NO: 6711 - DNA, 963 bp, Homo sapiens
  misc_feature 372, 399, 414, 420, 441, 473, 483, 484, 486, 491, 492, 495,498, 501, 504, 511, 514, 519, 531, 537, 540, 541, 544, 554,556, 560, 570, 580, 585, 589, 590, 606, 610, 611, 612, 613,624, 625, 626, 627, 644, 673, 682, 683, 684, 688, 689: n = A,T,C or G
  misc_feature 698, 701, 706, 708, 717, 719, 722, 725, 727, 728, 730, 738,741, 742, 743, 745, 746, 747, 761, 773, 775, 776, 783, 786,794, 799, 800, 805, 814, 815, 825, 830, 833, 835, 837, 839,840, 843, 848, 850, 851, 853, 862, 865, 869, 870, 873: n = A,T,C or G
  misc_feature 878, 879, 882, 884, 885, 888, 889, 896, 899, 901, 912, 913,916, 930, 931, 936, 938, 939, 940, 942, 943, 947, 948, 952,953, 959: n = A,T,C or G
ggcgaattggagctccaccgcggtggcggccgaggtactgaatgtaatttagattctcttctatgttaatctgattaattatattttaaaatagcacattcacactgttttacttgaatacagctaaatgtgtgtatatatggaccacatatacaaatatggtcccttaagattataatggggccaggcgcagtggctcaggtctgtaatcccagccctttgggagaccaaggtgggcagatcatgaggtcaagtaatcaagaccatcctggccagcatggtgaaatcccgtctctactaaaaatacaaaaattagctgggcgttgtggcacgtgcctgtagtcccagctacttgggaggcaggagaatcgnttgaacccaagaggtggaggttgcaantcggcttgaaaatcncaccanttgtttttcccggccctggcnacaggggtgaagacacccgttccccgcccccnggtatatttnnantgttnnaanaanatnatnttttttngtnttccnttggccgggggngggctncgnnttnaaaaacttangnggtnaccccccccngggctggaanggtanttcnngatttttaaagttttntccnnnntcccctttagnnnnttggggggggggggggncccggataccccattttttttgtttcccntttatggtnnngggnntttaaattnggnccccntnggctaaaananatnggntnntngttgtttnctnnnannnaaatttgttttccntttcaaattctncnnaaatatnttnccggtccngggtnntaatnataaattannaagccctggnggtgnctncnanannggncaccncnncncctaatttngtngggnntgncctcnnttnannctnnttttaanaangnggaaaaccttnngangccctttataattnnatagnannncnncccnnccgnngggggngggg

SEQ ID NO: 6712 - DNA, 897 bp, Homo sapiens
  misc_feature 141, 178, 247, 310, 405, 423, 438, 440, 445, 446, 452, 453,487, 490, 492, 503, 515, 517, 522, 531, 561, 563, 564, 587,599, 604, 623, 643, 650, 676, 720, 721, 727, 729, 736, 744,747, 749, 752, 755, 758, 764, 766, 770, 781, 786, 792: n = A,T,C or G
  misc_feature 799, 800, 821, 826, 831, 836, 839, 843, 850, 854, 866, 870,874, 879, 884, 888: n = A,T,C or G
ggcgaattggagctccccgcggtggcggccgaggtacgcggggggcggtggttgggtggtaagatggcggctgtgagtctgcggctcggcgacttggtgtgggggaaactcggccgctctagaactagtggatcccccggnctgcaggaattcgatatcaagcttatcgataccgtcnacctcgagggggggcccggtacccagcttttgttccctttagtgagggttaattgcgcgcttggcgtantcatggtcatagcttgtttcctgtgtgaaattgttatccgctcacaattccacacaacatacnagccgggagcataaagtgtaaagcctggggtgcctaatgagtgagctaactcacattaattgcgtttgccgctcactgcccgcttttccagtccnggaaacctgtcgtgccanctgcattaatgaatngntcaannctcggnnagaggcggttgcgtattgggcgctcttccgcttnctngntcactgactcnctgcgctcggtngntcggntgcggcganccggtattaagcttcactcaaaggcggtantnncgggttattcccacagaattcanggggattaaccnccaangaaaagaaccattttttancaaaaaggcccatcataaanggcccangaaaccgtataaaaaagggcccgcgnttgcctgggcgtttttttccataagggccttccgcccccccttnncgaagnantcacaanaaaattcnacncntcnaanttnaagaangntggngaaaccccacnaggancttttnaaagaanncccatgccgttttcccccttngaaangcttnccttntgncccntttcttntatncgaaccctttcntttnaccnggtantaccntgtnccccctttc

SEQ ID NO: 6713 - DNA, 935 bp, Homo sapiens
  misc_feature 2, 6, 271, 334, 346, 376, 492, 532, 543, 548, 572, 574, 594,596, 600, 615, 627, 643, 646, 650, 655, 658, 659, 667, 685,686, 690, 698, 704, 705, 715, 724, 725, 728, 729, 731, 744,756, 764, 772, 790, 792, 798, 799, 803, 804, 806: n = A,T,C or G
  misc_feature 810, 819, 822, 825, 831, 832, 844, 845, 848, 857, 861, 866,871, 873, 877, 886, 888, 893, 898, 900, 901, 918, 920, 922,923, 924, 929, 934, 935: n = A,T,C or G
gnccgntcgactcctatagggcgaattggagctccaccgcggtggcggccgaggtactttaggagacccaggcgggcagattgcctgaggtcaggagtttgagaccagcctggctaacatggtgaaaccttgtctctactaaaaatacaaaaattagccgggcatggtggctcacgcctgtagtcccaactgcttgggaggttgaggcaagagaatcgcttgaacccaggaggtggaggttgcagtgagccgagatcgcgccactgcactncagcatgggccgacagagcaagactccatctcaaaataaagaaaggaaagaaacaaagaaaangaaaagcttatntttgaactttctctaaaaaaagaaaaaaanagaaagcctgatgcacacaaatctaaatttggcaagtcgatcaattaaagggatatttatttgcatcacaaaataattctttactccccccaaaaaatcaataaaaagttcaaatngcaacttttttcctaatgtgtttaaaaaatggtaaattcnacccaaattcnatggnggttcccccaaccttcttttttcnangttattaaatttcttatttngnggtnaaagttggagggtantacccttggaangttggagggccaaatnaangaanaggtntgnngccctttnaaaaaccttgccctgggnngaanaaaacgtngtttcnnttttttttanaaaaggtgnngtnngnaaaattggttttnggggggccccanaaattccntttcaaancctttttttttttttccntnattccnngggnntntttnttttttttnggnttnaaaaanngttttttggggnnaanttttttttnaccntgggnacctngncccngggggggcngntttantaaanannggggttcccccccgggntntnnngaaanttttnn

SEQ ID NO: 6714 - DNA, 885 bp, Homo sapiens
  misc_feature 394, 424, 448, 451, 477, 486, 492, 495, 504, 559, 564, 565,571, 600, 613, 618, 623, 628, 637, 640, 641, 646, 661, 664,673, 675, 686, 695, 696, 697, 703, 709, 711, 723, 729, 730,757, 767, 773, 794, 798, 803, 807, 811, 815, 816, 818: n = A,T,C or G
  misc_feature 839, 841, 850, 851, 856, 867, 879, 880, 881, 883: n = A,T,C or G
tatagggcgaattggagctccaccgcggtggcggccgcccgggcaggtacactaatcctactgagccaagtgatcatcttttaataaagacctttcctgaactcactttgtttggtctctcccatctttgattgtcccgcaacaataataactataaaacagaaactgttttaacttgttgccctactcagtgacctgatgaatacattgggaacagtcctccatgtggggaaaatcaagtggaagtccttattacataagtccaaattttaaggagaataagtcccacgatgagtttcctcatgctttggctgtgcatagatgagtcagccttctgggtgtgactgcaagcagggcttgtcagtccttctcagagtcactttgcaggggttgnctgggcttggtctcaccttccaggtctcanaggctgcaggttttacatggctgnggnggatccaggcttggattccttcaacnctttaccangctgtnggnggtgggttnaaagatgacggtcttgggggttttttccaaccggtgggtcacaaagggggactancattnnccaatncctttgaattcaaaactttgattcacccnttggagagaaaangggtngaaantgggntttgaaatnaanntaaantggggggcaccctcnttnatttacccnanggctgaaaaanttggttttnnngccaantttttntncatattgggccntatagnntgttcaatttttaaacttaaattttcnccctaacctnttttgntgggagtggcccttggggganatcnccaantaantatngggnnanggggggtttttttggttaacntngggcctggnntctanaaaaaaaaggnggatcccccggnnntnta

SEQ ID NO: 6715 - DNA, 877 bp, Homo sapiens
  misc_feature 305, 369, 477, 500, 507, 552, 576, 581, 591, 597, 613, 620,640, 656, 661, 674, 677, 695, 721, 724, 731, 732, 734, 738,771, 773, 785, 787, 789, 795, 797, 807, 811, 814, 815, 818,827, 829, 830, 833, 835, 844, 855, 861, 866, 876: n = A,T,C or G
gactcactatagggcgaattggagctccaccgcggtggcggccgaggtacctgactcctgactcagaacacgctcttgaagatgttgatctaaacaaagtttacatcctcggtgggcttgtggatgaaagcattcagaagaaggtgacatttcaaaaggcccgggaatactctgtcaagaccgcacgcttgccaatccaggaatacatggtcagaaaccagaatgggaaaaactatcattcagagatactggccatcaatcaagagactcacaactggcctgaagcattgaaagaaaggagtttnttcaggaaaaggctatattcttcggaactcagtggaatgatgggcctaagattgcagctgcgtngccaggttgctcacgccgttaatgccaacactttggtagacccgaagtgggccagatcacctgaggtcaggagttccgaccagcctggccaacatggtgaaacccttntctactgaaaatacaaaaattanccaggtntggtggcgcatacctgtagtcccagctaccttggggaggctgaangcaggagaaatcaccttgtaactntgggnagggcgaaangtttgncaagttgaggccccangattttnaccccagtgccacttccatncctggggtgacagganccaangaactttccattnttnaaaaaaaaaaaaaatttnatttataaaaaaaaaattgcaatttncanggaattnnangcgncctttggaaggtaccttttccccgggccggggncngttttaaaaaantnantggaantnccccccgggntggnagnnaantttcaattntnnaancncttttttantacccgttaanccctgnggggngggggccccnt

SEQ ID NO: 6716 - DNA, 953 bp, Homo sapiens
  misc_feature 235, 261, 300, 306, 315, 329, 338, 366, 375, 382, 384, 386,391, 415, 420, 429, 430, 445, 454, 461, 473, 490, 498, 504,516, 522, 525, 538, 547, 549, 559, 561, 563, 565, 568, 569,574, 576, 578, 590, 594, 595, 596, 598, 611, 623, 624: n = A,T,C or G
  misc_feature 630, 631, 640, 642, 643, 648, 653, 658, 663, 671, 676, 687,688, 690, 691, 700, 701, 702, 709, 711, 721, 725, 732, 735,738, 740, 749, 758, 761, 762, 763, 771, 773, 775, 776, 780,782, 794, 805, 812, 813, 825, 827, 831, 832, 833, 840: n = A,T,C or G
  misc_feature 841, 847, 851, 852, 853, 855, 858, 867, 870, 872, 874, 878,881, 888, 894, 897, 902, 903, 907, 913, 916, 919, 921, 924,929, 930, 931, 932, 933, 935, 936, 938, 939, 943, 945, 948,950, 953: n = A,T,C or G
gcgaattggagctccaccgcggtggcggccgaggtacaaaagaatcagaagtttaaaaaattaaaaatttataaagcaaaaatgttatagtatgttaactcactgaagaaagaaaaattttgtccaggcgtggtggctcatgcctgtaatcctagcactttgggaaggattggaggtgtgtggatcaattgaggtcaggagtttgagattttttaattaaatttctccaagaatngtatacacagcttgccataggtagtnactttctgctcctatccatgcgtgcatacggcccttaanagaacncccgctctngaactaagtggganccccccggnctgccaggaatttccgatattcaagctntattctgantacccgntngnacccnttgagggggggggcccccggggancccangcttttttnntccccctttaggtgnaggggcttnaattgcngccggctttggncgttaaatctatgggtncattagcnttggtntcccttgtggtngaaaantgntttttcctgcttntacaatttnancccccctaantntncntannctccntngnagccctcaatgntggnnnantgtcctgggggtngcccctacttgnnttgagnnctaaacttnannatatnaattngcggntgcancttaactngcccngtttttcccanntnnggggaatannnctgggcntngtccagtttntgtntttaatntgnacntncggtcccancccccgccnggnnntatgtggntncnntccncntaatttgtgctnctttatttccnctttatnnatgcattacagngnactnnnttgcgtnnatggtncccnnncnganattgcagcntanantntatntanacttcantcacanagncgtgnntttntacctnttntananacncatannnnngnngnntacntncanangcn

SEQ ID NO: 6717 - DNA, 902 bp, Homo sapiens
  misc_feature 351, 491, 508, 560, 607, 633, 656, 683, 704, 745, 757, 787,804, 809, 823, 825, 842, 846, 847, 850, 851, 852, 866, 876,877, 879, 880, 881, 883, 889, 892, 896, 898, 901: n = A,T,C or G
gactactatagggcgaattggagctccaccgcggtggcggccgaggtacgcggggacatttgcttctgacacaactgtgttcactagcaacctcaaacagacaccatggtgcatctgactcctgaggagaagtctgccgttactgccctgtggggcaaggtgaacgtggatgaagttggtggtgaggccctgggcaggctgctggtggtctacccttggacccagaggttctttgagtcctttggggatctgtccactcctgatgctgttatgggcaaccctaaggtgaaggctcatggcaagaaagtgctcggtgcctttagtgatggcctggctcacctggacaacctnaagggcacctttgccacactgagttgagctgcacttgtgacaagctgcacgtggatcctgagaacttcaggctcctgggcaaacgtgcttggtctgtgtgctggcccatcactttgggcaaagaattcaccccaccagtngcaaggctgccctattnaaaaaaattggtgggctgggttgttggcttaatgccccctgggccccacaangttattcactaaagcctcgccttttctttggccttgtccaaaatttnttatttaaaaggggttcctttttggnttcccttaaaggtcccaaccttncttaaaaccttgggggggattatttanttgaaaaggggcccttttgangcattcttggggatttttgcccttaaataaaaaaaaaacantttatttttgcnaaaaaaaaaaaaaaaaaaaaaaaaaaaagnttccttggccccggggncgggnccgggttttaaaantnagtgggaattccccccngggnntgnnnggaaatttctattnaaaaagcttnntnnntnaacccntcnaacncngtng

SEQ ID NO: 6718 - DNA, 907 bp, Homo sapiens
  misc_feature 1, 80, 113, 245, 247, 271, 284, 302, 312, 346, 361, 364,475, 479, 496, 508, 510, 511, 519, 532, 536, 544, 620, 622,632, 642, 650, 655, 656, 664, 665, 668, 685, 692, 695, 697,708, 714, 720, 724, 738, 744, 763, 768, 777, 781, 782: n = A,T,C or G
  misc_feature 784, 786, 791, 806, 808, 818, 819, 821, 822, 824, 825, 837,839, 845, 848, 860, 861, 865, 866, 869, 872, 878, 883, 889,890, 903, 904: n = A,T,C or G
nactcactatagggcgaattggagctccaccgcggtggcggccgcccgggcaggtacttttttttttttttttttttttngagatggagttttgctctgtcgccaggctgcantgcagtggtgtgatcttggctcactgcgggctccacctccaggttcaagtgattctcctgcctcagcctcccgagtagctgggattacaggcacccgccaccacgcccagctaatttttgcatttttagtananacggggtttcgccatgctggcctngacctcccaaagngctgggattacaggcgtngagccaccgnaccccggcctcatttttgttttttctactttgtntaaactttggggaanaanaaaaccccaaaattatttttagtagttcagcaaacattgattgatggggaacccccattttagggcaccgttcaccattggggaagcctcaggctgtcaccctggtgacanactnggtcaaggaaaaagggnggggtgttcccntnntttttttncaaaagattcctntttnaaaatttntattgggctttttaaaaactttgcttggttattcctattccgccccaatttttaaaagaattctaaaagaaaatanangtttttaatncacccattantttttccnggaannccgttttnnttngggggcccaaacttggnccatggnaanantttacaaaaancaaaanccgggngggnttttcccttttatnggcccngggaggctttaattcaagntttancccaaaaanaaanntntnttacncttttttaaaacatnangggccccctnntnngnnaatttttttttntnccccgnttngaaaagggtaannaaannganccncccccnataanttggtnnaaaactttttttnnaat

SEQ ID NO: 6719 - DNA, 904 bp, Homo sapiens
  misc_feature 75, 227, 255, 263, 273, 302, 338, 344, 383, 385, 387, 414,415, 419, 441, 458, 460, 463, 466, 469, 484, 486, 500, 520,526, 534, 536, 539, 541, 546, 556, 560, 563, 566, 567, 569,576, 582, 584, 585, 600, 602, 603, 606, 616, 619, 622: n = A,T,C or G
  misc_feature 627, 636, 640, 641, 644, 655, 656, 663, 673, 685, 686, 693,697, 717, 727, 734, 750, 755, 760, 765, 768, 769, 782, 790,796, 797, 798, 810, 812, 813, 814, 822, 824, 829, 830, 832,835, 836, 849, 852, 853, 854, 863, 867, 870, 873, 876: n = A,T,C or G
  misc_feature 878, 882, 883, 890, 891, 893, 896, 898, 901, 904: n = A,T,C or G
gggcgaattggagctccaccgcggtggcggccgcccgggcaggtactttttttttttttttttttttttttggcnggattttaatcatttattcattccttcagcgagcggcacttcctgagcagccactgtatgctaggagctggcaggaggcccttgaacactctggactcagtctagtgctagattgatgatcaggccatgacgatgccaggtgtgcatgctgnggagcctggaacaagtgccaagcctggngggccttntggaggaggngcctgctacacccagcctggcaggaggcngacgatcaggtgttattaaaaaaaaatttttaggcngggtgngggggttcatgcctgtaatcccagcacttttggaggctnantnggggcaaaccacttgagggtccaggannatcnagtagcccccctgggttcaaanattggtggaaaacccgntnttnttnctnaaaaaataccaaaanantttatgctttgggncatttggtttggccagggcncccctnttgggtcntnaancnttacntttggggggnttanaanggnnancgccgcncaaacngnngcccgggggcccccngnntanccttgggggncgnttntaaanaacataagngggnnaancccccgggggnntggccgngggaaatttnggttatttaaannctttttngaantccccgcccgcacccccgangggggggggnccctggnacccccaaactttttnttttnccctnttttntgnngggggtaaaattncgcccccntgggcnnnaaataaaggggncnnnaatgcatngntcccnngnggnnaaaatatgttttnccnnntacaatatncccncanaanatncncagnnccggggnncntananatngtn

SEQ ID NO: 6720 - DNA, 839 bp, Homo sapiens
  misc_feature 418, 575, 669, 670, 680, 682, 684, 705, 722, 730, 741, 746,750, 773, 774, 790, 801, 809, 812, 837, 838: n = A,T,C or G
gagcgcgcgtaatacgactcactatagggcgaattggagctccaccgcggtggcggccgcccgggcaggtacgcggggccttccaccatgtgaggacacagcaagaaggggctgactctgaaccaggaagctgtgctgtgctcaccagacactttgatcttggacttctcagcctccagaactatggggttctgctcttgtcacccagactggagtgaagtggcacaatctcggctcactgcaacctccgcctcccgggttcaagcgattcccctgcctcagcctccagagtagctggactgcaggcgcacgccaccactcctggctaatttttgtatttttagtagagacggggtttcaccatgttggccaagatgttcttgatcttctcaccttgtgatccgcccacctcaacctnccaaagtgctgagagactaagacacctttctagacagagaggaggccgatggcagacattctcagataggtttgtagctattgacctggcttgcatcaaaggagatgaaatcccttagaaattgacagcttctatgaaatttacaatcaagaaggcntaagaacaactggctgcagcttcagaactatgcagaaaataaaaatgtcaacagctggggagaaaaaaaattctaaagtgagcaaccagagccnngtgaaaaaanantnaacccaattagagccagggcnccttgagaacaaggggnaaatggcnccccactaaantgcanggtnttacaagggggttgacctttgcnnaccattttttgggttncccaaggttanccaaaaanccntttttttgatttattgaaaccggcnna

SEQ ID NO: 6721 - DNA, 859 bp, Homo sapiens
  misc_feature 3, 4, 5, 6, 7, 8, 9, 10, 178, 179, 180, 188, 190, 192, 193,195, 196, 201, 203, 207, 208, 211, 214, 216, 220, 222, 227,228, 233, 236, 237, 243, 245, 249, 250, 253, 262, 263, 267,270, 274, 275, 277, 288, 289, 296, 298, 299, 300, 301: n = A,T,C or G
  misc_feature 304, 310, 314, 315, 320, 321, 323, 327, 328, 330, 337, 338,339, 351, 354, 357, 360, 364, 368, 373, 381, 382, 385, 389,393, 396, 402, 415, 417, 421, 424, 427, 436, 440, 443, 444,445, 451, 455, 457, 471, 474, 475, 489, 490, 491, 505: n = A,T,C or G
  misc_feature 507, 511, 514, 527, 533, 538, 542, 545, 548, 555, 559, 561,562, 563, 567, 586, 587, 588, 594, 595, 596, 616, 617, 625,631, 637, 644, 645, 646, 648, 652, 660, 664, 665, 668, 670,679, 686, 692, 693, 701, 702, 708, 709, 719, 721, 725: n = A,T,C or G
  misc_feature 726, 731, 735, 736, 737, 745, 762, 776, 777, 793, 797, 804,826, 827, 852: n = A,T,C or G
agnnnnnnnngacgcgcgtaatacgactactatagggcgaattggagctccaccgcggtggcggccgaggtactttttttttttttttttttttttttcttttttttttttttttttttttttttttttttttttttttttttttttttttttttttttttttttttttttttttttnnnccgggganancnngnnttttntnaaannaanacntnaaancntttannttttnaannaaaaanangggnnttnttaaaaaanngggnaanccannanaaaattttttnnttttaanannnnaantttttnaaannttttnncnaaanntncccaaannnggtttttttttnaanggnaantttnaccngggcnttttttcnntcnaaantggnccnaaaaanttttggggggggnanaaanttnggnaaaatttantttnaannngggttnattnanaaaaaaaaagtttnaannttaaaaaaaaaaannngggaaaaaacttgnanttgnccnggaaaaaaaaaangggccnctttncccnccnggnaaaaccncccncnnntttnggggggggttggtttttgnnnggggannncattttttaaaaaaaaaaanngggggggntggggncctccnccccaannngncccncccccggnaatnntgncnggggggggngttttanaaaaannaagggggnncccccnngggtgggggngnaacnngaaanaaannntttttttncccccccccccccccgngggggggggccccnncccaaaatttttgggnttcnttttaangggggggaaaaaaagccccccnnacccaaaaaagggcccccaaaaggnccgggga

SEQ ID NO: 6722 - DNA, 925 bp, Homo sapiens
  misc_feature 54, 87, 165, 357, 378, 471, 486, 489, 496, 500, 501, 538,568, 591, 597, 612, 615, 617, 618, 619, 636, 648, 652, 669,671, 675, 676, 680, 685, 694, 704, 705, 713, 714, 719, 724,725, 726, 727, 729, 733, 736, 741, 750, 753, 757, 768: n = A,T,C or G
  misc_feature 769, 774, 776, 779, 784, 801, 805, 807, 818, 819, 833, 835,837, 840, 844, 845, 848, 850, 855, 857, 858, 867, 871, 873,881, 891, 895, 914: n = A,T,C or G
gactcactatagggcgaattggagctccccgcggtggcggccgaggtacgcggnagggagaaaacttggaagcttgcagtaatcttnctgtaacattttattggctggattacaccacatgcccatatctaaaccagtcactaggaaagcaaatgtaattactgngattagcttagaataatgatttctctttttgagatgggattggggtaatggaatactgaatacctaaagaaacttgtgtttctgcagcaagaaagaaaaaataatgcttatgcataggaagccagcaatgttttctgcagggattcatttggaaaattttgagcaggggagtcacaagattagatttgagtntcagggcatactggttatggnataaggcagagattggcaaacttttcctgttaagtgacagataggggaatatgttaagccgcttgggcatgggtggctcacacctgtaatccnagcacttttggggangcntgaaacntgcnngatcacccaggtccagggagtttctgagaaacaggtnttggcccaacaatgggtggaaaacctcaanctttttggctttaaaaaataccnctaaangtaagccccgggttnttngnnngggcatttgccccctgnttaattcccaancttnaccttgggaaggccttnanggcnngganaaaantcccttttnaaacccccannaaaggccnnaaggntttcnnnngnaaanttnaaaantcttaaccnttngccngggccgggacnnttttnanaantttanttggaatccccccgggncttngngggaattttcnntattacaacctaantngnaanaccnnttnanccttngnnggggggggncccngnaccccacnctttttgttncccntttttcggagggtttaaantccccccttcg

SEQ ID NO: 6723 - DNA, 620 bp, Homo sapiens
  misc_feature 2, 9, 12, 16, 26, 27, 32, 85, 184, 593, 604, 605, 607, 611,612: n = A,T,C or G
cntatacgntcntatnggcgattggnnctccncgcggtggcggccgcccgggcaggtacgcgggggcggcgacgacccattcgangtctgccctatcaactttcgatggtagtcgccgtgcctaccatggtgaccacgggtgacggggaatcagggttcgattccggagagggagcctgagaanggctaccacatccaaggaaggcagcaggcgcgcaaattacccactcccgacccggggaggtagtgacgaaaaaaaaaaaaaaaaaaaaaaagtacctcggccgctctagaactagtggatcccccgggctgcaggaattcgatatcaagcttatcgataccgtcgacctcgagggggggcccggtacccagcttttgttccctttagtgagggttaattgcgcgcttggcgtaatcatggtcatagctgtttcctgtgtgaaattgttatccgctcacaattccacacaacatacgagccgggagcataaagtgtaaagcctggggtgcctaatgagtgagctaactcacattaattgcgttgcgctcaattgcccgctttccagtcgggaaacctgtcgtgccactgnattaatgaatnngncaanncgcgggga

SEQ ID NO: 6724 - DNA, 583 bp, Homo sapiens
  misc_feature 5, 18, 31, 58, 101, 115, 142, 149, 197, 206, 226, 287, 294,308, 335, 339, 410, 420, 429, 460, 467, 481, 558: n = A,T,C or G
cgtancgactactatggncgaattggactcncgggtggcggcgccggcaggtcaatgnctctttcgctccccgttgccctctggatcactgctaaatcggngaggcaggccctgnctcctcagcttaggcacccaccactgncctgggncagtgaatcgacaatgccgcttctgctcgtggggcatcctcctgctgnaggcctgtnctgctggtccctgctcctgntgaggatccccagggagatcctgccagaagaagatcatcccaccatgatcaggacacccanccttcancaagacacccccancctggctgagttcgccttcagcctatnccgncagctggcacaccagtccaacagaccaatatcttcttctcccagtgagcatcgtacagcctttgcaatgtntccctggggncaaggctgnactcacgatgaaatcctggaggcctgaattnaacctcnggagattccggagntcagatcatgaagcttcaggaactcctccgacctcggccgtctagactagtggatcccccggctgaggaatcgattnaagcttatcataccgcgactcgagg

SEQ ID NO: 6725 - DNA, 929 bp, Homo sapiens
  misc_feature 1, 49, 62, 63, 101, 118, 134, 166, 170, 176, 184, 188, 229,230, 249, 270, 280, 282, 285, 294, 299, 301, 318, 337, 339,348, 372, 373, 383, 395, 399, 401, 405, 410, 429, 430, 452,461, 463, 474, 475, 478, 497, 505, 513, 519, 520, 541: n = A,T,C or G
  misc_feature 548, 556, 560, 564, 565, 571, 578, 588, 591, 597, 599, 602,615, 616, 617, 647, 648, 664, 666, 668, 669, 679, 687, 692,695, 700, 749, 762, 780, 796, 798, 812, 817, 823, 827, 833,848, 851, 858, 860, 877, 885, 887, 892, 894, 901, 912: n = A,T,C or G
  misc_feature 915, 921, 923, 926, 927, 928, 929: n = A,T,C or G
ngatattagggagtcgacgcgtaagacgtgttttgcgactccggagctnccgcgctgttggnngccgcccgggcaggtaccatcatcattctctcattttntacctcgatgagcaatncaacaaattccttganggattcagccgacgttaatttcatcgtcagtnagantgtctncaatgaantcanactgaaatgactgcagcgtctgggaaaatttctgaacagcnnaagaataatttctcatagngctgataagcgcgttgccgtntttgattacntnttnaatgaattngctgnanctctacagttcctgctnataacacttgagccttttngnggaaatcgnggctgtccaggtggcagtatgttnnactacaaatngaggatgacccntggntntgantcagngggggactcctgaggagcnntggctgggttcggacagagaanaggcgcccngnccatggctttnnggncagggagagctaactatcntagtttgncccggcanggtggnngccttagcaagcaaaattgtncccttangcatttgncttntccnngataangccagcnaaaaaaccgncangccccntnccnttttcctttgggnnnaatataagaacctaggggggatcccccggnncctgggaaggaatttngntnnttacgctttnttggtttnccgtnctnccttntttgggggggggggccccggtacccccaacatttttgtttcccttttanttgaggggtttanttgccccgctttgggcgnttatttaatggggcanangttggtttcctggntgggnaaaaantttntttccncttccaaattttcanaanaaaaaanancaaaacccggggacccntaaaaggntnaaaancntgggggnggccttaatgnggngggctnanttnnnn

SEQ ID NO: 6726 - DNA, 884 bp, Homo sapiens
  misc_feature 481, 483, 487, 544, 555, 574, 623, 632, 668, 670, 720, 738,756, 771, 783, 788, 796, 810, 816, 823, 849, 884: n = A,T,C or G
gggcgaattggagctccccgcggtggcggccgcccgggcaggtacgcggggaaattaacaccaggtggtgaatagagcccctcctaaggttgctcaggataaatcatttattaaataggtctgcttatcaggaggggcgtgaaggctcccaaaaggaaatgctggcacctgggcccagaagccagggcctctaactcctggggttgatttcttcagtgaagttgcaccctacaaagggaatatggccaaagcggcactcaactgaaggctgatatcagggcgattagacagccatgcattctgcgtttgtctggaatggattgtagagagatggacttatatgaggactaccagtccccgtttgattttgatgcaggagtgaacaaaagctatctctacttgtctcctagtggaaattcatctccacccggatcacctactcttcagaaatttggtctgctgagaacagacccagtccctnangaangagaagatgttgctgccacgatcagtgccacagagaccctctcggaagaggagccangaagagctaanaagagaacctgcaaaggtngaagaagaaatccagactctgtctcaagtgttagcagcaaaaagagaanccattctanccgagatcaagccggaaaactttggaaattaatttntntacaggaacctaaaaacagaaacatttgccaaaagggtgggcaagacgtnaccagccaaccattttgnttacaaagaaagaacatnttgaaaacctttatnccaggcttgganagaanggcctcancctggcttttttcntttgtngggtcangccatcacccaaaaagctgggaagantttaaaaaacctccccaactttttaaattatttgn

SEQ ID NO: 6727 - DNA, 968 bp, Homo sapiens
  misc_feature 11, 234, 277, 298, 334, 395, 410, 432, 474, 476, 501, 504,516, 519, 528, 533, 556, 561, 574, 601, 610, 618, 619, 628,636, 650, 651, 662, 665, 676, 681, 706, 707, 712, 716, 725,727, 738, 751, 755, 763, 766, 774, 775, 781, 786, 793: n = A,T,C or G
  misc_feature 794, 795, 800, 802, 807, 810, 815, 816, 819, 821, 828, 830,838, 850, 853, 855, 860, 870, 876, 877, 882, 887, 894, 917,919, 927, 929, 939, 947, 955, 962, 963, 964, 966, 968: n = A,T,C or G
atggttagacncgcgtaatacgactcactatagggcgaattggagctccaccgcggtggcggccgaggtacatggcccggggtgttgaaggtctcaaacataatctgagtcatcttctctctgttggccttggggttcaggggggcctcggtcagcagcactgggtgctcctccggggccacgcgcagctcgttgtagaaggtgtggtgccagatcttctccatgtcgtcccanttggtgacgatgccatgctcaatggggtacctgcccgggcggnccgctctagaactagtggatncccccggctgcaaggaattcgatattcaagcttatngatccggcgacctcgaaggggggccccggtacccaacttttttgtttccctttaagtgaanggttaaattgccccncttgggcgtaaatcaattgggnataagcctgtttccttgtggtgaaaaattgttattccgcttnanaaatttcccacaacaaacaataccnaancccggggaagcnatnaaaagtgtnaaaanccctttggggttgcccctaaatnaagtngagccttaaactnaacaatttaaatttgccgtttggccgnctcaacttngcccccgnnttttccaanttcggggnaaaaaacctttttnngtgccccaacnttncaatttaaatnaaaantcggccccaaccccccccggggggnnaaggncccntttttgcgntnatttttgggcnccttttttccccntttntttggttnaanatttaaannttcttngcccntccgggnnntttcngnttttnggnaaaannggnantttaaantnaaattttnaaagggggggtnaanancccgnttttttcccnaaaaanntatgnggganaaacccncggaaaaaaaaaaattttttacncnaaaaaggncnctcaaaaaanggccccgnaaaccctnaaaaaannntncn

SEQ ID NO: 6728 - DNA, 908 bp, Homo sapiens
  misc_feature 8, 148, 214, 290, 424, 475, 497, 561, 568, 575, 587, 589,591, 599, 612, 621, 627, 630, 636, 654, 665, 688, 708, 726,727, 733, 745, 757, 766, 775, 779, 787, 790, 791, 799, 808,813, 821, 824, 825, 826, 828, 829, 841, 850, 855, 862: n = A,T,C or G
  misc_feature 873, 874, 882, 892, 893, 896, 899, 900, 907: n = A,T,C or G
gatggttngagcgcgcgtaatacgactcactatagggcgaattggagctccaccgcggtggcggccgaggtaccaagccagcaacaccaaccaaatgctactctctttaaagtccattttccttcttctttttttttttttttttttnggagacagcatctcaccctgtcctggctggtctcgaactcctgacctcaggtgatccgccggcctnaccctcccaaagtgctgggattacaggcatgagccaccatgccagacttcccattttactttctgcaagctgtttncctagcagctccctctaggggagaggtgaaatcttgcaagttgtagcaagagcacacaggaaacccctaactttcctataccccacccgcctctttccctttctgtcccgggatacctggcgggaagagacttnttggctattgtccatgctcccagaatcaagcataaatgccagacacgggcnatttgagaagcccaatcagtgnacccttttggcaaagcccccattcacacctgggcacttcccttttaccaatccctgggcacaangggtttncttgggngagcaaggtgcntntncccttgcnccggggcggggcngcttttaanaaactnggnggattncccccgggggcttggcangggaatttccnatatttaaaggcttttttggaanaccccgccgaaccttttaanggggggggggcccggggnnccccancttttttggttncccttttaaggnggagggggnttaatttgncccnctttgggnggnnaaataatngggtaatanggctnggttttcnctnnngnngaaaattttttnttccccttnacaanttccccnacaaaaaatannaaagcccnggggggcatnnaanggnnttaaaant

SEQ ID NO: 6729 - DNA, 888 bp, Homo sapiens
  misc_feature 3, 10, 31, 358, 402, 407, 416, 419, 451, 480, 495, 501, 509,514, 529, 535, 543, 549, 555, 566, 572, 579, 591, 595, 600,602, 610, 612, 621, 636, 645, 656, 660, 666, 674, 682, 715,726, 736, 737, 742, 766, 790, 792, 804, 814, 820: n = A,T,C or G
  misc_feature 830, 835, 867, 870, 872, 882: n = A,T,C or G
ggngttccgnatttgactactatagggcttnttggagctccccgcggtggcggccgaggtacgcggggcttacaagtccttcttgatcctgaactgggttaggtgccgctgttgctgctcgtgttgaatctagaaccgtagccagacatgggactgggggacgagcaaaagatgcttaccgaatccggagatcctgaggaggaggaagaggaagaggaggaattagtggatcccctaacaacagtgagagagcaatgcgagcagttggagaaatgtgtaaaggcccgggagccggctagagctctgtgatgagccgtgtattctctcgatcacatacagaaagaggattgcaccgganggagctctttgacttctttgcatgccaagggaccattgcgtggnccacnaactttttnacnactttgaaataaatgtgtggaccttaattcanccccagtctttattcatctgggcattaanaatattttccttatnggtttnggatgtancctgncccgggccgggccgnttttanaacttagngggatncccccnggcttgcaggnaattcnaattttnaagcttttttcnatancccgncnaaccttcnanggggggggncccggtaccccaacnttttggttncccttttaaangganggggtnaaattgcncccccttnggcggaaaacaatggggcaaaaagcttggtttnccctggggggnaaaattgttnnttccnctttccaaatttcccccaaaaatnaccaaacccgggggcctttaaaangnttaaaaaccctngggggggccncaatgngggggggccncaccncccaatttatttgggggtggggcccccattgnccncntttttaaaanggggaa

SEQ ID NO: 6730 - DNA, 888 bp, Homo sapiens
  misc_feature 493, 603, 609, 661, 668, 701, 702, 709, 727, 736, 737, 742,752, 759, 785, 790, 791, 812, 814, 817, 819, 821, 822, 852,871, 873, 876, 888: n = A,T,C or G
gtaatacgactcactatagggcgaattggagctccaccgcggtggcggccgaggtacaaatctggctgcccgtttactttctgagcaagcactggagtccactccgacctttttctttgaacatgcatgctgctggaatatgtataaatcagaactagcagaagtagcagagtgatgggagcaaaataggcactgaattcgtcaactcttttttgtgagcctacttgtgaatattacctcagatacctgttgtcactcttcacaggttatttaagtttttgaagctgggaggagaaagatggagtagcttggaaagattccagcactgagcccgtgggccggtcatgagccacgataaaaaatgccagtttggcaaactcagcactcctgttccctgctcaggtatatgccgaatctctactggggaagcaagcccaaaaagttagaccaaaaagtatttaatggaggtatttccttttctccattaagtgcnaggactggttacttcacttacttaaactctacccaggaaatgggaaacaaaagaaatatttttcttgaagaattttttttttggaagaattaaatttattacccctattnaaaaanaaaaaaccttggttaggccttccgaatgaaaaggccaccttcaatcttcctnttcctancctaattttttttaaaaaaaagttttttaaggnncctggancccttggccattcaaatnccatgcccnncccanaaaagggggnttttccnccacccgggccccccacttcatttanccggnnccaaaagggggccctttcttntnttncngnntttttttttccccccccggggcctttttanttttaaaaacttttttccntnttnaaaaaaaaatgn

SEQ ID NO: 6731 - DNA, 947 bp, Homo sapiens
  misc_feature 405, 421, 440, 473, 475, 503, 519, 550, 585, 601, 606, 608,609, 621, 659, 670, 693, 694, 718, 725, 736, 748, 753, 767,768, 780, 781, 786, 803, 804, 821, 826, 827, 830, 831, 833,838, 842, 856, 866, 868, 869, 871, 877, 879, 890, 893: n = A,T,C or G
  misc_feature 895, 897, 901, 904, 907, 929: n = A,T,C or G
gtaatacgactcactatagggcgaattggagctccaccgcggtggcggccgaggtaccgcggggatcttaaaagaggttctttctctgggatgtggcatgagcaaaactgacaagtcaaggcaggaagatgtcgccatcacaactcattgggtttctgctgctctgggttccagcctccaggggtgaaattctactgactcagtctccagactttcagtctgtgactccaaaggaaaaagtcacaatcacctgccggaccaagtcaagagcattggtagtagcttacactggtacctgcccgggcggcccgctctagaactaagtggatccccccgggcttgcaggaattcgatatcaagcttatcgatacccgtcgacctcgagggggggccccggtaccccancttttggtccctttantgaggggtaaattgcgccncttgggcggtaaatcattgggtcaataagcttngnttccctggggtggaaaaattgtttaatnccgcttcacaaatttnccccaccaaaccaataccgaaccccggggangccataaaaaagtggtaaaaagcccctgggggggngcccctaaaatggagngtggnannctaaaccttccncaatttaaattggggggttggggctccacctggccccncctttttccanacccggggaaaaacccttgtccnngccccaaccttgaattttaattgnaaattcnggccccaaccncccccggggganaaagnccgggtttttgcgnnaatttgggggcnnccttnttttccccttttccttnnggcttaacttgacttcncttgnnccnncngggcntttngggttgggggggcnaagccgggantnnancccccncnttcaaaagggnggngnanaacnggnttnttccccaaaaaaaaaagggggnaaaacccccgggaaaaat

SEQ ID NO: 6732 - DNA, 917 bp, Homo sapiens
  misc_feature 2, 4, 5, 7, 9, 11, 12, 16, 26, 424, 459, 555, 567, 572, 587,594, 608, 626, 628, 635, 637, 638, 645, 651, 653, 656, 658,681, 691, 694, 699, 700, 703, 705, 718, 723, 735, 736, 745,757, 768, 771, 786, 787, 792, 796, 801, 807, 816: n = A,T,C or G
  misc_feature 819, 821, 828, 829, 832, 834, 836, 839, 842, 857, 865, 884,885, 886, 887, 889, 908, 916: n = A,T,C or G
gnanngntngnngccnctcctactcnctatagggcgaattggagctccccgcggtggcggccgcccgggcaggtacagtatgttaatatccttatggttacaagaaattaaaaaaagttttaatttacacatattttagagtgaccaattttagacttttaagcctaagattacatttggataaaatttggaagctgaggtataaataaagatataattttaagggaaaaaagaattaatgtgaaatgtccaagcatcaaaaaggaacttgttcatgtatttttatgtcaatattggaggacataaaatcactaatagttttggccaggtgcagtggcccactcctgtaatcccagcactttgggaggccgaggtgaacggatcacttgaggccaggagtttgagacagcctggccaacatggntgaaatcccctctctactaaaaatacaaaaattanccaagcatggtggtggggtgcctgtaatcccagctctccgggagactgagacagggagaaatcgctttcaaacccaagaaggattgaaggttgcangtgagcccgagnatccntgccaacttgccctnccaagcncttggggcaaccgnaggtggaaaactttttgntnacaacancnncaacacntcaccncntcnantttaaggttttccaaattctaanttaaaggagntcnataannccntnggaccagaaattnatttngaaaggcccctnntacccttcnggccccgttctntaaaacttagnggnattccccccggggcnntcaanggantttcnattttnaaacctttnttngnattcccnntcnancnttnaanggggggggccccggntaccccancttttttgtttcccttttnnnngnaggggttaaattgcccccnttgggccng

SEQ ID NO: 6733 - DNA, 885 bp, Homo sapiens
  misc_feature 2, 3, 4, 5, 7, 14, 564, 570, 608, 616, 618, 625, 665, 712,719, 721, 725, 741, 747, 769, 789, 793, 821, 834, 839, 840,843, 851, 869, 871: n = A,T,C or G
gnnnncngagcgcncgtaatacgactcactatagggcgaattggagctccaccgcggtggcggccgcccgggcaggtacaggcctccaagcccgggcttgttttggccgcgacgtcacttccgatttcttctttcgccttctggctaaaaaacgttccgcagcaatgcagctgaaactttcgggttttcttttttttgtccctctctccttttttttaatatttttgtttttgccgcctttacgctccgaggcccatcctgccggagtacctcggccgctctagaactagtggatcccccgggctgcaggaattcgatatcaagcttatcgataccgtcgacctcgagggggggcccggtacccagcttttgttccctttagtgagggttaattgcgcgcttggcgtaatcatggtcataagctgtttcctgtgtgaaattgttatccgctcacaattccacacaacatacgagccgggagcataaaagtgtaaaagcctggggtgcctaatggagtgaagctaactcacattaattgcgttggcgctcactggcccgcttttncagtcnggaaacctggtcgtgccagctgcattaaatgaatcggncaaacccncnggggaanaggcggtttgcgtattggggcgcttttttccgcttttctngctcaactgaactcggttggcgcttcggtcctttccgggttgcggcnaagcggntntttnagctttaactcaaaangggggnaattaccggtttattccacaanaaatcaagggggatttaacnccanggaaaaaaaccattgttgaaccaaaaanggccacccaaaangggcnnggnaacccgtnaaaaaaagggcccgtttngnttggcggttttttt

SEQ ID NO: 6734 - DNA, 902 bp, Homo sapiens
  misc_feature 2, 8, 10, 315, 385, 414, 521, 525, 527, 532, 548, 550, 553,573, 596, 613, 630, 639, 643, 644, 654, 659, 665, 674, 678,680, 684, 691, 704, 711, 721, 739, 742, 747, 751, 770, 777,787, 792, 798, 811, 812, 815, 827, 832, 833, 841, 843: n = A,T,C or G
  misc_feature 844, 848, 867, 876, 878, 879, 881, 886, 888, 894, 896, 900: n = A,T,C or G
gnatggtntnacgcgcgtaatacgactcactatagggcgaattggagctccaccgcggtggcggccgcccgggcaggtaccgcgggggtctgcaggttgtgcttccggtgcggaggtcagggacaagatggtgccaccggtgcaggtctctccgctcatcaagctcggccgcccgggcaggtacgcggggctgagcagtcggctgtgactctcgacaatgtaactctgcaaatcgatggagtcctttacctgcgcatcatggacccttacaaggcaagctacggtgtggaggaccctgagtatgccgtcacccanctagctcaaacaaccatgagatcagagctcggcaaactctttctggacaaagtcttccgggaacgggagnccctgaatgccagcattgtggatgccatnaaccaaagctgctgactgctgggggtatcccgctgcctccgttatgagatcaaggatatccatgtgccaccccgggtgaaagagtctatgcagaatgcaggtggaangcananccggnggaaaacgggccgcantntanagtctgaggggacccccganaatcgggccatcaatgtgggcanaaggggaagaaaacaanggcccaagattcctggncttccgaanccannaaaaaggctngaaanaagatnaaaattaanggcncncaanggaatanggcccaattgcantttcttngccaaaaggnccaaaggctaaaaacttnaangcttntttngaaatccctgggctggganctttttnacaccaaccnttaantggganaattgcaaccacnnttncttgggcttgtnggccnnaacaattntnnttantcgcggtttttcaaaactnggccaaagnanntncaaananttttcntnattncg

SEQ ID NO: 6735 - DNA, 874 bp, Homo sapiens
  misc_feature 3, 5, 7, 27, 28, 555, 588, 595, 613, 638, 648, 687, 689,698, 713, 724, 726, 737, 738, 750, 758, 767, 770, 781, 782,786, 787, 792, 805, 811, 814, 820, 821, 834, 850, 853, 855,857, 858, 861, 865: n = A,T,C or G
ggngntncgtactcgacttagggcganncgaatcggagctccaccgcggtggcggccgcccgggcaggtacctagaataagtgagaaagtgggggaaagggagctgattacccgcgcccaagccgttcgttcttaagagccctgcaccgcgccaccagctcccagcacaaacagctccggccgctctagaactagtggatcccccgggctgcaggaattcgatatcaagcttatcgataccgtcgacctcgagggggggcccggtacccagcttttgttccctttagtgagggttaattgcgcgcttggcgtaatcatggtcatagctgtttcctgtgtgaaattgttatccgctcacaattccacacaacataccgagccgggagcataaagtgtaaagcctggggtgcctaatgagtgagctaactcacattaattgcgttgcgctcactgcccgctttccagtcgggaaacctgtcgtgccagctgcattaatgaatcggccaacgcgcggggagaggcggttttgcgtattgggcgctctttcgctttctngctcaactgactcgcttgcgctcggtcgtttcngcttgcngcgagcggtatcaacttnacttcaaaggcggttataccggttnttcccacaanaattcaggggggattaccccaaggaaaaaaaacattgtngngccaaaaanggccagcaaaaaggnccaggaaaccntnaaaaagggccnngtttgtttggcngttttttncaataaggnttncggcccccccnngaannaggcntttaaaaaaaaanttttanccnttaatnnaaaaagggggggngaaaccccccccaggntcntntnnaanaatnccaggcgtt

SEQ ID NO: 6736 - DNA, 879 bp, Homo sapiens
  misc_feature 1, 5, 18, 51, 438, 459, 546, 569, 583, 622, 665, 668, 669,693, 694, 699, 708, 719, 720, 731, 768, 774, 778, 779, 785,804, 810, 820, 821, 825, 826, 835, 837, 840, 843, 844, 861,871, 873, 874: n = A,T,C or G
ngggngccgtaatacgantacggcgaattggagctccaccgcggtggcggncgcccgggcaggtacgcggggggagtgctcccaaccagaagatgagggaaatggagataatgaagcacgtccctcctaccaaacacgataaattctacaggcactgtaagatcaagaatttaagattatttttgtcccaccctattttacagagtaatcaagtcagaggattatatgacttttatctgcctagagaagaactatggatctacaacatggagactggaagatggaaaaaaatcaacactgaaggtgatgttcctccttctatgtcaggaagctgtgctgtgtgtgtagacagggtgctgtacctcggccgctctagaactagtggatcccccgggctgcaggaattcgatatcaagcttatcgataccgtcgacctcnagggggggcccggtacccagnttttgttccctttagtgagggttaattgcgcgcttggcggtaatcatggtcatagctgtttcctgtgtggaaaaatggttatcccgntcacaattccacacaaacatacnagccggggagcatnaagtgtaaaagcctggggggtgcctaatgaagtgagctnaactcacatttaatttggcgtttgcgctcactggccgcttttncanntcggggaaaccttttcgttgccanncttgnatttaatgnatcgggccaannccccgggggangaggccggtttttgcgttttttgggcgcttttttccnttttcnttgnntcaacntgaatttcgatggggcttnggtccntttcgggttnnggcnnagcggtttnanacnttnnttcaaaaggcggggaantaccggtttntnnacaag

SEQ ID NO: 6737 - DNA, 868 bp, Homo sapiens
  misc_feature 530, 535, 542, 621, 655, 676, 728, 755, 766, 769, 770, 772,775, 777, 787, 798, 807, 818, 819, 820, 821, 828, 840, 848,857, 859, 860, 862, 863, 866: n = A,T,C or G
gtaatacgactcactatagggcgaattggagctccaccgcggtggcggccgcccgggcaggtacaggctagactcaggatcgccctaagggagttggcatggaagatttcagagctgggcagactgggcggggacctctcatctgtgtttcctgagggtcacctagcctctttgagcctccgttctccataggtgaaaggagtgtatcatatctgccttgcaggggtgttgtgggactcagaagatgtccataacatctatgcccagtgtagagtaggaactgggaaataatatccattactgtgattttgtgaggagttccagataactgctcaggtctttaagagaattccttggtcttcatactccactcccagctctcagctcccgttccttttctttctctccccagtaagtcgttgaacgtccccgcgtacctcggccgctctagaactagtggatcccccgggctgcaggaattcgatatcaagcttatccgataccgtcgacctcgaagggggggcccggtncccanctttttngttccctttagtggagggtttaaattgcgcgccttgggcgtaatcatgggtcatagcctgtttccctggggtgaaaatnttatccgctcacaatttcccacacaacataccancccggggagcattaaagtgtnaaaagctggggggtggcctaaatgaggggagcctaactcacatttaatttgncgttgcgctccctggccccctttcaantcggggaaaanctnntncgngnccgcttgcanttaattgaatncgccccaanccccccggggnnnnagggggntttgggtttttngggggccnttttccctncnncnnccncc

SEQ ID NO: 6738 - DNA, 1147 bp, Homo sapiens
  misc_feature 3, 4, 5, 7, 8, 10, 11, 14, 15, 16, 17, 19, 20, 21, 22, 23,24, 25, 27, 28, 29, 32, 33, 36, 37, 38, 39, 40, 41, 43,46, 47, 48, 49, 51, 52, 55, 56, 71, 72, 73, 77, 78, 79,80, 81, 82, 83, 84, 85, 87, 90, 93, 96, 100, 114, 484, 495: n = A,T,C or G
  misc_feature 516, 523, 537, 552, 583, 721, 731, 763, 781, 807, 828, 840,844, 847, 867, 888, 926, 930, 942, 947, 954, 965, 977, 988,991, 994, 999, 1016, 1018, 1030, 1033, 1037, 1039, 1041,1045, 1050, 1058, 1061, 1066, 1067, 1069, 1076, 1080: n = A,T,C or G
  misc_feature 1087, 1095, 1096, 1103, 1110, 1112, 1118, 1120, 1121, 1124,1129, 1138, 1141, 1147: n = A,T,C or G
acnnncnncnnttnnnntnnnnnnngnnnctnnatnnnnnntnttnnnncnntgnntttattttttttttnnnattnnnnnnnnnanagnttnggngttnccgcgtaatacgantcactataaggcgaattggagctccaccgcggtggcggccgaggtacctgactagtgttttatttgaaagggaaaaataaagaccaccccatgcattgtccatcccatgaggcagggctgggccatgccaagacaatctcaaggaatggaggtccctgagcctgggaagacatttgaactcagatgtatcgcctgatgctaggaagaggggctcagtatggcaaatctggaggctttaccctaggcaaccgcagggagagcaggcaggagctaccccaagtacctgcccgggccggccgctctagaactagtggatcccccgggctgcaggaatttcggatattcaaggcttatcgatacccgttcgacncttcgaggggngggggccccggtaccccagcntttttgntttcccttttagtngaagggttaaatttngcgccgctttgggcggtaaaatcattgggtncataaggcttggttttccctggtggtggaaaaatttggtttaattcccggcttcacaaaattttcccacaaccaaacattaccgaagccccgggggagcaataaaaagtggtaaaaagcccctggggggttggccctnaattgaaggnggaggccttaaaccttcaacaattttaaattngcggtttggcgggcctcnacctgggccccgccttttttccaagntccggggaaaaacccttgtcngtggccccagcnttgncantttaaattgaaattcggggnccaaacctccccccggggganaaaggccggttttttgccgttatttggggccggccttntttncgcttttcctcngtttnacttganacttcaccttngggcttcgggtnccgtttcaggnttngcngccanaaccgggtttttaagcntncacttcaaaaanggngggntnantacncgggntttttccncantaatnnanggggggnatanacccccngggaaaannaacattngtgggancnaaaaangnnccncctanaggggcccnggntacccn

SEQ ID NO: 6739 - DNA, 1204 bp, Homo sapiens
  misc_feature 4, 9, 14, 15, 22, 23, 24, 25, 31, 33, 35, 36, 40, 42, 43,44, 45, 47, 52, 53, 54, 55, 56, 69, 71, 73, 74, 75, 76,77, 78, 79, 80, 81, 83, 87, 89, 98, 188, 204, 215, 221,223, 236, 275, 388, 389, 394, 402, 442, 499, 511, 534, 538,547: n = A,T,C or G
  misc_feature 550, 553, 554, 559, 560, 562, 564, 570, 579, 580, 582, 588,591, 595, 612, 626, 643, 664, 670, 676, 678, 679, 680, 695,699, 709, 713, 743, 749, 757, 782, 789, 797, 821, 831, 839,840, 853, 856, 867, 874, 887, 891, 896, 910, 914, 926: n = A,T,C or G
  misc_feature 928, 929, 931, 940, 943, 944, 954, 957, 960, 969, 974, 983,986, 994, 999, 1002, 1004, 1006, 1009, 1011, 1018, 1019,1020, 1024, 1027, 1032, 1037, 1040, 1045, 1047, 1051, 1052,1056, 1068, 1069, 1072, 1086, 1087, 1088, 1093, 1099: n = A,T,C or G
  misc_feature 1100, 1101, 1108, 1117, 1120, 1134, 1147, 1152, 1153, 1160,1162, 1165, 1170, 1177, 1184, 1187, 1194: n = A,T,C or G
ctcnctctnacttnntttgcannnncttatnantnntgangnnnntnttcgnnnnntattgtttttttntntnnnnnnnnntnggtngncgcgctatncgacttactactcactatagggcgaattggagctccaccgcggtggcggccgcccgggcaggtacttgcagccctcggccaaacggccanacgccgacgtctaccngcaaaaactgnttagangnttgatagctgtangactgggtgttgcagctcttgcatttgcaggtcgctacngcatttcggatctggaaacctctagaacaagttatcacagaaactgcaaagaagatttcaactcctagcttttcatcctactataaaggaggatttgaacagaaaaatgagtnngcganaagctggntcttattttagggcgtaagcccaatctgctggcaaggctnagaattagaacaagcctcattagggaggagttcatggattttttgaattcaccccangaataaaagggngggatccttcccttttacgttanggcnagctctcanttnagnnttaanngnanattttnagaattagnnangggtanccncctngggccccgctttctttnagaaaccctatggnggggaattccccccccngggggccttggcagggggaantttccnaaatantnnnaaagccttttattcnggantaacccggtncggnaaccctttttagggggggggggggcccccnggtttncccaaggntttttttggtttcccccttttttangggggangggggttnaaattttggggccccctttgggcngttaaattcnattggggnncattaaagccttnggnttttcccttgnggggtgnaaaaatttggttnattnccgcnttaacaaaattttnccanaaaaaaaaaaantnncnaaaaccccnggnngagcatttanaanggnggtaaaaanccccnggggggggnggncctttaanttganggngnangcncnacctccnnnattnaanttggnggttnggngcttnanttgnncccnggttttttccanntcnggggggaaaaaccnnntcgcnggcccnnngttggcntttaatttnaantattgcccaaaacncccccggccccanaaggnnggttttngnttntttgngggaggnttttttncgnttttttnccccccccct

SEQ ID NO: 6740 - DNA, 917 bp, Homo sapiens
  misc_feature 2, 3, 5, 8, 9, 10, 12, 15, 231, 333, 378, 618, 621, 622,623, 633, 643, 646, 718, 720, 784, 785, 794, 797, 811, 813,816, 818, 823, 828, 842, 850, 861, 874, 875, 880, 893, 901,904, 915, 916: n = A,T,C or G
gnntnggnnngnccncgtaatacgactcactatagggcgaattggagctccaccgcggtggcggccgaggtacgcgggcaaggaagaaaaggtggttgggatccatatgcagggacttgggtgtgatgaaatgctacagggttttgctgttgcagtgaagatgggagcaacgaaggcagactttgacaacacagtcgccattcaccctacctcttcagaagagctggtcgnacttcgttgagaaccaggagacacgtgtggcgggcagtgggacccatagatcttctgaaatgaaacaaataatcacattgacttactgtttgagttttatgnatttctttattttaatcaggatcttctgatagtggaaatttttantacctgcccgggcggcccgctctagaactagtggatcccccgggctgcaggaattcgatatcaagcttatcgataccgtccgacctcgagggggggcccggtacccagcttttgtttcctttagtgaggggtaattgcgcgcttggcgtaatcattgggcatagctgtttcctgtgtgaaatttttatcccgctcacaattccccaccaacataccgagccggggagcattaaaagtgtnaannncctgggggtnccctaatgangtngagccttaacctcacatttaatttgcgtttgggctcactggcccgcttttccagtccgggaaaaccctgtcntngccaagctggcatttaatgaaatccggcccaacccccccggggaagaaggccggttttgcggtnnttggggcgnctntttccgctttcctngnttnanttgancttcncttgggcttccggntccgtttngggttgcgggngaagcggggtttnnacctnccttccaaagggnggggaatnaancgtttttcccnng

SEQ ID NO: 6741 - DNA, 883 bp, Homo sapiens
  misc_feature 2, 3, 9, 81, 276, 311, 321, 324, 349, 353, 388, 492, 496,510, 515, 546, 613, 632, 638, 641, 651, 665, 682, 685, 696,697, 729, 741, 781, 787, 790, 794, 805, 819, 826, 845, 856,858, 863, 868, 870: n = A,T,C or G
gnngggttnggagcgcgcgtaatacgactcactatagggcgaattggagctccaccgcggtggcggccgaggtactttttnttttttttttttttttttatggaaccaaacccaggatttgagttttgtttaatgactgggctaaaaatcacaatggagaatgaatataaaggaaaaaaaaaacagggatgattttaaaaaatattatcctttccccccatgacttcatgacagggagagttaagcgagctctgttgaaatccatctgttttaagnggctttagtcagggccttttgttttacaaggaaanggcaattacnacnggttttgataaggatgctctgacanaatnttttttttcatgggactgcttttcatgatgcagcnccttgcaagtatttctctttctttgaaatcactggtattgccctttattaaaatccacttgccttattcttatttaggaattactatggttaccaaagtttcanaatnttccacactgaaanagccntgaatgaactttttgtctgactccaaatgcnccagtttctttattctccttctacactggcctcgttgttgcagcccaaaaatgggcagctgtatggntcaaagagggaatcccctntcaaanctnttgaaatttnccccttaaagaaancaggggggaaatccctnggnctttccccctnnctggaaacgtttagcacaaaacttcccaccancactcacttttngggccctgtcttgaagacaaggcttcctttcttttgtttncccgangcnctgngggtctttccnttggccctcaatantgggcanagggccccggtaacttttnccggggggggngnttttnaaacntnggggcccccccct

SEQ ID NO: 6742 - DNA, 1119 bp, Homo sapiens
  misc_feature 1, 2, 4, 5, 6, 7, 9, 18, 27, 28, 31, 32, 33, 35, 36, 37,38, 39, 41, 49, 50, 52, 54, 57, 61, 62, 63, 64, 65, 73,77, 82, 87, 88, 93, 96, 132, 409, 431, 468, 473, 500, 508,535, 539, 544, 551, 568, 592, 636, 658, 672, 693, 719, 741: n = A,T,C or G
  misc_feature 747, 752, 758, 763, 772, 779, 781, 787, 805, 810, 819, 831,833, 842, 844, 853, 862, 870, 906, 916, 918, 920, 943, 961,979, 989, 996, 1000, 1010, 1011, 1014, 1015, 1017, 1022,1025, 1033, 1034, 1039, 1050, 1052, 1053, 1054, 1059: n = A,T,C or G
  misc_feature 1064, 1065, 1069, 1071, 1072, 1074, 1075, 1076, 1082, 1086,1087, 1093, 1094, 1096, 1099, 1118: n = A,T,C or G
nncnnnntnttttaattnaaatttttnnaannntnnnnnancaattatnnantnttntctnnnnntatatctntatntattnatttnnagggnggncggccctcgtaatccactcactatagggcgaattgnagctccaccgcggtggcggccgcccgggcaggtactggaacagccagaaggacatcctggaggagaagcgggcagtgccggacaggatgtgcagacacaactacgagctgggtgggcccatgaccctgcagcgccgagtccagcctagggtgaatgtttccccctccaagaaggggcccttgcagcaccacaacctgcttgtctgccacgtgacggatttctacccaggcatgcattcaagtccgatggttcctgaatggacagggaggaaacagcntggggtcgttgtcccaccaacnctgaatcccgtaatgggagtacttggacctttccaanaatcnctgggttgatgcctgggaaaattgacncccccaancaagggggagatgtctacaccctgccnaagntgggnagcacanccaagcccttggatagntcctgtcaacccgtggggagttgngaaaaggccaacaagttcttgatttcttgcccgggaagttaagnaacatttgaccgggggaggccntgggggggccttcngttggctggggggcttcaatnattttggtgggaagtggggccatttnttttcattgccaccaagggaangggagncaaangaaaantttcnaaaccggangggatcntnccattnaaaaacaaggggttttcntggangccttcacnttgtaaaaaagnanttatttggngncctttaagnaaaaaaaancatttttngccttggtgttttccgtttagccaattttgggcttnccaggaacangnanccttttaaaacttttccaaaaanttgggattaacttgattngcccaaaaaaagtttgcnttttgaaaantcaaatnttcntataaaatanntgnntnttttntantgaaaaanntactngattttttttnannnggggnccaannaaananntnnnttcccntttnntttttnncnccncccaaattattcataatanc

SEQ ID NO: 6743 - DNA, 880 bp, Homo sapiens
  misc_feature 2, 8, 10, 12, 563, 649, 680, 681, 684, 687, 688, 696, 699,717, 721, 730, 743, 754, 755, 762, 764, 766, 770, 771, 774,775, 781, 783, 800, 804, 806, 807, 810, 816, 820, 827, 829,836, 839, 848, 853, 863, 864, 872, 875, 878: n = A,T,C or G
gnagggangntnccgtaatacgactactatagggcgaattggagctccaccgcggtggcggccgcccgggcaggtaccgcggggtaatcttaaaagcccaggttacccgcggaaatttatgctgtccggtcaccgtgacaatgcagctgagaaacccagaactacatctgggccgcgcgcttgcgcttcgcttcctggccctcgtttcctgggacatccctggggctagagcactggacaatggattggcaaggacgcctaccatgggctggctgcactgggagcgcttcatgtgcaaccttgactgccaggaagagccagattcctgcatcagtgagaagctcttcatggagatggcagagctcatggtctcagaaggctggaaggatgcaggttatgagtacctcggccgcccgggcaggtacgcgggagccaagaggcggataagtgccccaccttagaacagtatgccatgagagcgtttgccgacgcactggaggtcatccccatggcccttttctgaaaacagtggcatgaatcccatccagactatgaccgaagtncgagccagacaggtgaaggagatgaaccctgcttcttggcatcgactgtttgcacaaggggacaaatgatattgaagcaacagcantgtgatagaaacctttgttggcaaaaaaaannacnggnntatttttnttngacacaaaatgggtttanaaangaaggggtnaaaaattttttgnacatttgggtnnagcccgnananattnncgnngcaatntnttacctttgggggtaantcgngnnccntcttanaaanaattggngngttagancantttgggggnggacntttgtccggnnttaaaaantanaangg

SEQ ID NO: 6744 - DNA, 868 bp, Homo sapiens
  misc_feature 2, 3, 5, 9, 11, 14, 602, 661, 736, 745, 752, 771, 806, 811,816, 844, 865, 868: n = A,T,C or G
gnnanggtngnccncgtaatcgactcctatagggcgaattggagctccaccgcggtggcggccgaggtacaaacaagcccttaatcaagtctctaatctagggacagtaacatcggctatttgagtgcaggcaccctaggttgttaatgtctgtttcccaacactattccattccaatatttttctttacctaaagtgggataatgatcataaaaaaaaacacaataattttccttacaacactgctgataactaataatcacacaattgcatgtaagttaattctttaaatttaatcagtcatttataaaactccccaattagtaaaagttggcttattttaacagccttaaacattggccactatttaaacaagacattctaaaaaaaaaaagcaatcacataatagtttatagtcatttacaagtggatggtatacatttagatacagaggtagaagttcacctttacaatgtttcactaatacacatataccaaattcaaggcacaaaatagtttgctttacaaaaaaaatactgtaaaaatgtcatttgctgttctacaatgtgaataaacctttcaaaagaatctttacacccttncatacatatgccatagaataagatttcttcctctcactaatcatagtggcacaaaaatnggggacttttcaatgtagaagttcccatttttaaaaaactgttttctttggcagaagctgctatgttattcttangaataagantcccttncaaaaggaaatggaaaccncaacaacctttcctggagggaaaggggcacttttnttgtnttgcnagcaaaaattcatagggtgggaaaaatntattgaatctttttaaggaanaan

SEQ ID NO: 6745 - DNA, 888 bp, Homo sapiens
  misc_feature 3, 5, 19, 24, 30, 32, 38, 46, 63, 72, 76, 81, 82, 83, 88,95, 98, 100, 102, 109, 127, 129, 137, 152, 201, 296, 432,437, 452, 467, 499, 510, 560, 563, 564, 569, 571, 577, 587,595, 609, 615, 623, 655, 659, 662, 674, 703, 721, 722: n = A,T,C or G
  misc_feature 723, 727, 729, 730, 744, 747, 748, 757, 761, 771, 796, 798,800, 802, 807, 816, 817, 821, 837, 840, 841, 843, 850, 855,869, 879, 880, 883, 884, 886: n = A,T,C or G
ggncngcgaatcgactcantatanggcgantnggagcnccaccgcngcggcggggcgggccgncgggcacancggntatcnnngacanaagcagnagntnangatcatntgaagttataccttttgnantccattgncctatttcactgccngaataacttgctatttgctctccaagcacacttttgactattgactccngacacaaacttatttgtatattctacaaattattattacaaaacatataaacattcttggtaagtatgcatacagtatcatataaaatatttttnatttatattgagcttttcacgtttttgcttcattgtgagccttggtggcatgaaggttgcgcaagcagtaagttccatgtaactgatcactctatcagggtgttcctctggctctaccactcgggagatcatccanaactntttgaaatgaaaccnactgtcattattttncactgtggcagagtctccatataagcattttnggttcgcattnaaatatatatggcttttaaattttaaatggtgatatgagggagaaccctnggnnggcgnanaaattngattgggaangtcaagtnaaaaaaaccaagancggggnggaatgtnttaaaaaataaggggcgttttccatttggtgngggnttnaaaacaccccanctgggaattccacaaatggagttccacangattgcccttggataaannntggncnnggccgggccggctnttnnaaactagtnggantcccccccgngggtggcaaggaaattcggaaatcnangntnatccnataaccggnngganctcaaagggggggggnccnngnaccccanccttnttgttccccttttnttgagggggnnaanngncc

SEQ ID NO: 6746 - DNA, 873 bp, Homo sapiens
  misc_feature 538, 577, 597, 645, 659, 676, 685, 687, 695, 699, 702, 717,726, 728, 742, 746, 771, 772, 776, 785, 791, 794, 803, 812,813, 819, 832, 836, 838, 841, 858, 867, 873: n = A,T,C or G
gcgtaatacgactcactatagggcgaattggagctccaccgcggtggcggccgaggtacactgtaatttaaaacattagaaatagaattaaagtgttttatttcattgtaaaaacaaagtagtttgaatagggcttgcctttttttctggcaagtaacttaccatactgagtaagcatcttttatgttcacggcaaactgccatactccttctaagtttgggtcagcttccacccttttattgcttgtgctttcaatgttgtgaaatatttctatattcacattaaatatcttttaatgtaaagttttttttttttaaccatcacttcctctgggacgtatctgtctttattgcaaccactttgcttatttgtgttggtaagtttgccttcactaagctcctatgaatacacagcagcaagaacaacattcccatggtcagtgacttcttctacaaattcatttatgtttgattaaaatttcacttccagtgttatcatttttcattgctttgctgcactttcatctttgttgaccangttctttcgaggtgtcacttctatagaaatggcaaagtngatgacagagaagacagccntaactaccatgctctggctggacctggccccggcggggcgcttttaanaactaagtgggaanccccccgggcctggcanggaaattcnantatcaaangccntantcggatacccggccnaaccctccnangggggggggccccngganccccacctttttggttcccctttanngganggggtaaanttggcnccnccttgggcngtaaaaaanngggcanaacctggttttcntggngnggnaaaattggttatccccntcaacaaanttcccn

SEQ ID NO: 6747 - DNA, 949 bp, Homo sapiens
  misc_feature 2, 3, 8, 9, 10, 11, 13, 14, 15, 16, 162, 166, 173, 178, 195,197, 198, 202, 203, 208, 210, 244, 246, 251, 253, 255, 257,265, 272, 286, 309, 311, 320, 321, 322, 323, 328, 329, 330,331, 334, 336, 339, 341, 343, 344, 360, 363, 374: n = A,T,C or G
  misc_feature 376, 378, 385, 389, 390, 397, 404, 408, 411, 420, 424, 426,428, 429, 433, 434, 436, 446, 448, 453, 455, 457, 465, 484,486, 488, 498, 503, 509, 519, 521, 523, 547, 558, 560, 561,564, 569, 571, 573, 574, 585, 587, 591, 595, 597, 618: n = A,T,C or G
  misc_feature 624, 625, 627, 647, 654, 658, 660, 661, 677, 679, 688, 708,709, 716, 730, 734, 735, 757, 771, 778, 782, 783, 786, 796,802, 804, 806, 826, 833, 836, 837, 838, 842, 845, 858, 864,878, 879, 884, 886, 888, 889, 891, 899, 909, 910, 912: n = A,T,C or G
  misc_feature 913, 915, 916, 928, 932, 934, 937, 938, 944, 949: n = A,T,C or G
gnnagggnnnntnnnngagcgcgcgtaatacgactcactatagggcgaattggagctccaccgcggtggcggccgcccgggcaggtactttttttttttttttttttttttttttttttactttttttttttttttttttttttttttttttaaaagggttngctnaaaaatnttttnactgataggcatggctncnnaatnnttgantnttaaaggccaaaggaaaatgaggcctggcctggnanccctntncntntaaaaccnatttaanttttcctttccctngaaaaaaagggtttttttggggncntttttcccnnnnaaaannnnttngnagncntnnttttaaaaaatttttnggnagttgtttttntnanaacccanaggnntaaaaanaagggtncaanatnaaatttttntttngnannaagnncntttttaaaantngtaantntnccacccanatttatatgggggtttttntntntttgaaaaanccacnttccgnggggaaaaancncnaaaaaacccccctttttgggggtnaaaaaaaaacncnnagnccctncntnnaaaaaaaaccncnaagngggngngaaaaaaaaaaaacaaaaccntccccnnanaaaaaaaatttttttttgtngaaaaancagnanncttttttttaaaaaanangggcccccnggccccttttaaaaaaaatnnggggggnccccccccgggccncgannaaaaattttaaaaaataaaaanttttttaaaaaaanccgcccncccnngangggggggggnccccgncncnaaattttttttttccctttntaaaggnggnnntaanttnccccctttggggntaaaanataggacaaaaaannttttncntnnangaaaaatnttttatcccnntnngnnggtatcaaaccnaaangnaanntaccgngggan

SEQ ID NO: 6748 - DNA, 888 bp, Homo sapiens
  misc_feature 2, 3, 4, 7, 9, 10, 693, 737, 755, 756, 782, 793, 794, 816,822, 826, 857, 867: n = A,T,C or G
gnnntantnngacgcgcgtaatacgactcactatagggcgaattggagctccaccgcggtggcggccgaggtacgcggggttcttacctcagagctgagctgggcatgagtagatgctcagtaagtggtgcacagggttggtccctatggtggaggccccctaacaccgcccaacccccctccatgttctcacagctccacgcactgagcacgggcatgaaggccatgatgtcagaattctgcacccagggagctgagatgtaccgcagggcctgtggcggacatggctactcaaagctgagtggcctgccatcactggtcaccaaattgtcggcctcctgtacctgcccgggcggccgctctagaactagtggatcccccgggctgcaggaattcgatatcaagcttatcgataccgtcgacctcgagggggggcccggtacccagcttttgttccctttagtgagggttaattgcgcgcttggcgtaatcatggtcatagctgtttcctgtgtgaaattgttatccgctcacaattccacacaacatacgagccgggagcataaagtgtaaagcctggggtgcctaatgagtgagctaactcacattaattgcgttgcgctcacttgcccgcttttccaagtcgggaaaacctttcgtgccaactgcattaatgaatcggccaaccccccngggaagaggccggtttgcgttatttggggcgctttttccgcttncttggtttaactgaactnngctgcgctcggtcgtttcggcttgcnggcgagccggnntttaagctcaactcaaaaggcnggtaantacngttattccacaaaaatcaagggggataaacncaaggaaaanaaacttgtttagccaaaagct

SEQ ID NO: 6749 - DNA, 864 bp, Homo sapiens
  misc_feature 2, 3, 4, 5, 9, 10, 11, 636, 684, 691, 729, 732, 735, 738,753, 758, 807, 821, 836, 843, 847: n = A,T,C or G
gnnnnaggnnngacgcgcgtaatacgactcactatagggcgaattggagctccaccgcggtggcggccgcccgggcaggtacgcggggccccttccatgctgtggaagctttgttcttttgctcttcacaataaatcttgctgctgctcactctttgggttcgcactacctttatgagctgtaacaatcaccgcaaaggtctgcagcttcactcctgaagctagcaagagcacgaacccactgggaggaatgaacaactctggacacgctgcctttaagagctgtaacactgactgcgaaggtctgcaacttcactcctgaagtcagtgacaccatgaacccaccagaaggaagaaactctggacacatctgaacatctgaaggaacaaattccagacacaccatctttaaaaactttaacacccactgtgagggtgcgtagcttcattcttgaagtcagtgagaccaagaacccactggaaggaaccaattctggacacattttggtgactacgaagggactatcacctattgccaagcagtgagactatcacctatcaccaaacatctaggaggacaggcaagggtgcaggttttcgagaatgcgtcagtgcacacaaaacaagatcatcgctngatcacttagaaacatcaacaacccgcgatgattgtaagttttctgangcctttncagaaccaagcagatgtcaccatgctttctgtaccttnggncgnttntaaaactagtggatnccccnggcttgaagaattcgatataaagcttatcgaataccggcgaccttcgangggggggcccggtncccaactttttgttncccttantganggggtaattggccccct

SEQ ID NO: 6750 - DNA, 902 bp, Homo sapiens
  misc_feature 5, 6, 608, 832, 835, 844, 865: n = A,T,C or G
agttnngacgcgcgtaatacgactcactatagggcgaattggagctccaccgcggtggcggccgaggtacgcgggggcccctcaccaacatggccgcgggctggaagtgcgcatgagcagctgtctatggagatgcctaggccgggagagggagaatacagttggagaaaatcggcagctgagacggccttggccggacttagcactcaggcctgtgaatcaggagatacaaagacctccaaaaaaggaccagttcctcggatgtgccccctcacagagagatgaaggggcagcagaaaacagccgaaacggaagaggggacagtgcagattcaggaaggtgcagtggctactggggaagacccaaccagtgtggctattgccagcatccagtcagctgccaccttccctgaccccaacgtcaagtacctgcccgggcggccgctctagaactagtggatcccccgggctgcaggaattcgatatcaagcttatcgataccgtcgacctcgagggggggcccggtacccagcttttgttccctttagtgagggttaattgcgcccttggcgtaatcatggtcatagcttgtttcctgtgtgaaaattngttatcccgcttcacaatttccacacaacattacgaagcccggggagccataaaagtgtaaaagccctgggggtgccttaatgaagttgagcttaacttaacatttaaattgcgtttgcgctcacttgcccgcttttccagtcggggaaaccttgttcgttgcccagcttgcatttaatgaattcgggccaacccccccgggggaagaagccggtttggcgttnttngggcgcttntttccgctttcctttgcttanttgaattcgcttggcttcggtccgttccgggttgcgg

SEQ ID NO: 6751 - DNA, 860 bp, Homo sapiens
  misc_feature 2, 3, 4, 5, 8, 9, 11, 13, 110, 282, 284, 410, 419, 464, 487,616, 618, 633, 638, 652, 654, 656, 657, 658, 659, 660, 661,662, 663, 664, 665, 666, 667, 668, 669, 671, 672, 673, 674,675, 676, 677, 678, 679, 681, 683, 684, 689, 690: n = A,T,C or G
  misc_feature 692, 693, 694, 695, 696, 697, 698, 699, 700, 701, 704, 706,707, 708, 709, 710, 711, 712, 713, 714, 715, 717, 718, 719,720, 721, 722, 723, 724, 725, 726, 727, 728, 729, 730, 731,732, 737, 738, 739, 740, 743, 744, 745, 746, 747, 748: n = A,T,C or G
  misc_feature 749, 750, 751, 752, 753, 754, 755, 756, 757, 759, 760, 762,763, 764, 765, 766, 767, 768, 769, 770, 771, 772, 773, 774,775, 776, 777, 778, 779, 780, 781, 782, 783, 784, 786, 790,791, 792, 793, 794, 795, 796, 797, 798, 799, 800, 801: n = A,T,C or G
  misc_feature 802, 803, 804, 805, 807, 809, 810, 812, 815, 817, 818, 819,821, 825, 826, 827, 828, 829, 830, 832, 833, 834, 836, 837,843, 844, 845, 846, 850, 851, 852, 853, 854, 855, 856, 857,859: n = A,T,C or G
gnnnnggnngngnggagcgcgcgtaatacgactcactatagggcgaattggagctccaccgcggtggcggccgaggtacttttttttttttttttttttttttttttganatggagtctggctctgtcgcctaagctggagtgctggagtgcagtggcatgatcttggctcactgcaacctccgcctcccgggttcaagtaattctcctgcttcaacctcctgcatagctgggattacaggtgctcgccatgatgcccggctaatttttgtatttttagtananacggggtttcgccatgttggccaggctggtcttgagttcctgacctcaggtgatctgcctgcctcggcctcccaaagtgctgggattacaggcgtgagccatcatgccgtcctgtctgccctttancagtatttnttgagcattttcctggcttggttttagggagttggaaccatcatntgtctttcaaggcccatctcatntgcacgctgtccatgactaaaatgtggggcgagactctcagctcatccttcctcgagaatggctatttttagcctgagtttacactcttcatcctttttttttggaagttaaaatgttcctccttttgngnaaattattggggcgnaattngggacctgcccggncngnnnnnnnnnnnnnntnnnnnnnnnangnnaaaanntnnnnnnnnnnaantnnnnnnnnnntnnnnnnnnnnnnnnnnaaaannnnttnnnnnnnnnnnnnnnannannnnnnnnnnnnnnnnnnnnnnntnaagnnnnnnnnnnnnnnnntntnnanatngnnncncccnnnnnngnnntnnaaaaannnncccnnnnnnnngng

SEQ ID NO: 6752 - DNA, 915 bp, Homo sapiens
  misc_feature 408, 434, 471, 485, 495, 548, 570, 572, 591, 592, 606, 612,618, 622, 634, 640, 655, 677, 679, 697, 704, 711, 734, 748,756, 757, 786, 793, 801, 805, 808, 812, 818, 829, 833, 836,838, 839, 847, 851, 853, 857, 859, 861, 872, 883, 888: n = A,T,C or G
  misc_feature 892, 893, 898, 901, 903, 909, 910, 914: n = A,T,C or G
gcgtaatacgactcactatagggcgaattggagctccaccgcggtggcggccgcccgggcaggtacgcggggatttccaacaagagcactggccaagtcagcttcttctgagagagtctctagaagacatgatgctacactcagctttgggtctctgcctcttactcgtcacagtttcttccaaccttgccattgcaataaaaaaggaaaagaggcctcctcagacactctcaagaggatggggagatgacatcacttgggtacctcggccgcccgggcaggtacgcggggcacttggcttcaaagctggctcttggaaattgagcggagagcgacgcggttgttgtagctgccgctgcggccgctctagaactagtggatcccccgggcttgcaggaattcgatatnaagcttatcgatacccgtcgacctcnagggggggcccggtacccaactttttgtttcctttanatgagggataattngcgccgcctnggcgtaattcaatgggtcaatagcatggttttccctggtgtggaaaaatttgnttattcccgcttcaccaaattncnacaccaaacaataccgtanncccggggaagccantaaaanttgttnaaangccttggggggngccctnaatggaggtggaagncttaaacttcaacattttaatntngcggtttgccggcttcanttgcccngtttttncaattccgggaaaaacctgttcntgcccaaccttgcntttaaatnnaaattcgggccccaaccccccccgggganagaaggngcggtttngcgntanttgngggggntttttcccccntttnttngnnttaaattnaaantnattntngncttagggaccnattagggtttnggggnaagnnggggnttnancgttannattnt

SEQ ID NO: 6753 - DNA, 912 bp, Homo sapiens
  misc_feature 8, 20, 31, 38, 42, 44, 45, 51, 61, 82, 85, 97, 168, 192,495, 584, 634, 644, 679, 685, 693, 704, 712, 728, 737, 745,756, 770, 793, 795, 838, 843, 845, 853, 854, 857, 859, 865,866, 890, 892, 898, 910: n = A,T,C or G
gtaggccncgtaatcgactnactataagtcnatttggngctnanngcgagntggccgccgnccgggcaggtacaaaaaactnganaaattttctcanagcttgtcaagatgtgggaactgaacttcattgctctacaatgttggctcaagcaatggctaatttattantggacaaatctaaaaacggccaangagcaaatcctaaaatgggaaaatgttataattgtggaaaaatcggacacttcaaaaaagaataccgtcagacctttgggcagaagggatcttataatgcagccccccaccccagaaaaaatgccaggactttgccctcattgcaatataggaaataactgggctagtcaatgccactcaaaatttcatcaagaatggcacccccctgtcgggaaacgagaagggggcctggacccgggccctataaacaatggaggcattccctgtccagcccacagccccatcttaaggatagggttcccngaggcacattgattccctctcccaggaacacctggaagctcaaggattcaatctccccaaatcagagaacaaggtaacgttagtgggangaggacaaaaccccccaagattcccactggtttttggggggaccttttgncaaaccaggntatattgggaataaatttttgggttaaaaagcttntctttnattttacnagaagcatttnccctttanttcccagggagtttanttggatttnttgatttnttgaaaggganaaaattcaaggttntttgggtaattttcaccaaaggntntttttgggtttttttgaaccccaaaaaaaaaattttgggtccnacctncnggtttttnnacncngccaanntaacccccttttttttacgggggngngggggngttttgaaaccnct

SEQ ID NO: 6754 - DNA, 495 bp, Homo sapiens
  misc_feature 1, 5, 7, 12, 495: n = A,T,C or G
ntgtngntgaancgactactatagggcgaattgggccctctagatgcatgctcgagcggccgccagtgtgatggatatctgcagaattcggcttcgagcggccgcccgggcaggtgtgaggaggaggcgtccatcaacctcaatgccattaacaagtgccccctgctgaagccctgggccctgaccttctcctacggccgagccctgcaggcctctgccctgaaggcctggggcgggaagaaggagaacctgaaggctgcgcaggaggagtatgtcaagcgagccctggccaacagccttgcctgtcaaggaaagtacctcggccgcgaccacgctaagccgaattccagcacactggcggccgttactagtggatccgagctcggtaccaagcttggccgtaatcatggtcataagctgtttcctgtgtgaaattgtttattcccgcttcacaattttcacacaacataacgagcccggaaagcataaaagtgn

SEQ ID NO: 6755 - DNA, 986 bp, Homo sapiens
  misc_feature 111, 135, 174, 177, 226, 242, 248, 260, 313, 324, 329, 336,343, 345, 358, 373, 376, 381, 391, 395, 412, 414, 419, 420,428, 436, 440, 446, 447, 455, 456, 473, 475, 477, 478, 484,485, 487, 502, 510, 511, 512, 524, 536, 540, 542, 550: n = A,T,C or G
  misc_feature 554, 568, 576, 577, 580, 590, 591, 592, 593, 594, 597, 598,601, 602, 610, 616, 623, 624, 626, 629, 633, 642, 643, 644,648, 650, 656, 657, 663, 665, 676, 679, 680, 681, 685, 689,692, 694, 696, 700, 701, 702, 703, 706, 707, 709, 710: n = A,T,C or G
  misc_feature 720, 727, 734, 744, 748, 753, 757, 760, 763, 770, 773, 775,779, 782, 784, 785, 786, 787, 789, 793, 802, 815, 822, 823,825, 826, 828, 829, 830, 836, 840, 841, 849, 850, 851, 852,865, 867, 869, 870, 872, 879, 889, 891, 892, 902, 904: n = A,T,C or G
  misc_feature 906, 911, 912, 921, 922, 923, 924, 925, 928, 929, 935, 937,941, 949, 956, 963, 965, 967, 969, 971, 972, 976: n = A,T,C or G
ggcgaattggagctccaccgcggtggcggccgaggtacgcgggggagcagccattgaagcggaaggaactgcgggtgtgtgtgtgtatgtgtgtgtgtatgtgtgtgcgcncgtgcgtgcgtgtgtgtgcgcgcnctagtgtgtggacaaggaggtgggggcaactgagttaanagncccaactcttggactccatttgctattctcttctttctcccccacaccnatcttgtggtggtagngggccnttatattttgcngttccttttcattcatttctaaaatctcttaaaaaattttgggttggggggtntttgggggaangcaangaaaggngaaaatngnaatatttaccttnaggagcaaagaaagnaanacccntgtctcattnatanaaataaaaattaacccntnggaanntttaaagnaaacaaanaatncccccnncaatgaanntttgaccataaaatttngntnncctttnntnaaattgccctgcatntccaaatnnncggaaaattagnaccccccctttnggantntttttaanaaanaacctacaaaattntctgaaannttnggcctaaatnnnnngannctnnaatttctnctaggntccctgnntnttncaanctattaaannnaacncntctctnnagaaanantttaccccttncannnaaantttntantntntctnnnnaanngnnttttataaantccctgnacaacantaaaattatncatnaattnttcnccnctncctcaanaancntttntgnannnnancccnatatatacnggtttttacattncccctcnncnnannnggcccnttcnnaaaactannnngaatccccccccncncnntntgaaatncacattattncnncatattagtnancnttatnncctttacannnnnggnncccttntncccnccttttgntgtactnttttggngnantntnntttnctcccctttt

SEQ ID NO: 6756 - DNA, 1217 bp, Homo sapiens
  misc_feature 2, 3, 6, 7, 11, 14, 15, 17, 24, 29, 30, 34, 36, 38, 40, 41,46, 48, 50, 51, 52, 54, 56, 57, 64, 73, 84, 85, 86, 87,92, 101, 104, 111, 117, 151, 155, 162, 165, 170, 184, 199,241, 247, 259, 293, 346, 363, 370, 371, 406, 417, 425, 433: n = A,T,C or G
  misc_feature 437, 439, 468, 482, 493, 498, 500, 505, 506, 509, 517, 520,532, 533, 551, 558, 562, 564, 570, 572, 573, 588, 600, 619,627, 631, 646, 650, 651, 652, 655, 661, 685, 686, 694, 696,731, 734, 745, 747, 758, 759, 763, 770, 775, 776, 793: n = A,T,C or G
  misc_feature 794, 796, 799, 812, 819, 825, 835, 852, 853, 862, 863, 864,867, 873, 882, 883, 885, 887, 888, 895, 899, 901, 916, 917,926, 936, 951, 954, 961, 968, 969, 971, 974, 980, 982, 998,999, 1003, 1007, 1013, 1019, 1020, 1022, 1025, 1033: n = A,T,C or G
  misc_feature 1039, 1042, 1043, 1047, 1051, 1058, 1062, 1063, 1064, 1065,1066, 1073, 1079, 1082, 1085, 1087, 1089, 1092, 1093, 1096,1097, 1099, 1102, 1110, 1113, 1114, 1115, 1117, 1123, 1128,1137, 1139, 1141, 1148, 1151, 1154, 1155, 1156, 1172: n = A,T,C or G
  misc_feature 1174, 1175, 1177, 1178, 1191, 1195, 1197, 1201, 1206, 1215: n = A,T,C or G
cnngcnntacntanntntcacgantctcnntccntntntnnttttntnannntntnncttattnctttttttnttatatttcgnnnntaagnaggtggatnttntttactncttttntacggcgaattggagctccacccgcggtggcggnccangtaccanatncctgncattcaacaacttncccttccaagagggngctgatcacagactttttacttgtaatggggccaagaagagncagttncttaaactaatngagttctttttataacaagagactgcagatatcnctacagaaagaataccggttgtatgtttcctgaattattactaaaaacatttntttaaatgtctcatatntaaaggnngattggctcttatcttctgacaaatgaaacttagnggccctaaggnagaaagcnaaatttgnaacncnttgtttaaacaatttaaaaaaaggttcangctatgtccctttngaaaatacttnatttntnaattnnctnaccctttnggnaatgaatatcannccaaacctccaaaaattntttgttncccncncccacncnnggattatatcaaaanccaaaagttatncaagggggaggccccttanaaatcttntttnaaagggcccaggggncttnnnccnttgganccttgaaaaatccccttgaacttnnttgcttancntttggcttacccttggttttggtaatcccctaaangcnatttttaattntnttatcccccgnngttnacccttnccccnnggggcctgcctcggttnntnaanaaacctttaggtngggaatncccccncgtagccttngcaatgtaaaatttctnnatattcaannnccntaattngtttaaccnntncnnacccttnctangnggggggggcccctgnnttccccaanctttttttgnttcccctttaaattnganggggggntaaattnncnccnccttcngncgtgaaaacacttggnncatnatcntttttntccctnngnttnaaaaatgntttttnccnntatncccngttttcntccnnnnnctttttnatcccnggnganancnttnntannantanataagccntgnnngngtgccnatatnataaggggngncnaacatcncanttnnnttggttttgggccttnanntnncccccttttttcntgcngngtanactcntggcctcgncc

SEQ ID NO: 6757 - DNA, 872 bp, Homo sapiens
  misc_feature 527, 564, 577, 612, 615, 619, 628, 629, 631, 636, 649, 654,659, 662, 666, 673, 676, 682, 690, 698, 707, 712, 717, 721,729, 742, 743, 749, 754, 758, 769, 777, 780, 783, 787, 790,805, 806, 808, 810, 811, 812, 814, 815, 821, 825, 826: n = A,T,C or G
  misc_feature 828, 829, 830, 838, 839, 840, 848, 849, 850, 852, 861, 870,871, 872: n = A,T,C or G
ctatagggcgaattggagctccccgcggtggcggccgaggtacagaatttatcatggattattgactgctgagaaagggacagtggaatttagccataccaaggactatactggaaacagacttctgctgctgaatgtgccctgatgtgaccaggttgcacttggaagagatcctcgcgtcttcatgaggcacttaaagcttataaaagaactgcggctggaactcatctggtgctccccatgagagtgctctgcttgtagactggccagtgtccatgaaacaactgtaaataccaacatgtgtgcatgggtcaacagtcttggccatttctcatcaaaagaagccaaattcatgatcaacatctctgaagtttcaagtaaggtccacacttctttgaattactcttcatgggcccacattaggttgtgctgtgaattacttaaggcagtgatactgatgtagtatagttttgtcttaatttcccttatttctacttctttggggtgaatctatgaacttggattgnataattttcttataaattactgatgtaatcagcttgntcaattatgttgngaaattggttaggtatttcatttattaaaaaaatngancctntggttttanncnccatntttggttttaagnttctnggggnaanttgnttttttnccnttaaanggggaacncccccccnctttttttntaggnttaanggcntttttttntttttttcccccnntttttnaaaantttncaaaaaacacntttttttnggncanaggnganttttttttttttttnnanannncnnggggcnccanntnnntttttttnnnaaaatttnnntnaaatttttnccccaaaannn

SEQ ID NO: 6758 - DNA, 1154 bp, Homo sapiens
  misc_feature 3, 9, 10, 11, 16, 24, 26, 27, 28, 29, 30, 33, 34, 36, 38,39, 42, 43, 44, 45, 46, 48, 49, 52, 55, 56, 58, 59, 61,65, 67, 68, 69, 74, 76, 77, 84, 85, 87, 91, 93, 95, 96,107, 135, 139, 140, 141, 142, 145, 187, 389, 491, 530, 532,536: n = A,T,C or G
  misc_feature 541, 555, 605, 633, 635, 639, 641, 665, 677, 680, 691, 694,698, 701, 705, 708, 721, 733, 735, 741, 750, 760, 761, 769,775, 779, 780, 795, 805, 809, 813, 818, 821, 823, 831, 834,846, 868, 888, 894, 906, 908, 910, 913, 914, 930, 934: n = A,T,C or G
  misc_feature 937, 940, 944, 945, 946, 951, 958, 964, 991, 995, 1003, 1004,1012, 1017, 1018, 1023, 1027, 1028, 1031, 1037, 1044, 1046,1062, 1065, 1068, 1070, 1079, 1090, 1103, 1105, 1116, 1119,1120, 1123, 1125, 1126, 1129, 1130, 1134, 1143, 1146: n = A,T,C or G
  misc_feature 1150, 1152, 1153: n = A,T,C or G
gcntgtttnnnataanaaatatanannnnnatnntntnnatnnnnngnnatnttnnannantatntnnnttttnannatatatnnantatngngnntgaataataanatcctatagggcgaattgtagctccacngggnnnnccnccgaggtgcagggcattaaacaaataccaaggggaacagttnacttcaatacaaggtcaaaatcagcaacaagttctacaatccagtgctgatatcaggtacaagcttcaaggacaatttcttttcgaaggcttattccagtttcgtgaggctagcatgaggtgtgtgcatttgccaggggcaaatttctattctcaattaacccatgcagcaaaatgctacgcatctgctgagtccgttttanaagcatttgcggtgggacgatggagggggccccgactcgtcgtaccttgcccggggcggccggctctagaaactaagtgggatcccccccggggccttgcangaaatttccgatattcaaagcctttatcgattacccggntngaancttcnagggggggggggcnccgggtaccccaagccttttttggtttcccctttttaagtggaagggggntaaaattttgccgcccgcctttgggccngntaantnaaatggggtccattaagcctgggntttcccttggtnggnggaaaaaattngtnttantcncggnttncaaaaaaaatttncccacaccaaananataccnaaagccccngggtaagccnntaaaaagntggtanaaannccctggggggggtgngcccttaaantggnagtntgaangcntnaaactttnacnaatttaaatttnggccggtttgggggccttcaantttggccccgcattttttcntattcnggggaaaaaacntntntcnntggcccagcccttgcnattnaanggnaaannnggggnccaaacncccccnggggaaaaaagggcgggtttttcagtnattngggggccnntttttttnctganntttantttnngtnaaaatngaacatntntttttgtactttcggntgnaantnccgattttnaagatgaagcncggaatacatatntnctttttaatanggnntgngnnaannttcngttttttcncanagananng

SEQ ID NO: 6759 - DNA, 911 bp, Homo sapiens
  misc_feature 95, 242, 273, 365, 413, 435, 474, 515, 533, 538, 569, 570,580, 582, 600, 603, 624, 625, 628, 635, 641, 642, 647, 649,659, 660, 664, 685, 687, 691, 692, 693, 707, 708, 723, 751,762, 772, 774, 782, 788, 799, 800, 801, 804, 810, 830: n = A,T,C or G
  misc_feature 831, 832, 835, 839, 840, 842, 845, 849, 851, 852, 856, 859,872, 875, 878, 883, 893, 901, 902, 911: n = A,T,C or G
ggagctccaccgcggtggcggccgaggtacgcgggggctgtagtggcttcgtcttcggtttttctcttccttcgctaacgcctcccggctctcgncagcctcccgccggccgctctagaactagtggatcccccgggctgcaggaattcgatatcaagcttatcgataccgtcgacctcgagggggggcccggtacccagcttttgttccctttaagtgaggggttaattgcgcgcttggcngtaatcaatggtcatagcttgtttcctgtgngaaattgttatccgctcacaattccacacaacaatacgagccgggagccattaaaagtgtaaagccttgggggtgcctaatgaggtgagctnactcacattaaattgcgtttgcgctcactggcccgcttttccaggtcngggaaaacctggtcgtgccaantgccattaaatgaaatccggcccaaacgccccggggganaaggccggttttgccgtaatttggggccgccttctttccgntttcctcgcttcaattgnacttncgcttggcgccttcggggtccgtttccgggnnttgctggcgnanccgggtattcaaagcttnaantttaaaaaggggggggtaaannacngggttanttccannaaaantnaaggggggannaacnccagggaaaaaaaaaacattntnggannnaaaaaagggcccanncaaaaaaaggcccangggaaacccgtaaaaaaaggggccccgntttgctgggcntttttttttncnataaggcntcccgncccccccttgnnngangcattnaacaaaaaatttggaccctnnnaanttannanggngggngnnaaanccnggcacgggacttnttnaanataanccagggcgtnttcccccnngtgaaaagn

SEQ ID NO: 6760 - DNA, 1181 bp, Homo sapiens
  misc_feature 1, 2, 3, 6, 7, 9, 11, 13, 16, 17, 18, 20, 22, 24, 26, 28,30, 31, 33, 34, 35, 37, 40, 41, 42, 44, 45, 46, 48, 51,52, 53, 54, 56, 58, 60, 62, 63, 67, 69, 70, 71, 73, 74,75, 76, 78, 80, 81, 82, 84, 85, 86, 89, 90, 92, 94, 95,96, 97: n = A,T,C or G
  misc_feature 98, 99, 100, 104, 106, 108, 110, 114, 116, 118, 123, 124,125, 359, 395, 404, 469, 506, 523, 541, 542, 572, 573, 599,611, 633, 634, 656, 662, 664, 665, 666, 672, 676, 677, 678,679, 697, 699, 710, 712, 731, 732, 733, 747, 763, 784: n = A,T,C or G
  misc_feature 790, 791, 792, 803, 816, 823, 828, 839, 850, 851, 852, 857,878, 895, 901, 903, 904, 906, 915, 918, 928, 938, 940, 943,951, 958, 960, 963, 966, 971, 978, 981, 984, 988, 989, 998,1000, 1001, 1003, 1004, 1005, 1006, 1016, 1017, 1028: n = A,T,C or G
  misc_feature 1029, 1034, 1036, 1037, 1043, 1044, 1047, 1052, 1056, 1059,1060, 1063, 1065, 1066, 1072, 1074, 1076, 1095, 1100, 1105,1106, 1111, 1114, 1116, 1119, 1124, 1125, 1126, 1127, 1134,1136, 1140, 1152, 1156, 1163, 1164, 1170, 1172, 1176: n = A,T,C or G
  misc_feature 1180: n = A,T,C or G
nnncgnngngntntcnnntntnantngngnnannncnaannnannncntgnnnntntngngnntcantnnngnnnnanannntnnntgnntnannnnnnntagngngngngttnangnccttnnnactcactatagggcgaattggagctccaccgcggtggcggccgagcaaggagggctggaagttgttagtcagagtgttgaagcaccggtggctcagcatggctatctggtcatggaaggtgctgccagtgagagggagtgtctttggctgtgcttctggggaccttgagaggaggagcatagttcttctgagactggcccctgtcactggggttacctctgtgaaacccatgcnttctgccttctcgttctccccaatcaagacacgganagccgcatntgcctgcttcctgcttgccttcccgcgtacctcgggccgtctctaaaactaagttggatcccccnggctagcaggaaatttccgatattcaagcttatccgntaccgccctaacctacnaaggggggggggcccccnnggtacccccaagcttttttgttccctttanngtggaggggtttaaaatttggcggcncctttggggggntaaattccattgggtgccatanncattggtttttccctggtgctnagaaanannntggttnaatnnnnggcctcaaccaaattttncnacccacaaacnantaacctaaggccccggggnnngccaataaaaaagntgggtaaaaaagcccntggggggttggcccttaaatngaggtnnnaggcttaaacntcaacattttaantttgcgnttttnaggccttcaancttgcccgcgnnnttttncagtttcggggaaaaaccctntccgtgacccaccctgnatttanannanaatttcgtnccnaacacccccngggaaaaaangncgntttttgcnttatttngnggnggnctccntcccccnttnacnttgnntcaaatttnanntnnnntttggtcttnngggactttccnngtttntnnggaaanncgnttttnaganttnnccntnnaagggngngnttataaagggtttttttcncccanaaaannagggnggnanacnccccnnnnaaaaaanantttntttcaaaaatgnctcncaaaaannggcctncncaancttnc

SEQ ID NO: 6761 - DNA, 862 bp, Homo sapiens
  misc_feature 247, 251, 393, 427, 428, 431, 460, 476, 511, 539, 540, 543,544, 546, 555, 562, 571, 574, 575, 576, 582, 587, 589, 598,604, 610, 612, 613, 629, 633, 638, 641, 652, 655, 662, 663,664, 668, 672, 673, 675, 680, 681, 686, 697, 701, 702: n = A,T,C or G
  misc_feature 706, 714, 717, 724, 733, 734, 738, 747, 752, 755, 761, 763,766, 768, 772, 780, 784, 793, 802, 805, 812, 813, 816, 817,827, 831, 837, 838, 839, 840, 844, 850, 855, 859: n = A,T,C or G
tccccgcggtggcggccgaggtactttcaatgttgcctataaacagatttcagctgaagctcagatggtaaggttaagatgcctggggactgggatggatggatgggcaggagggttggaagagaagtaatccaattagcattgaaaataagagcgccaatttggaaaatcgaatgtctatgatcattttcttccctaaaacagggaagaaagtgaatgtggaaaatccgatttttcagcaatattngcangacctaaggcaacaaccacatgcctggggcaactatactttccaaatcctgaatattaaaaaggttttcacattggtaaatcatcttaatatttttctgtttttttagaatgaagttttgctcttgttgcccaggcctggantgcaatggtgcaatcttgggctcacctcaacctnntgncttccgggttcaagcgattcttctgcctnggccctccccaagtancttgggattacaggaaacgtgcccattcacccctngggttaaatttttggaatttttttttannaannanaaagggggnttttttnccatgtttngtnnnaagggnttggntntttaaaaanttcctnaacccncnngggtgaaacccccctngccnttgcnccnttccaaaaagngcnttggggnnnttcncaanncncttgnngttcnccccgggcccnggcnnaaantggggtgnccnttttttnaaagggaannaaancaaattttnccttngtnggggcnanaangnaggnttaacctngttnttgaaatantgtaaacanccntcccctnnggnnttttgtgctnatanggggcnnnngaanaaattntgggngttncaa

SEQ ID NO: 6762 - DNA, 1220 bp, Homo sapiens
  misc_feature 1, 2, 3, 5, 6, 9, 13, 18, 21, 25, 28, 30, 33, 34, 35, 36,37, 38, 39, 40, 49, 52, 53, 59, 61, 62, 74, 75, 79, 89,90, 93, 94, 98, 100, 104, 109, 111, 112, 145, 149, 200,214, 224, 251, 299, 310, 321, 336, 365, 376, 379, 380, 391,395: n = A,T,C or G
  misc_feature 404, 407, 416, 417, 439, 449, 471, 477, 479, 483, 498, 535,539, 566, 567, 574, 579, 583, 592, 597, 602, 603, 615, 623,624, 631, 632, 642, 644, 645, 654, 657, 659, 663, 664, 666,669, 684, 687, 691, 694, 708, 719, 725, 733, 738, 747: n = A,T,C or G
  misc_feature 751, 763, 765, 773, 782, 784, 786, 797, 801, 804, 807, 815,817, 822, 834, 835, 853, 861, 867, 877, 879, 880, 886, 912,916, 921, 930, 931, 936, 939, 942, 949, 954, 960, 966, 968,971, 973, 974, 980, 989, 1012, 1013, 1026, 1033, 1056: n = A,T,C or G
  misc_feature 1061, 1066, 1067, 1076, 1079, 1091, 1107, 1110, 1111, 1112,1113, 1114, 1115, 1119, 1126, 1129, 1130, 1131, 1132, 1133,1145, 1151, 1163, 1164, 1165, 1166, 1168, 1170, 1177, 1182,1188, 1190, 1194, 1197, 1199, 1204, 1207, 1210, 1214: n = A,T,C or G
  misc_feature 1220: n = A,T,C or G
nnntnnacntcgntttcnttnaaantantnatnnnnnnnnttaaagttnganntaatcnannttaattatgatnntttntatcttgatnnaannctananctantcatntnnggctaattggagctccaccgcggtggcggccgnggtncgcggggagtcccaaccaggacacagcatggacatgagggtccctgctcanctcctggggctccntgctgctctngctcttcaggttgccaggggtgacatncatatgacccagtctccatcctccctgtctgccatctgtaggagacanagtcaccatcncttgccaggcngagtcaggacatcangtaactatttaaaattggttattcagcantaaaccagggnaanngcccctaaggntcgnggatctacngantgccatccnnaatttggaaaatgaagggggtnccgcccaaanggtttcaattggaaaagttggnatcctngngtancagaatttttttagnttttcacccattcaagcaatcccttgccatgccctgngtangtattattttggcaaaacaaatatttnnctttgtncaaancaanctttttaantggantgttnncccctttaccancttttttnngggcccnnttgggggaancnnaaaaacctnggnangaanncnaanaaccgcaaaacttgntgnggcnttngcaaccccaattcntgggtcttttncaattnatattccnccccnccccatttnttgnaaatgaaagacncnggttttgnataaaattntngnggaaaaccttnctcntcnatngattttgntngttgnccccatgccttnnaaaataaaaccttttctnattttccnaaatantaaaggggcncnnaaaaanttatacccttttctccccggggctcngggngctgnttttttttnnataanctntantggggtngctcncccctntggctntngcnannggaaantttcgcgancttttaaaggttttattttcgtnntttcccctccccntcctttntaaggggggggggcccccctgtntcccnccaanntttttttgntantctctttttatnggtacggggtttaaanttnnnnnntccntctgggncannnnnataaattgtccnatatanccatttgtttcnnnntntntaaaaanatgtntattcncncccnccncnatttnccnccntatntctttn

SEQ ID NO: 6763 - DNA, 1192 bp, Homo sapiens
  misc_feature 4, 5, 7, 8, 9, 13, 15, 22, 39, 45, 50, 53, 54, 58, 62, 66,67, 73, 74, 75, 76, 77, 78, 79, 80, 85, 87, 88, 91, 93,94, 95, 98, 103, 104, 124, 364, 437, 456, 462, 478, 514,515, 527, 528, 530, 537, 543, 560, 565, 566, 576, 586, 588: n = A,T,C or G
  misc_feature 593, 596, 601, 605, 607, 608, 621, 626, 627, 632, 637, 639,671, 675, 701, 703, 713, 733, 747, 773, 781, 787, 799, 801,804, 806, 812, 815, 824, 825, 840, 843, 849, 854, 860, 872,874, 881, 883, 887, 901, 903, 905, 906, 908, 917, 923: n = A,T,C or G
  misc_feature 926, 929, 943, 944, 947, 949, 951, 971, 994, 996, 997, 998,1001, 1003, 1004, 1006, 1007, 1008, 1013, 1021, 1022, 1025,1026, 1040, 1042, 1044, 1053, 1058, 1059, 1062, 1063, 1069,1075, 1077, 1081, 1084, 1092, 1094, 1101, 1108, 1109: n = A,T,C or G
  misc_feature 1114, 1117, 1123, 1128, 1129, 1131, 1132, 1136, 1141, 1142,1144, 1146, 1147, 1156, 1158, 1160, 1162, 1163, 1164, 1166,1167, 1168, 1170, 1174, 1180, 1184, 1187, 1188: n = A,T,C or G
gtannannnatananaaattantaccatattatatatantacgtnatatnganntttnattntatnntaattnnnnnnnnaaagnanngtnannnttnaacanncatatattttggcgaattgnagctccaccgcggtggcggcccgaggtatcccaattctaaaataaaggttaaaaaagaaaaagatatttcagcatcacttgtttcatcttacaagggcattgtaaaataataaaagataaaagttaagagataggaaaagaaaaaaaagggaaaaagaaaaaaaccctcattggagtcctgttctgcccacccctggagttactaagtaagcccaacttaaggggtcccttgagctccanactgtaaagcccccaaggcagcattcatccacacccaccttatcaggatcctcaaagcaatttcttcttaaantttgggtaagacccggggntaagtntaatttcccaatttcnttgcaaaattgggggggaaaaaccttgaaggacctnnacgaaaaaaggnnanccttggnccccgngggccgggcccggcttnttatnnaaaacctaangttggggaantnccccnccnggggncttntnnaggggaaaatttncgtanntattncaaangncttttaattcggaattacccccggtccgaacncctntttaaggggggggggggggcccccgngnttacccccanacctttttttggtttccccntttttaaattgganagggggtttaaatttgccggccgccnttgggcgntaaatncaatgggggccnanaangncttggntgnttccttggnnggtgtgaaaaaaatnggntattcnccgcntttaanaaatttcccccncntaacaantntccnaagcccgggggtangncnntnaaaaaatgntaaaanccnctnggggtggggccttnnatngngnggggaccctctacctctacnatttatatattggcgtttgtggncnnntancnntnnnccccntttttacnnatnnacgggagaaaaacncntntgtctttgnccctnnctnnatattntatatnanaaanatncgtccccnanacccccncgcgggnnagaanggngcgtgnattgnncnnattntgggnncncnnttttttgcntntntnnnannntncacntgaganatangcnngtcg

SEQ ID NO: 6764 - DNA, 1228 bp, Homo sapiens
  misc_feature 4, 5, 11, 12, 15, 18, 19, 22, 28, 29, 32, 34, 36, 37, 38,39, 41, 42, 43, 44, 46, 47, 51, 53, 58, 62, 63, 65, 66,67, 69, 70, 71, 73, 76, 77, 78, 79, 80, 82, 87, 91, 92,93, 95, 97, 98, 99, 100, 101, 103, 106, 108, 111, 113, 115,118: n = A,T,C or G
  misc_feature 120, 128, 130, 137, 138, 147, 218, 282, 297, 370, 398, 429,483, 490, 499, 508, 532, 563, 590, 629, 632, 646, 648, 650,664, 676, 716, 717, 724, 738, 743, 763, 775, 782, 787, 791,816, 819, 831, 832, 842, 843, 859, 867, 871, 876, 878: n = A,T,C or G
  misc_feature 880, 889, 894, 897, 900, 908, 909, 913, 915, 926, 932, 938,951, 953, 973, 975, 977, 988, 996, 1003, 1011, 1013, 1034,1044, 1046, 1054, 1056, 1066, 1074, 1080, 1081, 1088, 1095,1110, 1115, 1116, 1122, 1126, 1130, 1132, 1136, 1140: n = A,T,C or G
  misc_feature 1145, 1147, 1151, 1153, 1157, 1171, 1173, 1174, 1175, 1176,1180, 1183, 1185, 1189, 1190, 1193, 1198, 1207, 1208, 1209,1213, 1214, 1215, 1219, 1222, 1224, 1227, 1228: n = A,T,C or G
cgcnncggatnnggnggnngtntgtganncgngncnnnncnnnntnntcgngngtgtnggcnngnnngnnngntannnnntntcttntgannnantnnnnncnggntnganananagncntttgctantnactatanngcgaattgnagctccaccgcggtggcggccgcccgggcaggtacgcggggacttccggttctctgtcagtcgcgagcgancgaccaagagggtgttcgactgctatagccgagcgaagcagatgcctaaatcaaaggaacttgnttcttcaagctcttntggcagtgattctgacagggaggttgacaaaaagttaaagaggaaaaagcaagttgctccagaaaaacctgtnaagaaacaaaagacaggttgagacttcnagagccctgtcatcttctaaacagagcagcnagcaagcagagatgataacatgtttcaagattgggggaaaaatgagggtacccntcgggcncggctctangaacctagntgggatccccccggggcttgcaanggaatttcggattatccaaggcctttatccngattacccggtctgacccttcagtagnggggggggggccccccggggtacccccaagccttttttnggnttccccctttttangntngaagggggttttanattttggcggcnggccttttgggggcggttaaatccacttgggttccattanngcctggntttcccttgttggntgganaaaattggggctaattcccnccttccaaccantttcccnaccancaanccatttaaccgaagtccccgggggnagncactttaaaagnntgttgaaaanngccctttggggggggngcccctanaatnggaangntngaaggcctnaaacnttnaancattttanntttngncggttgggagncgcttnacctgncccccgctttttncngggtcgcgggaaaaaccctngntnagtggcccaancctggccnttttaantgggaatntnggccccaaacgcccccggggngaagaaagantngtttttgncnttatttgggngcgcttcnttcccnnctttctntggggtnaaatttgatctttcnggtgnngccttnggancctntngtgntttnggggncnagancntgtntctacacttccctntnnnnaggnggncnatannttncgtgnatttccccnnnactnnntggnggngnttnn

SEQ ID NO: 6765 - DNA, 845 bp, Homo sapiens
  misc_feature 581, 582, 628, 652, 677, 696, 703, 705, 706, 720, 722, 725,749, 768, 783, 785, 801, 802, 810, 821, 822, 824, 825, 828,829, 831, 832, 834, 841: n = A,T,C or G
tagggcgaattggagctccaccgcggtggcggccgaggtaccacacacacggcctgtgtccttgtctactggttcttgtgtgataatcacagggacaccgatcatccctttcgtcatggacccacagctgcaggtggatttccataccgagatgaaggaagactcagacatcgccttccatttccgagtgtacctgcccgggcggccgctctagaactagtggatcccccgggctgcaggaattcgatatcaagcttatcgataccgtcgacctcgagggggggcccggtacccagcttttgttccctttagtgagggttaattgcgcgcttggcgtaatcatggtcatagctgtttcctgtgtgaaattgttatccgctcacaattccacacaacatacgagccgggagcataaagtgtaaagcctggggtgcctaatgagtgagctaactcacattaattgcgttgcgctcactgcccgctttccagtcgggaaacctgtcgtgccagctgcattaatgaatcggccaacgccccgggggagaggcggttttgcgtattgggcgctttttccgcttctnntcacttgactcgctgggctcggtcgttcggctggcggcgagcggtnttaagctcaacttcaaaaggcggntaatacgggtatccccaagaatcanggggataacccaaggaaanaaacatntnnagccaaaaagggcnancanaaggccagggaacccgtaaaaaangccccggtttgcttggggnttttttcataagggntnccgcccccctgaccgnngctttacnaaaaaatcganncnnaanntnnanagggggngaat

SEQ ID NO: 6766 - DNA, 1152 bp, Homo sapiens
  misc_feature 3, 8, 10, 11, 12, 13, 15, 18, 19, 24, 25, 27, 30, 32, 33,34, 37, 38, 41, 47, 48, 49, 50, 55, 56, 60, 61, 64, 67,69, 71, 72, 73, 74, 75, 77, 78, 79, 84, 86, 88, 90, 91,93, 99, 100, 101, 104, 108, 112, 413, 454, 462, 479, 498,567: n = A,T,C or G
  misc_feature 599, 615, 630, 655, 681, 685, 702, 715, 727, 747, 792, 799,802, 813, 814, 829, 833, 845, 857, 859, 862, 878, 879, 880,888, 896, 898, 910, 922, 925, 950, 977, 982, 993, 994, 1000,1001, 1007, 1012, 1015, 1027, 1035, 1037, 1038, 1043: n = A,T,C or G
  misc_feature 1048, 1051, 1065, 1067, 1074, 1082, 1083, 1090, 1094, 1102,1105, 1108, 1114, 1115, 1123, 1128, 1134, 1135, 1142, 1144,1145: n = A,T,C or G
aangtgtntnnnngnatnntatanntnatntnnntannttnttatgnnnnatatnntatnnttnttnantnnnnnannntgagngntntnngngttttnnnatnagtnacgnattactatagggcgaattggagctccaccgcggtggcggctatcaaagaagaacatgtgatcatccaggccgagttctatctgaatcctgaccaatcaggcgagtttatgtttgactttgatggtgatgagattttccatgtggatatggcaaagaaggagacggtctggcggcttgaagaatttggacgatttgccagctttgaggctcaaggtgcattggccaacatagctgtggacaaagccaacctggaaatcatgacaaagcgctccaactatacctccgatcaccaatgtacctnggcccgctcttagaaactaggtgggatcccccgggctgcanggaattcngatatcaaggcttatcngataccggtccgacctccnaagggggggggcccccggtacccagctttttgtttcccttttagtggaggggttaaaattggccgccgncttgggccgttaaattcaatgggtccataagncttggttttcccttgntggtggaaaaaattngtttaattcccggctttcaacaaantttccccaccaacaaaccaattaccntaanccccggggtaggccatnaaaaagggtggtnaaaaggcccttngggggggtggcccctaaaantggagggtgggagggcttaaaacctccaacattttaaatttggcngtttggnggnctttaaccttnncccccgccttttttnccangattccgggggnaaaacccttgtntnggntggccccaagcttggnnnatttaaanttgaaaantncgggcccaaacntcccccgggggnaanaaagggcccggtattttggcggctnttttgggggccgggcctcatttttccngcttntatctttgggnnttcaannttgaancttcngcntgggggccttcngggtcccntnnacggncttgngcngggcaaagccgggnanttcaaancttcaaanntccaaangggncgggggtntantanaccggnnttattccnaccanaaaaanncaagggngnnttaaacg

SEQ ID NO: 6767 - DNA, 883 bp, Homo sapiens
  misc_feature 5, 318, 334, 359, 369, 392, 469, 485, 501, 515, 532, 533,587, 588, 590, 596, 597, 606, 615, 619, 622, 657, 663, 666,667, 672, 680, 688, 704, 707, 709, 720, 726, 741, 751, 756,758, 763, 766, 771, 785, 789, 800, 801, 802, 815, 817: n = A,T,C or G
  misc_feature 819, 827, 832, 837, 839, 841, 846, 849, 853, 872, 874, 879,883: n = A,T,C or G
tactntagggcgaattggagctccccgcggtggcggccgcccgggcaggtactgaagatttcttcactgtggtaatcttgcgggtcttctcgttggttttctttccttcaaacttggagaatgtgagggattgggccccttggctgctctgactgctggcaaaggcctcttcttcctcccgctggagtcgtgtaatataagaaatatgactgtatatctggaaggctttattgcagtgatgtggaaccaaacccgtaacatctccaaagtatgcctgtaatattttacagcagcccccataggctgaagagctgcctntgcatctaaggatcanggcattctgtgttcgatggcagaantccaagtcanaatgcagcacaaatccctgttgnatttgttctaggctgagtaaccgtcaagttgtattataaagaagttctgatctcctgaagctggtttatcaagatgnaaatcttccatgtggntgaattcaataaaganaaatggtctccctngaagcctgggttttatnnaagcttggtaaaatctttccacattcttcaaaaatttcataaacctttcatggnnantcttgnnaaatccccnactttttgngganggnaaggtggggattcaactttggaggggtccagggangttttnaannggccnagcccggngcccctanatggggaaaaaaaacnctntnttcttttaccnagcaanccccttggggctttnttccacaaantaccntntgggncgnttttnaaaaaactaaaggngaanccccccgggcnnngaagggaaatttngntnttcacaanctttnttcgntnanccgtncgnaccntcatgggggggggggcccncngtacnccan

SEQ ID NO: 6768 - DNA, 839 bp, Homo sapiens
  misc_feature 590, 599, 622, 646, 650, 652, 665, 693, 701, 747, 748, 762,774, 802, 803, 807, 808, 815, 832, 833: n = A,T,C or G
gaattggagctccaccgcggtggcggccgaggtacgcggggactgcgactcgagacagcggcccggcaggacagctccagaatgaaaatgcggttcttggggttggtggtctgtttggttctctggcccctgcattctgaggggtctggagggaaactgacagctgtggatcctgaaacaaacatgaatgtgagtgaaattatctcttactggggattccctagtgaggaatacctagttgagacagaagatggatatattctgtgccttaaccgaattcctcatgggaggaagaaccattctgacaaaggtcccaaaccagttgtcttcctgcaacatggcttgctggcagattctagtaactggatcacaaaccttgccaacagcagcctgggcttcattcttgctgatgcttggttttgacgtgtggatgggcaacagcagaggaaatacctggtctcggaaacataagacactctcagtttctcaggatgaattctgggcttttcaagttatgatgagatggcaaaaatattgacctacccagcttcccattaacttcaatttcttggaaataaaaaacctggccnaaagaaacnaaagtgttatttattggtggggntcaattttttcaaggggcacccancttntnagggtttttaatnagccattttttcacaagaatccccttgngccttggncttaaaaagggatttaaaaaatggtttttttggcccctggggtccnngggggctttccggncgccttttttgnaaccttgccccggggggggccgtttttnnaaannatgtggntcccccccggccttgcnngggaat

SEQ ID NO: 6769 - DNA, 845 bp, Homo sapiens
  misc_feature 304, 308, 504, 523, 558, 580, 589, 602, 612, 618, 638, 663,672, 679, 686, 691, 701, 710, 718, 740, 741, 768, 776, 777,806, 835, 841, 843: n = A,T,C or G
ggagctccaccgcggtggcggccgaggtacaccagattccagtcccgaaataagcctgctgtgggggttggtggcgcttgaggctacaagtccaagtatcttcagctcaagaagaagttagaagatgagttccccggccgctctagaactagtggatcccccgggctgcaggaattcgatatcaagcttatcgataccgtcgacctcgagggggggcccggtacccagcttttgttccctttagtgagggttaattgcgcgcttggcgtaatcatggtcatagctgtttcctgtgtgaaattgntatncgctcacaattccacacaacatacgagccgggagcataaaagtgtaaaagcctggggtgcctaatgagtgagctaactcacattaatttgcgttgcgctcactgcccgcttttccagtcgggaaacctgtcgtgccagctgcattaaatgaatcggccaacgccccggggagaggcggtttgcgtattgggcgctnttccgctttcttgcttcantgactccgcttgcgctcggtccgttccggcttgcngcgaagccggtattcaggcttnacttaaaanggcgggtaaatancggtttattncaacanaaaatcaagggggataaacnccaaggaaaagaaaacattgttgangccaaaaanggcccanccaaaanggccnaggaaacccnttaaaaaanggccccgnttgcttgggcgtttttttccannaaaggctcccgccccccccttgaccgnagcattannaaaaaatccgcccctcaaggttaaaaagnggggggaaaaaccccccccgggccttttnaaaaananct

SEQ ID NO: 6770 - DNA, 1190 bp, Homo sapiens
  misc_feature 1, 5, 6, 9, 10, 16, 22, 23, 28, 32, 33, 34, 36, 42, 44, 45,48, 53, 56, 63, 64, 68, 70, 73, 76, 78, 81, 82, 84, 85,92, 95, 98, 106, 107, 109, 111, 190, 192, 202, 205, 215,216, 294, 328, 332, 337, 339, 369, 410, 426, 431, 432, 456: n = A,T,C or G
  misc_feature 474, 518, 525, 559, 570, 574, 605, 616, 619, 620, 628, 629,630, 631, 651, 652, 657, 661, 662, 666, 674, 677, 688, 689,691, 698, 714, 716, 723, 727, 733, 747, 748, 767, 770, 773,777, 782, 784, 786, 794, 795, 796, 797, 801, 812, 826: n = A,T,C or G
  misc_feature 832, 835, 840, 845, 851, 863, 879, 884, 888, 889, 892, 894,898, 899, 906, 908, 909, 910, 913, 915, 916, 920, 922, 928,930, 937, 941, 944, 945, 946, 959, 963, 967, 976, 986, 987,1001, 1012, 1013, 1018, 1019, 1023, 1028, 1032, 1041: n = A,T,C or G
  misc_feature 1046, 1047, 1048, 1060, 1071, 1077, 1079, 1086, 1103, 1107,1109, 1111, 1113, 1133, 1134, 1143, 1149, 1154, 1158, 1164,1166, 1167, 1184: n = A,T,C or G
ntatnnttnnttttgnattaannttttntttnnnanttattntnnaanttttncgnaaaattnntttntnatnttntntcnngnntggtgtngantanactctttnntntnctataaggcgaattggactccaccgcggtggcggccgaggtacttggcctcgctgatccgttccgtggtcgccctgcanancctcatcaanaanaaaattgccnnccgggatgcagagaagaaagaagggcaggagaaaagaagagagcaaaaaggataggaaagaggacaaggagaaagatnaagataaggaaaagagtgatgtaaaaaaaaaaanaaanaaaananataaagtacctgcccgggcggccgctctanaactagtggatcccccgggctgcaggaattcgattttcaancttatcgattccgtcnacctnnaagggggggggccccggtacccancttttgtttcccttttangtgaggggttaaattgccgccccttggccgtaaatccattgggntcattangctgtttttccctgttgttggaaaaatttgtttnttcccggcttnaacnaaatttcccccactaaaccatttcccgaaanccccggggatnccnnttaaaaannnnttttaaaagcctttgggggnnggccntttnnttgnggggtganccntaaacctccannanttttaantttggcgggttggggngncttccantttngccccngctttttttccaannttggggggaaaaaacctgntcnttncccnaactntngnttttaaannnnaaanttgggccaaanccccccccgggggnaaaaanggngggtnttttncctttntttggggccccntttttcccgctttttntttgntttnnaantnaacnnttaggtntnnnccntnngggncnttttcngntttttcnggcngannngggttttttaacntttncttnaaaaagggnggggtaattnncggggtttttccancaaaaattttnnggggnnttanccccngggnaaaaaacanttttnnncccaaaaagggncccccaaaaanggcccnantgaaccnttaaaaaaggggccccntttnantngncgttttttccataaaggttnnccccccccntttttngagtntttnaaaaantnntcccctttatttttaangggggg

SEQ ID NO: 6771 - DNA, 1341 bp, Homo sapiens
  misc_feature 2, 4, 5, 6, 7, 12, 14, 15, 17, 18, 19, 20, 21, 22, 24, 25,28, 30, 31, 34, 36, 38, 40, 43, 44, 48, 49, 53, 54, 55,56, 57, 59, 61, 63, 64, 69, 70, 71, 72, 73, 74, 75, 81,82, 83, 84, 86, 87, 88, 89, 90, 93, 95, 96, 101, 102, 103,104: n = A,T,C or G
  misc_feature 105, 106, 107, 109, 110, 115, 118, 122, 198, 202, 204, 217,218, 219, 220, 221, 224, 226, 290, 391, 436, 447, 449, 464,483, 493, 515, 519, 530, 531, 546, 547, 548, 554, 565, 568,576, 581, 591, 594, 603, 608, 611, 619, 628, 632, 633: n = A,T,C or G
  misc_feature 634, 636, 638, 639, 640, 656, 665, 666, 670, 675, 691, 692,705, 706, 718, 719, 727, 729, 730, 749, 758, 760, 761, 770,778, 789, 796, 798, 799, 808, 812, 816, 818, 819, 828, 830,832, 837, 844, 845, 852, 856, 865, 881, 882, 903, 912: n = A,T,C or G
  misc_feature 915, 919, 923, 929, 934, 936, 937, 946, 961, 966, 969, 973,977, 981, 982, 988, 991, 997, 999, 1007, 1015, 1016, 1017,1018, 1022, 1023, 1036, 1039, 1041, 1042, 1047, 1049, 1052,1053, 1056, 1061, 1070, 1071, 1074, 1077, 1081, 1083: n = A,T,C or G
  misc_feature 1088, 1089, 1091, 1109, 1132, 1136, 1137, 1144, 1146, 1148,1153, 1157, 1162, 1171, 1172, 1173, 1181, 1186, 1192, 1199,1203, 1209, 1211, 1220, 1221, 1224, 1229, 1232, 1237, 1238,1239, 1241, 1244, 1247, 1256, 1257, 1258, 1259, 1265: n = A,T,C or G
  misc_feature 1267, 1270, 1271, 1272, 1273, 1278, 1298, 1301, 1305, 1310,1314, 1324, 1327: n = A,T,C or G
cntnnnnaattntnngnnnnnntnnatnannctntntntnaanntggnncggnnnnntnantnnatttnnnnnnntgtttnnnnannnnnagncnnggggnnnnnnnanngaatntcncttnctttagggcgaattggagctccaccgcggtggcggccgcccgggcaggtactgctccactgttgatggcatctacntaanancaccaccaaaaannnnnaancnctttccagtgacaatgattccctctctcagggtcttggtctttgcatgggtgaaagatataagnaacagaagttgtcctgattgcataaagggaaatgcccttttcccaagaatttttctttcttggccactttcggtcccatattgaattttaaaatatttgcntttggtccatttttgttagggccccggtccaaaaagaccaaaaanccacctttccngntttttccgggaaagnaaaatggcccctggattanccacctcttncttaagggccattggtttttgnaaanttttttggaanntttttgggggaattnnntttggnccttgggaaantcnagcttttncaaanggccattttnttnccaaggttnccccnttnggggcccncttttttanaaannntnannngggaattccccccccnggcctttgnnaagngaaantttcccaaatttttcnnaaacccttatatnncgatataccccnngcccaaancnnttcaaaggggggggggggncccccgggntnnccccaaacntttttttnggtttcccccnttttaanannggaaggggngttnaaantnnccccccccntntnggccngaaaaannaaatggngccnaaaagcctngttttcccttttgggnnaaaaaatttgtttttcccccnttccccaanttncccncccnaacaanttccnanngccccgggngacccaaaaaatatngtttnaanaccncggngggnnccctcnctngggggngngacccccncccccccnnnntttnnttgggggtttggnccnannatgtncnctnnttnttaanaaatgggannaanacncccntnttgtnngncccctcctgttattaaantaaatccccccccccccccccgngaannaggggcncntnctttnatanataanggctccttnnnttattttntatcntaaaantatatantatnttaaanancttggtgtnngtnatatnttnccggnnnanacntgncgtctattnnnnctcttnanatnnnngggtngttttccgattttttcttcnaancacntaggngtangcccccgtgnaanaaactctgtgttgg

SEQ ID NO: 6772 - DNA, 409 bp, Homo sapiens
gaatacgactcactatagggcgaattgggccctctagtatgcatgctcgagcggccgccagtgtgatggatatctgcagaattcgcccttagcgtggtcgcggccgaggtacgcgggtagttagcatcagttgtcaccaacagtctttctgcaaagggcaggagagctttgggggaaaggaaaaggcttaccaggctgctatggtcaactcttcagaaattttcagagcaatctaaaagcgccaaaattcgctatgtttacagtgatactattaagaaaatgaatgtgattctgctctgtctttttaagtatgatcaaataaaaaatttgtacctgcccgggcggccgctaagggcgaattccagcacactggcggccgttactagtggatccgagctcggtaccaagc

SEQ ID NO: 6773 - DNA, 1265 bp, Homo sapiens
  misc_feature 3, 5, 7, 9, 11, 12, 14, 34, 37, 38, 39, 41, 43, 47, 49, 51,54, 61, 62, 66, 69, 74, 82, 83, 88, 89, 92, 93, 94, 100,109, 113, 121, 142, 164, 187, 199, 200, 202, 222, 226, 293,296, 327, 359, 398, 454, 477, 479, 482, 485, 504, 527: n = A,T,C or G
  misc_feature 533, 577, 586, 594, 597, 604, 612, 617, 630, 643, 651, 652,653, 654, 655, 664, 668, 674, 678, 680, 684, 686, 695, 713,716, 717, 724, 727, 728, 744, 751, 762, 769, 771, 774, 779,789, 793, 799, 802, 819, 826, 828, 830, 831, 840, 846: n = A,T,C or G
  misc_feature 848, 853, 854, 859, 875, 879, 888, 891, 892, 894, 898, 915,919, 925, 927, 929, 930, 932, 939, 940, 947, 948, 949, 959,962, 963, 970, 977, 980, 994, 996, 1000, 1001, 1014, 1015,1019, 1023, 1027, 1028, 1033, 1035, 1036, 1039, 1042: n = A,T,C or G
  misc_feature 1043, 1045, 1054, 1059, 1060, 1063, 1064, 1065, 1069, 1070,1089, 1091, 1093, 1101, 1102, 1107, 1108, 1115, 1117, 1126,1128, 1129, 1138, 1141, 1142, 1144, 1145, 1151, 1155, 1157,1167, 1171, 1172, 1174, 1176, 1181, 1190, 1191, 1192: n = A,T,C or G
  misc_feature 1196, 1201, 1205, 1206, 1208, 1216, 1218, 1219, 1222, 1227,1239, 1245, 1254, 1255, 1264: n = A,T,C or G
ctntntncntnngnaaatcgttgggagtattaangtnnngnangatngngnggnaattttnngggntanatttnttattttnntagcnnggnnnattaanatacctatncttntcctatanggcgaattggagctccaccgnggtggcggccgcccggcaggtncgcgggcgaacaatgactaatcnagctgacgctgnngnacaaatgaaaaccatacacnttcnctaaaggacgaacctgatctcttatactaggtatccttaatcattttttattgccacaactaacctnctnggactcctgcctcactcatttacaccaaccncccaactatctataaacctagccatggccatncccttatgagcgggcgcagatgattataaggctttcgcntctactgaatttaaaaaaattgcccttaggccccactttcttttaacccaacaaangggcacaactcttaccacccccncnttnatntcccccattaccttaaggntaatttaattcggaaaaacccantccagnccctaaccttcaattttcaaaacccaaaattaagccccttgggncccggttancccttctnggncccgggnttctttangaaancttaaggttgggnattccccccccgnggggcttnnnnnaggggaaanattncggatnaatncnaaangncttttattncggattaccccgggtccngannccttttntanngggggggggggccccncgggtanccccacgaccnttttttngnttnccccnttttaaagtnggangggggnttnaaaattgggcgccgccntttgggncngnnaaaatacantggggncnaatannacctnggtttcccttgtgggngaanaaaatgggntanntnccgncttcaacaaattttccnccanctaaanantnncnaaagtcnnggggggnnnatttaaagantgnntaaaagncctgggnggnggcctcttttggangngganncctacaccttccnnattnaaanttgnngctangnngcntanntntggcccggngtttnntcnnngttnngggaaaaccttggggattngncnaattggannttaanngaaaatngngcccaaaancnnccggggganganngnncggttntttnantattttgggnggtnntntntcggnttatatttnnngctnatggntttnngnttgggctntnntangttcntggttttgagcntaattngtaattaanntttctctang

SEQ ID NO: 6774 - DNA, 1396 bp, Homo sapiens
  misc_feature 21, 34, 43, 45, 51, 60, 137, 149, 256, 274, 305, 352, 421,471, 560, 597, 609, 637, 644, 685, 696, 775, 781, 782, 786,862, 905, 925, 947, 972, 997, 1041, 1052, 1083, 1103, 1109,1111, 1118, 1132, 1142, 1156, 1186, 1192, 1203, 1208: n = A,T,C or G
  misc_feature 1212, 1217, 1232, 1236, 1239, 1246, 1263, 1270, 1274, 1280,1284, 1285, 1287, 1290, 1294, 1304, 1307, 1310, 1317, 1323,1325, 1328, 1338, 1345, 1354, 1361, 1363, 1367: n = A,T,C or G
gggccgaaaaatttgggaagnccttccaccccgncggggttgngnccgggnctccgaagnggttaccgcccgggggggggaaagggggttccggttggaaaaaaaaaaaaaaaaggggtctttggggtggaagggtngccccgccccanttttcaatcctggtcccttcaatttcttcttggcgccctttttcggcaagaagcttttcccaagccaagccgggtattgttttggggcccaagaagcattcccaagnagggtttcaacaaacccntctggttgggtccccgttaggggaagccacnttattgaaggggagggggccccttgggggaaaggaaattttgcccantttttcaagttgggaaaaaaacaaaagttgggtccggttaccttaagccttaaaggaatggtggttttngttaacccttgcccccgggggccgggccccgcttctaagaaacttaagtnggggattcccccccgggggccttgcaagggaaatttccgaattatccaaaggcctttatccgaattaacccggttccgaacccttccgnaaggggggggggggcccccggggttaccccccaagcnttttttggtttnccccttttttaaggttggagggggtttnaaatttnggccgcccgccttttgggccggttaaattccaattggggtncaattaagccntggtttttccccttggtggttggaaaaaatttggttttaatccccgcttccaaccaaatttcccaccaaccaaaaccanttaccnnaagnccccggggggaaggccattaaaaaggtggttaaaaaaggcccctggggggggtggccccttaaaattggaaggttngaaggccttaaaccttccaccaattttaaattttggccgtttnggccggccttcaactttggnccccggctttttttccaagttncggggggaaaaaaccccttgttccnttggccccaagcctttgccattttnaaattggaaaattcggggcccaaaacccccccccggggggaaanaaaggcccggntttttgcccgttaatttgggggccgccttcnttttccggcttttccctttngcttcnanattgaantttcggcttggcgncttccggggnccgttttccgggcnttgccggggccaaaaacgggttatttaaancccttnactttaaaaangggcngggnaaatnacccggggttttttnccanaanaaaatcnaggggggattaaaaccnccagggnaaanaaaaanattnntntangccnaaaaaagggnccngcnaaaaaangggccnanggnaaacccgttnaaaaaangggcccccnttttctntnggcnttttttttcccaataagggccccccccct

SEQ ID NO: 6775 - DNA, 1041 bp, Homo sapiens
  misc_feature 193, 195, 201, 205, 211, 213, 216, 229, 231, 232, 233, 234,237, 239, 243, 248, 252, 254, 260, 261, 263, 264, 265, 266,267, 271, 273, 275, 276, 282, 285, 290, 299, 300, 301, 310,315, 316, 317, 320, 328, 330, 333, 336, 337, 341, 343: n = A,T,C or G
  misc_feature 349, 351, 352, 353, 357, 359, 363, 372, 373, 376, 377, 378,386, 387, 388, 390, 391, 400, 403, 406, 407, 409, 415, 417,418, 420, 422, 424, 429, 430, 434, 435, 436, 437, 444, 446,451, 454, 462, 467, 468, 470, 473, 477, 479, 485, 486: n = A,T,C or G
  misc_feature 490, 491, 492, 495, 496, 498, 499, 501, 502, 504, 509, 512,520, 523, 524, 526, 530, 533, 540, 541, 546, 547, 551, 558,560, 562, 563, 566, 580, 583, 588, 595, 600, 602, 607, 608,613, 614, 618, 620, 625, 627, 631, 634, 637, 638, 641: n = A,T,C or G
  misc_feature 642, 643, 650, 655, 657, 660, 664, 673, 674, 677, 680, 682,684, 688, 689, 690, 692, 696, 698, 699, 701, 707, 712, 716,721, 723, 725, 727, 728, 730, 736, 737, 739, 744, 747, 749,751, 759, 763, 764, 765, 769, 775, 778, 780, 783, 803: n = A,T,C or G
  misc_feature 804, 809, 812, 813, 815, 818, 823, 827, 828, 830, 837, 850,853, 857, 860, 869, 873, 878, 879, 886, 898, 903, 904, 905,908, 910, 912, 914, 917, 918, 922, 927, 928, 934, 938, 939,941, 947, 954, 955, 958, 965, 966, 974, 977, 981, 982: n = A,T,C or G
  misc_feature 987, 992, 993, 994, 995, 1000, 1003, 1008, 1011, 1020, 1025,1028, 1036, 1039: n = A,T,C or G
ctatagggcgaattggagctccaccgcggtggcggccgcccgggcaggtaccatgacgaagaaaaggaataggttgtttgtaaaataaatgttaaagataagtaactattacccatttctccaaccagtatacttgactttgagtgtttgctccagagttgaggggatggagagggatgtgtatgtatgtagncncccgtncatncgcttnantangacaccttgcgcntnnnnttngnacanaccanctcngnggttgnnannnnntttncngnntcgggnttntcccncttacagannngataaccanggtgnnnctncatacccncnccnctnngggntnctcctnannntacncncccntttttcccnntannntgattgcnnncnncctgtattnctngcnnanactttntnnantncnttggnncaannnncctgtgngnccccntgncacctttnttttnncnccnctcnancccccnncctnnnatnnannanncngtggnctnccccattnggnntncccnggnattaccnncctcnntttncctcccnantnncancctttcccttttangcnttttnttataantttangngggannccccnncctngnccttncnccgntanttnnctnnntttcaantcccngnttngtcncctctgcanntanccntntnttgnnntntgtncnncnttcacnccctncttntttgntntncnncnttcatnngnatcgnccncngncctccccncccnnntcgntcgatntangngtntattcttctatccccctccnncttcnatnncntgngtgcntccnntntcaccantttatattaaatnccntcanaantacgggggnttcnttatnncccatanacccttttattngttcnnntancngntngannctcnctctnnaatttntttnntnttggcntcctctnnccnccataannttcctttnttngttnntgccnaaatnnnngtttnccnccttnacncgtccgctnttcangcntttactcnttntc

SEQ ID NO: 6776 - DNA, 1200 bp, Homo sapiens
  misc_feature 2, 9, 10, 11, 19, 20, 29, 32, 34, 36, 39, 48, 50, 51, 54,56, 59, 60, 61, 62, 65, 68, 70, 73, 74, 75, 76, 83, 84,85, 87, 90, 91, 92, 96, 100, 103, 111, 216, 228, 485, 493,494, 506, 543, 551, 562, 570, 577, 591, 597, 602, 638, 653: n = A,T,C or G
  misc_feature 655, 660, 670, 683, 685, 698, 699, 700, 715, 722, 723, 730,739, 742, 746, 749, 768, 775, 777, 780, 804, 818, 843, 853,860, 873, 877, 892, 906, 908, 923, 937, 944, 945, 949, 958,961, 963, 966, 967, 975, 980, 981, 991, 1007, 1008: n = A,T,C or G
  misc_feature 1009, 1015, 1023, 1024, 1034, 1036, 1047, 1053, 1059, 1060,1063, 1064, 1069, 1070, 1072, 1082, 1084, 1085, 1090, 1094,1098, 1104, 1109, 1116, 1122, 1127, 1136, 1140, 1143, 1154,1162, 1169, 1177, 1179, 1181, 1184, 1198, 1200: n = A,T,C or G
tnccgacannntttttctnngttaaattnttntntnatnattatgggnanntanantgnnnnaanatntnttnnnnaattttnnntnagnnngggngagntgnacaaattngactcactatagggcgaattggagctccaccgcggtggcggccgaaggacttaggagtcggggagggccccgcgtacctgcccgggcggccggtctagaactagnggatcccccggnctgcaggaattcgatatcaagcttatcgataccgtcgacctcgagggggggcccggtacccagcttttgttccctttagtgagggttaattgcgcgcttggcgtaatcatggtcatagctgtttcctgtgtgaaattgttatccgctcacaattccacacaacatacgagccgggagccataaagtgtaaagccttgggggtgcctaattgaggtgagcctaactcacatttaattgccgttgcgctcaactgcccngctttttnncaggtccggggnaaaaccttgttccgtgcccaagctggcatttaaaatngaaattcngggcccaaccnccgccggngggaagnagggccgggttttngccgtnatttnggggccgccttcttttcccgccttttaccttcggcnttcaacttggacctncngcttnccggcttccngggtcctgtttcngnggcttggccggcnnnaaggccgggtaattnaagcctnnaacttcnaaaaggggncgnggtnaantaccgggtttatttccacnaagaaantncanggggggatttaccccaaggaaaangaaacattgttgantccaaaaagggcccaacccaaaaangggccagtgnaaacccngtaaaaaaaaggncccntccgtttggcttggncggttttttttccnantaagggcttcccgtncccccccctttacngagccanntacnaaaaaaaantcngnacnncctcaaantttannaaaggtgggncgaaaaacccccgaannnggaacnttttaaanngattaccccntnggccgttttcncccctngaaaannttnnccttnntngccctttttntnntttcngaancttngcccgnttttncccggtnaccttntcccngcttttttncccnttncggggaaagcngggggganttttttnaaaaaacntnantcntgttagggattttnan

SEQ ID NO: 6777 - DNA, 1220 bp, Homo sapiens
  misc_feature 3, 9, 10, 14, 17, 18, 21, 22, 26, 33, 36, 37, 39, 40, 45,49, 54, 55, 65, 67, 79, 82, 83, 85, 91, 94, 97, 99, 101,103, 111, 122, 124, 133, 134, 150, 185, 193, 194, 201, 202,203, 207, 210, 239, 306, 343, 351, 360, 402, 403, 407, 409: n = A,T,C or G
  misc_feature 418, 438, 451, 467, 469, 475, 483, 490, 516, 526, 540, 560,569, 582, 584, 610, 619, 621, 635, 644, 651, 662, 674, 706,709, 732, 736, 737, 738, 745, 748, 752, 753, 759, 773, 774,778, 782, 788, 792, 797, 804, 807, 820, 828, 837, 839: n = A,T,C or G
  misc_feature 843, 844, 846, 850, 854, 856, 863, 869, 870, 871, 876, 887,891, 896, 897, 898, 905, 908, 912, 915, 918, 919, 930, 935,937, 938, 951, 956, 975, 976, 981, 983, 984, 987, 988, 993,997, 1001, 1003, 1007, 1009, 1016, 1018, 1019, 1028: n = A,T,C or G
  misc_feature 1034, 1036, 1047, 1048, 1051, 1053, 1054, 1065, 1070, 1072,1077, 1080, 1083, 1105, 1113, 1116, 1119, 1120, 1123, 1128,1134, 1140, 1141, 1143, 1151, 1152, 1156, 1157, 1161, 1164,1171, 1172, 1176, 1182, 1190, 1194, 1195, 1197, 1210: n = A,T,C or G
  misc_feature 1215, 1216, 1217, 1220: n = A,T,C or G
ccnacttannattntgnngtnntttntttaatnttnntnnggttnaaanttgtnngaatttgttntnataatatttttnagnntngggggntanttntncnantcactatngggcgaattgnanctccaccgnngtggcggccgcccggncaggtaccttccccgagatggtggataaacttatnttactggnnacgccgnnnttantantggaatcagatgaaatggagaacttgctnacctacaagcggagagccatagagcacgtgctgcaggtagaggcctcccaggagccctcgcaccgtnttcagcctgaagcagctgctgcagaggttacttgaanagcaatanccacttgantgaggagtgcggggaagcttctcctgcaaaagaggaaccacnnaaangntggcacacnaggtcctgggttctgaacangaagtaccatganggcttcgccccttggngncaggangaaacaancaattgnacttttcatcaagccaggggagcctnttgttgcccncatttccattcagnggaaaagcttgccaagggcncccttggtnccttgtttggaancnaaaaggcaaagttccaacggggattntttttttgnantttccaaggaacanaaattttancttcttntaaggaaaggnagtttccccctngttccggtttcaattggaattagggaccaccntanttgaaaaatttccccccccttcnaaannngaaagcnaantttnncaaggntttttgtgggaaanntttnccangggccnaaantcaancttgttngtncccaacattgaanccgaaaanccccccaancnaccnntngggnccantntattaantcaaannnttccnttttatttacnaatnggcannnacaacanttncttnccnaannccccaaacatnttaancnnttttggggccttnggaancttttgaaaaaaaccctanntggcntnntcnnaaaantaanaaantngggnantttttgngnntttcttgangccccncncattaaaaaanngcnannggtattggtgnggggnanaaggnccnccncttatttttttggagggccccnccctctangtntgnnttntcttngggggnaaagtnncnctaatttnnctanntttnaanttttgtnnggancctttnaaaagggnatanntnttttttgggtttnctagnnnttn

SEQ ID NO: 6778 - DNA, 1277 bp, Homo sapiens
  misc_feature 3, 7, 9, 18, 21, 24, 26, 30, 33, 36, 38, 43, 44, 45, 47,48, 49, 51, 53, 54, 59, 61, 64, 69, 77, 78, 79, 85, 86,89, 91, 92, 93, 98, 100, 101, 109, 199, 201, 202, 205, 215,218, 219, 220, 230, 271, 289, 295, 298, 310, 317, 366, 389: n = A,T,C or G
  misc_feature 412, 435, 453, 455, 473, 474, 480, 504, 507, 508, 529, 530,538, 547, 548, 551, 554, 564, 575, 579, 580, 581, 596, 601,602, 614, 615, 623, 630, 636, 639, 643, 670, 679, 680, 683,693, 695, 704, 707, 714, 716, 717, 727, 730, 734, 746: n = A,T,C or G
  misc_feature 751, 752, 760, 762, 767, 768, 770, 773, 780, 786, 790, 791,796, 799, 810, 813, 814, 824, 826, 833, 836, 841, 843, 844,845, 846, 850, 852, 873, 880, 883, 884, 888, 894, 898, 913,920, 921, 922, 935, 940, 944, 953, 956, 967, 975, 976: n = A,T,C or G
  misc_feature 979, 984, 988, 989, 990, 993, 996, 997, 998, 1001, 1003,1007, 1018, 1021, 1024, 1030, 1038, 1041, 1058, 1059, 1063,1073, 1085, 1086, 1093, 1103, 1104, 1105, 1106, 1111, 1116,1122, 1124, 1143, 1146, 1147, 1150, 1151, 1161, 1170: n = A,T,C or G
  misc_feature 1173, 1181, 1194, 1200, 1203, 1204, 1205, 1207, 1209, 1212,1213, 1227, 1229, 1237, 1239, 1247, 1254, 1258, 1260, 1262,1263, 1265, 1272, 1273, 1274, 1275, 1277: n = A,T,C or G
ttntcanantttttattnatnttntnattnttntgnanaaacnnnannntntnnttttncntgnctgtntatttttnnnattatnnttngnnngggananngcaaaaangactcactataggcgaattggagctccaccgcggtggcggccgaggtacgcgggtgaaggattatgtgctggccgtggaggcgtgtcatngnnggntatcaagaanaannnaaatctttanccccagctgctcagcggcatcggccgctctagaactagtgnatcccccgggctgcaggnaattcnatntcaagcttatcnataccgncgacctcgagggggggcccggtcccagcttttgttccctttagtgaggngttaattgccgcgcttggcgtanatcatggtcataagcttgttttncctgtgtcgaaatttgttattcncgccttcaccaatttccnanaacaaaactattacttanncccggnggagccattaaaagttgttaaaangcnntgggggggtggcccttaaatnnaagtttgnaaggcctannacntcnaccattttanattttgggcgntttnnnggccttcaacttgcncccgnnttttttcccaannttcctggngaaaaancccttnttntgtngcccaagccttggcaattttaaaatgnaaaatttcnnggncccaaacttncngccggtgtnaantaagggncnntgttttttgnccnttanatttgggggccngcttnncttttacngnctttnncnttngggcttnaccttngaanntttgngcntgttggctttnggnntccggttaangncattgcnggncgaanannnnggtntnctattctttcaaccttttaanaaggggnggnntaanatttcngggntttattcccaccaantaaatcnnnggggggattttanccccncggnaataggaanctnttttgtaggcnaaaaaagnnccncccanaaannnggnccnnnganancccngaaaaaatggnccncgngcttanattgggcngtnttttttcccttagtggnnaaanctcgctcgcncttgatgtgggnnttaatanttttagaaannnntcgcntcaanataaananggtgggcacaaaaatcccntgnnatnncgctctttanttattcccntgncgtatttnttctcctggaaanactctnctnnntntnacnntcttttttttttcncngcctttancnttttattnggaatancatntngnngngtttttnnnntn

SEQ ID NO: 6779 - DNA, 1234 bp, Homo sapiens
  misc_feature 2, 5, 6, 14, 25, 26, 35, 41, 42, 43, 44, 45, 48, 55, 56,61, 64, 73, 74, 82, 84, 96, 97, 99, 101, 103, 109, 111,129, 146, 148, 164, 168, 171, 185, 186, 193, 199, 210, 211,214, 215, 217, 269, 274, 276, 295, 304, 331, 395, 402, 407: n = A,T,C or G
  misc_feature 412, 414, 415, 425, 426, 457, 461, 462, 477, 480, 488, 491,494, 527, 566, 582, 587, 591, 599, 606, 610, 618, 619, 640,647, 649, 653, 654, 660, 662, 666, 670, 671, 672, 690, 738,751, 767, 768, 777, 793, 795, 808, 815, 816, 817, 818: n = A,T,C or G
  misc_feature 819, 829, 832, 833, 837, 838, 839, 854, 857, 860, 861, 865,866, 868, 874, 876, 880, 887, 889, 895, 898, 904, 908, 911,922, 930, 953, 955, 956, 961, 976, 983, 996, 997, 999, 1001,1011, 1015, 1016, 1030, 1031, 1037, 1041, 1045, 1046: n = A,T,C or G
  misc_feature 1055, 1056, 1059, 1060, 1073, 1083, 1085, 1089, 1092, 1094,1098, 1100, 1106, 1112, 1115, 1119, 1123, 1124, 1129, 1131,1134, 1135, 1147, 1168, 1171, 1175, 1198, 1204, 1206, 1208,1209, 1211, 1220, 1221, 1222, 1227, 1230, 1232, 1234: n = A,T,C or G
anctnntttttttntttgtctgtanntatgttttnataatnnnnnggnatatttnntttgntanttttttttnntacctagntnagggaaatatgnnancnantacttntnactatagggcaaattgcngctccaccgcggtggcngncgatgtacctgatttnattngcngttttcatcctaanncctgggnaatggnacaaaaaaaannaanntnttttttggccaggaatcgcttaatcctgaaagtcttgtgagaagacatggcnagcancngagtcaagaacacaccacnatggcgganaaaggaagagccccgcgtacctgcccnggcggccgctctagaactagtggatcccccgggctgcaggaattcgatatcaagctttatcccntacccgncaacncttcnanngggggggccnnggtccccccagcttttttgtttccctttaantgannggatttaaatttgcngcnccttggcngtnatncattggtccattaggcttgtttttcccttgttnttgaaaaatttgttttattcccggctttcaccaattttnccaccaacaaaaccantaacngaanccccgggnggaagcnattnaaaggttnnttaaaaaggcccttggggggntgccccntnaacnngggggngngaangcgnnnaccttcaccatttaaatntggcgtttgccgcctccaaccttgcccccggcctttttaccaaagatncttggaaaaaacncctttctcgttgcccnnggcctggcnattttaaatgaaaatncngggcccaaaaccnccccccnnnnnaagaagggcnggnntttnnnggttattttttgggnccnccnntttnncngggggntntaanccccccntnaaaaanaanttcctntttnccncctccggggtncggttttngggctttgcgggggcccaggccngnnatttnataacttgacccccngagtggncgggggtcttttnntngnttttaattcncacnnaactcccccggggnnataaancccnttgnnaaaaaaatnnctnntgtatcctaaaanggctcaatcnanaagnggncnttcngncccccngataanaangggncccnntttgntnggnngatttttccccntaaggtttccccccccccttnccntggnttttccaaaaatttcgccctctncagaanananngngggggatannnccccncgnantn

SEQ ID NO: 6780 - DNA, 866 bp, Homo sapiens
  misc_feature 687, 688, 702, 729, 742, 744, 763, 769, 770, 784, 796, 813,820, 824, 825, 839, 841, 844, 845, 849, 854, 856: n = A,T,C or G
gactcctatagggcgaattggagctccccgcggtggcggccgaggtactttaaatttagtggttgctggagcacctaaaagtcagattgtcatgtcggaagcctctgcagagaacattttacagcaggacttttgccatgctatcaaagtgggagtgaaatatacccaacaaataattcagggcattcagcagttggtaaaagaaactggtgttaccaagaggacacctcagaagttatttaccccttcgccagagattgtgaaatatactcataaacttgctatggagagactctatgcagtttttacagattacgagcatgacaaagtttccagagatgaagctgttaacaaaataagattagatacggaggaacaactaaaagaaaaatttccagaagccgatccatatgaaataatagaatccttcaatgttgctgcaaaggaagtttttagaagtattgttttgaatgaatacaaaaggtgcgatggtcgggatttgacttcacttaggaatgtaagttgtgaggtagatatgtttaaaacccttcatggatcagcattatttcaaagaggacaaacacagggtgctttgtacctgcccgagccggccgctctagaactagtggatcccccgggctgcagggaattcgatttcaagccttattcgataccgtcgaccctcgnnggggggccccggtncccaactttttgttcccctttgtggangggttaattgccncnccttggcgtaattcatggnccatannttgtttcctggggnggaaaatggttntccgttccccaattccncccaacntacnnagcccggggagccntnaannggtnaaagncngggggggccg

SEQ ID NO: 6781 - DNA, 1156 bp, Homo sapiens
  misc_feature 1, 6, 7, 11, 14, 18, 19, 21, 22, 23, 24, 26, 28, 30, 33,34, 35, 36, 37, 41, 42, 46, 48, 52, 53, 54, 57, 58, 59,60, 61, 63, 64, 67, 72, 73, 74, 76, 78, 79, 80, 81, 82,86, 87, 88, 89, 91, 92, 93, 95, 96, 97, 98, 107, 138, 451,579: n = A,T,C or G
  misc_feature 588, 612, 613, 622, 626, 636, 659, 692, 703, 713, 715, 719,745, 746, 747, 774, 777, 786, 787, 807, 809, 810, 815, 829,833, 844, 846, 855, 858, 863, 872, 875, 880, 888, 897, 903,904, 915, 916, 917, 920, 930, 944, 947, 954, 958, 971: n = A,T,C or G
  misc_feature 972, 974, 990, 996, 1002, 1006, 1012, 1014, 1016, 1019, 1021,1029, 1035, 1037, 1038, 1053, 1054, 1059, 1065, 1067, 1084,1085, 1087, 1092, 1093, 1096, 1099, 1101, 1106, 1114, 1119,1120, 1122, 1126, 1127, 1131, 1132, 1139, 1140, 1141: n = A,T,C or G
  misc_feature 1144, 1146, 1147, 1150, 1154: n = A,T,C or G
ntctcnncatnctnattnncnnnntntnanttnnnnntggnntttnangtgnnngtnnnnntnngtnacagnnngntnnnnntttnnnntnnntnnnnggcccgtancgtatacgactcactatagggcgaattgganctccaccgcggtggcggccgcccgggcaggtacaagcagctcttcttagggggtgtggatcggcataagcagttctggcgctactttgctggtaacctggcgtccggtggggccgctggggccacctccctttgctttgtctacccgctggactttgctaggaccaggttggctgctgatgtgggcaagggcgccgcccagcgtgagttccatggtctgggcgactgtatcatcaagatcttcaagtctgatggcctgagggggctctaccagggtttcaaccgtctctgtccaaggcatcattatctatagnagctgcctacttcggagtctatgataacttgccaagggggatgcctgccttgaccccaaggaaccgttgcacattttttgttgagctgggattgattgccccagaagtggtgaccggcatgtcgcaanggcctggtntccctacccccttttgacacttgnntcgtcgtanaaantggattgatncaagttcccgggccgcctctaanaaaccttagtggggaatccccccccggggcttngcaaagggaantttccgaatnantcanaggcctttattcgaattacccggtcnnnaccctcccaaggggggggggccccccnggnacccccaanncttttttgtttccccttttntnnttgangggggttaaatttngcgnccccctttggncngttaaatcnaanggggncattaaacntgngtttnccttgtgntggaaaaanttggtnnttcccgcttcnnnaantattcccacnaccaaacaatttcnganaccccgngggnagcccattaaaanngntttaaataccctgggnggtggncccctnttcntgagtngnanctntncccccacntttaananngggggctgagggcanncttcntgccantnttttgtatagaaggggnnanaaatnngangtncncctcnacgactcntattnntnagtnnatanntgctccnnnccncnnggngggngg

SEQ ID NO: 6782 - DNA, 898 bp, Homo sapiens
  misc_feature 556, 569, 586, 598, 612, 628, 645, 672, 684, 688, 719, 730,738, 740, 750, 753, 754, 758, 763, 766, 769, 772, 775, 785,801, 806, 812, 820, 821, 822, 841, 845, 846, 847, 850, 861,867, 872, 876, 878, 879, 885, 888, 889, 893, 895: n = A,T,C or G
ctactatagggcgaattggagctccaccgcggtggcggccgaggtacattcatccctgacaaccaccagaacatagtggcagctttgcagggggtgtcatgtcatgggagattaaggcaattgaataccttactgatgaccgcctgcagagatggtgggtgtctctgggctctggcctacactgggctcttataatcataggtagcatagcaggaatattagtagtaggttgttgctctctttattgttgctgtggcctatgggtccagggtgctcccctatgtgcacgagttcccattaagaggacccccttggcctagggggcggagtgtaaggaacatggctgtgttgctgccaggcaggcataggccgaggtaaaaatcctgcatgacacagtgggattagagcacacgcgcgcaatcctgtgcctgatataatcacagctaggtagacataacacagagaagctcatcatttggctctcagccactatcatttgtgaggtgtacctgcccgggcggccgctctagaacttagtggatcccccccgggctgnaaggaattcgatntcaaagcttatttgatnccgtccacctcnaagggggggccccngtacccaactttttgnttcccttttaagtggangggttaaattgcgccgctttggccgtnaatcaatgggtncatnagcttgttttcctgtggtgaaaatttgttantcccgcttcanaatttccncnacaaacattnccnncccnggggngcnttnaanaantttaaaaccncggggggggccccaanagggnggcgcnccctcccnnntttttttgggtggggggcncccnnncgncctttttatantagggnaaaanattntnngccccnttnntttntntat

SEQ ID NO: 6783 - DNA, 945 bp, Homo sapiens
  misc_feature 6, 8, 15, 136, 388, 430, 442, 448, 464, 489, 491, 510, 524,555, 569, 612, 614, 644, 656, 660, 665, 669, 670, 689, 695,711, 723, 730, 735, 736, 746, 754, 782, 784, 798, 805, 808,812, 819, 829, 830, 836, 842, 847, 852, 855, 866, 869: n = A,T,C or G
  misc_feature 871, 878, 890, 894, 901, 909, 912, 913, 926, 928, 935, 941,943: n = A,T,C or G
gggtantntgacccncgtaatacgactcactatagggcgaattggagctccaccgcggtggcggcccgaggtacgcggggggagccggagccgcggaacgagccacagagaaaaaggttattggttggcagttcanccaatgagcgggcctgttactagtttgcggcatcctgtggtataggggaagcgctccgggtctggaatccctacgcgtccctttgggtttagcacgatgagctcaatcggcactgggtatgacctgtcagcctctacattctctcctgacggaagagtttttcaagttgaatattgctatgaaggctgtggaaaatagtaatacctgcccgggccggcccgctctagaactagtggatcccccgggctgcangaattccgatatcaagcttatccgataccgggcgacctcganggggggcccggnacccancttttgttccctttantgagggttaattgcgcccttgcgtnantcatggtcatagctggttncctggggtgaaaantgttatcccgctcacaatttcacacaaacantaccaagccgggancattaaaagtggtaaagccctggggggtggcctaaatggagtngngcctaacctcaccattaattggcggttgcngcctcacttggncccnttttncaanncggggaaaaacctttccgngcccanccttgcatttaaatgnaattcggcccanccccccnggggnnaaaggccggnttgccttnttttgggcgccttttttccctttccttngnttaacttgacttcnctttggnccncggncctttcnggttttcggnnaaaccngttttnaaacnttaanttnaaaaggccggntantnccggttnttccccaaaaancaanggggganaacccccnggnnaaaaaaaattttnanccaaaanggcctncnat

SEQ ID NO: 6784 - DNA, 910 bp, Homo sapiens
  misc_feature 526, 588, 590, 601, 624, 661, 670, 684, 688, 699, 719, 731,742, 750, 753, 767, 771, 772, 773, 777, 778, 779, 796, 798,799, 802, 803, 804, 811, 815, 823, 824, 832, 839, 845, 855,859, 865, 870, 871, 872, 877, 878, 884, 885, 887, 895: n = A,T,C or G
  misc_feature 896, 898, 900: n = A,T,C or G
gggcgaattggagctccaccgcggtggcggccgaggtacttctcagccagtgtgcaggcatcctcgaacaggacgtgccgcttttcccagaggtcacatttatttccaatcagcataatgaccacatttgcagctccatatttctctatctcatgaatccagtgagggatggactcgaacgtggaccgccgggtgaggtcataggcgatgatggctgcgtgggcactgcggtagtagctttgggtgatggtgcggaagcgctcctggccagctgtgtcccacacctgcatcttcacttttttgccgtcaatatcaagggaacgcacggtaaagtccactccaatcgtgttctgctgtgtctcaagtgtagactccagacttgaaatgctgcaccacacacgttttccccacattggaatccccaatgaggataatcttgaacaaatagtcaaagtttctcatctgctgccctggctgagctggagaagtgcatggttcttgccacctagaacagaactctgctggncggcaaggtaatgtttttcgctttttcttcttggggtttggctttttcaagccccccccagntngcccccctttnttttctccttggcctctgccccnctttgggtgggggaaagtggtaattcctggccccccnaggtgttcnggggttttggcgtncctngagaaaaagtnccccggcgttaccctgcccngggcgggccggntcttaaaaacnaagtgggnatncccccgggcttgcntggnnnttcnnntttcaaaagcttttttnannccnnnccacccncagngggggggnncgggttcncccacgnttttgnttcccttttnatanagggtnaattnnnccccnntggcgnnanttattgtnncntntttttttgtc

SEQ ID NO: 6785 - DNA, 1122 bp, Homo sapiens
  misc_feature 2, 3, 8, 9, 12, 13, 16, 19, 20, 21, 24, 25, 27, 28, 30, 31,32, 33, 34, 36, 38, 40, 41, 42, 44, 46, 47, 48, 53, 54,55, 56, 59, 62, 64, 66, 67, 68, 69, 70, 76, 77, 80, 81,83, 85, 86, 87, 88, 89, 90, 92, 93, 94, 95, 96, 100, 102,104: n = A,T,C or G
  misc_feature 106, 663, 683, 743, 762, 788, 802, 830, 840, 852, 882, 894,898, 919, 928, 929, 931, 937, 941, 947, 955, 958, 977, 978,986, 988, 996, 1004, 1010, 1014, 1020, 1034, 1035, 1038,1047, 1052, 1054, 1061, 1063, 1072, 1081, 1082, 1088: n = A,T,C or G
  misc_feature 1089, 1094, 1108: n = A,T,C or G
cnnctggnnttnnttnatnnnttnngnnannnnntntngnnntngnnngtgtnnnnttngantntnnnnnagactnnttnntntnnnnnntnnnnngggngngngngctatacgactcactatagggcgaattggagctccaccgcggtggcggccgcccgggcaggtactttgtggataagaaaatggaggaacacatctgatggagagtgggcatttgacaacaatggaacaggtaaccagcatgtaaaatcaaaatataagtgtctttttaagagctgaaagctgctgctggtcattcattaatgtgtcagacatttaatcaggatgctggaccttcaaaataactgaaaaaagaaccaagaaaaggcgtttttgttttcaacaaactttactaaataaccctggaaaggcaatgaaccgatctgacaatttaagctctaattgatttaaagcctcagcctaggaaagaaaagtgaggcattgacattatactgtcaaacgggagggttgaagggaggccagatttcctgggaaatgccaatggatcccaccaccatttgctttcaagggaggaaacctgccagacatatttttcaaggtcttgctaaagtaaacaacttgtttattttgttaatcaaataccatttggggaaaagtctngcctttgttagcctaaaggntcactgtggaccaccaggaaccaaccaggatggaaaaagggaaaaaagcccctggaacangcaaggaaaaaattacatnccccattccttcaaaaaagaattttnaagttgaacccagnttttaaaaaaaggaaaaaaaaaaatttngattcccggnccctttcattcntttttaaccaaaattttttttttccctttncccaaatatttntttncccaaattataaaaacccctngtggggagnngntttatnattnatttcnagtggcgnaanaaaaaaaaatttattaatnnggggagantngggggggnggtttttnaaacantaanggggantccccccccggggnnttncggggaatntcttnantttcacncnttttttcgntttcccccnnaaaaanngaagnggggggggggcccngttttttttttttt

SEQ ID NO: 6786 - DNA, 900 bp, Homo sapiens
  misc_feature 567, 597, 602, 613, 685, 711, 716, 723, 752, 757, 761, 773,779, 781, 784, 785, 786, 794, 797, 799, 804, 807, 809, 812,822, 824, 832, 838, 842, 844, 846, 850, 857, 862, 872, 873,882, 883, 888, 897: n = A,T,C or G
gaattggagctccccgcggtggcggccgaggtaccttgaatttcgaagacaacatcggcaagcatcggcttattaaggaaaaacttgagggaagtgttataaaaccacaaaggttttctggcttgataggttttgcaattccttaggcaattaatctttcctggtgtttttaaaatgcatttaactttctcgattacatttgaaacatccccagaatctttcaacttcttcctgatatcttcttccaattcttcccactgaaaagcacctgaataaatgaggcgaaggatgtctgataaacaagaacagaagagggcgtctttaacaacgactcgtaatggtgggttgcctgaagattcatggctagcacctggaaatgcagtatctctgtttatagcaaaaagatcctgggtagttcggatgatactggaatcctgaatgtcagtgggactcttcacattgaaaagcagcatgaaaacatggcttacagcgcagagaacgatcttgtgggcctctacaactttctttaaatcgggggttataaaaatcccacgtcccacaccactnggcagcagaaccagcaaggttattttaagncagangttattaatgnggaccgctttcagccctttttaagacaagggcattttttttcttgggttggttcaaagtttggagggggggncctaaattcccattgaaaagggaggntggcntcaattnttttcttttttttttaccttttttaaacnttggncctntgggaaaaaaangggttngnaannnataaaacnccncnaaccnctncnccncaaaaaaccntncccttttntgaaanagantnangggnggtgggnggggnaaaaaaaaanngggggcccnnccctntttttttcngct

SEQ ID NO: 6787 - DNA, 1271 bp, Homo sapiens
  misc_feature 1, 2, 6, 7, 8, 9, 10, 11, 16, 17, 18, 20, 21, 24, 25, 26,27, 29, 34, 38, 47, 48, 50, 53, 54, 55, 61, 63, 65, 72,74, 75, 82, 86, 89, 90, 92, 93, 95, 96, 98, 99, 114, 149,426, 436, 443, 449, 451, 460, 475, 522, 543, 567, 570, 585: n = A,T,C or G
  misc_feature 586, 592, 598, 616, 637, 638, 643, 650, 660, 671, 678, 696,699, 705, 713, 716, 720, 727, 734, 736, 739, 747, 749, 756,758, 762, 763, 782, 793, 799, 802, 805, 806, 810, 832, 843,845, 853, 859, 866, 867, 872, 885, 892, 899, 900, 904: n = A,T,C or G
  misc_feature 912, 915, 916, 919, 925, 926, 940, 943, 953, 957, 958, 959,969, 978, 981, 984, 985, 989, 996, 1000, 1010, 1011, 1012,1014, 1015, 1025, 1031, 1032, 1033, 1034, 1037, 1051, 1054,1076, 1078, 1079, 1089, 1095, 1098, 1108, 1114, 1118: n = A,T,C or G
  misc_feature 1119, 1120, 1125, 1129, 1143, 1145, 1148, 1154, 1167, 1169,1170, 1172, 1177, 1182, 1183, 1184, 1187, 1192, 1193, 1195,1200, 1201, 1214, 1220, 1227, 1237, 1241, 1251, 1254, 1256,1271: n = A,T,C or G
nncccnnnnnnttgtnnncnntannnntngtgtncgcnctgtgtgtnntntgnnntttttngntnagatgantnngacatanattnttnntnntnngnngagggggtgcgcggncgcgtactcactatagggcgaattggagctccacncgcggtggcggccgcccgggcaggtacgatgtgctgattagtgttgtctttgttggcactgacagtcttgcatggtcatatgccagtgtttttgctttagcttttctttgaataaaacagatttaaatgcatttagacaatacgtatttgtaagctgtttacatacactaaatttaagagattcaatattagagtttctttgtttccccgcgtacctcggcccgctctaggaactaagtggatcccccgggctgcaggaattctcatattcaaagcnttatcgattncccgtcngacctngnagggggggngcccccggtacccangcttttggtttcccctttaagtggaaggggttaaatttgccgccgcnttggccggtaatccattgggntccaataaggcttgtttcccttgntgntcgaaaaatttggtnntaattncccgcnttcaacaaaattttcccnaccaaccaaaaccattaaccnnaagcnccggggngaaggccatnataaaaagttnggttaanaaggccccttgggggggntgncccttnaaattggnagnttgnaaggccnttaaacntncancattttanantttgggncntttnncggccttcaactttgcccncgggatttttncccaanatnacnncggngaaaaaaccccttggttcgatntgcccaagccntngcaatttnaaattnaaaattnnggggnccaaaaccgccgnccggggnggaaaanngccnggtttttnccnnctnttttgnnggcgggccttcttnttncgacttttcncttnnngtttcacatngaacctcangcnggnncctnggggtcntttncgaggcttgnnngnngaaaccgggnatcacnnnnttnctttaaaaatgggnggngaaatttaccgggttattttcncnnagtaatttcnagtggngantattacgcgnaagggnaaannnaaaanaggnggagatcaaaaaangnccncccccnaaagagggagttnannancttanataannnggnccccnncnctttnnggagtttttttanataatnggacccncccccctccnttcngagactcttnatnanaaatttattctcttn

SEQ ID NO: 6788 - DNA, 892 bp, Homo sapiens
  misc_feature 7, 14, 60, 474, 547, 594, 608, 629, 658, 661, 708, 724, 725,726, 727, 731, 732, 733, 752, 773, 795, 796, 808, 815, 816,833, 834, 852, 856, 879, 882, 884, 892: n = A,T,C or G
ggggttntcctttnattccctcacttttggctaattgcagctccccgcggtggctgccgnggtacctttggtccatattgcataaccctgcccttctttgttgactgaggaaagctcgctccctgcccaggtttttcattgttgatcgaaattaacaccaggtggtgaatagagcccctcctaaggttgctcaggataaatcatttattaaataggtctgcttatcaggaggggccgtgaaggctcccaaaaggaaatgctggcacctgggcccagaagccagggcctctaactcctggggttgatttcttcagtgaaagttgcaccctacaaagggaatatggccaaagcggcactcaactgaaggctgatatcaggcgattagacagccatgcattctgcgtttgtctggaatggattgtagagagatggacttatatgaggactaccagtccccgtttgattttgatgcangagtgaacaaaagctatctctacttgtctcctaatgggaaatcatctccacccggatcacctacttcttcaanaaatttggtctgctgaaacaaacccagtccctgaggaaaggagaaanatgttgctgccacnatcagtgccccagaaaccctntcggaagaaggagcaggaagaagcttaanaanaaaacttgcaaaggtagaaaaaaaaaaatcccactctgtcttaaagngttagccagcaaaaannnnaacnnnttaccagagaatcaagccngaaaccttgggaatcaaattnttttcagggaacctaaaaccannaccattttgccnaaagggnnggcaaagacgggacaannaacatttggtttacaaanaaanaaatttggaaacctttttcccangcntnggaaaaan

SEQ ID NO: 6789 - DNA, 987 bp, Homo sapiens
  misc_feature 279, 292, 308, 339, 352, 354, 389, 391, 408, 410, 414, 426,434, 462, 473, 482, 483, 485, 486, 502, 506, 508, 510, 517,518, 526, 530, 531, 538, 548, 551, 560, 566, 568, 570, 572,575, 576, 577, 582, 585, 588, 589, 590, 591, 592, 597: n = A,T,C or G
  misc_feature 601, 604, 607, 609, 611, 615, 618, 625, 629, 633, 635, 637,640, 643, 660, 664, 665, 666, 667, 668, 669, 671, 673, 681,685, 687, 688, 700, 714, 716, 722, 723, 725, 731, 735, 736,737, 739, 747, 749, 751, 759, 761, 763, 767, 769, 770: n = A,T,C or G
  misc_feature 771, 773, 783, 784, 791, 795, 796, 800, 802, 806, 807, 808,810, 812, 813, 821, 827, 828, 829, 830, 838, 839, 840, 848,853, 860, 862, 863, 869, 873, 875, 876, 878, 880, 881, 887,888, 892, 898, 901, 902, 906, 907, 913, 920, 926, 927: n = A,T,C or G
  misc_feature 928, 932, 933, 934, 935, 936, 942, 946, 949, 950, 951, 956,957, 961, 963, 968, 969, 971: n = A,T,C or G
ggagctccaccgcggtggcggccgcccgggcaggtacctacgctgttgttattcatttcctgcttttcacagaaaacaattttgttgcatggaagatcggtgagttaaaaaaagacctgccctgggtgtcaagcacagtagttacaccgctggttctgctccctctgcttgggatacatgggcagggtgccctggtggtagggccttggtcaccagcaaagtcagttcccatgggatcctctttctgagctgatgcccactcccctgaagaaggggctnctattcaggcctnttgttgcaaggagcanaaacccacttaggctggctcaagtccgctgngtaccgctgtttnancaatccctgtttcacaagaatgtgtcccagccttntntttggggtattgacacnanggcntggcaggggganaaccccangggaatgttcaccagtcccttggggggnttgccttctanctcaaaacnngnnccttccctttttagcncttntntntattctnnatactatnaatnnttttttngaaaaattgnagntcttttgcnttttcnantncntcnnnggctnggnatnnnnngattntatnttnatntntntgtnganctacttngatntcgntncnctntcnatttatatttttctatnctannnnnntnanccaacctntganannttcatattgtgngagcttgggtaacnanaaggcnncntagccncccnnntntctttaantntntataactntntntatncnnnantaacagatgnnttatatncgtnntttntntgtnnngntnntggtttcnaatgannnncgagggtnnntatagtangcatnttaaatntnntctctntttntnngngnntgagtnngtgngatatnganncacnnatgatnagggatntatgtnnntatnnnnntgtganatanttnnntttannaatntntttanncnccccccccccccccct

SEQ ID NO: 6790 - DNA, 859 bp, Homo sapiens
  misc_feature 3, 555, 609, 612, 636, 639, 641, 642, 660, 674, 704, 706,712, 743, 747, 767, 771, 778, 789, 800, 807, 814, 815, 816,820, 831, 837: n = A,T,C or G
gcncgtaataccgactcactatagggcgaattggagctccacccgcggtggcggccgcacaaaaaccaatctacctgatgaaaactccgttcccttctcgccagaaacataaaatgcgatggagctacggccaccgctgctgagacaaaatggcgccgacaagctggtttagcgcaagccccgcgtacctcggccgctctagaactagtggatcccccgggctgcaggaattcgatatcaagcttatcgataccgtcgacctcgagggggggcccggtacccagcttttgttccctttagtgagggttaattgcgcgcttggcgtaatcatggtcatagctgtttcctgtgtgaaattgttatccgctcacaattccacacaacatacgagccgggagcataaagtgtaaagcctggggtgcctaatgagtgagctaactcacattaattgcgttgcgctcactgcccgctttccagtcgggaaacctgtccgtgccagcttgcattaatgaatcggccaaccccccgggaagaagccgtttgcgtattgggccnctttttcgctttcttgcttacttgactcgcttgcgctcggtccttccgcttgcngcnaagccgtatcaacctcactcaaangcngnnataccggttattcccaanaatcagggataccncaggaaagaacattttgaccaaaaggcccncnaaaggncaagaaccctaaaaagcccctttgcttgcgntttncataagcttccgccccctgnccangcattanaaaaattaccnctcaagtaaanggggggnaaacccnnncggnctttttaaaanaccccngcttttccccttggaagctcct

SEQ ID NO: 6791 - DNA, 939 bp, Homo sapiens
  misc_feature 237, 377, 421, 498, 500, 513, 528, 543, 546, 547, 576, 583,589, 591, 601, 611, 613, 615, 616, 617, 622, 625, 632, 634,639, 640, 643, 650, 655, 662, 670, 671, 673, 674, 683, 692,695, 698, 704, 716, 717, 721, 727, 728, 732, 734, 747: n = A,T,C or G
  misc_feature 748, 751, 758, 759, 761, 767, 768, 770, 773, 774, 777, 785,786, 788, 789, 791, 792, 796, 800, 802, 804, 810, 817, 818,821, 822, 826, 828, 830, 832, 833, 835, 837, 839, 842, 854,856, 876, 878, 886, 896, 899, 910, 915, 916, 918, 920: n = A,T,C or G
  misc_feature 921, 922, 924, 926, 927, 930, 931, 932, 934: n = A,T,C or G
gaattggagctccaccgcggtggcggccgaggtacaaaaattacgctgggcatagtggcacatgcctgtagtcccagctactcgggaggctgatgaacaagaatcacttgaacctgggaggaggaggttgcagtgagctgagatcgtgccactgcactccagcctgagcgacagagcaagactgtctcaaaaaaataaaaaagaaaaaaataataaaaaggaaaacaaagcctttanaaaaacaaagcctttgaaaaaggatgtaaaattgaatatatagatacaattatttttaaaaagttttatagaaaaatatcctggattgttgatgttgttttaatatattttaatcatttttgtataatgtcatgtataanatgttataatgaaagtaaaaaaaaaaaggtcttagcagtagcangcagaaaaatgccaaactcagtgccttttagttatttttgatatgtgggaagatcatgcataaggctcctttttaancntcatttggcttgngcttaggaaagggtnaatcccccctggaanggnnacccttggaaaagggtaccttggcccggngcggccngctttnantaacctaagnggggaatccncncnnncctgnagngaaattncnatttnnaanctttatntgaanacccgtnggaccttnnannggggggggncccgggtanccnaantttttngatcccttttanntganggggtnnaatntnggtgccccttggnngtnaatcaanngnacatanncntgnntanctggtgtnnanncnngtantccncntncacaanttcacannccnntatncnantnncngngngcntataaagatgananacaccctggggggtccaaananagtgggantcaaccaccnagnaatatgtgggngcgcnnanannncntnnttnnntnagagg

SEQ ID NO: 6792 - DNA, 945 bp, Homo sapiens
  misc_feature 3, 7, 10, 35, 52, 57, 87, 91, 92, 109, 118, 187, 342, 369,376, 521, 544, 567, 575, 596, 608, 646, 661, 663, 667, 690,701, 702, 707, 720, 727, 732, 757, 763, 771, 772, 783, 799,809, 811, 815, 825, 839, 846, 855, 862, 863, 864, 867: n = A,T,C or G
  misc_feature 874, 889, 906, 910, 915, 927, 937, 938, 945: n = A,T,C or G
ggngttnttntttcttttaaacccttcttttggcnaattgccctccaccgcngtggntgccgaggtactttttttttttttttaaancccnnggagcttcaagaacgantgatttaanaacagccctcccatcttagcaatgtcccggggtggctggagccacggtcacttcttggtcctggtccanaactgtcggtagcgttccacatgcaagtcatcactgagctcctgctcgtacctgcccgggcggccgctctagaactagtggatcccccgggctgcaggaattcgatatcaagcttatcgatacccgtcgacctcgagggggggcccggtacccancttttgttccctttaaatgagggttanttgcgcncttggcgtaatcatggtcatagctgtttcctgtgtgaaattgttatcccgctcacaattccacacaacataccgagcccggagcataaagtgtaaagcctggggtgcctaaatgaggtgagctaactcacatttaattggcgttnggctcactggcccgctttttcangtcgggaaaacctggcgtgccancctgccantaaatgaaaatccgcccaacnccccgggggaanaaggccggttttgccttaattggggccccttttttccnctttcctttggattnanatgnactccccttgcgcctccggtacntttcggctttnngggcnaaacccggaattnaacttcnactcnaaaagggcgggtaattaccgggttntttccncaaaaaannaaagggggatnaacccccagggaaaanaaaaattttngngccnaaaaggcccncccaaaagggcccntaaaccnttaaaaaanggccccnnntgntttggcntttttttaaaaaagngttccccccccctgggngagnctttnaaaaaaaattgncccccaaatnnaaggggn

SEQ ID NO: 6793 - DNA, 850 bp, Homo sapiens
  misc_feature 2, 3, 4, 9, 10, 12, 689, 745, 748, 764, 776, 819: n = A,T,C or G
gnnntaggnngncgcgcgtaatacgactcactatagggcgaattggagctccaccgcggtggcggccgcccgggcaggtacagagtgtgggaatagtttcacgagtagttccgagtttgttatacatcagagaatccacactggggagaaaccctatgagtgtaatgagtgtggcaaagcttttgttggtaattcacccctacttcggcatcagaaaatccacactggagagaaaccctatgagtgtaatgagtgtggcaaaagctttggaaggacttcccatctaagccaacatcagcgtattcacacaggggaaaagccttattcttgtaaagtatgtggacaagccttcaattttcatacaaaactaactcggcaccagagaattcacagtgaggagaaaccctttgactgtgtagattgtggaaaagccttcagtgctcaggaacaattaaaaaggcatctgagaattcatactcaggagtcttcctatgtatgtgatgagtgtggaaaagccttgactagcaaaagaaatcttcatcagcatcaaagaatccatactggagagaaaccctatgagtgtagcaagtatgagaaggcctttgggacttcttccagctaggtcaccttgagcatgtctactctggagagaagcctgtgctggacatttgtcgtttttggcctcccanaattttttaccccctttactggtaataagtacctcgggccggttctagaactagtnggntccccccgggctgcangaaattcgaatntcaagcttatcgataccggccgcctcggagggggggcccggtncccaacttttgttccctttagggagggttaa

SEQ ID NO: 6794 - DNA, 884 bp, Homo sapiens
  misc_feature 574, 597, 605, 647, 658, 661, 663, 664, 667, 671, 678, 679,683, 687, 707, 724, 729, 735, 736, 738, 741, 742, 746, 752,758, 760, 762, 763, 770, 771, 773, 783, 784, 786, 788, 792,794, 797, 806, 811, 812, 817, 822, 824, 827, 836, 838: n = A,T,C or G
  misc_feature 840, 843, 852, 853, 856, 878, 883, 884: n = A,T,C or G
gactactatagggcgaattggagctccccgcggtggcggccgcccgggcaggtacccgctgcaggaagtagagcggttcctcgccccctacgggaggcaagaccttcacctgcgtatctttgacccaagcccggaggacatagccagggcggacaacatcttcacggccactgaacggaaccgcatcgactacgtcagctccgccgtccgtatcgaccacgccccggaccttccgcggccagagggacacacaaagaaaatgaattttttcaaagttggaaaacattttacagtggtggacatgccaggttatggctttagagcacctgaagattttgttgacatggtagagacctatctaaaagaacgaaggaacttgaagagaacatttttattagtggatagccgttgttggaattcaaaaaacagacaatattgccatagaaatgtgttgaagaatttgcattaccttatgtgattgtattaacaaaaattgacaaatctttccaaggggacattttttaaaacaagggcttcatattccagaaatttgttaaccatgaaaactcaaggntgtttttcctcaagttgttttcnctgtaaantgctgggaacctttttcttggaaattccacctgtttggagangctttattagnccngnngtnaacnggaaatnntggncttnatggtttccccgggtttagnctggaaggatttcacanattgntagttnnantanncatnaatatnataggntncnntctgggnngntttttagaanntntngtgngnttnccccggggnttggnnggaanttttnanatnaagctttantntnttnccgtgcgannctntatgggggggggccccgttccnccaann

SEQ ID NO: 6795 - DNA, 838 bp, Homo sapiens
  misc_feature 553, 659, 666, 683, 685, 690, 695, 709, 728, 734, 742, 755,765, 778, 788, 809, 810, 819, 825, 828, 831, 832, 833, 836: n = A,T,C or G
atagggcgaattggagctccaccgcggtggcggccgcccgggcaggtaccagacatctctgcaacacctttctaagaaaaaaatccctgatataacttttgccttaaaatagaacaaactgcacatgcatctttactcattatcactatacacttctcctttgcagctgcaacaacccctctcaagacatatctggaaccttgatattttagcatgtgtgtgtcatttaattttctctcatcccacctttaatcataaggaaaaaaacaaaacaaaaacaaagttagattcaataagtattcccgacctttctggtttttactgtctctcggctgtagtctttcattctcacacgctccccggcgatcttgaagaagtttttactttcggttatctagctttatgaagaccaatacactcatacagctagataaccaaagataacaactcgcttcccacacaggcctctgtcttcctcttgccagactccaggtcctgatcctttctggcagtacctcggccggtctagaactagtggatccccccgggctgnagggaattcgatatcaagcttatcgataccgtcgacctcgagggggggccccggtacccagcttttgttccctttaggggaggggtaattgcgcgcttggcgtaantcatggncaatagctggttcctgngngaaantggtngtcccggtcacaanttccccacaaccatactancccggncagcaatnagcggaaaggccngggggtggcntaaatgaatgganctaaacttanattaattggggttgcggcccnnaggcccggnattcanaanggnnnaancg

SEQ ID NO: 6796 - DNA, 1208 bp, Homo sapiens
  misc_feature 1, 2, 6, 11, 15, 16, 22, 25, 28, 30, 31, 37, 39, 41, 43,44, 45, 47, 48, 49, 50, 57, 58, 61, 62, 63, 65, 74, 75,77, 80, 82, 83, 85, 86, 88, 90, 92, 97, 98, 99, 103, 104,106, 107, 112, 113, 114, 115, 116, 123, 124, 127, 132, 143: n = A,T,C or G
  misc_feature 149, 150, 163, 166, 192, 195, 196, 229, 231, 248, 252, 457,459, 500, 508, 571, 591, 612, 614, 616, 635, 660, 666, 708,726, 730, 737, 784, 785, 789, 792, 794, 806, 807, 810, 817,828, 840, 842, 849, 850, 858, 860, 945, 959, 985, 987: n = A,T,C or G
  misc_feature 992, 997, 1003, 1027, 1028, 1034, 1046, 1067, 1074, 1082,1096, 1100, 1103, 1110, 1115, 1116, 1123, 1131, 1135, 1138,1143, 1146, 1154, 1157, 1159, 1165, 1170, 1172, 1173, 1177,1179, 1180, 1192, 1197, 1201, 1202, 1207: n = A,T,C or G
nncgcncactntatnnatatanatnatntnngtgtanananannnannnntatacanntannnanataatgtanncntgntnnanntnantncaatnnntttnncnnaagannnnnagtgggnntgngcgtnattcgtactcnctactnnctataaggcgagntgnagctccaccgcggtggcggccgcagnacnnatgtcattcagaaacctgaagtgtggctgcatntngctgctaatgtgtgaanaaanacgcctaactgaatttgaacagctcaccactgtgcctacatttaaaaatacttctctctcttttctaaaaagctttaactgtagtgcctcctaataagcagtatgtttgtttcattgtgagattgcagttctgtatttcgaatgagtctaagaaccacaggggataatacttgtgcagatttcctgttctttaccctggcgtctncnttccagcagtattggacaccctaggtcctttgctgcaattngtaccctngcccgggggcggccgctcttagaaactaggttggatccccccggggctgcaagggaaatttcngatatcaaaggcctttattnggagtacccggggcgacctangnangggggggggcccccggtancccaaggctttttgtttgccccttntagggnagggggattaaatttggcccccgcctttggctgttaattcantggggaccatttagcctngttntcccctnggtggtaggaaaaaatttggtttaatccccggccttcaaccaaattnnccancancnaaacaattaccnnaangccccgngggaaggccanttaaaaaagatngntaaaaannccccttgngngggtggcccttaaataggagggtggaagccctaaaccttcaacaattttaaaatttggcggttttgcggcctcaacttgggcccnggctttttcccaantccgggggaaaaacccttgttccgtngnccacncttgncatttnaaattgaaattcgggcccaaaacnnccccgngtgggaaaaagncccggttttgccttattttgnggccccnttttttcngcttttcctttcgncttnacntgaactncgctnngcgcctncggttacntttncgngcttncgnggcgaaanccngngttttncaaantnncacntnnaaagggcggggngaatncacnngtatnc

SEQ ID NO: 6797 - DNA, 1186 bp, Homo sapiens
  misc_feature 1, 2, 8, 9, 14, 16, 25, 26, 29, 31, 35, 38, 39, 40, 41, 43,45, 50, 51, 53, 57, 60, 62, 63, 64, 66, 69, 83, 86, 88,92, 94, 96, 100, 106, 111, 298, 442, 485, 489, 511, 521,531, 539, 575, 579, 581, 597, 622, 628, 636, 643, 657, 670: n = A,T,C or G
  misc_feature 685, 688, 697, 699, 705, 716, 728, 729, 731, 736, 738, 743,745, 748, 752, 754, 763, 770, 787, 788, 796, 798, 812, 819,821, 828, 830, 834, 846, 848, 851, 865, 871, 876, 878, 886,891, 894, 895, 897, 901, 911, 918, 921, 927, 928, 952: n = A,T,C or G
  misc_feature 957, 974, 975, 976, 978, 980, 983, 1001, 1008, 1014, 1017,1019, 1021, 1026, 1031, 1035, 1037, 1038, 1040, 1050, 1068,1071, 1073, 1075, 1076, 1081, 1082, 1087, 1088, 1090, 1092,1095, 1104, 1107, 1108, 1116, 1117, 1118, 1121, 1122: n = A,T,C or G
  misc_feature 1125, 1126, 1127, 1135, 1136, 1137, 1138, 1143, 1145, 1147,1152, 1155, 1159, 1161, 1162, 1171, 1174, 1175, 1176, 1181,1182, 1183, 1184, 1185: n = A,T,C or G
nnatttanntgcgntntttaatttnnttntnttangtnnnntntnatatnncnggantantnnnantgngggaattctggtanttntnagtngngntgtntggggnaccgnatacgactcactatagggcgaattggagctccaccgcggtggcggccgcccgggcaggtaccctttgtctgcaccaacgttcccttgcttaccaggctcttaatgcccagcttaatgcggctgttgttcttctccacgtgcgtagcctgcggccgctctaataactagtggatcccccgggctgcangaattcgatatcaagcttatcgataccgtcgacctcatagggggggcccggtacccagcttttgttccctttagtgagggttaattgcgcgcttggccgtaatcatgggtcatagctggttcctgtgttgaaatttgggtatcncgctcaccaatttccacaacaaccatactagcccgggagcatnaaantgtaaaagcctgggggtgcctnaaatggagtngagctaaacntcacattnaatttgcagttggcagctcaactgcccccgctttcnaagncngggaaaacctgtcgtngccagtctgcatttaaatggaattncgggcncaaccganaccggantaagaaggctgggntttggcggttatntagggggccgcctcnttntcgcttttncntatggnttcaacttggnactttcgggctnncngcatncnggggncnatnttcngngcttgggcnagtcggnagccgggtatttcaagnntttacttncnaaaggggctgggtnaaattancnaggtttntncccncaaggaaattcnanggngggattttaccggncattgnaaaananaacaatgnttggnacnngnaaanggcccgagcntagaaanggncccttnnacccaattaaaaaaaggcccaacnttttntttggccgtttttttcnnnananagnctttccgccccccccctngatcgangccatnttncnanaaaanttgtngacngnntnaaagggatangaggaggtggggggaaanccngncnntgggnnttttnnantnatnccgcattgncgnntttttccnnnctnngannnatttcccnnnnagccncntnttttntgntttncnnactaccttncgnnnttttnnnnng

SEQ ID NO: 6798 - DNA, 486 bp, Homo sapiens
gtaatacgactcactatagggcgaattggagctccccgcggtggcggccgaggtacaaattgaaagattgggttttttctttagttttccacatgtattgtctcatctctgttcttgaaacatccacaatcacataaactccagttataaccatggagttatgtgactcattaaaatttaggaaaagtgttgctgagctgtgggatcaggcgtttctccctcagttcaacaactaatacatagactgctgatcaagaataaggaaccaaataaagtcatgcaccgttctgttgacagaggaactctgtggctgttgaattttactgtaactagttactctgtcttcagagtcaacttaatatacaagttatgtcataatggatggaaagacctgtgttgatgtatccagactctagcaaatgaagataaaaaacccgttatgactaatccttggggaagagaaagtctgcaaaatggctcaaacct

SEQ ID NO: 6799 - DNA, 473 bp, Homo sapiens
ggagctccacccgcggtggcggccgcccgggcatggtacgttgaccatctttgcagcagggctgttttgtctatatgatgaaaacgagaaacagcgcccgacacctggcccttcgcagctctcgcctttcgcagctctcgcctccccgcgtacctcggccgctctagaactagtggatcccccgggctgcaggaattcgatatcaagcttatcgataccgtcgacctcgagggggggcccggtacccagcttttgttccctttagtgagggttaattgcgcgcttggcgtaatcatggtcatagctgtttcctgtgtgaaattgttatccgctcacaattccacacaacatacgagccgggagcataaagtgtaaagcctggggtgcctaatgagtgagctaactcacattaattgcgttgcgctcactgcccgctttccagtcgggaaacctgtcggccagctgcattaatg

SEQ ID NO: 6800 - DNA, 471 bp, Homo sapiens
  misc_feature 471: n = A,T,C or G
ggagctcccccgcggtggcggctcgaggtacgcggggggaggcgaagaacgcaaagctgagaacatggacgttaatatcgccccactccgcgcctgggacgatttcttcccgggttccgatcgctttgcccggccgctctagaactagtggatcccccgggctgcaggaattcgatatcaagcttatcgataccgtcgacctcgagggggggcccggtacccagcttttgttccctttagtgagggttaattgcgcgcttggcgtaatcatggtcatagctgtttcctgtgtgaaattgttatccgctcacaattccacacaacatacgagccgggagcataaagtgtaaagcctggggtgcctaatgagtgagctaactcacattaattgcgttgcgctcactgccgctttccagtcgggaaacctgtcgtgccagctgcattaatgaatcggccaacgcgcggggagan

SEQ ID NO: 6801 - DNA, 1257 bp, Homo sapiens
  misc_feature 1, 10, 13, 16, 17, 18, 19, 21, 25, 27, 34, 35, 43, 45, 47,54, 55, 56, 59, 60, 62, 64, 71, 72, 74, 78, 81, 90, 93,94, 95, 96, 99, 102, 104, 110, 113, 118, 122, 131, 138,160, 171, 216, 330, 382, 386, 430, 465, 517, 519, 536, 539: n = A,T,C or G
  misc_feature 551, 584, 588, 590, 599, 616, 617, 644, 663, 685, 689, 697,715, 717, 722, 730, 737, 758, 760, 769, 771, 773, 805, 822,823, 840, 842, 856, 858, 860, 869, 891, 893, 898, 906, 910,923, 930, 935, 936, 940, 949, 966, 979, 983, 1010: n = A,T,C or G
  misc_feature 1011, 1016, 1022, 1025, 1028, 1045, 1059, 1084, 1089, 1090,1091, 1113, 1118, 1129, 1160, 1162, 1163, 1172, 1173, 1176,1178, 1184, 1185, 1186, 1187, 1188, 1201, 1202, 1203, 1204,1210, 1231, 1241, 1242, 1243, 1256: n = A,T,C or G
nccccctccncanatnnnntnttcncntccccanntaaaatantntnatactcnnntannantnattattnncnatcnacntcatacctnttnnnnagntananttagtntantattntaanggcgaattnggagctncaccgcggtggcggtcgaggtncgctgggggcncgacggactgtgtccggcgatgggcacggactgtctgtttgcatnctgattgggaacactgggatcattttcatcatgccgacagtggtggtaatggatgtatccctttccatgacccgacctgtgtctattgaggggtccgaggaataccagcgtaangcacctaacagcccatggttaaaccgatgctgttttgagcacatggccacanaatnacaaagctttgaatttacagcactgtgtggtgttttttcatcanttttggggagttgattggtcccccttcacgaggangaattataaattaccccttaccagagaaagccacctaaaagataaattttgngnatggattttaatggacnaanaacccctgcctntgggaagttccttggcaatttaagttttgggtnggtntntggccaaantaattccggcttcccannccaaatggaaaattgggggggttgggnttggccaaattttcccctntggccccaaggggtttggttcncctnggggttgnaaccaaggaaaccggggncnttggntccttttngggccantttggggataaggaagggggntncaactttgncngnaccatttttccccctttaaggccccaccttcnaaaaaaaatccaaaccnnaaaaggtggaaggaagncnaacccaggggtttntncncaccttacnccttttttcccctttttccccnantcctnaaagcttnatanttatttaatggtngccaatngggcnnaaantttttgggnagggaaggctttccagnaaggcacccccgnattnttactttggggaaaaatgcccctttgnnaaccnttcttnaanaangaatttttaaaaacaanttggggtggaaaanggggccaaaattttttttaacttanttggnnngggcccccccttggggcctttnaaaanaaaatgggatnccctggctcccgggggccgggcccccttctngnntaccccccnnctntntttggnnnnncccctttataaannnnggggtnttaaatttgctcccccctttnggccgttaannnaattgggcccttng

SEQ ID NO: 6802 - DNA, 1136 bp, Homo sapiens
  misc_feature 1, 6, 8, 11, 12, 14, 22, 23, 24, 25, 29, 31, 32, 33, 34,36, 37, 40, 45, 47, 51, 57, 65, 68, 74, 75, 76, 79, 80,81, 82, 83, 84, 85, 88, 89, 91, 92, 93, 95, 97, 98, 100,102, 103, 104, 105, 107, 111, 112, 115, 116, 118, 185, 409,468: n = A,T,C or G
  misc_feature 513, 588, 601, 612, 678, 836, 843, 846, 848, 852, 855, 860,864, 880, 882, 883, 901, 902, 918, 920, 923, 935, 938, 948,951, 963, 989, 991, 1000, 1005, 1007, 1008, 1009, 1013,1020, 1032, 1035, 1040, 1042, 1047, 1055, 1056, 1057, 1063: n = A,T,C or G
  misc_feature 1070, 1071, 1080, 1089, 1091, 1092, 1094, 1104, 1106, 1107,1122: n = A,T,C or G
nccccncnacnnanttcaatannnnttanannnntnnacnctacntnttanttctanaatatctnttncaagcnnntcnnnnnnntanntnnngngnngngnnnngncaannaanncntatagggcgaattggactccaccgcggtggcggccgcccgggcaggtacgcggggggcggctccgcngaagggaggagtggcaacatggcgtcttcgggagctggtgaccctctggattctaagcgtggagaggccccgttcgctcagcgtatcgacccgactcgggagaagctgacacccgagcaactgcattccatgcggcaggcggagcttgcccagtggcagaaggtcctaccacggcgggcgaacccggaacatcgtgaccggcctaggcatcggggccctggtgnttggctatttatggtttacacccttctactcgattttcccagggagccgtttccctagnatgaagctaagaaagacgaggcccaaagcctgccccgagccccgnagcttcttggcaaaggggccgtcaggggtccttaaatcttggatggggtaatttggaattcattggttcccaacncttgcttgggagnccccctttcancatgggtgggattggaatggcccccaatgaaccccttgtaggaaaaatttggaaatcccttgcttncaacaaacatttgggttgggcccttttctttaacttaaaaccctttgggaaccccggtggaatttggaagcccccaaaaggaaaaaccccaaggggggacttttaccgccatttttgggcccaaattggtgcaaaaaaggaaaccaggaaaccttttngccccanctngncacnacnttggnttgnggtacccttcgggccngnnccccggggccagggatannccggggcctttttttngnaangggtaggggaanttncaactttccntgnggaagggtattngggggcctttggggtggccaaaaaangncaaatgggnggggntnnntggngattagngccccctttatnggncccangnttggntttccccnnngggaanggggtgnnaaaatatgncttcttggnanngnccctaaaaangnncaaggccttaaattncaaggccatttggc

SEQ ID NO: 6803 - DNA, 1129 bp, Homo sapiens
  misc_feature 3, 8, 9, 23, 25, 26, 28, 30, 31, 32, 38, 42, 47, 50, 51,53, 54, 56, 58, 59, 60, 61, 64, 65, 69, 71, 74, 77, 79,80, 83, 84, 86, 95, 96, 101, 102, 104, 105, 112, 117, 499,550, 554, 654, 666, 667, 670, 681, 730, 733, 749, 775, 789: n = A,T,C or G
  misc_feature 800, 806, 807, 815, 824, 842, 850, 859, 869, 879, 884, 906,907, 930, 943, 949, 988, 994, 997, 1006, 1010, 1019, 1021,1022, 1025, 1035, 1051, 1057, 1070, 1071, 1072, 1074, 1077,1078, 1083, 1096, 1111, 1114, 1124, 1127: n = A,T,C or G
ccnccctnnttttacagtagtantnntntnnnaactanaatntatanatnnanntntnnnnatnncttntncanatntnnttnntnttagaagannaaganncnngaattcnacttntatagggcgaattggagctccaccgcggtggcggccgaggtacagcagcctggagcatgagagtgtggcgggagtggtggagagcctgaagatcatcaccaaggccaagtccctgcgcattgccgggtatgccttcaagctggcgcaggagagcgggcgcaagaaagtgacggccgctctagaactagtggatcccccgggctgcaggaattcgatatcaagcttatccgataccgtcgacctcgaggggggggcccggtacccagcttttgttccctttagtgagggttaattgccgcgctttggcgttaatcatgggtcataggctgtttcctgtgtgaaaattgttatcccgctcaccaatttccacacaacataccgnagccggggagccattaaaagtgtaaaagccctggggtgccttaatgaagtngagnctaacctcaccattaatttggcgtttgcgcctcactgcccggcttttccagtccggggaaaaaccttgtccgtggcccagcctgcatttaaatggaaatncgggcccaaacnnccncccgggggagnagggccgggtttttggccgttaatttgggggccgccttcttttccggcnttncccttcggctttcaanttggactttcgagcttggcggcttcngggttccgttttcnggcctttgccngggccnnaagccggntaattaaancttttcactttcaaaaanggccgggntaaaataanccgggttatnttcccacaanaaatncaaggggggaattaaaccgccnngggggaaaaggaaaccattggtntaagcccaaaaanggcccnagcccaaaaaagggccccaagaaaccccgttaaaaaaanggcccnccntttggcttnggcnggttttttncnnaanggctttcccncccccccttggccgangccttncacaaaaaaatcnnncntcnntaaanttcaaaaaggggnggccgaaaaccccgncangggacttatnaanaa

SEQ ID NO: 6804 - DNA, 1172 bp, Homo sapiens
  misc_feature 1, 5, 9, 13, 17, 18, 19, 20, 21, 22, 23, 25, 26, 28, 29,30, 31, 32, 34, 38, 39, 42, 43, 47, 48, 49, 54, 57, 59,61, 64, 66, 68, 72, 73, 76, 77, 82, 86, 89, 90, 91, 92,93, 94, 99, 101, 104, 105, 107, 109, 111, 112, 114, 117,119: n = A,T,C or G
  misc_feature 124, 129, 131, 134, 137, 447, 546, 566, 591, 621, 688, 744,747, 776, 795, 812, 865, 870, 872, 879, 886, 903, 915, 916,930, 934, 938, 957, 961, 979, 983, 986, 992, 1005, 1021,1024, 1027, 1039, 1047, 1057, 1066, 1071, 1080, 1090: n = A,T,C or G
  misc_feature 1093, 1109, 1114, 1124, 1133, 1134, 1147, 1148, 1154, 1166,1169, 1170, 1171: n = A,T,C or G
ncccncctntttncacnnnnnnntnnannnnntntttnnatnntttnnntctcnttntntntantnantttnnatnnttatntttntannnnnntcttnanagnntnananntntantntattntatcntnttnggncgaattggagctccaccgcggtggcggccgaggtacgcggggccgtgggcctgtcgtgccagtcctgggggcgagatgggggtagaaatgcattttattctttaagttcacgtaagatacaagtttcagacagggtctgaaggactggattggccaaacatcagacctgtcttccaaggagaccaagtcctggctacatcccagcctgtggttacagtgcagacaggccatgtgagccactcgctgccagcaacagaagccgtccttcccccttgtagactaagttgcccgtaggggaagtaccttgccncggggcggcccgctcttagaaactagtgggatcccccggggcctgcaagggaaatttcggatatcaaagcctttatccgatacccgttccgaccctcgnaggggggggggcccccgggnaccccaagccttttttggttccccnttttagtggaagggggtttaaattggccgncgcctttgggcggtaaattcaattgggttcaattaagccttggtttttcccttggtggtggaaaaanttggtttaattccccgctttccaccaaaatttttccaccaaccaaaccattaccgnaanccccgggggaagccattaaaaggttggtnaaaaggccctgggggggtngcccttaaatggaggtngaagccttaaccttcaacaatttaaaattggccgtttgccggcttcaacttgnccccncnttttttncaagttncgggggaaaaaccctgntccgtggcccannttggcaatttaatngaanttcnggccccaaccccccccggngaanaagggccggtttttgccnttanttnggggcngcctttttttccncttttcttcggttcanttnganttcgtttggggnccttcggntccgttttcnggctttgcnggganaagccggtntttaagcttncancttcaaaagggcgggngaaantaccgggttnttccaacannaaattcagggggnntaaccnccagggaaaaanaannnt

SEQ ID NO: 6805 - DNA, 1180 bp, Homo sapiens
  misc_feature 7, 10, 11, 13, 19, 20, 21, 22, 24, 26, 28, 29, 34, 35, 37,38, 39, 40, 41, 44, 45, 48, 51, 55, 58, 59, 60, 65, 67,68, 73, 74, 76, 77, 78, 80, 86, 88, 89, 91, 92, 93, 94,97, 102, 106, 107, 108, 110, 111, 112, 117, 121, 160, 455,462: n = A,T,C or G
  misc_feature 497, 504, 555, 556, 599, 607, 615, 616, 652, 657, 658, 664,679, 685, 686, 706, 720, 741, 743, 759, 778, 780, 788, 811,816, 818, 828, 832, 836, 846, 848, 853, 854, 862, 869, 875,894, 895, 902, 907, 911, 925, 932, 940, 942, 947, 963: n = A,T,C or G
  misc_feature 964, 971, 982, 985, 988, 991, 1024, 1034, 1036, 1045, 1053,1063, 1064, 1065, 1072, 1081, 1082, 1089, 1090, 1096, 1108,1113, 1125, 1128, 1131, 1139, 1156, 1158, 1163, 1164, 1167,1168, 1171: n = A,T,C or G
ccccccnccnnangttatnnnnanantnnacttnnannnnnttnnttnatncatnatnnntatangnnttttnncnnngncaattntnncnnnnagnagatngatnnnannnttaancganttactatagggcgaattggagctccaccgcggtggcggncgcccgggcaggtacgcgggggtgaaactggaaggctgccatggctagcccagccgcctcctcggtgcgaccaccgaggcccaagaaagagccgcagacgctcgtcatccccaagaatgcggcggaggagcagaagctcaagctggagcggctcatgaagaaccaaggcaaagcagttccaattccagagaaaatgagtgaatggggcacctcgacctcccccagaatttgtccgagatgtcatgggttcaagtgctggggcccggccagtgggagagttccacgttgtaccttnggccggnttctaagaacctaagttggggatcccccccggggncttgcanggaatttcgaatattccaaagcctttattcggatacccgtcgaccccttcnnagggggggggggcccccgggtaacccccaagccttttttggtntccccctntttaagtnnggagggggtttaaatttgggcgccgcctttgggccnttaanntcaatngggtccattaagctnggtttnncccttggtgggtggaaaaanttggttttatttcncggcttcacaaaatttctccncnagccaaccattaccgnaaggcccgggggaaggccntnaaaagttngttaaaaaggcccttggggggtngcccntnaattggaggnggangccntaaaccttcnancaaannaaaatttngccgttngcccgnccttcaaccttggccccgnnttttttnccaantccnggggaaaaaccctngttcggnggccccancntggcnatttaaatgggaattnnggggccnaaacccccccnggnggnaanaaaggccggtttttgccggtaatttggggccgncttttttccngnttttccttngcttcaanttgaacttcnnnttggcgncctttcggnncggttcnnggcttngcccggcccaanccggnatttaaagcttnaanttnaaaagggnggggaaataacccggtntntcccnnaannaantaaagggga

SEQ ID NO: 6806 - DNA, 1144 bp, Homo sapiens
  misc_feature 9, 11, 12, 13, 16, 17, 21, 25, 28, 29, 30, 33, 34, 35, 37,38, 41, 43, 44, 64, 67, 71, 73, 78, 87, 93, 95, 99, 105,106, 107, 109, 111, 128, 144, 148, 151, 451, 534, 574, 600,641, 658, 680, 697, 700, 716, 720, 746, 762, 769, 770: n = A,T,C or G
  misc_feature 778, 780, 785, 790, 791, 809, 816, 839, 841, 856, 863, 868,901, 917, 919, 926, 934, 948, 952, 953, 955, 959, 965, 966,975, 983, 990, 994, 995, 997, 1008, 1009, 1014, 1023, 1036,1037, 1056, 1057, 1078, 1080, 1082, 1085, 1087, 1093: n = A,T,C or G
  misc_feature 1100, 1111, 1116, 1122, 1124, 1128, 1135, 1140, 1143, 1144: n = A,T,C or G
ccctccccncnnncanntttnattngtnnntannntnnttncnntcttaatttttttttttttnaantaanantgttnttttctctncgtttntnaggngtattnnnantnatcacattaagtatatngcgaattggagctccnccgnggnggcggccgaggtacgttgcgtaatggccacgttgcagcacacggcggaagaaataaagagattagctgaaaaagaagactggattgttgacaatgaaggactgacttctctaccatgtcagtttgaacagtgcatcgtgtgttctctgcagtcactgaagggggtctctggagtgcaagccgggagaggccagtgtcttccaacaacctaaaacacaggaggaggtttgccagctaagcatcaatataatgcaggttttttatatacttgtctgggaacagcttgaagcaccaagcctgnatgccaggattattaggattacctacaccatcttcttctggttggatgtttcttcccctgggccttgttttgggaagttatcncatggaaagactttccagcctggaccctcaggaaacaagncgccttttttggataagtccttaagntaatttgcctggctattcttaggaaccgtcaccaccctttncctaaaatattcgcaanaaaccattttttgaaaaaggcnaccaacctttttcaagnggnaaattagaaaaaaaanttcnccccccagggtattaagccatggggnccctcaatttggaaangaacctnnggaattcnanaaagnacctnntttttggaaaaaattttnccattcngagttttggaaaaagccaggaantncccccattccgtttngggcctnccttnaaaaaaccctgggaaatttttaattgccagggnattatttttttgaatntngggaaanggaattgnccttgtccctttcnaaannangggngggtcnngaaaaaacntttttttnaaaaaanaaanncnccttggggggnnaatanttaaatttnccccggggccatnncaaaaaggggggttttcannccatttttcccaaaaagaaancntnggntncccttnggggttnccttggccccngggcngggccncntttnagaaacntattnggnn

SEQ ID NO: 6807 - DNA, 1154 bp, Homo sapiens
  misc_feature 2, 3, 4, 6, 12, 15, 16, 18, 21, 22, 23, 24, 25, 30, 32, 35,36, 41, 42, 44, 50, 52, 61, 63, 64, 65, 67, 70, 73, 76,77, 79, 82, 84, 86, 87, 88, 90, 92, 94, 95, 97, 98, 100,101, 102, 105, 106, 109, 110, 111, 113, 115, 116, 117, 118: n = A,T,C or G
  misc_feature 127, 132, 133, 134, 143, 144, 300, 382, 497, 530, 627, 630,632, 647, 656, 664, 683, 685, 687, 716, 737, 741, 745, 764,767, 769, 797, 802, 836, 837, 849, 878, 904, 906, 908, 916,936, 948, 950, 957, 959, 977, 995, 1001, 1008, 1009: n = A,T,C or G
  misc_feature 1016, 1021, 1024, 1029, 1030, 1065, 1073, 1076, 1089, 1093,1100, 1106, 1113, 1115, 1116, 1136, 1141, 1151, 1152: n = A,T,C or G
cnnncncccacncannantannnnnatagnanaanntatcnncnaactcntnatacattanannnanttnaantanntnttntntnnnantncnncnnannnatnnggnnngngnnnnagcgtaatnttatnnngtataaggnncgaattggagctccaccgcggtggctggccgaggtacctgcagaagccagggcagtctccacaggtcctgatctatacgctttcctatcgggcctctggagtcccagacaggttcagtggcagtggctcaggcactgatttcacactgaaaatcancagggtggaggctgaggatgttggagtttattactgcatgcaacgtatagagtttccccacacttttggccaggggaccaanctggagatcaaacgagactgtggctgcaccatctgtcttcatcttcccgccatctgatgagcagttgaaatctgggaactgcctctgttggtgtgccctgcctgaattaacttcntatcccagaagaggcccaaaaagtaccttgccncgggcggcccgcttctagaacttaggtgggatccccccgggcttgcagggaaattccgattattcaaagcctttaatccgaatacccggttcggacnctncnaagggggggggggcncccgggtanccccaagnctttttgtttccccctttnantnggagggggtttaaaatttggccgccgccnttgggccggttaaattcaatngggnccantaggcctggtgtttccctngtngntggaaaaaattttggttttattcccggnttttnaccaaatttcccaacaaccaaaccatttacccgnngccccggggaanccattaaaaaggtggttaaaaagcccctngggggggttggcccttaaatggaagntngnaggcttanacctttcaacatttaaattngccggtttgccncnttccacntngccccgctttttcccaantccgggggaaaaaccttnttccgnggcccanngccttgnatttnaangaaanntcgggcccaaaccccccccggggggaaaaaggccnggttttgncgnttattggggggcncctntttcccncttttncttgggntnnaaatgaaaatcggtttgggncctcngggccggttnncg

SEQ ID NO: 6808 - DNA, 1173 bp, Homo sapiens
  misc_feature 3, 6, 7, 8, 9, 13, 15, 18, 19, 20, 22, 26, 27, 28, 35, 38,41, 42, 43, 47, 61, 65, 79, 80, 85, 87, 88, 89, 91, 94,95, 98, 103, 104, 110, 113, 115, 124, 127, 160, 189, 407,435, 438, 480, 482, 490, 501, 504, 585, 589, 593, 615, 616: n = A,T,C or G
  misc_feature 668, 704, 706, 714, 716, 718, 721, 727, 732, 748, 750, 773,788, 791, 805, 819, 823, 856, 863, 876, 888, 900, 905, 912,923, 941, 948, 958, 960, 962, 973, 978, 979, 982, 991, 993,996, 1003, 1004, 1007, 1008, 1009, 1020, 1021, 1033: n = A,T,C or G
  misc_feature 1053, 1055, 1056, 1071, 1084, 1088, 1090, 1099, 1106, 1120,1122, 1129, 1134, 1137, 1144, 1145, 1146, 1151, 1158, 1159,1160, 1161, 1163, 1164, 1169, 1171: n = A,T,C or G
ttntgnnnntttntnggnnnantgtnnntatttgncanttnnncggnattttggaattgtngatntagtgtaaatttgnnaatcntnnntnttnnagnggggnnttcgtnttntngacttactntanggcgaattggagctccaccgcggtggcggccgnccgggcaggtacgcgggggagagatgcangagaaaacaaaaagccattttacaagacaatttgaaggatcacattttgttcatgaatattcaagaagacatcctcagcttgctgtctcagtaattctaagagttgctaaaggataccaggagttattggagaagtgtttccagactgaaaaccctcttgaatgccaagataaaggagaagaagaattacagaaatacatccaggagagccaagcatntggcaaagccgaagctgcggccttcttncanaaactagggaggaattattactttaacaaaaatgcgtttttntncgtttgcntttacaccaanagnaaaggccccccagcctgaccctcgttcgggagcttgattgggccattcaacccaggaaaaaatgggcaagcccaccaggcnagcncacnttgtttgcccaacttcaagttnnagggaccaaaacttatttgggcccttgttggggcggagggggaaccggcctngaacaattttatttatttccggggaccaccttttantnggtaattnangnacnaattgnaaaantggaccttcccaggtnanaaaccccctggggtgttttgggnccaagttgccttgcnacnttttctttcatttnttgcccaaaccaanggangggcccttggccttttcaagccaggctttgggntgggggnggggattgaaaancaataatggttncccttccctggnatttncttctgnattggaccaanggtttcaatttttttccnataaaanggaatccttntngncccaaaccttnaaggnntgntttaccgcntnccnaaaaccnnatnnnaaatcccaggnnggttttcttcantttaaccccttggggggaangnnaaaaaaagccccccnaattttaccaggngggnanccacctttnggggggnttggccaatttggnanaaatttntctcnaangccctcnnnttggnagaaaannnncnngcccnangg

SEQ ID NO: 6809 - DNA, 1128 bp, Homo sapiens
  misc_feature 2, 4, 5, 7, 9, 10, 11, 12, 14, 15, 17, 18, 19, 20, 21, 22,26, 28, 30, 32, 39, 45, 46, 52, 54, 58, 59, 61, 63, 64,65, 66, 67, 68, 70, 71, 73, 75, 76, 77, 78, 80, 82, 83,88, 89, 94, 95, 96, 98, 99, 100, 102, 103, 108, 330, 465,518: n = A,T,C or G
  misc_feature 577, 582, 653, 661, 692, 698, 700, 727, 731, 735, 760, 782,800, 801, 805, 811, 817, 822, 828, 835, 846, 877, 878, 880,893, 898, 901, 906, 910, 915, 934, 938, 939, 951, 961, 964,966, 981, 986, 1002, 1004, 1006, 1024, 1039, 1040: n = A,T,C or G
  misc_feature 1061, 1065, 1072, 1074, 1077, 1090, 1094, 1100, 1113, 1114,1117, 1118: n = A,T,C or G
cncnntntnnnntnntnnnnnntgcntnantnattaaanttcagnntatttnanattnnantnnnnnntnnancnnnntntnntttannaggtnnnannntnnctttnatataggcgaattggagctccaccgcggtggcggccgcccgggcaggtacgcgggtccgcgcgtgtgatcgtccgtgcgtctagcctttgcccacgcagctttcagtcatggcctccggtaacgcgcgcatcggaaagccagcccctgacttcaaggccacagcggtggttgatggcgccttcaaagaggtgaagctgtcggactacaaagggaagtacctnggccgctctagaactagtggatcccccgggctgcaggaatttcgatatcaagcttatcggatacccgtcgacctcgagggggggggccccggtacccagcttttgttccctttagtggaggggtttaattggcgncgctttgggcggtaatcatggtcatagctggttttcctgtggtgaaaattgtntatcccgctcacaaattccacacaacaatacgaagcccggggagcattaaaaggtggtnaaagnccttgggggtggccttaaatggagttgagccttaaacctcacatttaaaattggcggttgcggcttcaacntgccccgnctttttcccaagttccgggggaaaaaccctngtccgntngcccaagcttgccatttaaatggaaanttcngggnccaaaacctccgccgggggggaagnaagggccggggttttggcggtnattttgggggccggcttnntttnccggcntttccntcggnttcaanttggaantttggctttgncgccttcggggaccggttttcggggcttgcnngnccgaaggccgggntattncanggttnaacnttcanaaaaggggcggggggaatntacnngggttttttccnccaagaaaanttnanggggggaataaaacnccccnggaaaaaaaaacattntngnggccaaaaaagggcccanctaaaaaggggcccnnggaaaccccttaaaaaagggncccngtttttntnggnttttttttcatangggnttcccncccccccttgaannganngaattaaaaa

SEQ ID NO: 6810 - DNA, 1073 bp, Homo sapiens
  misc_feature 1, 2, 3, 4, 5, 6, 7, 8, 9, 10, 11, 12, 14, 15, 16, 17, 18,19, 21, 22, 23, 24, 25, 26, 27, 28, 29, 30, 33, 34, 35,36, 37, 38, 39, 40, 41, 42, 43, 44, 45, 46, 48, 49, 50,51, 52, 53, 54, 55, 56, 57, 58, 61, 62, 63, 64, 65, 66,67: n = A,T,C or G
  misc_feature 68, 69, 70, 71, 72, 73, 74, 75, 76, 77, 78, 79, 80, 81, 82,83, 84, 85, 86, 87, 88, 91, 92, 95, 98, 99, 100, 101, 102,103, 104, 107, 108, 111, 487, 556, 566, 703, 784, 811, 815,837, 846, 849, 883, 893, 897, 916, 932, 940, 943, 944: n = A,T,C or G
  misc_feature 949, 950, 954, 958, 969, 974, 994, 999, 1005, 1006, 1022,1028, 1033, 1039, 1042, 1048, 1049, 1050, 1061: n = A,T,C or G
nnnnnnnnnnnntnnnnnnannnnnnnnnnttnnnnnnnnnnnnnnannnnnnnnnnnttnnnnnnnnnnnnnnnnnnnnnnnnnnnnttnnagnaannnnnnntannatnatatagggcgaattggagctccaccgcggtggcggccgcccgggcaggtacgcgggggcacttcctgaagctgaaggtcagcatagacaaagggcctcagaatcgcgcaggcgcaattgtgccctggttcgccaagatgtcgttcccaaagtataagccgtcgagcctgcgcactctgcctgagaccctcgacccagccgaatacaacatatctccggaaacccggcgggcgcaagccgagcggttggccataagagcccagctgaaacgagagtacctcggccgctctagaactagtggatcccccgggcttgcagggaattcgatatcaaggcttatcgataccgtccgacctcgagggggggggccccggtancccagctttttgttccctttagtgaggggtttaattgcgcgcttggcggtaaatcatggtcatagctgnttcctgtgtngaaaattgtttatcccgcttcacaattcccaccacaacataccgaagcccggggagcattaaagtgtaaagcctgggggtgcctaatggaagtggagctaacttcacattaaatttgcggttggcgcttcacttggnccggcttttccaagtccgggaaaaacctgttcgtggcccagctggcattttaattggaatcggggccaaaacgcccccggnggaagaagggccggtttttgccgttantttngggggcgcctctttttcccgcnttttccttnggnttcaacttggacttccggcttggggcctttgggntccggttccnggcntggccgggccaagccgggnttttcaagccttaacntccaaaanggnnggggnnaatnaccnggttttttccncaagnaattcaagggggattaaacncccanggaaannaaccattgttgaggcnaaaaanggccnaccaanaangggccnnnggaaacccgtnaaaaaggggccc

SEQ ID NO: 6811 - DNA, 1131 bp, Homo sapiens
  misc_feature 4, 5, 7, 9, 11, 14, 16, 19, 20, 24, 26, 27, 33, 36, 40, 42,44, 50, 54, 58, 59, 60, 68, 72, 74, 75, 76, 79, 81, 82,83, 84, 86, 88, 91, 92, 94, 95, 98, 99, 101, 102, 103, 104,106, 122, 148, 160, 162, 469, 532, 540, 548, 577, 582: n = A,T,C or G
  misc_feature 585, 605, 606, 610, 648, 668, 686, 701, 713, 733, 734, 756,766, 787, 790, 803, 816, 830, 838, 840, 841, 850, 855, 875,890, 906, 910, 921, 925, 926, 948, 954, 972, 979, 990, 991,992, 1003, 1013, 1021, 1026, 1031, 1032, 1038, 1042: n = A,T,C or G
  misc_feature 1044, 1045, 1046, 1063, 1064, 1065, 1067, 1071, 1073, 1074,1079, 1080, 1095, 1096, 1105, 1112, 1117, 1118, 1127: n = A,T,C or G
acanntntntnatntnttnncttntnnttcaantancctntnanttagtntttntttnnntgattatntttngnnnttntnnnntncnagnngnngcnnannnntnatatatggcgaattgnagctccaccgcggtggcggccgcccnggcaggtaccancncatcatcccctggagcgggcaggtgttcccggatcatgtcggcagtcacaaagcccttgctgtaggcccaatcttttgggggatgatccagagtgaaccagagcttaaagcgattgggatagcgggcctgcagttcctctaagtcctcccgcaagatgatatccttttctgtctggttggcaaaaagcagaaagcactgggttggatcttcagggactttcaggatggccccggatcagctgttagcattggggggtgattcctgtcccgcccggcaatcattcccagtttcttcgcccactccggnggttcttggttggaagaattttctttgttggggcctgaatgttaaaaaatggcccctttttcncaagtgtnaaggtgangcaaaccccccgcttggcccccccgaaanacttncancacccgccgttacctagggnncggntcttaagaaacctaagtgggattccccccggggcctgncaggggaaaatttccgattntccaaagcctttaatcgnattaccccgttccgnacccttcgaaangggggggggccccccgggtnnacccccaagccttttttggttnccccttttangtggaagggggtttaaatttngcnccgcctttgggcngttaaattcaatnggtcaataagcctnggttttcncnnggggggttnaaaantttgtttatttccccggttncaccaaattttcccnaccacaaacaattacngaancccggggggangcanntaaaaggtggttaaaagccctngggggntggcccttaaatggaagngggaaanctaaaactccnnnatttataaatngcgggttggngcctcaanttggncccgnntttttncaantnnnggggaaaaaccctggtnnntncccnannttggnnttttaatgggaatanngggccaaancccccgngggannaaaggcggntttc

SEQ ID NO: 6812 - DNA, 1113 bp, Homo sapiens
  misc_feature 3, 6, 7, 9, 10, 11, 13, 14, 15, 17, 19, 21, 22, 23, 24, 25,26, 28, 29, 30, 31, 32, 33, 34, 36, 37, 38, 39, 40, 41,44, 45, 46, 47, 48, 49, 51, 52, 53, 54, 56, 57, 62, 63,65, 66, 68, 69, 70, 71, 72, 74, 76, 77, 78, 79, 80, 82,83: n = A,T,C or G
  misc_feature 84, 85, 86, 87, 88, 89, 90, 91, 92, 94, 96, 98, 99, 101,103, 107, 441, 548, 592, 624, 671, 705, 726, 756, 769, 782,795, 827, 830, 833, 836, 894, 899, 902, 904, 906, 928, 936,952, 968, 969, 978, 988, 1000, 1013, 1023, 1028, 1029: n = A,T,C or G
  misc_feature 1050, 1052, 1053, 1060, 1079, 1085, 1086, 1092: n = A,T,C or G
ttntcnntnnntnnntngnannnnnntnnnnnnntnnnnnntcnnnnnntnnnntnnttttnntnntnnnnntntnnnnntnnnnnnnnnnntnangnngnangttncgatcatataggcgaattggagctccaccgcggtggcggccgcggggacccctgcgggccctcggttttaagactctggcccccgcgtacctcggccgctctagaactagtggatcccccgggctgcaggaattcgatatcaagcttatcgataccgtcgacctcgagggggggcccggtacccagcttttgttccctttagtgagggttaattgcgcgcttggcgtaatcatggtcatagctgtttcctgtgtgaaattgttatccgctcacaattccacacaacatacgagccgggagcataaagtgtaaagcctggggtgcctaatgagtngaagctaactcacattaattgccgttgcgctcactgcccgctttccagtcggggaaaccctgttccgtgccagctgcattaaatggaatcggcccaacgccgcgggngagagggcgggttttgccggtatttgggccgcctctttcccgcnttccttcggcttcacttgaacttcgcctgcgnctcgggtccgtttcgggcttgcggggcgaagccgggttattcaagcntcacttccaaaaagggccgggtaaatacccgggnttattcccaccagaaattcangggggggattaaaccgccaggggaaaaagnaaacaattggttnaagccaaaaaaangggcccagccaanaaaggggcccagggaaacccggtaaaaaaaanggnccnccnttttgccttgggccggtttttttttccaataagggccttcccgcccccccccttggancgaangcnantntaccaaaaaaaattccggaccncttcaaantttaagaaaggggggncgaaaacccccggacnnggggacttntttaaagganacccaagggcgnttttccccccctnggaaaacttnccctnngggcccccttttccctttttncnnaaccctngcccgcttttacccgggantacctnntcccgnctttttttttcccttttggga

SEQ ID NO: 6813 - DNA, 1150 bp, Homo sapiens
  misc_feature 4, 6, 12, 19, 28, 29, 30, 39, 40, 46, 47, 49, 55, 57, 60,62, 63, 66, 71, 72, 73, 79, 81, 82, 84, 86, 87, 88, 89,91, 92, 100, 102, 105, 116, 117, 143, 149, 155, 157, 160,165, 173, 175, 178, 187, 192, 199, 210, 211, 220, 224, 430: n = A,T,C or G
  misc_feature 452, 465, 533, 576, 581, 585, 628, 632, 633, 644, 689, 719,720, 730, 774, 784, 785, 793, 807, 815, 822, 833, 851, 871,878, 882, 883, 886, 894, 896, 908, 914, 919, 945, 955, 956,959, 960, 962, 966, 967, 968, 971, 989, 993, 1003: n = A,T,C or G
  misc_feature 1021, 1032, 1040, 1043, 1045, 1048, 1066, 1069, 1097, 1101,1102, 1113, 1129, 1134, 1148, 1149: n = A,T,C or G
tccncntcttgngaatttncgggattcnnngaaatttgnnaatttnngncatttntncantnnatnatttnnnattttntnnancnnnnannagagattnangcnttgaaaaaccnncactttttgaaactccaccgcggcancggccntctggngnctntcctngtgcccantntcnggcccagangtggnacaagtnatctaagcttnngataatgangaanctccaggccgagaggatgctgtttgagcacattgcagctatgtaatttttggtgtatgtatgtaatatttaaggttggaaaaaaaactcaaaagcaaagatattaactcttattagaaaaaaagacaaaaaaaaagccaaagcatgatgcgtcttgtcagcccttaagtgggctccacacctgtgcttgtgctgtgacccgcccanccaagcaataagctgcgggagngatggagcccggnaccaccacacccgtggcattttgggaacccggagtccgggtaatcttgtttggagaaaccaccccggnagttgaacctgggtggggggctgttgcctttccccaagtgcanttgtncctnggccgcttctaagaaacttaggtgggatcccccccggggcctngcanngaaatttccgnataattcaaagctttaattcggattaccccgttcgaacccttctnagggggggggggcccccgggtaccccccannctttttttgntttccccttttaagtggaaggggtttaaatttgccgcccccttnggccgttaanncattgggntccattaagcctgntttttccntggtggnggaaaaaattnggttattcccggcttcancaaattttccctccaaccancccattnaccnnagncccggggnangccattaaaaanttggtnaaaancccctgggggggtggcccctaaaatngaaggtggannccnnancttnnncantttaaattttggcctttnggcngccttccacnttggccccagctttttcnaatttcggggnaaaaaccnttntntcntgggcccagccttgcatnttnaattgaaaattttggcccaactcccctngggnngagaaggccgnttttgcgttttttggnccccnctttccccctttcnnc

SEQ ID NO: 6814 - DNA, 1126 bp, Homo sapiens
  misc_feature 1, 3, 4, 10, 11, 14, 15, 17, 22, 23, 24, 27, 31, 32, 33,34, 35, 37, 38, 39, 40, 42, 44, 45, 50, 51, 54, 61, 63,64, 65, 70, 72, 74, 75, 76, 77, 78, 80, 81, 82, 83, 88,92, 93, 95, 103, 111, 115, 399, 433, 462, 540, 582, 651,653: n = A,T,C or G
  misc_feature 692, 704, 748, 750, 764, 766, 782, 795, 808, 810, 829, 833,845, 868, 870, 886, 893, 901, 908, 924, 931, 937, 942, 944,960, 964, 967, 975, 978, 981, 988, 1005, 1007, 1016, 1020,1022, 1026, 1027, 1028, 1037, 1046, 1048, 1057, 1073: n = A,T,C or G
  misc_feature 1074, 1075, 1077, 1080, 1094, 1109, 1117, 1119: n = A,T,C or G
ntnntacttnnttnntnatttnnnatntttnnnnntnnnnantnnttaannttntaaattntnnntttgntntnnnnntnnnntaaangggnntntgcgattntatatgcnaatngtactccaccgcggtggcggccgaggtacgcggggacaagaattaagattattcccattgagaaaagggacacgcagtctgaggtcgctgaggatactttcaggaaagtggtaagatctgatggacaaagaaaaggatagtaaaccagatgtccagacagagtgccatatggcagagaaaaggtgtgtcaactggaggcatcaggaactcctatgagacgggagagttccctagaccccttcactggacttgcaacagggtacctgcccgggcggccgctctanaactaagttggatcccccgggctgcaggaattcngatatccaagcttattcgatacccgttcnacctcgaggggggggccccggtacccagcttttgtttccctttagtgagggttaatttgcgcgcttgggcgttaatcnatgggtcataagcttggttttccctggtgttgaaaaattggntaatccccgcttcaccaaatttttcacaccaaacattaccgaagccccggggaagccattaaaaaggtngntaaaaagcccttgggggggtggcccttaaattggaggtngaagccttaacnttcaacaatttaaatttggcgtttgggcgcttcaccttgccccngncttttttccaagtncngggaaaaacccttgtncggttggcccagncttgcaatttaantnggaaattccggggccaaancgcnccccgggggaantaaggcccggtttttttgctgtnantttgggggcgggcttntttttcngccttttncttttgnttcaacttgaactttngccttgnggcttnggggncngttttcgggcttggcngccnaangcgggttnttnaanctttaancttcaaaaagggcgggngnaattccggntttntncccnnntagaaattnagggggggntnaacccccangggaaaaggaaaaatnnngntgncaaaaaagggcccntcaaaaagggcccanggaacccntnaaataag

SEQ ID NO: 6815 - DNA, 1132 bp, Homo sapiens
  misc_feature 1, 5, 6, 8, 10, 22, 23, 27, 28, 30, 32, 35, 39, 40, 45, 47,49, 50, 52, 57, 58, 59, 61, 63, 65, 66, 67, 71, 72, 74,77, 78, 81, 82, 83, 84, 85, 86, 87, 89, 92, 94, 95, 96,97, 103, 104, 106, 109, 218, 468, 474, 509, 572, 647, 725: n = A,T,C or G
  misc_feature 735, 748, 751, 768, 774, 777, 781, 808, 810, 812, 838, 857,858, 865, 867, 874, 876, 879, 882, 890, 899, 910, 919, 933,946, 947, 953, 955, 956, 967, 969, 976, 983, 991, 992, 1005,1007, 1017, 1038, 1059, 1068, 1073, 1074, 1078, 1079: n = A,T,C or G
  misc_feature 1080, 1084, 1093, 1099, 1103, 1104, 1107, 1113, 1118, 1119,1124, 1125: n = A,T,C or G
nttgnntntntttctatttctnntatnntntnttnttcnnaaatngntnnanttttnnntntntnnntttnntnttnnatnnnnnnncntangnnnntagtanntntcntatagggcgaattggatctccaccgcggtggcggccgaggtaccttttcatcttctctgtggccaacatgaggaacagcaagctgaaggacatccggaacgcctggaancacagccggatgttctttggcaaaaacaaggtgatgatggtggccttgggtcggagcccatctgatgaatacaaagacaacctgcatcaggtcagcaaaaggttgaggggtgaggtgggtctcctgttcaccaaccgcacaaaggaggaggtgaatgagtggttcacgaaatacacagaaatggactacgccccgagctggtaaacaaagcaagctttttcactgtgagcctggatccagggcccctggnaggcangttcccctacttccatgggagcccacagcttcaangcagctggggccctgcccaccgcccttaagtagagggtgtggtggaactcttgctgtctgacntaccgagggtgtgccaaagggaagggccgattgttgcctgacccccaaaagccaggccttcgcgttccctgaaanctttttttggggttattgaagaattgggcttggaaattttcaaaggggtggaaccccatttccaaaaattaccattgntggggggganttttcaaccaagntcngggggaaaaggggtttncccaanccngganttgggggaggaccggacctttacccangnangaaggccgccattcttgaagttcccnacaagaaaagaagtttcanntacctcnanaaagatntnttngancttgaaanaaagggganccttcgggggncttgaaaanggtcttcccttggnaaaagcttttttnngggtcntnnacctgggggancnattcaanggactgngttgcccnncccctttttgggnanaagaagcaantttttttatattttggcctgnaagaaccaggggaaccattgnttggggcancttgnncccnnnctgnttaaaaaanaaaaanattnnggncccaanccaannacttnntttcttt

SEQ ID NO: 6816 - DNA, 1091 bp, Homo sapiens
  misc_feature 2, 3, 4, 5, 7, 8, 10, 13, 14, 16, 17, 18, 19, 20, 21, 22,23, 24, 25, 26, 27, 28, 29, 30, 31, 32, 34, 35, 36, 39,40, 41, 42, 43, 44, 48, 49, 51, 54, 56, 58, 59, 60, 61,62, 65, 66, 69, 70, 71, 72, 73, 74, 77, 79, 81, 82, 83,84, 85: n = A,T,C or G
  misc_feature 86, 87, 88, 89, 90, 93, 97, 99, 103, 104, 107, 108, 110,111, 112, 516, 679, 716, 730, 768, 857, 864, 878, 889, 893,920, 923, 944, 954, 960, 967, 975, 1011, 1026, 1027, 1030,1049, 1068, 1084: n = A,T,C or G
tnnnnanntntgnntnnnnnnnnnnnnnnnnntnnntcnnnnnntatnntnctnantnnnnnatnnttnnnnnnttntncnnnnnnnnnntgnaggngngagnnatnnannnactataggcgaattggagctccaccgcggtggcggccgcccgggcaggtacgcgggggctgctgctgcttgtcccaagaccaagtcgtaatagcaacttcccttcctcagctgcctgaactttttttttcccttgtagctggagagaagtgtcacattttgctcactctcaaccttcctcgcccacccccttcccggagaacctgtgcggtgtgtagagggtgctgtgagccacctccagcctcgggtggctgcttaagtaactttcaactcctctcttcttaacactatgaagtgtctcggggaagcgcaggggccaggcagcttgctttcctgcctctttgctggctctttttgaaagattctgcaacccggggcacaagccacctttataaccaacccgcntatgctggtggataaaagtgataaagattttattcccaaaaacaggaaagagggaagcattatggcacctggaaagaaaaatatcctaatcaacttaaagggggggaccttgtggcagcccagcaaggtattctcctatgtatcaagaaggggaaacagtttncccgaatgttccattatcccccccaaaaaatgggttncccggaagcccctngtttaagcccctttttttacaagggaaaggcccaacanttcccaattacccttcggggcccgcttcttaagaaacctaaggtggggaatccccccccgggggcttggcaagggaaatttcggaatanttcaaangcctttatccggantaccccgctcngaanccttctgaaggggggggggccccgggnttnccccaaagcctttttgggttnccctttttangtggangggtttnaatttggncgccgccttggggcgtaaaatcaattgggtccatangcttgttttccctgnnggngaaaaatggttttttcccncttcacaaaatttccccancaaacaaaaaccaagnccggggg

SEQ ID NO: 6817 - DNA, 1088 bp, Homo sapiens
  misc_feature 3, 6, 10, 11, 13, 15, 16, 17, 18, 20, 22, 23, 24, 25, 27,32, 37, 38, 39, 40, 41, 47, 48, 49, 51, 54, 56, 58, 66,71, 72, 73, 77, 78, 79, 80, 81, 82, 84, 89, 95, 98, 106,108, 139, 152, 553, 622, 710, 717, 725, 783, 787, 793, 804: n = A,T,C or G
  misc_feature 807, 829, 831, 866, 870, 894, 897, 904, 909, 913, 931, 932,943, 968, 976, 982, 993, 997, 1002, 1020, 1029, 1031, 1032,1035, 1042, 1043, 1048, 1049, 1059, 1063, 1073, 1080, 1083,1085: n = A,T,C or G
ttntgnaaanntntnnnntntnnnnantcttngattnnnnnaatcgnnnanttntngnaatttttntattnnntttnnnnnntntaagnggggtnatngttgtttncnatctctatatggcgaattggagctccaccgnggtggcggccgangtacgcgggggggaagcggcggcaggcgccatgtccggccgctctagaactagtggatcccccgggctgcaggaattcgatatcaagcttatcgataccgtcgacctcgagggggggcccggtacccagcttttgttccctttagtgagggttaattgcgcgcttggcgtaatcatggtcatagctgtttcctgtgtgaaattgttatccgctcacaattccacacaacataccgaagccgggaagcataaagtgtaaagcctggggtgcctaatgagtgaagctaactcacatttaattgccgttgcgctcactggcccgctttccagtcggggaaacctgtcgttgccaagcctgcatttaatggaatcggcgcaaccgcgccggggaaggaggcggtnttgccgttattgggcgcttcttccgctttcctcgctcacttgaccttcgcttggcgcttcggtccgttncgggctgcgggcgagccggttattcaggcttcacttcaaagggcgggtaataccggtttatcccaccagaaaatcaagggggattaancgccaangaaaaagnaaccattgttgaagccaaaaaagggcccaggcaaaaaaagggccaagggaaacccccntttnaaaaangggcccgccgnttngcttgggccgttttttttccantnaggggcttccggccccccccttggaccgaaggcanttcnacaaaaaaattccgaacgccttcnaangtccaanaaggngggncggaaaaacccccggccnngggaccttttnaaaggattaccccagggccgttttncccccctngggaangccttcccttnttgncggcntttttcttgtttccgaancctttggcngnnttnaccgggnntaccnngggccccccntttntttccctttnggggaangcngnggg

SEQ ID NO: 6818 - DNA, 1110 bp, Homo sapiens
  misc_feature 2, 5, 6, 7, 8, 10, 11, 13, 14, 16, 19, 20, 21, 23, 26, 27,28, 31, 32, 36, 40, 41, 44, 50, 55, 57, 59, 63, 64, 65,67, 68, 70, 71, 72, 76, 79, 80, 81, 82, 83, 84, 85, 90,94, 96, 100, 102, 175, 350, 415, 450, 464, 474, 492, 495,525: n = A,T,C or G
  misc_feature 560, 610, 629, 650, 655, 657, 679, 691, 699, 731, 747, 758,760, 764, 781, 787, 794, 795, 805, 843, 844, 879, 880, 895,917, 927, 930, 934, 938, 944, 956, 958, 959, 965, 973, 975,976, 980, 983, 991, 996, 1005, 1007, 1013, 1016, 1025: n = A,T,C or G
  misc_feature 1028, 1046, 1050, 1057, 1058, 1071, 1072, 1074, 1078, 1080,1090, 1096, 1100, 1108, 1109: n = A,T,C or G
tnctnnnntnntnntntannntnttnnnttnntatnaaannttntaattnttttntntntttnnnanncnnnaatnagnnnnnnnactcntacnantctntnggcgaatggactccaccgcggtggcggccgaggtacttctggaacaggacttccctgccccagtgatgacagntaaagatggcaaaaatgaagaattcaacatgtatacgcagtgcagtctgatgtcttcagatgttctctaaaattctgtatttggtcagagccgggagtgagatcagggtgcttgcacatttctgctccactgctcccgattctgctttgctgccttggagggagagtagatttanatctgggggctggtgggggccatagccttggcagctttgcttgggctaaccaagtacctgcccgngccggcccgctctagaactagtggatcccccgggnctgcaggaattccnatattcaagncttatcgatacccgttcnacnctccgaggggggggggcccggttacccaancttttgtttcccttttagtgaaggggttaattgcngcgccttgggccgtaaatcatgggtcaataagcctgttttccctgtggtngaaaattggttaattccgntttaacaaattttcccaccancaaancnattacccgatgccccgggggangccattaaaaangtggttanaaagcccttggggggttggcccttaaatggangtggaagccttaaccntcaacattttnanttgnccggtttggcggcttcnaccttncccccgnnttttttccanattccgggggaaaaaaccttgggccggttggcccaaannctgggcaatttaaaatggaaaattccggtcccaanntcccccgggggtaanaaaggccggtttttgcggtaantttgggggcncgncttntttnccgctntttccttagggntnnaaattngaaacttnannttgncantttggggnaattntccgggttngngggccnagncgggttttnaancttcaccttcaaaagggncggnaaattannggggtttttccannanaaantnatggggaatntccccnctgnaaaaaaannt

SEQ ID NO: 6819 - DNA, 1205 bp, Homo sapiens
  misc_feature 4, 5, 7, 8, 11, 12, 13, 16, 17, 19, 23, 24, 25, 26, 27, 28,29, 30, 31, 34, 38, 39, 40, 43, 47, 48, 57, 58, 62, 63,64, 65, 68, 72, 74, 80, 81, 84, 86, 88, 93, 94, 95, 96,98, 99, 100, 102, 103, 105, 106, 109, 111, 112, 125, 138,142: n = A,T,C or G
  misc_feature 175, 178, 189, 190, 431, 462, 473, 490, 511, 524, 544, 556,594, 641, 645, 671, 692, 695, 707, 726, 733, 745, 747, 748,749, 782, 785, 793, 822, 823, 828, 847, 850, 865, 869, 870,878, 880, 881, 885, 892, 895, 896, 901, 904, 906, 907: n = A,T,C or G
  misc_feature 933, 936, 950, 953, 959, 960, 964, 975, 980, 981, 984, 992,1000, 1002, 1012, 1017, 1019, 1022, 1023, 1025, 1026, 1028,1033, 1034, 1035, 1044, 1050, 1063, 1064, 1065, 1070, 1072,1074, 1078, 1079, 1080, 1081, 1085, 1091, 1101, 1102: n = A,T,C or G
  misc_feature 1105, 1107, 1118, 1120, 1125, 1134, 1135, 1152, 1153, 1154,1160, 1161, 1165, 1172, 1179, 1181, 1182, 1184, 1186, 1190,1191, 1197, 1199, 1201, 1202: n = A,T,C or G
atanngnnacnnntgnngnagannnnnnnnnaantttnnngtntctnntacattggnngtannnngcnattntnacgatnnccngnanttctnnnntnnngnngnnagngnnattgcggaaattntgttttactatanggcngaatccggagctccaccgcggtggcggcccgangtnctgaccatacnntaactgacagcaaacttagggtttgcatttgagctacacattcactggaatttcacggcaaatattcaacttggcttgatcaacactgctcaaagaaaaaaaaattatacaaaatgtgcaaattcagaggttggcaaaattctgaagctagcgaggtaaacaaaaatattaacaccatgaaaacttcaaataaaattaaacctatctttctcttccccgaagatttagctggcaaattcanaaaaggttctcttagaggtggggtctgatgnctgccagaagnccttcaggaccttcaancacttataatggaggatgggnagacccgtggggntaggggcccgggaggttgcntttgcctaaatntacttcggagtgcagggtttttggttcccaacttccgngcttttggaacccccgccgttacccttgcccccggggccgggcccgncttncttaaggaaacctaagttggggattncccccccggggggccttggcnagnggaaaatttccncattattcaaaaagccttnattcctnatttaccccgtncnnnacccctcataagggggggggggggcccccgggntancccccaancctttttttggattcccccctttttaagnntggangggggtttaaattttgccnccngcctttgggcggttnaatnnaattgggncnntaangcctggntannccctnggngnnggaaaatttggggttaattcccgccntcnacaaaattttccanccncaaccnntttnccaaaatcccnggaannccnaaaaagtnggtaaaangnccctgggggntggcncntanntnngnggggnnnccctaaccntcaacnctttaaaatttgnnntgttncngnctcnnnntggnccccgntttttccaanncgngngaaaaacctcntnaatgncccaacccnnggaatttaaagaaaaannnggcccnncccncccgggnaatagangnncntnttgnnattttngngnnccc

SEQ ID NO: 6820 - DNA, 1143 bp, Homo sapiens
  misc_feature 2, 4, 6, 11, 13, 16, 17, 21, 22, 25, 26, 29, 30, 32, 33,36, 38, 43, 44, 48, 49, 55, 56, 57, 58, 61, 67, 70, 74,75, 76, 77, 78, 82, 83, 87, 90, 91, 94, 95, 96, 99, 102,104, 105, 204, 564, 577, 582, 601, 609, 616, 623, 681, 683,692: n = A,T,C or G
  misc_feature 722, 725, 746, 765, 772, 779, 804, 819, 822, 827, 862, 867,869, 879, 880, 882, 893, 894, 896, 925, 928, 937, 938, 951,952, 968, 973, 976, 989, 998, 1008, 1013, 1015, 1024, 1027,1031, 1032, 1036, 1040, 1041, 1049, 1050, 1051, 1061: n = A,T,C or G
  misc_feature 1062, 1069, 1070, 1073, 1074, 1075, 1084, 1090, 1091, 1094,1096, 1100, 1115, 1119, 1126, 1132, 1138, 1139, 1142: n = A,T,C or G
tngnanatttngngtnntttnnacnnccnntnncgntnaattnngatnnctgttnnnngcnattttnatntccnnnnnttgnnaggnggnntgnnnttnttncnnttttatatggcgaattggagctccaccgcggtggcggccgcccgggcaggtacacatctgtgagcctttcggtgagcaggtgaggcaattcctcttcancaacacactcctctggaatcttcagcatgatgaagaatgttttgtttgatgataattcaagtatttcattttcatcttcatcaacataagttactgcagcaagacataagcctatgatgatcactgtaatgacacctaggaaaatggaggtgatgatcatccacagtttgcatcttccaaccaccatttcttattacaggaagctccaggggcctttcctttgttagccttcggccgctctaagaactagtggatcccccgggctgcaaggaatttccgattattcaaagccttatcggattacccgtcgaccttcgagggggggggcccccgggacccaagctttttgttcccttttangtggaggggtttnaattngcgccgccttgggccggtnaaattcantgggtcnataagcntggttttccctggtggttggaaaaattggtttattcccggctccaacaaatttcccancnccaaacaanttccgaagccccgggggaagccattaaaangtnggtaaaaagcccctggggggntggccctaaattggaggtnggaggcnttaaccnccaacaatttaaattttgcgggttngggggccttcaactnggncccgncttttttcccaggttcgggggaaaaaacccttgtngcttngnccccagcctnngncattttaaatnngnaaattcgggcccaaacccccccccggggnaangaaaggccnnggttttggccgtnnatttgggggccgcctnttttncgncttttccttgggntttaaattngaaatttggntttgngnccttcgggnccntttnnggcntttnnggggaaannncgggttttcnnagctttnnctnnnaaaaggggngggtannatncngggnatttcccccaaaaantcanggggggntaaccnccaagnnaana

SEQ ID NO: 6821 - DNA, 943 bp, Homo sapiens
  misc_feature 1, 5, 7, 12, 28, 37, 48, 50, 58, 63, 64, 70, 73, 80, 86,124, 130, 237, 306, 357, 377, 428, 468, 589, 591, 619, 649,656, 736, 756, 758, 765, 774, 781, 785, 788, 797, 816, 819,823, 836, 846, 852, 872, 887, 892, 899, 903, 910, 923: n = A,T,C or G
  misc_feature 930, 943: n = A,T,C or G
ngtangncgaanggagctccaccgcggnggcggccgnccgggcaggtncncgggggtnactgnntatccncangtcagantagccngatctcatgaggagcctggctaagcaaaaccctgcagnacggcntgcctaatttacagcaaccattgaggaaaggccacttaaggatgcagctaagaaggagccatctgcaatccaggaagaaattccttgccaggaaccaaattggttgncaccttcatctaggacttctagcctcgagaacttacaaatgggggatgatcatcacgtcaaggatagtntggagcaattgagatgttcactttacatggggagttatccattgatgacgnatggaaatgcctggatttangaaaacagagtcttggatcagattgaatttcctagacaccaaatacagtgnggggaatacaccaacctactagcctatgtgaaacacctgnaaaaggccagaatgaaggaagccctgaaagagcttaaaaaggaagctggaaaacttaatgcagggaagaacatggacaaccaagccaaatggtgagggaagtcttggtgaccctggggggncnacctttgcctgggaatggttattaaccnaccattggggccaggacttgggcagaaaangcccaanaacctttacccttgggacaaagggggggggaggaaccatttttgccaaaggaaagccttttcaaaaatcccccttttccngcttattaagaaatgggaantngtcccanaaaaattangaacctnggtnaanggaaagggnatggggcccctttgcttgnaantggnggggggggaaaanaaaatttttnaaaccnggggcccaaaggccctggcnttttgaaaaaagggngcctntgaaagngggnacccctnggaaaaacccttnaaatccngcggcttgggggn

SEQ ID NO: 6822 - DNA, 981 bp, Homo sapiens
  misc_feature 1, 2, 4, 5, 6, 7, 8, 9, 10, 11, 19, 24, 46, 330, 339, 356,357, 396, 446, 454, 463, 500, 506, 562, 563, 587, 599, 602,617, 630, 638, 641, 653, 660, 661, 666, 670, 679, 691, 694,700, 704, 731, 736, 739, 742, 743, 746, 750, 753, 754: n = A,T,C or G
  misc_feature 762, 769, 783, 785, 786, 793, 805, 809, 810, 813, 815, 826,828, 831, 832, 839, 853, 857, 858, 876, 879, 881, 900, 911,926, 934, 935, 938, 941, 944, 956, 957, 962, 966, 968, 973,981: n = A,T,C or G
nnannnnnnnntaaaaganattgnactccaccgcggtggcggccgnccgggcaggtaccacgatgtatagagcaacactggggtaaggtcactgtgggatggttgcctgctgagacctgtgcaaacgtaacacatgccaccatgccaaggatgtggcggaacaagcagccctaccaaggctgggcccccatggactttgtgcctgctgggagatttataggtctgtggggacataggatggccatatcttgccagccaactagactggacattgtacctcggccgctctagaactaagtggatcccccgggctgcagggaattcgatatnaaagcttanccgataccgttcgaccnncgaggggggggcccggtacccagcttttgttccctttanatgaggggttaatttgcgccgcttggcggtaaatcatgggtcatagctgntttcctgnggtgaaaantggttaatcccgctcacaaattttccacacaaacaantaccgnagccccggggaagcattaaaagttggttaaaagcccctgggggggtggccctaaanngaaggtgggagccttaaccttcancatttaaatttngcnggtttggccgcctcnacttgcccccgcntttttccnagntccggggaaaanccttggnnccgtngccnagccttgcnatttaaaatggnaantccggncccnaacccccccggggggaaaaagggccgnttttnccntannttngggnccnncttctttnccgcttnccttcggtttcaantnnaacttcngatgggcccctncggnnccntnccggacttggngngcnnagcccgntattcaagcttacncctnnaaaagggcgggggaaatnccngnttatttcacaaaaaaaatncagggggaatnaccccagggaaaaanaaacttgnnaancanaanagggccaacaannaaagnccantnaaccngtaaaaan

SEQ ID NO: 6823 - DNA, 1000 bp, Homo sapiens
  misc_feature 2, 15, 46, 54, 83, 232, 328, 343, 355, 385, 399, 425, 429,470, 486, 516, 530, 551, 566, 568, 569, 577, 581, 582, 610,624, 646, 647, 656, 657, 659, 667, 670, 702, 707, 711, 731,761, 773, 775, 776, 786, 794, 799, 806, 814, 837, 840: n = A,T,C or G
  misc_feature 844, 845, 848, 856, 867, 869, 886, 889, 907, 912, 922, 924,947, 954, 960, 966, 967, 974, 983, 986, 990, 994, 995: n = A,T,C or G
cnctatagggcaaantggagctccaccgcggtggcggccgcccggncaggtacntattttaattacaaggtgtcaacatacangattagcataagcttcaactgtcataagaaacatgttccatcaaattcagaaacagcacggtatcagtgaaactggagcaagcattttgaagacttcaacgtattggatggaatttttcaaaaatttcaccatatgatttcttatcttncttcaggaaaatcctctgggatgtaattttcatatatccaaacatttcacggtccctcacagcataccaggtagtctttcacgttttacaaggatnatatccagcaaaaanaaaaggccgtanatatataagaagctggcgatgcaaaccagnccgtcgcgatcggnctcccgcccgggatcagggtttatcnatcngggccggagccagtagcccaagaagcccgatgtaagtaggnagcccgcggggtcggntccaagctttggggccggggggccaggctnctgggccctttatnccgaacaggaaaaaccccgtnaagggggttttcttngnntttcccgnccgnngccgaatccatggggtgaacccgcccgngtttcccacctttngaagggccctggggtccttcanngaccccacnnanaccttacnatnggggaagaaccccccggacggacccacctttnccccngggngcccttaaagcggggtgcangcttttttcttccttcacttccattttggngccccccggcgntnnccttctgggnccgggctncttanaaacctngtggggantccccccccgggccttgccaggnaanttcnnatntatccaancttttattcgntntccccggccgaaccttngangggggggggccccgggtnccccnaagctttttngngttccccttttaaggggaggggntaaaatngccccncttggnngggaatncattggganaanagangggnntccct

SEQ ID NO: 6824 - DNA, 952 bp, Homo sapiens
  misc_feature 3, 8, 11, 13, 14, 15, 19, 23, 44, 60, 100, 184, 197, 221,286, 308, 393, 415, 420, 434, 442, 451, 462, 482, 510, 524,526, 563, 583, 594, 604, 623, 624, 646, 658, 660, 686, 689,690, 703, 709, 713, 714, 724, 726, 729, 747, 778, 781: n = A,T,C or G
  misc_feature 797, 803, 815, 816, 819, 822, 828, 830, 832, 836, 841, 849,851, 854, 868, 872, 879, 899, 904, 911, 913, 926, 935, 936,941, 947, 952: n = A,T,C or G
aancagcnganannntgcngcantggagctccaccgcggtggcngcgcgaggtacgcggnggaaaaactgtaaccatgatgaaggcaaaggaaagagcanagagctcggtagacagaggaaggagcctgtcctcagacaggcccaaaagtgagtgtgtgtgggagtttgtgctaatgttcagtnggtggaagctcanggatttccactgtattcttaaggngaagtcagagatttgagagaggatacccacttgaaccatacagctgccattttgggctgcaacancgaggccagtgtagaaggaganataaatgaaactggtgcatttggagtcaggacaaaaaaggccatttcattggctctttcaatctggaaaagattctgtaaacttngggtaaccatagcaagttcctnaaatnaagaataaaggccngtgggatntttaataanaggggcaatanccaggggatttcaaaggaanagagaaaatactgcaaggtgccttgcancatgaaaaagccangnccctggaagaaaaaaagatttctggccatgagcatgnctttgatgcaaaaaaccccnccccgggaatngcccattttntcctttgtaaaaaacaaannagggggcccctggccttaatangcccactttaananccaggatgggatttttcaaccaggangcnncgctttaaacctnatcccntggnncatgaaaacncnatnggggggggggaaaagggnataaattatttttttttaaaaaaatccatgnccntggcttgttttttttncccttngaaaattccaannacnccnattggngnanttantccgnccaagtgntnttnaaaaccaaaaaacncaanaatcctnggggtttttggggtacccangaaangggatcncnagggcctttttgncctttcttnnaaccnactgcnctggn

SEQ ID NO: 6825 - DNA, 841 bp, Homo sapiens
  misc_feature 4, 596, 626, 651, 654, 681, 721, 737, 740, 741, 751, 753,760, 789, 790, 794, 795, 802, 806, 818, 826, 833, 834: n = A,T,C or G
actnctatagggcgaattggagctccccgcggtggcggccgaggtacgcgggggctttgtttgtttgggcttttacaggttggtttttgctctcggcagtctccagctatagaggtcctgaaaagagggagaaggcattggaaactaactgtagctctggatttcagtttcagcggatgttctctccagctttcaacagaccttgcactcaactttgctgaatcccattccaaaatgtcggccagcgctctgcaccttactatctcatggcttcttcagaaatgattttctggaagttgtgaatttcttgaaaagtttaacattgaagagtgaagaggagaaaacggaattctttaaatcatgcgcagggagaaactccttgcttgctctcaccagccctgttccagtcacgggtgatccccgtgcttctccagttgtttgaagttcatgaagagcatgtgcggatggtgctgctgtcttcacatcgaggcctacgtggagcactttcactcaggagcagctgaagaaaggtcatcttgcccacaaggttttgctggggcctgcgtgaatactaagcgattccatttgtgggcaanttactcttgcataagccctagcagtgcttngtcttttctgctttggaccaaaaangtngttgtgggaaggaagaaccaaaccaangattttcaaacgcccctggccccaagttttactaaaaaanacctgaccctttcttntannaaggcgaatncnttttttntcagccctattaaaatttccccataaaanngggnntcttaanatgntaaaaaaaaacnttcggganggacagnngaaaaat

SEQ ID NO: 6826 - DNA, 1115 bp, Homo sapiens
  misc_feature 114, 203, 246, 256, 276, 297, 346, 366, 378, 388, 400, 422,429, 432, 435, 449, 461, 486, 488, 509, 520, 529, 536, 543,560, 574, 588, 591, 600, 604, 616, 635, 654, 669, 675, 677,679, 691, 701, 705, 722, 728, 750, 753, 754, 758, 759: n = A,T,C or G
  misc_feature 760, 764, 782, 785, 786, 788, 790, 802, 808, 811, 822, 823,824, 825, 828, 837, 840, 841, 844, 845, 846, 863, 870, 872,873, 879, 909, 910, 915, 920, 921, 939, 942, 944, 947, 965,966, 967, 977, 983, 986, 992, 1003, 1008, 1013, 1014: n = A,T,C or G
  misc_feature 1017, 1034, 1046, 1047, 1054, 1058, 1062, 1070, 1081, 1088,1091, 1095, 1098, 1101, 1102, 1103, 1108, 1111, 1112, 1114: n = A,T,C or G
actcactatagggcgaattggagctccaccgcggtggcggcccgcccgggcaggtacgctgtgaacctgacgagtcacatggggttttctggcaaaatccctcttgttttagtngggttctatgtttatacttgattcctgggatagataagtctgtcttctccacataatgaaaataaaaaacttttaatttttataccagnggcagttacttttaagccactttaaaaaggttaaggaagtgtnaagtaccctngggcccgcccgggcaggttncgacccaagccaggggaggangaggcaccaccgagaaggtgacttcagacttcaagggaagccattcgtntgtggtcccggctttggacnttcccagggagntaagaaatancggttttaccancccatttccaaaggtcccttgnaggaggnttnggnacaaggggaaaaangaagaattgccnccccaattttggtaaaaaccaaaangntgggtggaacaacccaatttngtgtctttccnaacccaaancaaaaanttttgcnatttttggggagggccnaaaaccccccttgnccacccttggggangtnggcttccanaagntccttccccttngggggagggaggggaagcnaccccaccccccaaggaanattttaccttggggnttaatnangnaaattttacccnccaaaccccnttancaaaaaaccgggcccangccaangggtaaaattttctttttgggnaannaaannntggnttcccattgccttgatancannangntccttggccacntttttngantaaaacccctnnnngtnccccggggnccnnggnnnttaccctttaagccccncttcttntnnaaactnaggtggggaatcccccccgggggcttgggnnggggnatttnnatttttcaaaagcctttnttngnaancccgggtcgccccctctnnngggggggggncccggnaancccaancttttttgttnccccntttannggnggggggtaaatttgggnccccttggggcnntaaaatnaatngggngaataacnttgttttttcnggggggnganaaanatngtnnntcccnccnncnt

SEQ ID NO: 6827 - DNA, 1062 bp, Homo sapiens
  misc_feature 5, 8, 14, 20, 25, 27, 34, 54, 56, 86, 166, 289, 296, 302,320, 395, 405, 406, 415, 416, 419, 420, 460, 468, 474, 478,488, 499, 506, 518, 520, 528, 543, 544, 549, 583, 595, 602,603, 627, 659, 661, 662, 674, 696, 704, 706, 707, 709: n = A,T,C or G
  misc_feature 710, 717, 731, 736, 739, 741, 747, 754, 758, 762, 764, 773,778, 789, 790, 792, 793, 797, 805, 810, 814, 821, 828, 832,833, 838, 857, 858, 870, 871, 885, 891, 898, 913, 924, 925,928, 933, 940, 942, 946, 949, 953, 962, 964, 965, 966: n = A,T,C or G
  misc_feature 977, 979, 982, 987, 989, 991, 994, 998, 1005, 1009, 1014,1015, 1016, 1017, 1019, 1020, 1021, 1022, 1023, 1028, 1035,1042, 1044, 1045, 1047, 1051, 1054, 1056, 1059, 1060, 1061: n = A,T,C or G
catgnatnttggcnaatagnatctncnccgcggnggcggccgcccgggcaggtncncgggggagggcccatgtgctgaaaatccgnagtgccgcggaaagtggagagctgacaaggaaggtttctgagccgtttttgctggcaaagggatttcttacaacctccangcatgcgtctttctgccctgctggccttggcatccaaggtcactctgcccccccattaccgctatgggatgagccccccaggctctgttgcagacaaagaggaagaacccccccatggatcangccggcngcccantggtttgttggaacccanctctggatgaaagactgggtattctggttctggtggggaccacggttgggaagaatccttattaaaggccaatgngattcccttnnaaaggcaannggnncaaatagttgggttttcaaaggttttaattcccggggcanggccgaanaaaccntggngttgggttcntagggggaagngggcctntaaacaccaacnantttaaccngtcttacaatttggnncaaangaacccattgggaatttacctggggggaaacccnttggatcccccntaagtgnnaaagccccccctttgccttcccancccgcccaagggttcaaaaacctttggtgggnanncctttttgggancaagggaaaacccccccttaangaatccgnanntnnggaaganttttaacttgtaancccanggnanaacccnggggttncccnttgngncccgggttntttangaaaactttanntnngatncccccccnggggnttgnaaagganaattttntatnntctangctttattcgaattactcnnccaaactccttnnaggggggggggggnccccgntaccccncaaccttttaggttncccctttttanngtnggggntaaaatngntccnccnttgngcgtaaaanannngggtcaaatancnttnttttncncnggngttnaaaaatntttnttccnnnntnnnnnaattntcctcancaaaatnannantccnggngngcnnna

SEQ ID NO: 6828 - DNA, 978 bp, Homo sapiens
  misc_feature 76, 103, 137, 177, 197, 215, 247, 258, 294, 360, 368, 404,419, 440, 486, 496, 593, 600, 605, 609, 624, 641, 643, 656,670, 697, 699, 702, 703, 712, 720, 731, 739, 763, 771, 777,793, 796, 819, 829, 830, 831, 834, 835, 843, 853, 860: n = A,T,C or G
  misc_feature 863, 872, 876, 881, 890, 892, 900, 910, 911, 929, 941, 944,946, 951, 963, 973, 974: n = A,T,C or G
tcatatagggcgaattggactccaccgcggtggcggccgcccgggcaggtactttttttttttttttttttttttncaaacttattttaatatccttcttccntcccccaccacattgggaaaaggctaaaacaatntggatgggtttaattacaaattaatacatactgtcattgngtaaagtaaatcaacattgnggcaacaagggactattnttggaaaaagtgaaacccatattaacaaaatntgtcatggaanaaccccacttagggatttcactggctgcttgaaagnacagtcaatggaaaggtcaatgtttcctgcatgttctctgggggcttgtccatgccctccggaaanaaaggttnttgcccgggacttcaacccaagccctagttagctcnaaaacaggcccttanaccaaaaaagccaaggggaanagggcatccttttcaaatagggacaaaggggtagaaagggggcaanaattgaaaanaataaaatcctgcagcttttactttaaaaaagccccaacggggggaaaaaaaaaaaaggccagggaaagtttaccttggggaaaggggcttaaaaanaaaaagnccgcnagcnattttttttttcaancggtttaaaaaaaaaantntttaaaaaaaaanttaaaaaaaaaacnaaaaccaaatttaaacctgggcaaagnantcnntttggggangagggaanggaaaaaaaangggaattngaaacttttcattttggtttttcnagggggangttttngaaacaccgggttctnaancttttaatcccattgtttttccntttttggcannnacnncccttttncttttttaanaacttgnggnttttgaccnttgnggaanacccttttngnttttacanccttttgggnnggaaattgtttttttttnaaaaaaaggganccntnggccncttctaaaaaantagggggganncccc

SEQ ID NO: 6829 - DNA, 859 bp, Homo sapiens
  misc_feature 57, 83, 85, 86, 89, 114, 154, 162, 178, 188, 201, 227, 248,312, 319, 321, 334, 359, 372, 374, 380, 388, 396, 423, 430,439, 461, 463, 475, 502, 503, 514, 517, 551, 554, 570, 572,584, 600, 606, 612, 613, 624, 633, 635, 645, 648, 662: n = A,T,C or G
  misc_feature 665, 676, 685, 687, 688, 693, 707, 718, 721, 722, 728, 744,747, 752, 753, 756, 757, 776, 779, 801, 804, 814, 816, 822,825, 827, 837, 840, 841, 842, 845, 846: n = A,T,C or G
ctactatagggcgaattggagctccccgcggtggcggccgcccgggcaggtactttntttttttttttttttttttttggggncnnttnttttttttttttttaagccttcggngctttaatccagaggaaaattacttattttaaaaagcagngaaaaacnccgcattcctttggcncaggatgaanaccagctcagctnttcagttgttgatcattggctattgntctccaaacagtaaaccagtntttcacactgagattgtcggctgcgggtatattccaattccccgtctcctcatgaatatgaagngaagggntntgaccctggaagnggtaggtaattgcttggcgataggngattgtctcgccncncagctntaggcgangggctcancactcggggataggcgattgtcccatntaggtcnccaaaatgngtctggaattggggggttcttngnctcactgacttnaagaatgaagccccgggacactcgcanngagtgttgcanttnttaaaggcggcatgtctagaggtttggtccttcngangtttcggaatgggttnanaaaatttctttnctttcttggggggggnttcggngggccnncgcttggcttncagggaggngnaaaacctggnggnaccctttcccgggnggntaccaagcttnattaaaggncnnggggnggggcccccaaagnagtgggggccngcnncaaatnttttttttgccaaagngcnaaaannaannaaaaacccttccccggggnggngggaaagggggccccaaaagcnggnttgccccccngnttaccnttngncccgccgggnccnnngtnnctttttttttttt

SEQ ID NO: 6830 - DNA, 996 bp, Homo sapiens
  misc_feature 2, 5, 6, 8, 9, 10, 11, 12, 84, 88, 105, 107, 108, 114, 334,361, 380, 395, 444, 569, 651, 675, 697, 698, 707, 742, 758,765, 770, 776, 790, 804, 806, 808, 810, 811, 813, 817, 830,834, 843, 850, 862, 865, 883, 893, 899, 900, 908, 916: n = A,T,C or G
  misc_feature 934, 935, 952, 961, 964, 966, 968, 970, 971, 978, 979, 984,989: n = A,T,C or G
tnttnncnnnnnttttagggcgaattggagctccaccgcggtggcggcccgaggtacgcgggggttacggtctgagacatcacngccnagctgggcatcggggananngccganactgaccccaagaccgtgcaggacctcacctcggtggtgcagacactcctgcagcagatgcaagataaatttcagaccatgtctgaccagatcattgggagaattgatgatatgagtagtcgcattgatgatctggaaaagaatatcgcggacctcatgacacaggctggggtggaagaactggaaagtgaaaacaagatacctgccacgcaaaagagtngaagggttgctaataatttatactggnaaatctgggcatttttttncaagccaagaggaanatcggaaatggcctttttttgcagctaactactatgtgttaggacaggntttttaatattataaaaggtattccatttcttatcacctaagtattattaagttagttttgttaggaggaggattttccccccccaagtttttctttggaaacattggtaattcctttcaccatnctttgggaaccctttgggtccagtttggtgccttattttcaatttatttaaaaaccaccttaaaaaccttttgggccggggnttctttggccattaaacaatttgntccagaatttttttttaggggnnatttttctnggggaaaggccaattttttttttttttttcctttngtcaattacctttttnggaaagntaaanttggcntggctcttggggantaaaaaaggtttgnantngnngngganttttttttaattnaaancaaaaattnttaaaanccccctttcaanttnttaggtttgggccttggntgaaaaatanagaatnnttttggtngaaccttnaataaaggttgttttaanntctttggggcccaaccntggacctgnttnancntnnacacccnnaatanggtgnggttggc

SEQ ID NO: 6831 - DNA, 957 bp, Homo sapiens
  misc_feature 9, 105, 291, 328, 391, 405, 500, 536, 552, 553, 555, 598,657, 668, 675, 681, 694, 706, 741, 758, 768, 776, 801, 802,813, 822, 827, 835, 836, 837, 839, 853, 863, 894, 895, 922,930, 938, 941, 944, 948, 951: n = A,T,C or G
tatcaacgncgaattggagctccaccgcggtggcggccgcccgggcaggtactgcggggggccgggccgagaggtggttacattcgttgaaggacaccagctgcngaatttgcggctttggcagattgaaatcatggcaggtccagaaagtgatgcgcaataccagttcactggtattaaaaaatatttcaactcttatactctcacaggtagaatgaactgtgtacctcggccgctctagaactagtggatcccccgggctgcaggaattcgatatcaagcttatcgatnccgtcgacctcgagggggggcccggttacccagcttnttgttccctttttagtgagggttaattgcgcgcttggcgtaatcatgggtcatagctgtttcnctgtgtgaaattgntatccgctcacaattccaccacaacataccgagcccggggagcataaagtgtaaagcctgggggtgcctaatgagtgagctaaactcacattaanttgcgtttcgctcaactgccccgcttttccaagttnggggaaaacctgttcnntngcccagcttggcaatttaaaattgaaattccgggcccaaaccnccccggggggaagaaggccgggtttttggccgttaattggggccgccttctttccccgnctttccctttnggcttcnacttgnaccttccggcttngcggcttcgggntccgtttcgggcttgccggccgaaccgggtaattnaagcttaacttcaaaanggccgggtanaattaacnggtttatcccaccaagcaaatccanngggggattaancgccagggnaaaanaaccattnnnanaccaaaaaggcccngccaaaaaanggccccggaaaacccgtttaaaaaaggcccnncgttgcttggccctttttttccataanggcttccngccccccntgnacnaacnttnaacaat

SEQ ID NO: 6832 - DNA, 985 bp, Homo sapiens
  misc_feature 5, 12, 153, 167, 214, 358, 377, 394, 462, 484, 507, 510,529, 534, 543, 572, 590, 591, 604, 610, 616, 630, 633, 642,651, 653, 665, 666, 674, 697, 702, 709, 711, 730, 732, 737,743, 750, 759, 761, 767, 770, 782, 783, 784, 793, 794: n = A,T,C or G
  misc_feature 803, 817, 834, 841, 848, 849, 851, 866, 874, 876, 889, 890,891, 893, 899, 900, 903, 904, 911, 924, 929, 932, 933, 974,984, 985: n = A,T,C or G
ttatnctagtantattgggcgaattggagctccaccgcggtggcggccgaggtacaggcatccctgagcctcactaaggagattccattcctcctgggtaaatttcacagccacgtcttcaaaagtcactgtgccctgaacggggaaccttancgcggccgctctanaactagtggatcccccgggctgcaggaattcgatatcaagcttatcngataccgtcgacctcgagggggggcccggtacccagcttttgttccctttagtgagggttaatttgcgcgcttggcgtaatcatggtcatagctgtttcctgtgtgaaattgttattccgcttcacaattccacacaacatacnagcccggggagcataaaantgtaaaagcctggggtncctaaatgagtgaggctaactcacattaaattgcgttgcgctcacttgcccgctttccaggtccgggnaaaccttgtcgtgcccagcttncattaatgaaatcggccaaaccnccncgggggaagaagggcgggnttttncgttaattnggggccgcctcttttacgcttttcctttngcttcaacttgaccttcnncttgcagctttcnggtccntttttngggcttgacgggcngangccgggttnttcaagccntnaactttcaaaannggccgggngaaattaccgggtttaattcccnccaanaaattcnanggggggaattaaccgccangnaaaanaaaacnatttttnaacccaaanangggccnacnaaaaagggcccnnnggaaacccnnttaaaaaanggcccgcggtttgncttgggccgcttttttncaattanggttccnngnccccccttggccganggctttcncnaaaaaaatttgannncnttcaannttnnaaagggnggccaaaaacccnggccnggnncttttttaaattataacccagggggtttttccccctttggnaaagttcccnn

SEQ ID NO: 6833 - DNA, 1034 bp, Homo sapiens
  misc_feature 1, 2, 3, 4, 7, 10, 12, 13, 14, 16, 22, 23, 30, 49, 53, 88,277, 285, 298, 325, 370, 378, 444, 448, 452, 470, 500, 518,524, 527, 529, 534, 543, 546, 548, 562, 567, 582, 599, 606,627, 631, 637, 644, 683, 686, 697, 712, 715, 717, 742: n = A,T,C or G
  misc_feature 748, 766, 775, 778, 779, 804, 808, 815, 827, 845, 849, 862,865, 871, 873, 880, 895, 902, 918, 921, 927, 972, 973, 974,976, 991, 993, 994, 996, 999, 1001, 1011, 1020, 1023, 1024,1030, 1033: n = A,T,C or G
nnnncanttntnnntntgagcnnaattggngctccaccgcggtggcggncgangtacgcgggttgcaagtattatttttgcttcctgngttactgccattcctatttacagtatatttgagtgaatgattatatttttaaaaagttacatggggcttttttggttgtcctaaacttacaaacattccactcattctgtttgtaactgtgattataatttttgtgataatttctggcctgattgaaggaaatttgagaggtctgcatttatatatttntaaatacnatttggataggtnttttaaattgctttttttcataagggnatttataaagttatttggggttgtctggggatttgtgtgaaaagnaaaattanaaacccaccgcttgtattttacattttacctttggtagtttattttgttggatgggccaagttttnttgnttanttttttgggggacctgtngggtagccttcttttgggaattgttttttnggcaaaaatttaacaagnctgganaantncttgntggtccatnggnanttaaaaacctgggnccttnatggtgggcctttanggaaaattaagggaaangaaggangaaaaaaaaaattgaaaaatngggnttggtntttaccntaaattttttaataccctcccccatttaaaaaaaaatcnctnttaaatgggtnaaaggaaaaaccccnttnanaatttaaaccatttgaatttggaantcaaantattgggcccagcaatgnattttaacnagnncccatttattattggccattttggnaaangccccanctttcaaccacntagccctttaccaagggnttcntttgaaaaggggnggnaaaaancntttaaantttcttttcctggcntttggcnggaaattaaatcccancantgggtnaataaaatttctaaagcccttaaattctattttttttaaaaaatnnnangtgcccctctttggngnnanacntntttttcttgngttttaaanaannatcccntgnc

SEQ ID NO: 6834 - DNA, 375 bp, Homo sapiens
ttgagctcccgcggtggcggccgcccgggcaggtacaattattgctgggaagggaaatactccaagatctcctcttgtgctgttttcccttttctgattgtttacccagatttccagaattagtctgttccttcagtgtgtgtgaccaggttaaatgctgctttttcaagctaggttgaaactccaatagatctactgtgcaatcataactgtgtgacttagcatcatgttctgaaatggttaagtacctcggccgctctagaactagtggatcccccgggctgcaggaattcgatatcaagcttatcgataccgtcgacctcgagggggggcccggtacccagcttttgttccctttagtgagggttaattgcg

SEQ ID NO: 6835 - DNA, 1082 bp, Homo sapiens
  misc_feature 4, 5, 6, 7, 9, 10, 13, 15, 17, 18, 20, 21, 22, 23, 24, 25,27, 28, 29, 30, 31, 33, 34, 35, 36, 37, 39, 40, 42, 43,44, 45, 46, 47, 48, 51, 54, 56, 59, 60, 61, 65, 66, 68,69, 70, 71, 73, 75, 76, 77, 78, 79, 81, 82, 83, 84, 85,86: n = A,T,C or G
  misc_feature 87, 88, 89, 90, 91, 94, 95, 96, 100, 101, 103, 105, 107,110, 510, 640, 644, 650, 657, 658, 665, 670, 673, 675, 677,681, 683, 693, 694, 720, 772, 788, 791, 795, 808, 811, 813,836, 853, 871, 885, 890, 898, 900, 909, 911, 917, 923: n = A,T,C or G
  misc_feature 935, 936, 942, 948, 952, 954, 957, 960, 962, 974, 985, 991,996, 1004, 1005, 1028, 1029, 1035, 1054, 1057, 1068, 1081: n = A,T,C or G
tatnnnnannttntnanntnnnnnntnnnnntnnnnntnngnnnnnnntantananttnnnattnntnnnntnannnnntnnnnnnnnnnnagnnngggnngncngngtngatcatatagggcgaattggactccaccgcggtggcggccgaggtacagctgcctcccggcagtccaggaaaactgcaaaaaatgggaagtaaggtcctggcaggcagacccggcatgtagccgctggccatcttgaatcctagggcatgaagttgccccaaagttcagcacttggttaagcctgatccctctggtttatcacaaaaaataggatgggataaagaaagtggacacttaaataagctataaattatatggtccttgtctagcaggagacaactgcgcaggtatactaccagcgtttggatattgatatatacatggcaaatctgaatattgttttatgagaaggcctgggcaatggggttaaaacacccaaacctttgaaatcaagaacantagggtggcaaatggccactcctgtagttttcttttctgtaaaatggggatctgggaccgaatgataccaaaccgtttttcttttctaaccattgggattttttataaacctctggcctatggaattggngttngtgtcnttgcctnnaaaaatnaaggncgncnantttnanttattataannagttacccttgccccgggcggcccgnttcttagaaactaggtgggatccccccggggcctggccagggaaattttcgnatattcaaagcctttnttngatnaccccgtccgaanccntnggaggggggggggccccgggtanccccaacccttttttgnttcccccttttagtgggnggggtttaaatttnccgcnccttgggncngtaaaatcnantggggncaaaancctggttttccnngggggngaaaanttgntnatnccncntccacaaatttncccaacaaacnattacngaaancccggggnnccataaaggtggttaaaaccccnngggggnggcccttaaatgagggggngcnttaaccccccntttaaattggcgnc

SEQ ID NO: 6836 - DNA, 826 bp, Homo sapiens
  misc_feature 582, 665, 675, 726, 765, 771, 804, 809, 811: n = A,T,C or G
ggagctccaccgcggtggcggccgaggtacagtgtgagacgtgtgatgctggaacacgggcatatgtccataggtgacgttcacttgcttaaaatagcactcttcattgacttgtctctcaaactggccttcgcattcccagtcagctctaaaatcggagccctccaggtcactgcatttaaggctttccattatctcccagttgaatgccccgatttcaaaaatgtctttttgtagaaatttctcacacctggactccaagtctaggcaccatggtcctgtcacatcatttgcaatcatccagggctctttcccttgctccaataaggagacgacatcaggcttagaaatggagagtcctagtgaggccaagtgaccaaagttctccagagtcacctccctgtacctgcccgggcggccgctctagaactagtggatcccccgggctgcaggaattcgatatcaagcttatcgataccgtcgacctcgagggggggcccggtacccagcttttgttccctttagtgagggttaattgcgcgcttggcgtaatcatggtcatagctgtttcctgtgtgaaantgtatccgcttcacaatttccaccaacatacgagccggggagcataaaagtgtaaaagcctggggtgcctaatgagtgagctnactcacattnatttgcgttgggctcactggccgcttttcaagtcggggaaaactgtcgtgnccagctgcattaatgaaatcggcccaacccccggggganaaggcngtttgcgttttgggcggcttttttcgcttcctnggttnantggactcggttgggg

SEQ ID NO: 6837 - DNA, 826 bp, Homo sapiens
  misc_feature 597, 615, 627, 651, 663, 667, 685, 707, 720, 739, 752, 765,767, 768, 776, 783, 789, 797, 812, 817, 825: n = A,T,C or G
gaattggagctccccgcggtggcggccgaggtacgcgggagagtgttcaaagcaggcccgagccgcctggataccgcagctaggaataatggaataggaccgcggttctattttgttggttttcggaactgaggccatgattaagagggacggccgctctagaactagtggatcccccgggctgcaggaattcgatatcaagcttatcgataccgtcgacctcgagggggggcccggtacccagcttttgttccctttagtgagggttaattgcgcgcttggcgtaatcatggtcatagctgtttcctgtgtgaaattgttatccgctcacaattccacacaacatacgagccgggagcataaagtgtaaagcctggggtgcctaatgagtgagctaactcacattaattgcgttgcgctcactgcccgctttccagtcgggaaacctgtcgtgccagctgcattaatgaatcggccaacgcgcggggagaggcggtttgcgtattgggcgctcttccgcttctcgctcactgactcgctgcgctcggtcgttcggctgcggcgagcggtattcactcactcaaaggcggtaatacnggtattccacagaatcangggataacccanggaaaagaacatgttgagcaaaanggccagcaaaangccnaggaaccgtaaaaaaggncgcgttgcttggccgttttttncataggcttccgnccccctgacgaagcattanaaaaaattcgacncctcaagtcaaangnnggcgaaancccgccnggactnttaaaganacccaggccgttttnccctnggaagctnt

SEQ ID NO: 6838 - DNA, 858 bp, Homo sapiens
  misc_feature 97, 107, 110, 113, 180, 228, 266, 272, 278, 314, 320, 346,353, 400, 436, 457, 460, 467, 486, 507, 515, 522, 543, 559,560, 574, 576, 609, 625, 631, 639, 650, 654, 661, 666, 697,701, 714, 734, 764, 768, 779, 788, 789, 792, 810, 812: n = A,T,C or G
  misc_feature 814, 815, 816, 818, 821, 829, 838, 840, 844, 845, 846, 847,858: n = A,T,C or G
gcgtaatacgactcactatagggcgaattggagctccaccgcggtggcggccgaggtacttttttttttttttttttttttttttttttatgaatgntgttgggggnatnaanaattcactccccttttacttactgaagctgtgtcattgtctggggtaaatacccaaggttcatcatntcacaccaaggaaatcaaggacatggacacacaagaagtgagtttaanagtggaggtttaataggtgagagaaaagagaaaagctntccttnctgcanagaggagctcctgagtgggtcttccaattttatggngaaacncatagggttttatagacaagcttganaagtggngtctgatttacatagggcacaggagattggtcagaccaggtgtgccncctcaacctaatcttttattatgcaaatgggttctntacctgcccgggcggccgctntanaactagnggatcccccgggcttgcangaattcgatatcaagcttatngataccgncgacctngagggggggcccggtacccancttttgttccctttanngagggttaattgcncncttggcgtaatcatgggcatagctgtttcctgnggtgaaaaatgttatncgcttnacaaattnccacaacatancaanccggganccatnaaaggtgtaaaagccctggggtggcctaatngagntgagcttaacctncacattaaatttgcggttgncgcttcacttggccccctttttccaagttngggnaaaaccttgtncggtgcccnnctngcattttaatgaaaatcngncnnncnccnccgggggngaaagggcngntttnnnntatttgggccn

SEQ ID NO: 6839 - DNA, 1027 bp, Homo sapiens
  misc_feature 2, 4, 6, 7, 8, 9, 10, 11, 12, 14, 18, 19, 20, 21, 22, 23,24, 27, 28, 31, 33, 35, 36, 37, 38, 39, 41, 43, 46, 47,50, 51, 52, 53, 54, 56, 58, 59, 61, 62, 63, 64, 66, 67,68, 70, 71, 72, 74, 76, 77, 78, 79, 80, 81, 82, 83, 84,85, 86: n = A,T,C or G
  misc_feature 87, 88, 89, 90, 91, 98, 105, 189, 190, 194, 196, 198, 199,225, 626, 726, 795, 826, 858, 863, 865, 877, 891, 903, 910,913, 943, 944, 953, 962, 971, 978, 981, 983, 986, 991, 998,999, 1009, 1013, 1014, 1015: n = A,T,C or G
tncntnnnnnnngnattnnnnnnnttnncangngnnnnngntntcnntgnnnnngngnntnnnngnnngnnngngnnnnnnnnnnnnnnnngggtganaaatatngactcactatagggcgaattggagctccaccgcggtggcggccgcccgggcaggtactctccaagctgctcaaaaagctcacanngggngngnngattaaattctgaggctcttccacangaggtttaaattcatcgaacactttggcatagcattcatgaggatctgcagcggcacagcacttctctagagtggtttcatatgtcttggcaagtctcagcagcagcacgacagagtaatcaggatgccttcttgcatattcatacaaaaacctaattaagatgaaaataaaatagactttgttggacaaatgagccacaaaaaaattatcacaaagctaatctcaaaagtaaactcatattccaaaaggtcttaatttgactaaaaccccatgccagttaaaagctttaagtaggcttaagggactttgggggtcccaggagttaaaagtttacccaagggctcaattcctagctctgcttacttattatccccccgcgttaccctcggccgctcctagnaactagtgggatcccccggggctgcagggaattcgatatcaagctttatcggatacccgtcgaccctcggaggggggggggcccggtacccaagcttttngttccctttagtgaggggttaattgcgcgccttgggcggtaatcatgggtccattagctgttttcctgngtggaaatttgttatcccgcttcacaatttncacaccaaccataccgaagcccggggaggccntaaangngttaaagccctngggggtgccctaantggaggtggagnctaaccntcnccatttaattttggcggtttggcgcctccnntggcccccntttttccanttccggggnaaaaccnttntnttngcccngcctggnnttttttttgnaatnnnggcccccccccc

SEQ ID NO: 6840 - DNA, 1231 bp, Homo sapiens
  misc_feature 4, 8, 14, 20, 21, 22, 24, 30, 31, 32, 36, 37, 38, 41, 43,51, 54, 58, 59, 60, 64, 69, 75, 78, 84, 85, 86, 89, 93,94, 98, 101, 103, 104, 107, 110, 119, 120, 121, 125, 129,141, 147, 154, 193, 201, 203, 220, 227, 231, 232, 389, 412: n = A,T,C or G
  misc_feature 414, 415, 418, 419, 423, 427, 456, 464, 477, 492, 493, 521,533, 546, 550, 559, 575, 586, 621, 634, 668, 698, 700, 710,711, 714, 718, 720, 735, 739, 741, 746, 748, 752, 760, 762,763, 769, 772, 795, 797, 798, 808, 809, 812, 841, 843: n = A,T,C or G
  misc_feature 851, 852, 867, 879, 881, 898, 899, 906, 914, 930, 933, 936,943, 949, 950, 962, 968, 976, 979, 984, 1002, 1015, 1035,1036, 1046, 1051, 1068, 1069, 1070, 1072, 1077, 1083, 1085,1090, 1093, 1096, 1098, 1099, 1101, 1115, 1116, 1121: n = A,T,C or G
  misc_feature 1124, 1129, 1130, 1138, 1142, 1143, 1148, 1153, 1156, 1169,1191, 1197, 1213, 1214, 1216, 1218, 1219, 1224: n = A,T,C or G
cccncccnctattnatactnnnangtgttnnntccnnnaanantcaacgcnccnatannnagcncttcnccgctncgncagcgnnnttngctnngggngananngtnagnccttcctannnggcnaatngacagctccacncgcggnggcggcncgcccgggcaggtacccccttgaccggctggagattgangttgcggnangggggagactataaaanaaaaatntttnntttttggaggatacggatatgaaatctctagagaacaaaagtttggaaatgaccttcatccctaccattgaagatactggaaaagctcttgtttgtcaggctaagttacatattggatgacatggaattcgaacccaaacaaagggcaggagtactntttttttgtttttgcagtttttngnnttnnaacncagnttttttttatttgtaaaagcctctggccnataaaacntttcttagccggngtggcccaaatgggnncaccttgcccacacttctgtcacccaanggtttgttcccnttggttaggcccngacnaaaccaagnaggttcctggggcccnatttcaagccnaggaccccatgggcccaagggggaaggggtggccnccttggggggggntggggttttctttgccccctttggccttggtctngggtaacccctcggggccccggctttcttnanaaaacctatnngtngggnantccccccccccgggncctngnaaagngnaaantttccgantnnttcaanagncttttatttcggatacccccgcncnnaacccttccnnagnggggggggggcccccggggtacccccaancntttttttnnttcccccttttttanaggggggggggntntaaaatttggccccccnnttgggcngtgtaaantccattgggggccacnaanctnggtcttncctcgnnggttgaaaaaanatgggnaattcccngcntcacnaaatttccccccccaaancattaccgtaganccgggggaggccattaaaanntggttaaaanccccncgggggggggccctaannngnggtgnggcccnanccccnccnatntnnanttgggcgttggggnntaccntgnccccnntttttccnaatnncgggngaaanccntgttcggggcccnattgcaattaaattaaattccngcccancccccccgggggaganngncnnttttngtgttca

SEQ ID NO: 6841 - DNA, 1171 bp, Homo sapiens
  misc_feature 10, 11, 16, 17, 18, 19, 21, 22, 23, 27, 28, 29, 30, 31, 33,34, 36, 41, 45, 47, 50, 55, 57, 59, 60, 62, 64, 66, 69,70, 71, 72, 73, 75, 77, 80, 81, 82, 83, 84, 86, 87, 88,89, 91, 93, 95, 96, 97, 98, 101, 102, 104, 108, 117, 158,437: n = A,T,C or G
  misc_feature 447, 532, 569, 606, 609, 611, 620, 645, 688, 700, 723, 738,740, 773, 776, 784, 799, 807, 811, 815, 830, 831, 837, 844,871, 872, 876, 886, 899, 902, 914, 926, 975, 983, 985, 997,1021, 1027, 1029, 1037, 1038, 1046, 1052, 1068, 1074: n = A,T,C or G
  misc_feature 1076, 1078, 1091, 1100, 1101, 1104, 1116, 1118, 1119, 1123,1127, 1129, 1132, 1133, 1134, 1137, 1141, 1142, 1143, 1150,1152, 1157, 1168, 1170, 1171: n = A,T,C or G
cccctctttnnctctnnnntnnntttnnnnncnntntactnacanantgngatangntnncngntnacnnnnnananctnnnnnannnngntnannnnttnnangcanatatagacnaattggactccaccgcggtggcggccgcccgggcaggtacncgggggcttcaatatggctgcccccagggagagacgagactaccatgaatgatcctatcgcagaccctgagtccgtcacccatggatcgcagcgcggagttcaggaaatggaaggcgcaatgtttgagcaaagcggacctcagccggaagggcagtgttgacgaggatgtggtagagcttgtgcagtttctgaacatgcgagatcagtttttcaccaccaagctcctgcgctggcccgcatcctactccttgaccggggtataaatggttttgaggttnaagaaaacanaaactggttgctgggctactgggttacacacaaacctttggtggtaaaaagatgatgtgatttgtagcttcttgaaaggaaaagncaaaatgggttgatgcccacttttttggaaaattttngaaacccatttttgttttcttttcaattggtggccanatngntccgaaccnaattttggccaaggggaattgccancaagaattcctgggcaattttcccaattggggccaaattaagnattttcttgggntttttcaaggggaaacctttttnggcaattaaaccggntngggggaaaaaggaaggaagggaaaaaaaccttnttnttttgggncttggttcccgggangttacccnttcngggnccggcttaaccaccnncctttnagcgggncccgccccccggggccaagggttaccnngggnaaccaccaanccaagggaaaccngcnaaaggggctttntttgcctggcantgaagccatggggggaaggaaattaaggaatttccttttttcccttgcnacctgggntnattccttttccngccattttttacttcccaaggccngggttntncaaggggnnaccctttntgcaantgtctttggccttttnggcctncnangggtcaagaaccntttttttcnngcnttaaaaaccttngnngaangggnanacnnncantttnnnccccctngngaaanatttttttttntnn

SEQ ID NO: 6842 - DNA, 1051 bp, Homo sapiens
  misc_feature 5, 7, 10, 11, 12, 14, 15, 17, 18, 19, 20, 21, 22, 23, 24,25, 26, 28, 29, 30, 31, 32, 33, 34, 35, 36, 38, 40, 41,42, 44, 46, 47, 48, 49, 50, 51, 52, 53, 54, 55, 56, 57,58, 60, 61, 62, 63, 64, 69, 71, 72, 75, 76, 77, 78, 79,80, 82: n = A,T,C or G
  misc_feature 83, 84, 85, 86, 87, 88, 89, 90, 91, 92, 93, 94, 95, 96, 97,98, 101, 102, 103, 104, 106, 107, 112, 113, 114, 115, 116,222, 547, 548, 811, 846, 853, 871, 879, 882, 900, 922, 938,951, 957, 975, 982, 991, 997, 1025, 1027, 1030, 1031: n = A,T,C or G
  misc_feature 1036, 1044, 1051: n = A,T,C or G
ccccncncgnnncnntnnnnnnnnnnannnnnnnnntntnnnanannnnnnnnnnnnntnnnnnattcncnnacnnnnnngnnnnnnnnnnnnnnnnnagnnnngnngaggnnnnntcgactcactatagggcgaattggagctccaccgcggtggcggccgcccgggcaggtacgcggggactttagggagggctgtcctaaaaccagaagcttggagcanaaagtgaaaccctggtgctccagacaaagatcttagtcgggactagccggccaaggatgaagcctcacttcagaaacacagtggagcgaatgtatcgagacacattctcctacaacttttataatagacccatcctttctcgtcggaataccgtctagctgtgctacgaagtgaaaacaaagggtccctcaaggccccctttggacgcaaagatctttcgaggccaggtgtattccggaacttaagtacctcggccgctctagaaactagtgggatcccccgggcttgcaaggaattccgatattcaaagcttatcgattaccgnncgaccctcgaggggggggcccgggtacccagctttttgttcccctttagtgagggttaaatttggcgccgctttgggccgtaaattcattggtcataagcttgttttcctgtgtggaaaattgttatcccgctcacaatttccacacaacaatacgagccggggagcattaaaaggtggtaaagcccttgggggtgccctaaatggagtgaagcctaacttacatttaaattgcgtttgcgctcacttgccccgcttttccangtcggggaaaaccctgtcggtggcccagcttgcantttaatnaaatcgggccaaaccccnccgggggnagnagggcccggttttggccntttttggggcgcttctttccgnctttccctcggctttnactggacttcggnttggcnccttccgggttcggttcnggcttgngggggcaangcgggntattcaagcttcactttaaaaggggggntntanncgggntttttccncaaaaan

SEQ ID NO: 6843 - DNA, 1058 bp, Homo sapiens
  misc_feature 7, 8, 10, 11, 12, 15, 16, 18, 19, 20, 21, 22, 24, 25, 26,27, 28, 30, 32, 33, 35, 36, 37, 38, 39, 40, 41, 42, 44,46, 47, 48, 51, 52, 54, 56, 58, 59, 60, 62, 64, 65, 66,67, 68, 69, 70, 71, 72, 73, 74, 75, 76, 78, 80, 82, 84,85, 86: n = A,T,C or G
  misc_feature 87, 88, 89, 90, 91, 92, 94, 95, 96, 97, 98, 100, 102, 104,105, 106, 108, 109, 110, 111, 118, 121, 128, 168, 225, 572,657, 768, 809, 841, 845, 855, 873, 883, 886, 892, 901, 902,915, 922, 959, 980, 981, 985, 989, 990, 1003, 1004: n = A,T,C or G
  misc_feature 1012, 1014, 1028, 1037, 1038, 1043, 1048, 1052, 1053, 1056: n = A,T,C or G
ccccctnntnnnttnngnnnnngnnnnntntnncnnnnnnnngnannnttnnanantnnngntnnnnnnnnnnnnngngnanannnnnnnnntnnnnntntngnnntnnnnctgatcnatnactatanggcgaattggagctccaccgcggtggcggccgaggtactngtgcgttgtatttcttcattctctggcaggctgggagtccaaggtcagtctaggcangagggctgcttggcctaagcagtcacacaattttcaccgtcttgagcatatctgacaagacatacgtgtcatcccaacccctcccaggcttcctcagggtccgctccaaagcctgggctgtttctaggagctctggtgtggcaagtttttgctcagggtgcagctgacagaacaggatctcattcacttcaccctcaattcgcccggacatatagggagggggggaacactgccttggagcccaagccagcactggagtcttttagccccaagtctcggcacaccaaggtttgaagaaataaaaaccacccttcagggagttcaagatgctttttaaccttctgtangaaaagattgctccacaaaatgctgggggccgggacaactcaccccgcgtaccttgcccgggccggcccgctctagaactaagtnggatcccccgggctgcaaggaaattcgatatcaagcttatccgatacccgtccgaccctcgaagggggggggcccgggtacccaagcttttttgttccccttttaatgganggggtttaatttgccgccgcctttgggcggtaatcatgggnccatagccttgttttccctggtggtggaaaanttgnttattcccgnctccacaaattttcccancaccaaccantancgtaancccggggannccattaaaaggtngtaaaangccctgggggggtgcccttaaatggaagtggagcccnaacctccacatttaaattggnnttgncggnntaacctggcccgnntttccagntngggaaaaccttgtnggggcccanncttgnttttnaatnnaancc

SEQ ID NO: 6844 - DNA, 1037 bp, Homo sapiens
  misc_feature 4, 5, 6, 7, 8, 9, 10, 11, 12, 13, 14, 15, 16, 18, 19, 20,21, 22, 24, 25, 26, 28, 29, 30, 31, 32, 34, 35, 36, 38,40, 41, 44, 45, 46, 48, 49, 52, 53, 55, 57, 59, 63, 64,65, 66, 67, 69, 71, 72, 73, 75, 76, 77, 78, 79, 80, 81,82, 83: n = A,T,C or G
  misc_feature 84, 85, 86, 87, 88, 89, 90, 91, 93, 94, 95, 96, 98, 101,105, 107, 109, 111, 113, 115, 116, 118, 203, 215, 221, 403,579, 701, 737, 811, 821, 835, 844, 853, 869, 870, 903, 905,919, 952, 957, 959, 961, 963, 969, 977, 979, 980, 982: n = A,T,C or G
  misc_feature 995, 998, 1003, 1007, 1024, 1029: n = A,T,C or G
tctnnnnnnnnnnnnngnnnnntnnntnnnnnannngngnngannntnnctnntntnantgannnnnantnnngnnnnnnnnnnnnnnnnnannnngntgngtgngntngngngnntnactatagggcgaattggagctccaccgcggtggcggccgcccgggcaggtaccagtccaataccatcctgcgtcacctgggccgnacccttgggctntatggnaaggaccagcaggaggcagccctggtggacatggtgaatgacggcgtggaggacctccgctgcaaatacatctccctcatctacaccaactatgaggcgggcaaggatgactatgtgaaggcactgcccgggcaactgaagccttttgagaccctgctgtcccagaaccaggggaggcaagnaccttcattgtgggagaccagatctccttcgctgactaccaacctgctgggacttgctgctgatccatggaggtcctaagcccctggcctgcctggatgccgtttcccccttgctctcaagcattattgccgggggcaccctcagtgccccggcccaagcttcaagggcctttccntggcctcccctgaagtacctcggccgctcttagaaactaagtgggatccccccgggctgcagggaaatttccgatattcaagccttatcgataaccggcgaccttcgaagggggggggcccngtacccaagcttttgttcccttttagtggagggttnaattgcgccgctttggcgtaaatcatgggtcattaagcttgttttcctggggtggaaatttggttaatcccgcntcacaaattncccaacaaacattncgaagcccngggaggcantaaaagttgttaaaanncctggggggtggccctaaattgaggtggaagcntnaacttcaccatttnaattggcgtttggcgcctccacctggccccgcnttttncnantncggggnaaaccctntnngnggcccagcttgcnttnaaatngaanttggccccacccccccnggggngaaaggcc

SEQ ID NO: 6845 - DNA, 1271 bp, Homo sapiens
  misc_feature 6, 11, 15, 17, 21, 23, 24, 25, 26, 27, 28, 29, 30, 31, 32,37, 41, 44, 47, 48, 49, 51, 53, 56, 57, 58, 59, 61, 62,63, 66, 67, 68, 69, 70, 73, 76, 78, 85, 86, 88, 89, 90,91, 93, 94, 96, 97, 100, 101, 103, 104, 106, 108, 110, 115: n = A,T,C or G
  misc_feature 125, 127, 128, 133, 138, 148, 154, 156, 172, 191, 194, 196,204, 207, 216, 218, 222, 226, 243, 271, 285, 319, 372, 373,404, 408, 439, 442, 456, 459, 475, 492, 502, 508, 510, 514,520, 534, 544, 548, 569, 578, 579, 580, 595, 618, 622: n = A,T,C or G
  misc_feature 650, 658, 659, 660, 669, 670, 686, 699, 709, 713, 743, 747,759, 764, 771, 774, 776, 780, 785, 793, 795, 800, 803, 808,809, 822, 823, 832, 833, 855, 862, 864, 869, 894, 908, 930,936, 942, 956, 962, 964, 977, 988, 989, 994, 1002: n = A,T,C or G
  misc_feature 1010, 1013, 1014, 1021, 1029, 1031, 1032, 1033, 1039, 1042,1048, 1059, 1061, 1070, 1074, 1080, 1082, 1084, 1090, 1095,1097, 1107, 1112, 1123, 1125, 1130, 1138, 1142, 1144, 1152,1154, 1156, 1158, 1176, 1178, 1181, 1182, 1194, 1195: n = A,T,C or G
  misc_feature 1199, 1201, 1203, 1206, 1208, 1217, 1219, 1220, 1228, 1232,1235, 1247, 1250, 1251, 1252, 1255, 1269: n = A,T,C or G
cccccnctccntccntncganannnnnnnnnntcttntccnctntcnnncncnctnnnntnnnctnnnnnccnccnantaacccnncnnnncnngnnagnnanngntntnaaccncattcacttngnncatantccanctcccccccngtggcngnccgacgtacgcggagnagtgccccaggagctatgnccngngggggggnagnagggtgccngnaaanaaantattttttttttttttnttgtccgcggatacagaaatctctgcangcaagttgctccanagcatattgcagggacaagccttgtaacgaatanttaaattcaccggcatcttggattccctaatccttttcccgaaattggccaanntgctgaagtgcccttgttataaaaaatattnctantggtttacccttccaacctttctttggttcntgncctaatgttgggtnatnccttggaatccctagncaattttaagccaattnattgggggtnaccctngncccngggccngggccgcctccttngaaaaccttnggtngggattccccccccccggggncttggccannnggaaattttccggantaattcaaaagccctttaattcngganttaccccgggcccgaacccctccagaanaggggggnnnggccccccnnggttaccccccaaacntttttttgttttncccctttttnaagntgggaaggggggtttaaaatttggccaccngccnttgggggccggntcaantcccatnggngnccantaagncttggtgntnccccntgntggtnngaaaaaattggtnnttattcccnncttccaacaaaatttccccacnacccaancnattancggaagccccggggggaggccattnaaaagttggttaanaagcccctcgggggggtgcccncaaatnggaggnggaggccttaaccnttcacnantttaaatttggcngtttgccgccnncaccntggccccncctttttncanntccgggnaaaacccntnnncattgnccnccctgncactttaaatngnaaatccggncccnaacccncncnggaggnaaaangnccgggtttgnccgtntttgggggcgncnctttncccccttncctntngctccacntnancntccctggggcgccttcgngnacnnttttcccgtctnnctgncnanccngncaatacacncnnccctttanaaanggnggggacatatcncgnnnttnttccccccaaaaancg

SEQ ID NO: 6846 - DNA, 1193 bp, Homo sapiens
  misc_feature 3, 4, 6, 14, 15, 17, 18, 19, 22, 25, 26, 29, 32, 34, 36,45, 49, 52, 53, 55, 56, 60, 62, 64, 67, 69, 73, 78, 79,83, 84, 88, 89, 92, 94, 95, 98, 100, 101, 102, 103, 104,105, 106, 110, 115, 117, 119, 120, 121, 122, 124, 126, 128,131: n = A,T,C or G
  misc_feature 132, 133, 138, 149, 150, 153, 214, 217, 218, 220, 231, 232,238, 244, 255, 260, 272, 277, 281, 333, 385, 389, 397, 406,422, 473, 474, 507, 511, 521, 539, 549, 576, 595, 598, 616,649, 653, 660, 676, 700, 703, 708, 717, 728, 730, 731: n = A,T,C or G
  misc_feature 734, 783, 786, 798, 800, 801, 816, 827, 831, 851, 852, 853,856, 870, 878, 924, 939, 940, 948, 952, 953, 957, 959, 962,965, 971, 979, 984, 996, 1003, 1004, 1006, 1011, 1018, 1038,1039, 1041, 1044, 1052, 1066, 1071, 1079, 1086, 1087: n = A,T,C or G
  misc_feature 1091, 1099, 1106, 1112, 1120, 1121, 1124, 1126, 1131, 1133,1136, 1148, 1152, 1153, 1157, 1164, 1170, 1172, 1173, 1185,1189, 1193: n = A,T,C or G
cgnngncccgtgtnncnnntgnggnnttnttntntnctctctccnacgncanncnnctcncncntcntnctantgtgnntganncatnntangnnctntnnnnnnngttnagggntngnnnntnancntcnnnccatnggactgaattnnaanctccaccgcggtggcggccgaggtacttttttttttttttttttttttcccaatggggggnggnngngagaagcacannaaaaanattttntttttattttntttgngaaacccccaantttgntctnatggcctttcttctccatttgtcatctctgggaaccttgagtctaaatttangggctgaaagtctctctgctaggagctttccaaaatgccattgctttgattntggngaactgantaggagganaacacctggactactntgagtccctgagtttcaaattcctcctcaaactgggtttccttggaagggnnggcctgtaccctgccccggggccggcccggttnttanaaacctaggngggatcccccccggggcntgcaaggganattcggattattcaaaagccttattcngataccgttcgaccttcanagngggggggggccccgggtnaccccaaacttttttgttttcccctttttaagntggnaggggtntaaaatttggcccccnctttggggcgataaaatccagtgnggntccantaaggcctnggttttccctngnnggngggaaaaatttggttaatttcccggccttcaaccaattttcccacccancanaacatttaaccntnnccccgggggaggcanttaaaaaaggnggtnaaaaagcccctggggggggnnnccnttaattggaggtgngaggcttnaccttcaccaatttaatttttgccgttttggcggcttcacttggcncccgctttttccaanntcgggggnaaanncccntngtnagnggcccnagctagcnttttnaattgaaaattngggcccnnanccccncccgagnagaagaaaggccggtttttnncnttntttggggncgcctctttcccgnctttnccttcgcntcaactnnaacntctggctngcccttngggacnttttcagnnttncnggctnanccnggtgatttaccntctnntcanaaggggngggatntnnccgtggttttcncccnaaan

SEQ ID NO: 6847 - DNA, 1215 bp, Homo sapiens
  misc_feature 3, 10, 12, 18, 28, 30, 32, 41, 43, 46, 47, 52, 54, 55, 57,62, 63, 70, 71, 74, 79, 82, 83, 84, 85, 86, 88, 91, 92,93, 98, 101, 104, 105, 107, 185, 189, 190, 198, 199, 200,205, 207, 209, 213, 229, 375, 391, 400, 401, 452, 462, 471: n = A,T,C or G
  misc_feature 472, 477, 538, 562, 563, 568, 574, 605, 629, 640, 658, 686,690, 697, 699, 718, 721, 783, 796, 814, 815, 828, 837, 838,840, 846, 851, 861, 865, 883, 888, 890, 892, 896, 905, 912,916, 919, 950, 952, 957, 972, 974, 975, 978, 997, 1000: n = A,T,C or G
  misc_feature 1009, 1021, 1022, 1030, 1033, 1034, 1042, 1052, 1060, 1064,1066, 1072, 1075, 1086, 1095, 1109, 1110, 1122, 1125, 1126,1127, 1136, 1138, 1141, 1142, 1166, 1167, 1176, 1186, 1198,1201, 1208, 1213, 1214, 1215: n = A,T,C or G
ccncacgctntngtgtgnttttatattntntncttcacacntntannttccncnntnatacnntttttgnnacnaatcntcnnnnncncannnagggngcngtnntnctatcactatagggcgaattggactccaccgcggtggcggccgaggtacgggggttggggtggtcgttccacctgtgntgannggggggcnnnagctntnanaaanaaaaaaaaaaactccngtctagctgtcacccaggctggagtgcagtggtgtgatcttggctcatcacaacctccatctcacgggttcaagcaattctcctgcctctcttcccgagtaactgggattacacgcacgcgccactacatccggctaatttttgtncctgcccggggccggnccgctctannaactagtggaatcccccgggctgcagggaatttcgatatcaaacttattgnattacccgtnggaccctcnnatggngggggccccggttacccaagcttttttggttccctttagatggaagggggtttaatttgcngccgcctttggggcgttaattcannggggncaatanggctggttttcccttgttggtggaaaaaatntgtttaattcccggccttcaccanattttcccacnaaccaaaccaattaccgnaggcccccggggaagcccattaataaangttngttaaanangcccctggggggggttggnccnttaaattggaaggttggaaggccttaaaacctttcaacaatttaaattttggcggttttgcngccttcaacttgnccccggccttttccccanntccgggggaaaanccttgttcnntngcccanccttncaaatttaantggnaaatcggggcccaaaccncctcngngngtanaaagggccngtttttngccnttnttttgggggccggcctcttttttccgctttncntcgcnttcaacttggacctncnnctngcggccttcggggttccgnttncgggtcttnccggggcgaaanncggttatntcnnacttccancttcaaaaanggccgggntaantnccgggnttntttcccaccanaaaatccanggggggattaaacnnccagggaaaaanaannnttgtgtaancnaannggccctgcccacaagaggccccgnnaaaaccctntaaaaaaggncccctctttctnggnccttttntcccnnn

SEQ ID NO: 6848 - DNA, 1204 bp, Homo sapiens
  misc_feature 2, 4, 5, 9, 10, 12, 18, 20, 21, 24, 27, 29, 33, 37, 40, 45,46, 47, 48, 50, 52, 54, 59, 61, 62, 63, 70, 73, 74, 76,77, 78, 79, 80, 81, 83, 84, 85, 89, 91, 94, 97, 101, 103,106, 109, 112, 115, 117, 124, 128, 131, 165, 192, 195, 198: n = A,T,C or G
  misc_feature 206, 212, 214, 215, 304, 306, 331, 363, 406, 409, 414, 423,433, 436, 441, 446, 447, 455, 468, 480, 484, 491, 495, 496,521, 526, 527, 538, 548, 554, 555, 556, 562, 566, 603, 605,607, 613, 619, 638, 643, 654, 680, 684, 688, 689, 693: n = A,T,C or G
  misc_feature 700, 716, 718, 720, 723, 725, 731, 734, 740, 748, 751, 781,784, 785, 813, 818, 834, 838, 841, 853, 861, 862, 864, 873,878, 884, 921, 936, 961, 970, 973, 995, 998, 1004, 1011,1025, 1044, 1046, 1052, 1053, 1054, 1063, 1066, 1074: n = A,T,C or G
  misc_feature 1085, 1095, 1098, 1101, 1107, 1109, 1110, 1111, 1113, 1118,1119, 1136, 1137, 1139, 1164, 1168, 1169, 1176, 1190, 1191,1196, 1199, 1203: n = A,T,C or G
cncnncccnntntatatncnngtnttnanttcntccnccncatgnnnnanantnaaacntnnntgctctnatnntnnnnnncnnnagtnanggnganagantnganaancanatncngcgaatngcanctncaccgcggtggcggccgcccgggcaggtaccacnatgtatagagcaacactggggtaaggncantgnggggatgnatagantnnttatacctgtgcaaacgtaacacatgccaccatgccaaggatgtggcggaacaagcagccctaccaaggctgggcccccatggactttngngcctgctgggagtttataggtctgngggggacataaggatggccatatctgccagcncaactagactggacattgttacctcggcccgcttttagaactnagngggantcccccccnggggcttggnaanggaantttcnnattattcnaagcctttattcnggattacccggnccgnacccctncggnngggggggggggccccccggggtacnccccnnagcctttttgngtttcccccntttaannnggaagngggnttaaaatttggccgccgcctttggggcggtaaattcnantnggggtncattanagcttggtttccccttggngtggnaaaattggttnattcccggttcacaaaattttccccnacanaaanncatnccgaaanccccgggggaagcctntnanaantnggttanaangccttngggggggnggnccttaaaattggaggtggaagccttaaacntcnncatttaaatttggcggtttgggggcctncactnggcccccgtttttcanaagngcngggggaaaaccnctggtctnngncccaggctngcgantttaanatggaaattcgggcccccaaccccccccgggggaaanaagggcgggtttttnccgttttttggggcggctttttccngcttttccnttnggcttaaacttaaccttcggtnggnggcctncggggcnttttccggcttggngggccaaggccgggttttnanagcttnnnctcaaaaanggncgggtaantcccggggttnttcccccaanaantcngggggnannnanccccnnggaaaaaaaaaatttgnngnccaaaaagggcccctcaaaaagggncccnnaaccctnaaaaaagggccccnnttttnttncgtna

SEQ ID NO: 6849 - DNA, 1110 bp, Homo sapiens
  misc_feature 7, 9, 11, 13, 17, 18, 19, 20, 21, 25, 27, 29, 31, 33, 37,38, 39, 40, 44, 46, 50, 54, 56, 60, 62, 63, 67, 68, 82,83, 84, 85, 86, 88, 89, 90, 91, 92, 93, 94, 95, 96, 97,98, 103, 108, 110, 112, 117, 121, 125, 209, 211, 223, 232,233: n = A,T,C or G
  misc_feature 234, 235, 564, 571, 611, 617, 641, 653, 666, 672, 678, 689,705, 708, 755, 757, 761, 763, 768, 791, 797, 804, 827, 837,838, 861, 864, 883, 905, 907, 909, 925, 937, 941, 945, 955,956, 959, 964, 970, 973, 982, 1000, 1010, 1019, 1022: n = A,T,C or G
  misc_feature 1027, 1032, 1040, 1041, 1053, 1070, 1072, 1077, 1090, 1100,1107: n = A,T,C or G
ttccttntntncntgtnnnnntttnantntnantttnnnncganantctntgtngntatnannttgnnatagcagacatcgnnnnnannnnnnnnnnnaaggntaggnantnaatcngtangtcncagcgaattggagctccaccgcggcggcggcccgaggtacactgatctacaaaaattttaaaatgagcccgggcgcggggactnangcctgtaataanaaaactttnnnnggccaaagcaggcggatcatgaggtcaggagatcaagaccatcctggctaacacggtgaaaccccgtctctactaaaaatacaaaaaattagccgggtgtggtggcgggcacctgtagtcccagctactcgggaggctgaggcaggagaatggcgtgaagccgggaggtggagcttgcagtgagcccgagatcacaccactgcactccagcctgggcaacaaagccaagactcttcaaaaaaagaaaaaaaattttttttttaaaattgaagctgggggtgttacctgcccggggcggcccgctctagaaactagttgggatccccccngggcttncaaggaattcgatattcaaagctttattcggatacccgtncgaacnctcgtaagggggggggcccccggntacccccaaggnttttttgttcccnttttanttgaanggtttaatttngccgccgccttgggcngtnaattcattgggccattagccttggttttccttgtggtggaaaaattngntttntncccgnttcaacaattttcccacaacaanccattnaccgaancccgggggaggcatttaaaaagntgttaaaaannccctggggggttgcccttaaatngangtggaagcctcaaacttcnacaatttaaatttggcggtttngngncttcaacttgggcccngctttttccaantttngagnaaaaaccctnnttnttggncccacnttncattttaantgaaatccgggcccaacncccccggagnaaaaaggcnggntttcnccttntttggggnncctttttccccntttcctcggcttaactngnacttncgttgggtcctcnggtcgtttcnggttttnccc

SEQ ID NO: 6850 - DNA, 838 bp, Homo sapiens
  misc_feature 15, 31, 44, 45, 53, 81, 85, 88, 641, 684, 733, 737, 746,774, 824, 827, 829: n = A,T,C or G
ttttggtaaatttcngctccaccgcggtggntgccgaggtacgnnggggctgnttaaagccgtgtctcatctacctgctgnctcnttngtgttcttccagctccctgcccctcatcaacccactctcctcagacctcagctggggcttgaacctgataattggtgtagtcatcaggatgagatttagaagtggtggtgcccctcttgtgacagcatttggcagtgtgcagttgggccatcaataaatccaaggtccaagggccggaattgtctgccaaattcttgggagttatttgctcagccacaggttggcatgctccaacaacattgtggactgggctcacacctatgctgaggtggccaatgtctccaactgttagatctgcaccacccttccagcagcagctgtggatggcttgccttggcatgtgcatccagcttttgtgaagaactggacatggctagaaacttggggtcccacagacaatgggcgggatgcaacatggtgagctttggatgggggtgtcacaaaacccatggcaagcctgccccctggctgactcatagcatccatgatgaatggggctggctaatggggagaaaaacatggtggccccattgcaagtacctgcccgggcggncgcttctagaactaagtggatcccccgggctgcaaggaattcnatatcaagcttaatcgatacccgtcgacctcgaggggggggccccggtnccancttttggtncctttaattgaggggttaaatttgcccncttggcgttaatcattggtccatagcctgttttcctgggtgaaattggtnatncnctcacaatt

SEQ ID NO: 6851 - DNA, 1170 bp, Homo sapiens
  misc_feature 3, 5, 7, 11, 12, 14, 16, 17, 18, 19, 20, 21, 22, 23, 25,27, 30, 31, 34, 35, 37, 38, 39, 40, 41, 42, 43, 44, 45,46, 47, 48, 50, 51, 55, 60, 62, 65, 66, 68, 70, 71, 72,73, 74, 75, 76, 78, 79, 80, 81, 82, 83, 84, 85, 86, 87,88, 89: n = A,T,C or G
  misc_feature 90, 91, 92, 93, 94, 97, 98, 104, 108, 196, 198, 203, 205,207, 209, 217, 218, 219, 220, 221, 222, 226, 229, 233, 234,244, 247, 272, 287, 288, 301, 340, 386, 409, 428, 436, 462,473, 477, 491, 494, 505, 512, 521, 525, 552, 567, 573: n = A,T,C or G
  misc_feature 576, 579, 587, 600, 603, 604, 625, 632, 643, 646, 668, 673,680, 685, 703, 710, 723, 725, 730, 744, 752, 775, 780, 782,788, 790, 792, 799, 800, 813, 816, 825, 834, 836, 845, 849,850, 860, 861, 866, 875, 877, 886, 888, 903, 905, 906: n = A,T,C or G
  misc_feature 908, 910, 912, 916, 920, 925, 931, 953, 962, 966, 970, 979,992, 993, 994, 1014, 1019, 1021, 1026, 1031, 1036, 1049,1054, 1057, 1062, 1067, 1070, 1072, 1080, 1081, 1083, 1097,1103, 1104, 1122, 1127, 1128, 1134, 1144, 1146, 1147: n = A,T,C or G
  misc_feature 1149, 1150, 1152, 1155, 1157, 1162, 1168: n = A,T,C or G
ccnantnattnntntnnnnnnnnantnttnntgnntnnnnnnnnnnnntnnattncattnantanntntnnnnnnntnnnnnnnnnnnnnnnnngtnnaggtangtcntttacgactcactatagggcgaattggagctccaccgcggtggcggccgaggtacagagaaactgccaatggctcattaaatcatgtngnggggncntnangtcgctcnnnnnnatantantttnntaactgcggnaantctagagctaatacatgccgacgangcgctgacccccttnntgggggggatgcntgcatttatcaggatcaaaaccaacccggtcagcccctntccggccccggccgctctagaactaggtggatcccccgggctgcanagaattctgatatcaaacttatncgatacccgtcaacctccnagggggangccccgggttaccccagcctttttgnttcccttttantganggggtttaaatttnggngcgcttttggncgttaancaattgggnccantaagccttgggtctccctgtggtgcanaatttgttaatcccnggcttnaanaanatttcccncaccaacattacnatnncccggggtagcattaacaaantgttaanagcccttgggnggngccctaatggaggtgaagcctnaactnacatttnatttnccgtttgaagcttcaacntggcccngcttttcccaagntnggggnaaaaccctggtccntggcccangccttggcatttaaattgaaaanacggncncaaacntncnccgggtnnaagaagggccggnttntggccgtanttttggggncnccttttttnccanncttttccttnngattnaaacttggncnctcggcttncnacttccgggttccantnncngngnttanaaanggcgnagagcnggttttttaagccttttacttnaaaaagggngggnttanattaccggntttttcccaccannnaattcaagggggttttaacnccatngnaaaanaaacnattgnggagccaaaaaanggccnacncaaantaggnccntnttaacccnntnaaaatagggccccncggtanncttggcctttttttcctnttagnnttttcncccccccttntnngnngnttncnaaaanaattgncc

SEQ ID NO: 6852 - DNA, 926 bp, Homo sapiens
  misc_feature 2, 358, 558, 584, 591, 597, 623, 626, 635, 639, 642, 645,669, 673, 683, 691, 692, 696, 709, 714, 729, 736, 740, 745,753, 754, 763, 765, 769, 789, 792, 794, 803, 817, 834, 835,836, 852, 871, 880, 887, 888, 892, 896, 897, 900, 901: n = A,T,C or G
  misc_feature 921, 922: n = A,T,C or G
tntagggcgaattggagctccaccgcggtggcggccgcccgggcaggtactcggggaccttgagccgggcgagcgctgtgggccaagcaggggttgcagggcagtaggagtgcagactgaaaaaatgcagaccgccggggcattattcatttctccagctctgatccgctgttgtacctcggccgctctagaactagtggatcccccgggctgcaggaattcgatatcaagcttatcgataccgtcgacctcgagggggggcccggtacccagcttttgttccctttagtgagggttaattgcgcgcttggcgtaatcatggtcatagctgtttcctgtgtgaaattgttatccgctnacaattccacacaacatacgagccgggagcataaagtgtaaagcctggggtgcctaatgaagtgagctaacttcacattaattgcgttggcgcttaactggcccgcttttcaagttccgggaaaccttgtcatggccaatctggaattaaatgaaatccgcccaaacgcccccggggaggagggccggtttgccgtattngggcgccttttttccggctttccttngcttaanttgaanttcgcttgcccctccggtccgttccnggntttgctggnaaanccnggnattcaacttcacttccaaaaggcngganaataaccggnttattccnnaagnaatttagggggantaacnccaaggaaaaaaaancattttnaacnaaaantgggccanncaaaaaggncntggnaaccctttaaaaaaggcccntgntnggctggccnttattccaaaaggnttccccccccttgggannnattccaaaaaaatccncccttaaaattaaaggggnggaaacccncccgggnntttnaaanntcnncggccttttccccctggaannccct

SEQ ID NO: 6853 - DNA, 583 bp, Homo sapiens
  misc_feature 2, 3, 5, 6, 10, 12, 26, 28, 30, 33, 35, 37, 40, 44, 46, 47,50, 57, 58, 62, 63, 65, 67, 68, 70, 71, 75, 76, 79, 80,84, 86, 87, 93, 101, 128, 136, 147, 155, 180, 546, 549: n = A,T,C or G
cnntnntcantncattattttataantnantgncntnttntgtntnnatnattattnnattnntnanntnngttnnatnntggntnnacgttnactatttncgaattgtagctccccgcggtggcggncgcccggncaggtacgcgnggcacaanggtcctagcttttggcctgcctcanctgttgacatgccttcctcactaagcttaatcatttctagctttcaatttaaagtaagaagtgtgtgacccttcctttcagttgaacactgagaagccattgtaggattattaattcaatattaattaatttctatattgctctgtcttagggaataagggaggcccgaggagagggagagagatgggagaatggccaatgggtggagcagtcagaatacacacactgtctcttgattaagttcaccatcttacagatagagaaataatgaaaaagtttgaaatattgtgagaattatcaaaatgtgacagacacaagaatgagcacatgctgttggaaaaatggtgccaataggcttgtttgatncanggtttgccacaaaccttcaatttgtaaaaactct

SEQ ID NO: 6854 - DNA, 878 bp, Homo sapiens
  misc_feature 470, 571, 584, 601, 609, 638, 639, 666, 669, 683, 684, 699,705, 712, 716, 734, 737, 752, 758, 759, 770, 771, 778, 780,790, 801, 815, 817, 818, 824, 825, 841, 847, 849, 857, 858,863, 871, 875: n = A,T,C or G
ggcgaattggagctccaccgcggtggcggccgcccgggcaggtacaaagtgttagctccactctttctcctttgaatactgagtattaaacttttagaatttattaataattacttagttctcccaattcccttccaacctctgagcgttctctgacatcatgcagtagcaactcctttcttgttctctgggtcacttgaataacttaatatgaaaatgctttgagaccttcagagaatcaggacagtcgcatactttggcccaggcacccgcaagacgtgccaggaggtttacgtgcctgtctctctgcctctagctggctggggttgtcccacggctctgaggagggacacacgcaaatgctgagagcctgcagttcctcgggggtggtcaggagagtacctcggccgctctagaactagtggatcccccgggctgcaggaattcgatatcaagcttatcgataccgncgacctcgagggggggcccggtacccagcttttggttccctttagtgaggggttaaattgcgccgcttgggcgtaatcatgggtcatagctggtttcctgnggtgaaattgttntccgcttcacaatttcncacacaancataccgaagcccggggagccataaagtnntaaaagccttggggggggcctaattgnggntgagcttaaacctnnacatttaaatttggngtttgngggcttnactnggccccggttttccaagnccnggaaaacctgttcgntgccannctgcatttaanngaaaatngncccaaccccnccgggggggangcgggttttggcgntnnttgggnngctttttcggtttacntggttnantggaatcnnttggncttggccntcanggt

SEQ ID NO: 6855 - DNA, 1142 bp, Homo sapiens
  misc_feature 1, 4, 5, 7, 10, 11, 13, 17, 18, 20, 23, 24, 26, 27, 28, 29,34, 35, 36, 37, 42, 43, 45, 49, 50, 51, 55, 58, 59, 61,65, 70, 71, 72, 73, 75, 77, 80, 81, 84, 85, 87, 88, 89,90, 91, 93, 94, 95, 96, 97, 98, 99, 100, 104, 106, 107,108: n = A,T,C or G
  misc_feature 109, 110, 111, 112, 113, 114, 117, 120, 556, 626, 630, 671,686, 706, 747, 766, 772, 817, 835, 844, 864, 867, 881, 899,908, 909, 910, 913, 919, 930, 939, 961, 993, 998, 1009,1013, 1019, 1021, 1026, 1027, 1028, 1034, 1044, 1045, 1051: n = A,T,C or G
  misc_feature 1057, 1060, 1066, 1075, 1079, 1094, 1096, 1106, 1114, 1115,1120, 1139, 1140: n = A,T,C or G
ngcnntnttnntnttcnnanttnnannnnttttnnnnatttnntntttnnntaanttnntnaatnatatnnnnangnttnnatnntnnnnntnnnnnnnnaggngnnnnnnnnntanacnactcatatagggcgaattggagctccaccgcggtggcggccgcttcgcatttttcttttgcaggttgcatgccagccaatattcctctgtgctgggaagggaaagtttgaggatgtatcaagaccatagcagtggatctcactgctcttgcctactcagggctttatctacacattgatagcccctcagaggaaaggcaccagccgaagagtcgacactggctctgggcttggatgctgcctctgataaacgctgggcactctgacccttgaagccagggagggagtgcttggcagctgccccccgcgtacctcggcccgctctaggaactagtgggatccccccgggcctgcagggaatttcgattatcaagctttatcgatacccgttcggacccttgaagggggggggccccggttaccccaagcttttttgnttccctttttagttgaggggtttaaatttgcggccgcctttgggccgttaattcattgggttcaataagnctgnttttttccctggtggtggaaaaatttggtttaattcccggncttcaccaaattttnccaccaacaaaccaataacngaagccccgggggaagccattaaaaagttggtaaaagcccntggggggtggccttaaatngaagtngaagcctaaacctcaacaatttaaatttggcggttggccgcctcnacttggccccgccttttnccaagttcnggggaaaaaaccctggttcngtngcccaagccttgcnattttaaattgaaattcngggccaaannnccncccggnggaagaaggcnggttttgcngtattttggggcggcttctttnccggcttttcctttggctttaacttgaacttngactngcgcctttggnaccntttttngnatttnnncgggcnaaagcgggtnnttaaancttaanctnaaaaanggggggggnaatnacccggttttttcancncaaaaaatanaggggggnnaaacnccccgtgaaaataaaaatnntt

SEQ ID NO: 6856 - DNA, 832 bp, Homo sapiens
  misc_feature 434, 448, 449, 456, 532, 570, 577, 578, 636, 652, 661, 665,690, 709, 712, 717, 724, 728, 739, 740, 747, 748, 752, 755,763, 764, 766, 769, 772, 773, 788, 789, 796, 800, 801, 802,803, 804, 813, 816, 821, 822, 824, 826, 827: n = A,T,C or G
gaattggagctccaccgcggtggcggccgcccgggcaggtacgcgggattctcactggtgctcaaggtgacattttcatccataaatctgtatgtggtttaaatattttaaattttaatcagagtgctagccattgtttaaaaatacagcttcctaaaatgtttgcaaagcaaagcagtggcgtccagtagaactttctgaagtgatagagatgacctgtgtctgcactgtctaataacctcatgtggcttaaagcacctgaaatgtggctattatgactgaaactgaatttttaattttagttaatttaaatagccacatgtaggccgggcacggtggctcccagcactttgggagcctgagacgggcggatcgcctgaggtcaggagttcaagaccagtctggccaacatggtgaaaccctgtctctaccanaaaaaaaaaaaagnnaaaaaanggtacctcggcccgctctagaactaggtggatcccccgggctgcagggaattcgatatcaagcttatcgataccgncgacctcgagggggggcccggtacccaacttttggttncctttanngagggttaaattgcgcgcttgggcgtaaatcatgggtcatagcctgtttccctggggngaaatttgttattccncttaacaanttcnaaacaaacaataccgagcccggggnggcataaaaggggtaaagnccnggggnggcctantggngggggggctgnnccccccnntttnttntggggtgnngnctnaannggcccgctttcctgnnggggganaaannnnnattgccccnttnatttnngnannaggcc

SEQ ID NO: 6857 - DNA, 1124 bp, Homo sapiens
  misc_feature 5, 9, 10, 14, 15, 20, 21, 22, 23, 24, 25, 29, 31, 33, 34,37, 39, 40, 42, 47, 50, 53, 55, 58, 59, 64, 72, 73, 74,75, 77, 78, 80, 82, 83, 84, 86, 87, 94, 98, 99, 100, 101,102, 103, 105, 106, 109, 110, 141, 200, 204, 382, 465, 544: n = A,T,C or G
  misc_feature 566, 574, 582, 587, 599, 604, 605, 617, 639, 655, 684, 686,727, 753, 776, 785, 797, 803, 838, 849, 857, 861, 864, 875,882, 885, 886, 905, 907, 909, 910, 913, 914, 923, 926, 935,942, 943, 944, 949, 952, 953, 984, 985, 998, 1000: n = A,T,C or G
  misc_feature 1016, 1024, 1027, 1031, 1033, 1042, 1044, 1046, 1052, 1054,1060, 1066, 1071, 1080, 1087, 1088, 1095, 1099, 1107, 1116,1117, 1118, 1124: n = A,T,C or G
ccccnctannattnnttttnnnnnngtantncnnttntnntntatgnttntgntnttnntattnatttattnnnntnntntnnntnnaaagggnggannnnnntnnaanncgaatggagctccaccgcggtggcggccgangtacgcggggaggttgaagtctcctaagatgcccggtgggctggggcaccgggagctgngaanggaacgtgagggggcggccgtagtggagacccacggcaggcctgaagaagagcggcggccgctctagaactagtggatcccccgggctgcaggaattcgatatcaagcttatcgataccgtcgacctcgagggggggcccggtacccagcttttgttccctttagtgagggttaattngccgcgcttggccgtaatcatggtcatagctgtttcctgtgtgaaaattgttatcccgctcacaatttccacacaacattacngagccggggagcataaaagtggtaaagcctgggggtgcctaaatggagttgaagcttaacctcaccatttaaattgccntttgccgcctcaactggcccgnctttttcncaagttcnggggnaaaaccccttgntccgnngcccaaggcttngccaatttaaaatggaaaattngggcccaaaccgcccnccgggggggaagaagggccgggtttttgncngtaatttgggggcccgcctcttttcccgccttttccttcgnctttcaacttggaacttcgcttggcngcttcgggtccttttcggggctngcccgggcngaagccgggttntccaanccttcaacttcaaaaagggccgggttaaattaccnggggtttattnccaccaangaanttnacggggggaanaaacctnccnngggaaaaagaaaacatttntntnngcnnaaaaagggnccnccccaaaangggcccnnnagaanccnnttaaaaaaaaggccccccttttccttggccnnttttttccaatangngcttcccccccccccntggcccgngcncttntncaaaaaaantngngactcntnaaaganacaaanagggngggggaganaaacccnncgggggntttnataaatanttaacccannnccgttn

SEQ ID NO: 6858 - DNA, 842 bp, Homo sapiens
  misc_feature 3, 4, 5, 676, 686, 694, 697, 702, 705, 727, 736, 741, 744,751, 762, 797, 817, 823, 824, 827, 839: n = A,T,C or G
agnnnctatcgactctcactatagggcgaattggagctccaccgcggtggcggccgaggtacgtgtaaaactaaaatgtcttttgtaaatcactgagtcttcctgtttatttctggttagagatctttgggggcttggatggaggaacaggaaaagaggagccaggcttttttggaaaattggcggcagcggtggcatacgggaaactgaaatctttatctaatctcatcctttgtatattcgtcttggatttgctgaagaaaattaaaaggtaaattttgctgtgagctcactgaactcaaattgaaagggaacatatgctgtttatttttgtgaaggacattaattgggtgtgactggcagggttgagacctgaagttcctcttttagataaggaaaatttcccttggtcccgcgtacgactgtctaatatcctgctggacatttaggtaggacctacagcttgtccgagagagtaactcatttgttttctctgagacaatctgtaatttgtcttgtcctattatccttaagtaaggtaatttcgctctttcttttcccatatacagattatgtacctcggccgctctagaactagtggatcccccgggctgcaggaattcgatatcaagcttatcgatacccgtcgacctcgagggggggccccggtacccancttttggttncctttaangangggtnaantgggcccctggcggaaacaatngggcaaaanctggnttncctgggnggaaaattgtnttccccttcacaaatttccccccaaaaaaaccaanccccgggggccaaaaaaagngtaaannccnggggggggcctnaat

SEQ ID NO: 6859 - DNA, 1194 bp, Homo sapiens
  misc_feature 4, 5, 7, 8, 12, 13, 14, 15, 17, 18, 25, 26, 28, 29, 30, 31,33, 34, 37, 38, 42, 43, 44, 46, 47, 48, 49, 50, 51, 53,54, 58, 60, 64, 67, 71, 74, 77, 81, 84, 85, 86, 87, 89,90, 91, 93, 95, 96, 98, 100, 103, 104, 105, 106, 108, 109: n = A,T,C or G
  misc_feature 112, 113, 138, 167, 188, 203, 328, 350, 387, 452, 498, 503,504, 505, 506, 510, 527, 545, 554, 566, 580, 581, 585, 588,592, 597, 598, 599, 605, 611, 621, 628, 635, 647, 658, 705,722, 724, 732, 741, 767, 794, 798, 825, 829, 830, 838: n = A,T,C or G
  misc_feature 839, 840, 888, 889, 914, 938, 945, 964, 965, 972, 977, 985,988, 989, 990, 1000, 1004, 1011, 1012, 1017, 1020, 1022,1024, 1028, 1029, 1030, 1031, 1032, 1040, 1058, 1060, 1063,1068, 1081, 1091, 1099, 1102, 1113, 1116, 1122, 1123: n = A,T,C or G
  misc_feature 1132, 1133, 1134, 1135, 1149, 1152, 1153, 1154, 1157, 1159,1164, 1166, 1167, 1168, 1171, 1174, 1177, 1180, 1183, 1186,1188: n = A,T,C or G
gcgnncnntttnnnntnntatagtnntnnnntnnatnnatannntnnnnnnannatantntaanttntatntanttngtcnttnnnnannnantnnangngannnnanntannatcactatagggcgaattggagctncaccgcggtggcggccgaggtactttctnttttttttttttttttttttngatatttaatgatgnagcttctaaatttggtagttctgtctttgagtgtgaacttaaaaattatgaaaatgcggctgggcgcgggggctcacacctgtcatccaggcactttgggaggccgagccactgcatctggcagnaacatatatttcaaaagagtancctggccactaggatctacctacctacattttttggngcaaactattactttgggggacatctttcttttttccttttctttattttttttaaaatttacanaatgggggtccttgttaatgttttcccaaaagaagggctcaaaggntgcannnnggcntatttccaccaagggcnattggattcaataagccnccaactttnttaagccctttnggaaaaccttcccnngggnccnttcnaaagnnnggaatncttttnccccaccaantaaagcntttggangaaccaaaccangggttaacccnttggccccccggggccggggcccggttttttttaaaaaaacattaangttggggatttcccccncngggggtcnttggcaagnggaaaatttccgaattatttcaaaangccttttattcgaattacccggtccgnaacnccttttagaggggggggggggcccccngggnncccccaannnttttttggtttcccccttttaagttggaagggggtttaaaatttggcnncccccttgggccgttaaaatcaatngggtccaataagcccttggttttnccctggnggtgggaaaaaaatggttnnttccggnttcanaaaatttnccnnnaaaaaaaaanaacnaaagccnnggggngcncntnaaannnnnggtaaaanacccctggggggggggcntntanagggngggggggcccccnccccccttantattgggnggntggggggctanaanggggcnngtttttcgnnnntgggggaaaaaacnttnnntgngncccanannnggnttnaanaanaanaangncccccc

SEQ ID NO: 6860 - DNA, 1072 bp, Homo sapiens
  misc_feature 4, 5, 6, 8, 9, 10, 13, 14, 15, 16, 17, 19, 20, 23, 24, 25,26, 27, 29, 31, 32, 33, 34, 36, 37, 38, 39, 42, 44, 45,46, 49, 51, 53, 55, 56, 57, 58, 66, 67, 70, 72, 73, 75,77, 78, 79, 80, 82, 84, 88, 89, 91, 92, 93, 96, 98, 100,104: n = A,T,C or G
  misc_feature 462, 466, 470, 559, 593, 676, 737, 744, 758, 763, 792, 846,853, 857, 864, 876, 897, 907, 918, 922, 926, 939, 966, 974,976, 989, 992, 1000, 1009, 1012, 1018, 1026, 1030, 1031,1041, 1042, 1045, 1047, 1058, 1060, 1062, 1069, 1070: n = A,T,C or G
  misc_feature 1072: n = A,T,C or G
tttnnntnnnatnnnnntnntannnnntntnnnntnnnntantnnnttntngntnnnntttatttnnttncnntntnnnngnangggnngnnnagntncnactnctatagggcgaattggactccaccgcggtggcggccgcccgggcaggtacgcggggaccttgcgaccgtatccgctagcgcggcctgggatgcagctagggctccctgttcgttcccacatgcagggcagcacaaggagaatgggcgtcatgactgatgtccaccggcgcttcctccagttgctgatgacccatggcgtgctagaggaatgggacgtgaagcgcttgcagaccgcactgctacaaggtccatgacccgcaatgccaccgtagataagtttggaggacttcatcaacaacattaacagtgtccttggagtccttggtatattggaggataaagaagagggagtcacggnaagnatgnatggggagacccatttatgccgtttgggtggaaatcttgctacaaacttcaatttccaaaaatggcttaccgggatttttgccagaagnaatggaacttggatttgttttaagaaagggcttnttgggaactgattattggacttcaaaaaaacccggctttgcgttctttcccacaaacataattggaacctgggtttgattcanaccttaaaaaggccaaggaaagaatgtaaggaaagaaagggaaagccgggaagcaaaggtnccttgcnaaaaaaatttttgntttcnaaaaacaaaggttgggcttgattttgaanaaaaggaaaaggggggaggttttcaacccccttgcaaccgggccgggtttttangaaactnagtngggattncccccccggggncttgcaagggaaatttccaantatttaaagnctttatttcgnatancccngtccgaaccctcnaaggggggggggccccggtacccccancttttttngnttcccttttaatnganggggtttnaattgcccnccnttgggncggtaaancaanngggtcaatannctntnttttccctggngngnaaaaatnntn

SEQ ID NO: 6861 - DNA, 830 bp, Homo sapiens
  misc_feature 2, 3, 8, 9, 10, 20, 365, 646, 647, 649, 650, 654, 655, 656,657, 658, 659, 660, 750, 778, 824, 830: n = A,T,C or G
gnnaagtnnngcccgcgtantacgactcctatagggcgaattggagctccaccgcggtggcggccgcccgggcaggtacgcgggattccccagaccttctgcagattctgtggttatactcactcctcatcccaaagaatgaaatttaccactctcctcttcttggcagctgtagcaggggccctggtctatgctgaagatgcctcctctgactcgacgggtgctgatcctgcccaggaagctgggacctctaagcctaatgaagagatctcaggtccagcagaaccagcttcacccccagagacgaccacaacagcccaggagacttcggcggcagcagttcaggggacagccaaggtcacctnaagcaggcaggaactaaaccccctgaaatccatagtggagaaaagtatcttactaacagaacaagcccttgcaaaggcaggaaaaggaatgcacggaggcgtgccaggtggaaaacaattcatcgaaaatggaagtgaatttgcacaaaaattactgaagaaattcagtctattaaaaccatgggcatgagaagctgaaaagaatgggatcattggacttaaagccttaaatacccttgtagcccagagctattaaaacgaaagcatccaaagaaaaaagnntnnaaannnnnnnggaaaaagtacctcggccgctctagaactagtggatcccccgggctgcaggaattcgatatcaagctttatcgataccgtcgacctcganggggggggccccggtacccagcttttgnttcccttttagggagggttaattggcgcgccttgggcgtaatcatngggcan

SEQ ID NO: 6862 - DNA, 883 bp, Homo sapiens
  misc_feature 516, 533, 590, 594, 658, 679, 684, 689, 703, 714, 719, 722,728, 737, 741, 742, 747, 754, 759, 762, 766, 768, 769, 770,786, 787, 791, 793, 800, 808, 825, 841, 847, 850, 857, 859,860, 861, 862, 866, 869, 875, 878, 880, 882: n = A,T,C or G
gaattggagctccccgcggtggcggccgaggtaccctgagcatcagcagagatgccgagatgaaatcagggaactcctaggggatgggtcttctattacctgggaacacctgagccagatgccttacaccacgatgtgcatcaaggaatgcctccgcctctacgcaccggtagtaaacatatcccggttactcgacaaacccattacttttccagatggacgctccttacctgcaggaataactgtgtttatcaatatttgggctcttcaccacaacccctatttctgggaagaccctcaggtctttaaccccttgagattctccagggaaaattctgaaaaaatacatccctatgccttcataccattctcagctggattaaggaactgcattgggcagcattttgccataattgagtgtaaagtggcagtggcattaactctgctccgcttcaagcttggctccagaccactcaaggcctccccagcctgttcgtccaagttgtcctcaaagtncaaagaaatggggaatnccatgttgtttggcaaaaaaaaaagtttgcttaattttttaaaggtccttttcgtantaangaaattaaatggaggacaaattttttcctacccaaaaggggaagaaccaaaaaggggtttaaanttttaattccaaaaaattttnttgtnttatnggggtgggttggancaaaatttttntaacnttnagggantaccttttngaanncgggntttttgnaaatnccnttanannnggaaattttaaatttnntttngntgggatntggggggnaaacccccccaaaaaancccctggaaaaaaaanttaagnagnggttttncnnnngggnagngggganaanantng

SEQ ID NO: 6863 - DNA, 831 bp, Homo sapiens
  misc_feature 449, 511, 578, 584, 588, 591, 626, 631, 650, 657, 670, 673,692, 706, 714, 724, 741, 756, 757, 769, 772, 786, 788, 801,805, 806, 819, 820, 822, 829: n = A,T,C or G
tccccgcggtggcggccgaggtacctgaccagacacacccaaatgcatgtcatactgcacaaattacacattgcaaagtgtgtcctctgcactgttatggaaaacaatttgcagaatacttccttttcccttctgttgtgcccaactctttattataggatagggatttaaggtcagggttacatggaagcagggttccctggggtgttgtatcagcctgatgccgccccacctcagctgcccctccactttcatctcccattcttctttatgagagcagagaggagaagggaaagacgtggcagaggaataagcagagatggttaccctgagacaggactttggtccacatcatttacttgagaggtgatcccaggaaccatggggacagtgacacaaggaagacaggaagccaatgaagggtatgatgaccagtgggtgcctggcantgagtggacaggcaaggctcagcctgctggggccccctgagagactgcagaactctccccanattgtcccattgaaagacaaggggagtgggggttactgatccaccaacttgccttctgttggttganaagttncttnttnacccaaggcattaacttccttggtaccttgccccngggcnggccgttttaaaaactaantgggatnccccccgggcttncanggaatttccatttcaaaancctttttccgattncccgtccnaccctcttanggggggggcccccgganccccaaccttttttnntccccctttagnggnagggggtaaaattngnccccttggggggnaaannttggggcaataanntntttcctngg

SEQ ID NO: 6864 - DNA, 822 bp, Homo sapiens
  misc_feature 598, 639, 656, 669, 672, 678, 709, 714, 723, 724, 729, 739,753, 762, 767, 768, 770, 774, 775, 792, 797, 799, 804, 805,821: n = A,T,C or G
tagggcgaattggagctccccgcggtggcggccgaggtaccttaatacactccaaacctcagactggtgatattgcattactttctataagatacacacttatattttgcttaaagaagcatttgcagctttaacccatttaatgtaatatataaggcagatggttcttgacaactataatcttggaagaaaactgaaaaaatcaattaggtgtttggcagcactcaaaaaacagcctaataagctcattgccatgcaaatcacctacaatgttaaatatataaaactgctgtattaagctcggagaaggaggaaaatttcctcttcactcatgtgaccggagactaaaaggaaggctccaggggtgctgctggctgggaagagaactggggaaactgccccagtagaggtggagatgccagggcagagggaactgggcttaacggggcagggctgcctctagaaagagccagcttttctagcacaggttaggagtgaggcagcagaactgggcttaacagggggcaggactgcctctagaaagagccagcttttctagcacaggttaggagtgaggcagcagaactgggcttaacangggcagggctgcctctagaacgaggcagcttttctagccangtttaggagtgaggcanctttccccccagngangtcaancctttgccataaattggccaacaaaatttgnttcanggtcgaaannaaccnaaatcaaaangtttttgggacctnttttttttnattannanaaannttttttttgggggggcnagttncnccccnncccaaattaaaaaaang

SEQ ID NO: 6865 - DNA, 1257 bp, Homo sapiens
  misc_feature 1, 2, 3, 4, 5, 6, 7, 8, 9, 10, 11, 12, 13, 14, 15, 16, 17,19, 20, 21, 22, 23, 24, 25, 26, 28, 29, 30, 31, 32, 33,34, 35, 37, 38, 39, 40, 41, 42, 43, 44, 45, 46, 47, 48,50, 51, 52, 53, 55, 57, 58, 59, 60, 61, 62, 63, 64, 65,66: n = A,T,C or G
  misc_feature 67, 70, 71, 73, 74, 75, 76, 77, 78, 79, 80, 81, 82, 83, 84,85, 86, 87, 88, 89, 90, 91, 92, 93, 94, 95, 96, 97, 98,99, 100, 101, 102, 103, 106, 107, 113, 114, 121, 123, 124,126, 147, 173, 433, 554, 580, 625, 687, 700, 763, 767, 776: n = A,T,C or G
  misc_feature 781, 883, 889, 921, 983, 998, 1023, 1024, 1041, 1053, 1061,1065, 1082, 1088, 1089, 1097, 1118, 1129, 1133, 1139, 1141,1155, 1165, 1172, 1175, 1176, 1179, 1183, 1184, 1185, 1186,1191, 1205, 1207, 1208, 1210, 1218, 1226, 1229, 1231: n = A,T,C or G
  misc_feature 1241, 1256: n = A,T,C or G
nnnnnnnnnnnnnnnnntnnnnnnnntnnnnnnnntnnnnnnnnnnnntnnnntnannnnnnnnnnntanntnnnnnnnnnnnnnnnnnnnnnnnnnnnnnnnagnnaattanncctttgnannancctcctattttggcgaattgnagctccacccgccggtggcggcccgnccgggcaggtacacaaatgttcacagcaatattattcataatagctaaaaaaaagtagaaacaaccaatcaatggataaatggataaacaaaatgtggtatactcatacaatgaaatatttttctccatgaaaaatgaaatgaagggcttgaccattgggtgggctcaccgccttgtaatcccaagcaccgttgggggaagggcttgagggcaagggccggggatcacccttgaagggtccaaggggaagtttttgaagnacccaagccttgggcccaaaccattgggttggaaaaacccttgtcctcttaccttaaaaaaaaataccaaaaaaaaaaaaggtaagccttgggggccattggggtgcccaagggccgcccntgttaaaatcccttgggcttaccttngggggaaagcccaaaagaaccaagggaaggaaattccgcctttgnaaacccttaagaaaaggggcaagaagggtttggaaagttggaagccttggaagaaccttgcnacccaccttggcnacttcccaagcccttgggggccaaaaggaaaagaaaattggaaaaacttcccattcttcaaanaaanaaaaaaaanattanaattggaaaaaaaaaaaaaaaggtacccttcgggcccgcttcttaaaaaacctaagttggggaatcccccccgggggcctggcaagggaaatttccgaatantcaaancctttttcgaattacccggtccgacccttcgnagggggggggggccccgggtaaccccaaacttttttggttcccctttttaagtggaaggggnttaaattggccgccncctttgggccggtaaatcaatgggnncaataagccttgttttnccttggggttgnaaaatttntttnttccgctttcaaaaaantttccnncaccaaanaattacccaaaacccgggggngccattaaaantggnttaaanancctggggggggggnccttaatagnagggggngcnntancccnnnnttaantttgggggttgggncnncntggccccnttttttcnaancnggggaaaaanctttttttgcccacnt

SEQ ID NO: 6866 - DNA, 1152 bp, Homo sapiens
  misc_feature 1, 3, 7, 10, 11, 13, 15, 16, 17, 19, 21, 22, 24, 26, 27,32, 34, 37, 38, 39, 40, 46, 47, 51, 52, 53, 56, 58, 59,60, 61, 63, 68, 69, 71, 72, 73, 74, 80, 82, 83, 84, 86,87, 88, 89, 90, 91, 92, 94, 95, 102, 103, 104, 106, 107,108: n = A,T,C or G
  misc_feature 109, 110, 112, 187, 237, 269, 298, 310, 332, 407, 409, 421,461, 464, 481, 485, 486, 492, 495, 513, 517, 564, 588, 593,614, 644, 666, 687, 694, 768, 785, 813, 832, 833, 849, 857,878, 880, 881, 883, 901, 940, 942, 949, 955, 983, 987: n = A,T,C or G
  misc_feature 988, 989, 994, 1005, 1007, 1010, 1018, 1023, 1026, 1027,1030, 1058, 1060, 1064, 1067, 1070, 1072, 1073, 1080, 1082,1083, 1085, 1090, 1096, 1097, 1100, 1107, 1108, 1109, 1118,1120, 1123, 1130, 1131, 1134, 1137, 1142, 1145, 1147: n = A,T,C or G
ncncctnttnntntnnntntnntntnnttttntnttnnnntatttnntttnnnttntnnnnanatttnntnnnnttattntnnnannnnnnntnngtagggnnngnnnnnancgacttctatatggcgaattggagctccaccgcggtggcggccgacgtactttttttttttttttttttttgcantctgcttctttgatatgccttagggttacccatttaagttagaggttgtnatgcaatggtgggaatgaaaattgatcaaatntacaccttgtcatttcatttcaaattgcngctggaaacttncaaaaaaagggtaggcatgaanaaaaaaaaaatcaaatcaaaacctcttcaggggtttgtgttctgatatggcagacaagataccacagtcccaccngntagatggaaccnattcaaaaattaaggggtaaatggggcctgaccaaaggtnttntttgccagccattgggnaccnnaatgangcnacaggcctgaaaaagttntttnggattaatataggcacctactagtctctgatggtaaggggaaatttnttgtttaggtccaaaaccataccncctanaactttcccaaggggaaaaantcttttcacgggttagccctaaagcctttngccttttttttaagaagtggantgaagtttggccatttggctncctggtngaattttttttttggaaaaaaaccaaaaacttgggggttttttgggtaccctttcgggccccgccttctttaanaaaacttaaggttgggnaattccccccccgggggccttggccaangggaaaaatttccccattnnttccaaagccttttantttcgganttccccggtacggaccctttngnnanggggggggggggcccccnggttacccccaaaccttttttgggttcccctttttaagngnagggggntttaantttggcgcccctttgggcggttaaaaanaaannngggcnacaaaccctgntnttncctggggnggganaanntgntttttcccccctccccaaattttccacncnaaanatnttntnnccccctngnngncattnaaaatnnttnaaacccnnngggggcccnantgngagggannctnccnccccnatntnttttc

SEQ ID NO: 6867 - DNA, 824 bp, Homo sapiens
  misc_feature 1, 3, 5, 663, 713, 735, 739, 742, 747, 755, 761, 778, 784,785, 810, 814, 817, 820, 822, 823, 824: n = A,T,C or G
ntncnactactatagggcgaattggagctccaccgcggtggcggccgatcttcccaatttttgaagcaaagccagacactcctagcctgcggccaaccacttccagggttgtcaggacttccaccccacactgacccagggtggcttcattctgtaagggagaacctgccagaagcacaaccttatcttcagggatgaggccctccagggatgctacatgggccttgctctgggcaaccgtctccaggccggtcacttcaagagtgtgccccgcgtacctgcccgggcggccgctctagaactagtggatcccccgggctgcaggaattcgatatcaagcttatcgataccgtcgacctcgagggggggcccggtacccagcttttgttccctttagtgagggttaattgcgcgcttggcgtaatcatggtcatagctgtttcctgtgtgaaattgttatccgctcacaattccacacaacatacgagccgggagcataaagtgtaaagcctggggtgcctaatgagtgagctaactcacattaattgcgttgcgctcactgcccgctttccagtcgggaaacctgtcgtgccagctgcattaatgaatcggccaacgcgcggggagaggcggtttgcgtattgggcgctcttccgctttctngctcctgaacttcgttgcgctcggtcgtttcggctgcgggcgaaccggtntcaacttacttcaaaaggcggnaatnacnggttnttccacangaattnaagggggataaccccanggaaannaacattgtggagccaaaaaggccancaanaanggncnnn

SEQ ID NO: 6868 - DNA, 955 bp, Homo sapiens
  misc_feature 1, 3, 4, 11, 12, 14, 21, 27, 67, 160, 161, 173, 176, 178,189, 200, 202, 203, 205, 209, 211, 220, 221, 223, 228, 234,504, 547, 569, 595, 611, 635, 640, 678, 694, 700, 707, 711,746, 750, 755, 780, 787, 791, 808, 811, 816, 819, 827: n = A,T,C or G
  misc_feature 828, 845, 854, 860, 863, 871, 882, 887, 890, 892, 895, 896,898, 919, 935, 938, 941, 947, 949: n = A,T,C or G
ngnncttgggnntnttgggcnatttgnagctccaccgcggtggcggccgcccgggcaggtactttangagacccaggcgggcagattgcctgaggtcaggagtttgagaccagcctggctaacatggtgaaaccctgtctctactaaaaatacaaaaatnngccgggcatggnggntnacgcctgtagncccatctgctngnnangttnangcaagaganncncttgnacccangaggtggaggttgcagtgagccgagatcgcgccactgcactccagcatgggcgacagagcaagactccatctcaaaattaaagaaagaaagaaacaaagaaaagaaaagcttatattgaacttctcttaaaaaaagaaaaaaaagaaagcctgatgcacacaaatctaaatttttggcaaagtcgatcaatttaaaggatattttattttgcattcacaaaaataatttctttacctccccccaaaaatcaataaaaaagttcaaatagncaacttttcctaatggtgttttaaaaatgtaattcaccaaatnccatgtgttcccccaacctttnttttccaagttataaattctattggngtaaaagtggagggtnttacctgaaaggtggggggccaantaagnagaggtttgaggctttcaggaaccttgccttgggaagnaagaagccgtggtttncttttnttaaaangtcntggagggaaaattgggtttggggggggcaccaaanttcntctcnaatcttttttttctttttccccctnatttccntggngcttccttaatttttcnttngggcnttnaaactggnnttttcttggggtaaaanctttggttnaacccnggntacccttngggcccgcttnttttnaantnagnngnattcccccccggggttgcaanggaatttccttttttnaanctntttttngntacccg

SEQ ID NO: 6869 - DNA, 903 bp, Homo sapiens
  misc_feature 547, 554, 576, 655, 662, 701, 703, 704, 725, 759, 761, 763,774, 777, 779, 781, 782, 790, 797, 818, 843, 844, 848, 859,860, 869, 875, 878, 879, 882, 890, 892, 895: n = A,T,C or G
cgtatacgactcactatagggcgaattggagctccaccgcggtggcggccgggcacagtggctcatgcctgtaattccaacacttgggaggctgaggcgggtggatcacctgaggtccggagttcgagaccagcctgaccaacatggagaaaccctgtctctactaaaaatacaaaattagctgggcgtggtggtgcacacctgtaatcccagctactcgggaggctgaggcaggagaatcgcctgaacccgggagacagaggttgtggtgagccgagatcgtgccactgcactccagcactccagcctgggcaatgacagcgaaactctgtctcaaaaattatatacatatatattttttggccaggcgcagtggctcacgcctgtaatcccagcactttgggaggccgaggcaggcagatcatgaggtcaggagatggagaccctcctggctaacacggtgaaaccccgttttctactaaaaatacaaaaaattagccaggcgtgttggcgggcgcctgtagtcccagctactgggggagcttgngcagganaaatggccgtgaaccccaggangagggcggagcttgcagtgagctgaagaatccgcgcccacttgcacttccaaccttggggggacacagccgagaacttncgttttnaaacccaaaaaaaaaaaaaaaaaaaaaaaaaaagttccntnnggcccgcttttaaaacttaantgggatccccccggggcttggcagggaaattccnantnttaaagctttnttngnanncccgcccnacctttnaagggggggggcccccggganccccaactttttgtttccttttaanngganggggtaaattnnccccctttnggcggnaannatngggccaananttngtttcctg

SEQ ID NO: 6870 - DNA, 1204 bp, Homo sapiens
  misc_feature 7, 8, 12, 14, 19, 21, 23, 24, 25, 26, 28, 29, 31, 32, 33,36, 37, 38, 43, 44, 45, 46, 51, 52, 56, 57, 59, 61, 63,64, 65, 68, 76, 77, 79, 80, 81, 82, 83, 84, 85, 86, 87,88, 91, 93, 97, 106, 110, 118, 119, 135, 143, 159, 169,185: n = A,T,C or G
  misc_feature 200, 213, 220, 222, 342, 368, 391, 392, 395, 431, 434, 447,469, 493, 503, 510, 525, 533, 534, 564, 573, 580, 600, 602,604, 614, 618, 643, 655, 656, 669, 677, 683, 701, 708, 720,722, 730, 737, 741, 743, 753, 757, 758, 759, 762, 766: n = A,T,C or G
  misc_feature 767, 772, 773, 798, 801, 803, 819, 820, 821, 830, 831, 846,855, 860, 866, 869, 879, 886, 890, 898, 899, 900, 906, 918,924, 925, 927, 930, 931, 940, 943, 945, 948, 949, 955, 958,962, 964, 965, 966, 967, 973, 975, 985, 989, 992, 994: n = A,T,C or G
  misc_feature 995, 998, 1010, 1013, 1016, 1017, 1032, 1036, 1041, 1051,1055, 1056, 1058, 1059, 1067, 1071, 1081, 1090, 1092, 1093,1108, 1112, 1121, 1136, 1152, 1155, 1158, 1164, 1168, 1171,1173, 1178, 1189, 1194, 1196, 1200, 1204: n = A,T,C or G
cgcacanncacnancacgncngnnnntnngnnnccnnnatacnnnntactnntttnnancnannnagnatttatannannnnnnnnnnaanantgancgttgaaanccanacatttgnnaaattcccaattgcanctccaccncggtggcggccgttcngccaggttcncggggagaaggaagangcggggagggaaagnctgcagcaaaaanaaaaaanantcccggacaggccgcttgctgcagaggatccagtccagatcccaggagagcccctctgccccttcggacctcgtcttcccatctacaaaacgtgaagattggcccaagttagccgtgtcnctacaaaataggtgcatataccactngaagctgccttgtttgcttttgnntgntggattgaaccttttgctttcatgaaatcaccgggnttngggaaaaggcctncctccttgttttttcctgcctnaataaaaaaaagcccattctttgnggccccaaangccggtngggtggggctccacnacccgtgnnaaattcccccagccacctttttggggaagngcccccaanggccaangcccgggcaatccacccctngnanggccccaagnggangtttccaaagaacccccagcccctngaaccccaaacnngttgggggggaanaacccctngttttncccaacttaaaacgaganaaaaagncccatataaatntngagaaaanaaaattntggntnccctatgggncccnnnttnttannaaacnnaaggggggggatccccccccggggnccncnccagggaaatttccgnnntattcaaanncctttaattcgaaanacccggccntaccncttttnaangggggggggncccccgngtcncccccaannntttttnggggttcccccnttttannanggnngggggggtnaantnggnncccccnttngggngnnnnaaacanangggggccccnaagnccngnnttnccccgggggggnaanaanngggggttcccccctncccnaaatnttcccccccnaaannannacaaaagncccnggggggcccnaaaaaagtngnnaaaagcccccggggngggncccctaaanaggggggagcccaancccaccactttaattnggngtnttggcncccnacntnacccngagattattcntattntngacnacan

SEQ ID NO: 6871 - DNA, 926 bp, Homo sapiens
  misc_feature 2, 22, 31, 34, 47, 60, 63, 72, 73, 104, 112, 114, 115, 119,123, 378, 413, 422, 429, 431, 454, 476, 502, 508, 523, 584,604, 633, 640, 665, 671, 695, 700, 702, 708, 715, 723, 732,738, 749, 756, 760, 766, 771, 786, 787, 791, 796, 798: n = A,T,C or G
  misc_feature 803, 812, 825, 843, 846, 847, 859, 861, 888, 905, 906, 907,908, 909, 910, 914, 916, 919, 921, 922, 923, 924, 925, 926: n = A,T,C or G
gnaacttgaaatccaaaatccnggaaaattnccnccggagctccacntttgtggcggccnttncccaggttnnaagaccccgagaggcactcagcgggagcctngtggaaancnnacanctcntcatcgactacattctcgacctgcaggtagtcctggccgagccagcccctggaccccctgatggcccccaccttcccatccagacagccgagctcgctccggaacttgtcatctccaacgacaaaaggagcttttgccactgactcggccgctctagaactagtggatcccccgggctgcaggaattcgatatcaagcttatcgataccgtcgacctcgagggggggcccggtacccaacttttggtccctttantgaggggtaattgcgcgcttgggcgtaatcatggncatagctgnttcctgngngaaattggtatcccgctcacaanttccacacaacaatacgagccngggagccataaaaggggtaaaagccngggggnggccctaaatgaagngaagcctaacctcacatttaaattggcggttggcgcctcaactggccccgcttttcccagnccggggaaaaccctggtcgnggccaagctgcatttaaatgaatccgggnccaaccnccccgggggaagaaggccggttttngcgtanttggggcggctcctttccgctttncttcngnttaacntggaacncgcttggngcctcgggncgttcnggcttgggggngaaaccngggnttcaancctcnactcaaaaggcgggnnatancgggntnttccnccagaaatnaaggggataacgncagggaaaaaaaacatgnganncaaaaaggccancnaaaagggcccaggaaaccggaaaaaanggcccgcgttgctgggnnnnnntttnanaanannnnnn

SEQ ID NO: 6872 - DNA, 912 bp, Homo sapiens
  misc_feature 370, 437, 448, 452, 461, 469, 507, 512, 551, 561, 568, 582,587, 592, 606, 663, 667, 668, 683, 684, 686, 694, 696, 702,720, 722, 723, 726, 737, 743, 745, 748, 750, 751, 752, 753,757, 768, 770, 774, 777, 781, 782, 784, 787, 791, 803: n = A,T,C or G
  misc_feature 808, 809, 820, 824, 828, 833, 835, 837, 844, 846, 847, 852,870, 871, 878, 879, 885, 899, 908, 911: n = A,T,C or G
actatagggcgaattggagctccaccgcggtggcggccgcccgggcagctaattttttgtgttttaagtagagacggggtttcaccatgttggccaggatggtctcactctcctgacctcgtgatccacccacctcggcctcccaaagtgctaggattacaggtgtgagccaccatgcgtggtccacacttattatttttactttagttaatagtctaatatttaagggtatattgttttttaaatccaatgcctttactttttatttatttttttttgagatggggtcttactctgtcatccaggctggggtgtggtggcgcgatctcggctcactgcaacctcaacctcctggactcaagcgatcctnccaccttccttccgagtagctgggatcacaggcatgtgccatcacgcctggctgattttctgtaaanggggtttcggntgtntttggccanggcccggncttaaaaaactccttgccccttcaagcgaatccttcangcctnaaagcctttccaaaagatggctgggggatttacaagggngtggagcccnacttatncctttgggccaaanatctngaaantttttaaaaatttncacttggaatggaacattaacccggaaggggaaaattaccaggagaaaaattgggcngganntccctcaaaagaccnngngggaattngnaaatcnttcccaagctgggaaaanannaanattaatatganttaatnantantnnnntggnttcccttgggncncttntanaaannanggnggantcccccccgggntggcnnggaatttcganattnaaanttttncnantccccgncnnccttncaagggggggggcccggnnccccaanntttttntcccttttaaggangggggaaantgnc

SEQ ID NO: 6873 - DNA, 808 bp, Homo sapiens
  misc_feature 657, 696, 736, 771, 772, 776, 784, 787, 798, 800, 807: n = A,T,C or G
ggcgaattgggtaccgggccccccctcgaggtcgacggtatcgataagcttgatatcgaattcctgcagcccgggggatccactagttctagagcggccgccgggcggccgccaccgcggtggagctccagcttttgttccctttagtgagggttaattgcgcgcttggcgtaatcatggtcatagctgtttcctgtgtgaaattgttatccgctcacaattccacacaacatacgagccggaagcataaagtgtaaagcctggggtgcctaatgagtgagctaactcacattaattgcgttgcgctcactgcccgctttccagtcgggaaacctgtcgtgccagctgcattaatgaatcggccaacgcgcggggagaggcggtttgcgtattgggcgctcttccgcttcctcgctcactgactcgctgcgctcggtcgttcggctgcggcgagcggtatcagctcactcaaaggcggtaatacggttatccacagaatcaggggataacgcaggaaagaacattgtgagcaaaaggccagcaaaaggccaggaaccgtaaaaaggccgcgttgctggcgtttttccataggctccgcccccctgcgagcatcacaaaaatcgaacgctcaaatcagaaggtggcgaaaccccgacngggactataaaagataccaaggcgtttcccccctggaancttccctcggtgccgctcttcctgttcggacccttgccgntttccggaataccctgtccggcttttcttcccttnngggnaagcagtnggngcttttcttantnagctcanc

SEQ ID NO: 6874 - DNA, 1181 bp, Homo sapiens
  misc_feature 1, 3, 4, 5, 7, 10, 12, 15, 18, 22, 23, 27, 28, 29, 30, 31,32, 34, 35, 36, 37, 38, 41, 44, 50, 52, 54, 55, 56, 57,68, 72, 73, 76, 77, 78, 79, 80, 81, 82, 83, 84, 85, 88,95, 96, 97, 98, 101, 103, 104, 105, 107, 110, 111, 115,125: n = A,T,C or G
  misc_feature 191, 193, 195, 198, 199, 210, 212, 214, 221, 404, 432, 442,443, 445, 454, 472, 476, 483, 485, 496, 501, 506, 513, 515,522, 523, 527, 530, 568, 633, 635, 639, 707, 724, 726, 739,756, 761, 770, 773, 782, 800, 808, 815, 826, 843, 847: n = A,T,C or G
  misc_feature 849, 860, 861, 863, 865, 879, 880, 885, 912, 933, 936, 938,939, 941, 957, 969, 977, 997, 1006, 1010, 1035, 1040, 1053,1074, 1077, 1080, 1093, 1099, 1105, 1109, 1114, 1120, 1122,1126, 1127, 1130, 1136, 1139, 1157, 1158, 1172, 1173: n = A,T,C or G
  misc_feature 1179, 1180: n = A,T,C or G
nannntnttnangcngtnttgnntttnnnnnncnnnnntanttnttttantnannnntgagattgganatanngtnnnnnnnnnnagntagaggnnnnagngnnncntcnntttncttacttttnggcgaattggagctccaccgcggtggcggccgcccgggcaggtactttaggagacccatgcgggcngntngcnngaggtcaggantntnaaaccancctggctaacatggtgaaaccctgtctctactaaaaatacaaaaattagccgggcatggtggctcacgcctgtagtcccaactgcttgggaggttgaggcaagagaatcgcttgaacccaggaggtggaggttgcagtgagcccgagatcgcgccactgcactccagcatggggccgacagancaaggactccatcttcaaaaataatggnacgcaaaggnntncatgggcanaactaacaaggcttattntttngaaactntntcttaatagcncggancatcncccagananggccctnnattnccnccaccaatattctttaaaaatttttgggcccaaagttncggattccaaatttaaaaaaggggaattatttttaattttttggcaatttcaaccaaaaaaattnantttnctttttaaccttccccccccccaaaaaaaatccaaattaaaaaaaaggtttcaaaaattaaggcaaancttttttcccttaaatngntggttttaaaaanttggtaaattcacccanaaatnccatttttnttnccccccaancctttcttttttccccangtttattnaatttcntattttggggntaaaaagggtggagggntttnancccctggaaanntngnagggccaaattaannagaanaaggtttgaggccttttcaaaaacccntgccccttgggaaaaaagaanccngnngnttccttttttctttanaaagtcctgganaggaaaanaggggttggggggggggccnccaaaattntttncttaaattcttttttttcctttttnccctnaatttcctgaagnttttttatttttcctttgggnctnaancctggctttttcnggggtnaaaccntttngtttnactccntngttnnccnttgggnccngtttctaaaaaacttaannggggatttcccccnnggcctnng

SEQ ID NO: 6875 - DNA, 1084 bp, Homo sapiens
  misc_feature 1, 4, 5, 7, 8, 12, 15, 17, 19, 20, 21, 23, 24, 25, 26, 27,28, 29, 31, 32, 33, 34, 35, 36, 37, 39, 40, 41, 42, 43,44, 50, 51, 52, 53, 54, 55, 56, 59, 60, 61, 62, 64, 65,66, 69, 71, 73, 74, 75, 76, 77, 78, 79, 80, 81, 82, 83,86: n = A,T,C or G
  misc_feature 87, 88, 94, 100, 101, 106, 109, 111, 115, 191, 196, 198,214, 220, 673, 715, 716, 749, 783, 807, 844, 847, 858, 860,870, 887, 898, 915, 921, 928, 943, 1004, 1013, 1060, 1069,1070, 1075, 1077: n = A,T,C or G
nctnngnntgtnggntngnnnannnnnnntnnnnnnncnnnnnntttttnnnnnnnttnnnntnnnttntntnnnnnnnnnnnagnnnaagggngggggnnagagnttntntctnactatatggcgaattggagctccaccgcggtggcggccgcccgggcaggtaccaggtgaacaaagtttaccagagngcagngngagacaagaaaataanagctcntgatgagggaaaagaaaaagattgagagaatttgtgcccccaaccatttcctcagactctaagaaagaacacgctctctccaggcaggtctgaagctcaactctcttattgcctcacttcaggtatacctcacttttacacaataggaattataactggaaagaagttggggacacatgttatttggtgattacatttcaaacacatttagggaaaagttgctatttgaacttttttattggatttttggggggggagttaaagaaattattttggtggattgcaaataaatatccttttaaattgatccgaccttgcccaaattttaggatttgtgtgcattcaggctttcttttttttcttttttttaagagaaagttcaaatattaaagcttttttcttttttctttgggttccttttcttttctttttatttttgaggaatgggaaggntcttttgccttcttgttccgccccatgcctgggaagtggcannttgggccgccgaatcctcgggcttcaacttgcnaaacccttccaacttttccctgggggtttcaaangccgaattccccctttgccccttnaaaccctcccccaaaggcagggtttgggggaacttancanggccgttggangncccacccatnggccccgggccttaaantttttttggtnattttttttaaagtaangaaaancaggggntttttccacccattngttaagcccaaggccttgggtcttcaaaaaccttccttgggaaccttcagggccaattttnggcccccgncctgggggtcctccctaaaaggttacccttcggggcccggttcttanaaacttagnnggggntnccccccg

SEQ ID NO: 6876 - DNA, 1278 bp, Homo sapiens
  misc_feature 2, 3, 9, 13, 16, 17, 18, 22, 29, 30, 31, 33, 34, 36, 37,41, 43, 46, 48, 49, 50, 52, 54, 55, 57, 60, 68, 70, 72,73, 77, 78, 83, 85, 87, 89, 90, 91, 94, 96, 97, 104, 105,111, 119, 123, 130, 144, 150, 152, 183, 184, 188, 196, 204: n = A,T,C or G
  misc_feature 206, 207, 209, 212, 214, 218, 219, 220, 228, 234, 239, 300,328, 380, 403, 414, 453, 468, 469, 494, 549, 580, 583, 592,627, 630, 632, 670, 673, 675, 684, 687, 689, 702, 709, 710,731, 753, 755, 764, 782, 788, 808, 809, 811, 824, 829: n = A,T,C or G
  misc_feature 833, 845, 847, 851, 854, 875, 880, 893, 901, 914, 922, 928,940, 944, 969, 971, 977, 979, 1000, 1010, 1011, 1014, 1018,1023, 1033, 1049, 1050, 1055, 1059, 1062, 1065, 1071, 1072,1077, 1079, 1082, 1083, 1090, 1091, 1099, 1100, 1104: n = A,T,C or G
  misc_feature 1123, 1124, 1131, 1137, 1139, 1143, 1146, 1150, 1151, 1155,1158, 1163, 1175, 1198, 1201, 1202, 1203, 1210, 1219, 1221,1222, 1242, 1245, 1247, 1250, 1264, 1265, 1268, 1272, 1278: n = A,T,C or G
anngaagtntgtnttnnntttnattgatnnnanngnnatcnanatnannntnanntnttntatttaanananntatnngtacngntnannnagntnngagggannataaanattttatntatnttttttnttttgcggttttgnagtctncnccgtggttggccggccgaggtactgtacttnngggnatgtcaanaattcttngnngnggngngggnnngagtgttnaaaaanaactntgtttggcccccaactgcaggcagagaaccatggtagcagggtggcagggctggccctgancaggagctggagcaagcgcatgctgganaaaacagaaggcaatgtgtcccagagaagtggtccccgcgtacctgcccggngcaggcccgctctagaactagtnggatcccccgnggcttgcagggaattcgatattcaaggccttatcgaatncccgttcgaccctcnnagggggggggccccgggtaccccancctttttgtttccctttttaagtggaaggggttttaaatttggccgccgcctttnggccgtttaattccattggggttccattaangcntggtgtttncccttggttggttggaaaaattttggtttattccncgncnttcaacaaaattttcccacaaccaaaaacaattatccnganancccccgggngangnccaattaaaaaangttggtnnaaaaagccccttggggggggntggcccctttaaaattggaagntnggaaggccnttaaacccttcaaaccanttttanaaattttggcggtttttggnngnctttcaacattgnccccnggcnttttttcccaangnttcnggnggaaaaaaccctttgttccgnggggncccaagccttggncattttanattggaaaatttnggggcccnaaaacngccgcccggggngaantaaaggcccgggttttttgccggtnantttggngnccgggctctttttcccgcttnttcctatggnnttncaanttggnacttccagcnttggggccctttcagnngtccntttncgnggnttgcgnngggcntnaannccgggtnntttaagannctanactccaaaaagggcggggnnaatattnccgggntntttnccnccannaatntcnagggngggatttaaccngccatgggaaaataaaacatttntgnnnaccaaanaaagggccntnntaaaaaagggcctatttaanccngntanaaaaagggcccccnnttncctngggccn

SEQ ID NO: 6877 - DNA, 1137 bp, Homo sapiens
  misc_feature 1, 2, 3, 8, 12, 14, 16, 18, 20, 22, 23, 24, 26, 28, 29, 31,34, 35, 36, 37, 38, 39, 40, 41, 42, 43, 44, 46, 50, 52,55, 56, 57, 63, 64, 65, 67, 71, 72, 73, 77, 81, 82, 83,84, 85, 86, 87, 88, 89, 91, 93, 98, 99, 102, 105, 106, 108: n = A,T,C or G
  misc_feature 112, 113, 114, 115, 116, 117, 173, 201, 221, 483, 501, 568,583, 649, 678, 685, 691, 695, 706, 725, 736, 737, 771, 774,801, 804, 806, 809, 814, 825, 839, 840, 867, 868, 870, 875,884, 887, 894, 896, 901, 920, 933, 951, 952, 960, 973: n = A,T,C or G
  misc_feature 974, 984, 985, 1008, 1025, 1027, 1032, 1035, 1037, 1041,1047, 1064, 1068, 1080, 1091, 1092, 1094, 1097, 1098, 1109,1130, 1132, 1136: n = A,T,C or G
nnnatttnatantnantnanannntntnntntannnnnnnnnnntnttantnttnnnatttannntngttnnnatancttnnnnnnnnngnangagtnnggnttnngncggnnnnnnctctcactatatggcgaattggagctccaccgcggtggcggccgcccgggcaggtncgcggggcactcaagcagagaagaaatncacaaagactcacagactgntggtgggcatgagaagacagaaacgacatgagcacagcaggaaaagtaatcaaatgcaaagcagctgtgctatgggaggtaaagaaacccttttccattgaggatgtggaggttgcacctcctaaggcttatgaagttcgcattaagatggtggctgtagggaatcttgtcgcacaagatgaccacgttggttagtggcaaccctggtgaccccccttcctgtgattttaaggccatgaagggcagccgggcatcgtggganaagtgtttgggaggaagnggggtgacttccagttcaaaaccaaggttgattaaaagtcatcccggctctttactcctcagtggtnggaaaaaattgccangaggttttgttaaaaaaccccgggaagaagccaacctactggctttggaaaaaaaatggatcttanggccaattcccttcggggggggaaccccntgcaatnggattnggcnccccagggaanggtttcaccccttggcagngggggggaaanncccccattttcaacccaacttttccttttggggncancccaaagcaaccctttttttcccccangtnanccnttttnggcccgcgttnttaaaaaacctaanntggggaatccccccccggggccttgcnnanggaanttttcgganttnttcaaangnctttnttccggattacccgggtcngaacccttttaangggggggggccccgggtnnccccaaanctttttttggttnnccctttttannttggagggggtttaaaatttggngcccccctttgggcggntnaattncantngggncatttngccttggttttccctcngtgntgaaaaaattgntttatttccgnntntannaaattttcccncaccaaacatttatccgaggncngggng

SEQ ID NO: 6878 - DNA, 1034 bp, Homo sapiens
  misc_feature 2, 3, 4, 5, 6, 7, 8, 9, 10, 11, 13, 14, 16, 17, 18, 23, 26,27, 28, 29, 30, 33, 34, 35, 36, 38, 39, 40, 42, 46, 47,49, 51, 54, 64, 65, 67, 69, 70, 71, 72, 73, 74, 75, 76,78, 81, 84, 87, 88, 89, 90, 91, 92, 93, 95, 96, 99, 101,103: n = A,T,C or G
  misc_feature 105, 106, 111, 113, 154, 158, 182, 198, 315, 318, 325, 342,384, 389, 422, 441, 493, 509, 511, 564, 571, 582, 597, 615,620, 683, 700, 713, 716, 717, 773, 780, 811, 820, 831, 834,847, 850, 863, 866, 868, 903, 907, 911, 912, 932, 936: n = A,T,C or G
  misc_feature 945, 957, 969, 977, 979, 980, 984, 987, 1004, 1006, 1010,1027: n = A,T,C or G
tnnnnnnnnnntnntnnntttanatnnnnnttnnnnannnanttanntntnttntttttttatnnanannnnnnnntnttnagnaannnnnnncnnttnantntnnctatntngcgaattggagctccaccgcggtggcggccgaggtactctntttnttttttttttttttttttggcttnatgggacggtccaaanaggctttggaacagggctcctcggggttttcttgccaactgtctgagcccgggaacaagcacgggcccccttcctccttcagctcctgcccacactccatttcaccctccgaggccnacnccattgnggagttattgttctcanaatctgctatgggggctcccgcgtacctgcccgggcggccgntctanaactagtggatcccccgggctgcaggaatttcnatatcaagcttatcgattnccgtcgacctcgagggggggggccccggtacccagcttttgttcccttttantgagggttaaattgcncnctttggccgttaattcatggtcatagcttgttttcctgtgtgaaaattgtttntcccggntcacaatttcncacacaaccatttcnaagcccgggggagccatnaaaanttgttaaaagccctggggggtggcctaattgaagtggagcctaaccttcacattttaatttgngtttgcgcctcacctgnccccgcttttttncanntccggggaaaaaccctggtccggtgcccaggcttgcatttaaatggaaatccgggnccaaacncccccggggaaaagggcccttttttgcgttnttttggggncgccttctttncgnttttccttgcttnacnttgaacttcgggntgngncttccgggtcctttccggcttgggggcggaagccnggtntcanncttccacttccaaaaggggngggntaaataccngggttttttccncaaagaaattcngggggggntnnaccnccngggaaaagaaacatttntnggancaaaaaggggggggggncctaaaa

SEQ ID NO: 6879 - DNA, 1168 bp, Homo sapiens
  misc_feature 4, 5, 6, 7, 8, 10, 11, 12, 13, 16, 18, 19, 21, 22, 23, 27,29, 31, 32, 33, 34, 35, 36, 37, 38, 41, 43, 45, 47, 48,53, 59, 60, 63, 64, 66, 67, 71, 74, 75, 76, 78, 81, 82,84, 85, 86, 87, 88, 89, 90, 92, 93, 95, 96, 105, 110, 115,118: n = A,T,C or G
  misc_feature 119, 125, 126, 128, 176, 196, 198, 223, 412, 449, 459, 499,518, 530, 572, 592, 601, 620, 632, 649, 664, 684, 700, 709,715, 728, 795, 835, 841, 842, 855, 869, 871, 872, 882, 888,889, 891, 893, 900, 911, 916, 918, 921, 931, 940, 953: n = A,T,C or G
  misc_feature 972, 979, 980, 983, 988, 1019, 1033, 1043, 1044, 1052, 1064,1067, 1071, 1079, 1086, 1129, 1130, 1133, 1137, 1144, 1145,1147, 1159: n = A,T,C or G
tcannnnnannnnttnanntnnntttntntnnnnnnnngtnangntnntcttntattgnnatnntnntgtntannntntgnntnnnnnnntnntnnagggtaggnaaatnatcanatnnttattnntntttggcgaattggagctccaccgcggcggcggcccgcccgggcaggtnctttaggagacccatgcggncngattgcctgaggtcaggagtttganaccagcctggctaacatggtgaaaccctgtctctactaaaaatacaaaaattagccgggcatggtggctcacgcctgtagtcccaactgcttgggaggttgaggcaagagaatcgcttgaacccaggaggtggaggttgcagtgagcccgagatcgcgccactgcacttccagtcatgggccgaacagnggcaagactccatctcaaaataaaggaataggaaagnaaaacaaagnaaagggaaaagccttattatttgaaccttcttcttaaacnaaaggaaacattaaagganttgccttgatgncacaccaaaattcttaaatttttggccaaggttcgaatccanatttaaaagggattattttnatttttgcnattcaccaaaaaaattaantttcctttttancttcccccccccaaaanaattccaaattttanaaaaagttttccaaaattangccaaacctttttttncctaaaatnggttgntttttaaaaaaantggttaaaattccaccccaaaatttcccattgttgttcccccccaaaccttttctttttcccaaganttataaaaatttccctaatttggtggttaaaaagggtggnggggtnntttccccttgaanagttggaagggccnannttaaggaaanaggttnnangnccttctnataacccttgnccctngnaanaagaaagccnttgtttccnttttttttaaaantccttggaggggaaaaatnggttttnnggnggccnccaaaaattcctctccaaatccttttttttnttttttcccttaantcccctgganncttctttnattttttttttnggncttnaaactggnttttttntggggtaaaacattttgtttcccccttggttacctttgggccnnttncttnaaacctnngngggggtttcccnccggggccc

SEQ ID NO: 6880 - DNA, 1164 bp, Homo sapiens
  misc_feature 2, 7, 12, 13, 15, 19, 22, 24, 25, 26, 27, 28, 29, 31, 32,33, 34, 35, 36, 38, 40, 41, 44, 45, 47, 50, 52, 53, 58,62, 70, 71, 72, 75, 76, 77, 78, 79, 80, 83, 85, 89, 90,91, 93, 94, 97, 98, 115, 116, 159, 170, 192, 200, 204, 212,217: n = A,T,C or G
  misc_feature 220, 276, 358, 418, 443, 444, 447, 464, 473, 510, 531, 532,539, 580, 582, 586, 622, 633, 640, 644, 657, 664, 679, 682,695, 701, 704, 706, 708, 709, 722, 746, 747, 757, 758, 759,762, 774, 785, 787, 809, 810, 811, 819, 821, 829, 834: n = A,T,C or G
  misc_feature 838, 841, 849, 851, 868, 875, 876, 886, 889, 891, 896, 905,912, 920, 922, 927, 938, 955, 966, 967, 969, 976, 989, 996,1017, 1028, 1039, 1040, 1051, 1052, 1059, 1060, 1064, 1065,1070, 1072, 1076, 1083, 1093, 1098, 1100, 1105, 1111: n = A,T,C or G
  misc_feature 1115, 1120, 1133, 1134, 1137, 1149, 1151, 1153, 1163: n = A,T,C or G
gnactanttttnntnaatnttntnnnnnnannnnnntntnnaanntnaanannttatnattnatgtatcnnnatnnnnnnaananggannntnnaanngcctatttttgactatnnggcgaattggagctccaccgtggtggcggccgtgcgcggtggntcacgcctgtnatcccggcacttgggggaggangaggcggncaanaaaacaangtctntangtttgagaccatcttgaccaacttggtgaaacctcggctctactaaaaatacaaanattagccaagccgtggtgacgcgcgcctgtaatcctagctacttagaaggctgaggcaggtagaatcgcttgaacaccggangcagagcttgcagtgagcccgagatggcagccactgcactctcaagcctggagtgacagnagcgaagacttcccccgcgtacctnnggnccgcttctagaaactangtgggatcnccccccggggcctgcaaggaaattccgataattcaangctttattcggattacccgtnngaccctntgaagggggggggggccccgggttaccccaaggcctttttngntttncccctttttaagttggaaggggtttaaattttggcngccgccctttnggccgtnaaantcaattggggtcnattaagncttgttttttccctngtnggtggaaaaattnggttanttncngnnttcaacaaatttntccacaacaaaccattaacgaaanncccggggggnnncanttaaaaaggggntaaaaaacccntnggggggtgcccctaaatggaannntggaaggncntaaacctnaacantttnaanttgggggntngggggccttccacattnggccccnntttttccaanttncnggganaaaccctgntccgttngccccagncntggcntttaaattganaattggggggccaaacnccccccggaannanaaaaganaggtttttttccnttttttngggggcggccttttttcccgnctttcccttcngttttaaaatnnaacttcgcttnnagccccnnggtnngattncnaganttggcgnggagaaacgnggtantncaagnctacancttnaaaanggacgggagaatnncgnggtgatatcctntncnccattggggng

SEQ ID NO: 6881 - DNA, 919 bp, Homo sapiens
  misc_feature 559, 585, 616, 662, 675, 686, 696, 703, 706, 718, 734, 744,753, 757, 759, 765, 766, 770, 781, 797, 807, 831, 832, 833,844, 846, 848, 850, 854, 855, 856, 859, 862, 863, 864, 870,876, 883, 884, 888, 892, 895, 896, 905, 907, 909, 918: n = A,T,C or G
  misc_feature 919: n = A,T,C or G
gtaatacgactcctatagggcgaattggagctccaccgcggtggcggccgcccgggcaggtactttaggagacccaggcgggcagattgcctgaggtcaggagtttgagaccagcctggctaacatggtgaaaccctgtctctactaaaaatacaaaaattagccgggcatggtggctcacgcctgtagtcccaactgcttgggaggttgaggcaagagaatcgcttgaacccaggaggtggaggttgcagtgagccgagatcgcgccactgcactccagcatgggcgacagagcaagactccatctcaaaataaagaaagaaagaaacaaagaaaagaaaagcttatattgaacttctctaaaaaaagaaaaaaaagaaagcccgatgcacacaaatctaaatttggcaagtcgatcaattaaaggatatttatttgcatcacaaaaataattctttacttccccccaaaaatcaataaaaaagttcaaatagcaaccttttttccttaatggtgtttaaaatggtaatccaccaaaatacatgtgtcccccaacttntttccaggttattaattcttatttgnggtaaaagtgagggtatacctggaaggtganggcaattaagaagagtttggagcttttcccgaccctgccctggaanagaagccgtgttntttttcttaanaagtcttganggaaatnggnttgggggggccncaaaatttcttcttcnatcttttttntttttcccntcantncctggnncttntttattttttnttggcttaaaactggnttttttgggnaaaactttttgtttccccttgggnnncctctgggccncntntnaaannntantgnnntccccncgggcntgggggnntttngaanttnnaagcctatntngntccccgtcnn

SEQ ID NO: 6882 - DNA, 869 bp, Homo sapiens
  misc_feature 2, 3, 525, 671, 692, 708, 710, 718, 725, 729, 732, 736, 737,738, 749, 756, 757, 758, 769, 770, 779, 785, 790, 791, 797,801, 808, 824, 837, 840, 852, 861, 863: n = A,T,C or G
gnnaggcggcgtaatacgactcactatagggcgaattggagctccaccgcggtggcggccgcccgggcaggtaccctcaaaggtaaacaaaataaaatcttattaataattacatttaaaacagttttaacaaatgaacaaaggccatgtttagtagttactatagcctaaacatacctgctgtttcaggtgcttggttgcagaatcgccatttttagggtcattaagtgcatcgtgtaatgctggatgggacataatatgatctttaagtgtagaattcaagccttcacttgcttttctcaatttcttaattaacttttccaactgctcttcagatagagaagaaattggaactaattgttcaggtatttctgtttcatctcttaagcctgcattaatatcttgaatatagaaatcaggttttggtttctctcttgagttacattttttcaaatgctttgctagttgatcttcatatactgtgtgttttggatctaaaggacacaggattcttttccgagcatnttcttcctccatggctccagcgtgttcaccacaaaatcttttccctgcggccaccaccatcctgcagaacccgttttcttcttttccacatagtaacccgcatctaccctcagctggaaaaacccagccccgtgcgggcgacctcnccggagggtcgccataatttntagggctcccccgcgntnccctgggnccggttnttanaanctannnggaatcccccngggcctnnnagggaatttcnnaaattaaancctttntcggnntcccgnccanccttaangggggggggccccggncccccactttttnttncctttaaggagngggttaaantncccccc

SEQ ID NO: 6883 - DNA, 870 bp, Homo sapiens
  misc_feature 523, 537, 538, 556, 559, 563, 567, 570, 573, 574, 583, 586,600, 603, 626, 634, 653, 655, 656, 658, 659, 664, 674, 675,678, 680, 681, 695, 698, 702, 704, 709, 713, 714, 721, 743,759, 760, 763, 764, 768, 773, 774, 782, 784, 788, 806: n = A,T,C or G
  misc_feature 816, 819, 820, 825, 836, 839, 844, 846, 848, 863: n = A,T,C or G
ggagctccaccgcggtggcggccgcccgggcaggtacctgtggtctcagctactcgggaggctgaagtggggaggatcgcttgagcccaggtggtcgaggctgcagtgagctgtgtttataccaccacactccagcctgggccgcagagtgagactttgtccaaaacaacaacaacaacaacaacaacaacaacaaaaactgtagcttccattttgggtgttctctattgctctgtcttggatcattcactctgggagaagccagctgccaaaggcattccttcagcgaggcccacatgaatggtaacaggcacatgagtgagcttggaagctgatcctttcctagttgagccttgatgactgcagctgtggctgacacagcagtagctttttgaaagattctaaaccataactaaccagctaagtcttccagataactgtcctgcagaaactatgagataataaatgttcattgttttagctactgagtgttggggttattttgttgtacctcgggccgctntagaactagtgggnntcccccgggcctggcagnaanttcnaatnttnaannctttattcngantaccccggtcgacnccntgaaggggggggggccccgggtncccaaacntttttggtttcccttttananngnnggggnttaaattgcnnccncnntgggcgggtaaaanatngggncnaaagntgtnntccccgnggggaaaattgttttattcccnttcccaaattttcccnncannaatnacaanncccggggncnattnaaaatgggtaaaaaaccncggggggggnccnnataanggggggcccanccnccccntntnttggggtggggcccnctagccc

SEQ ID NO: 6884 - DNA, 908 bp, Homo sapiens
  misc_feature 2, 3, 8, 674, 679, 680, 681, 682, 684, 689, 696, 697, 698,708, 719, 723, 728, 729, 730, 731, 744, 753, 766, 770, 771,783, 786, 787, 790, 792, 794, 795, 802, 804, 813, 823, 842,843, 847, 850, 857, 859, 863, 867, 880, 886, 888, 895: n = A,T,C or G
  misc_feature 899, 903, 907: n = A,T,C or G
gnntagtngacgccgtaatacgactactatagggcgaattggagctccaccgcggtggcggccgcccgggcaggtacgcggggagaccgactaggacgagacaagagggacagggaggcttcgcggaaccctacgcccacccgacgcgttcgcccgtccgtttttatttttatttttattttggtttttttgttgttgttctcttcttttgtcttttttttctttagagacggggtctagctatgttggccaggctggtctcgagtccccgggctcaagcgatcctcccgcctcagcctccggaaaagtgggactacaggcgcgcatcgccgcacccggccaatccctgttttaatccttttccttaaaattgcaaaagtggtgtctttttcctgcagatggaccctccctgatacaggaggagaaaaagagacaggacacagggaggagagcactgcacgcagctgaaggcagagattggaatgacacctctgcaagccaaggaacacggagcattgctgggaaccaccggaagaagccagaagacaggcctggagctggctttccctcacagccccaaaaggaacccaccctggtgccaccttgattttcggacttttggccttcagaactggggaagagaataaaattttctgttgcttttaaaaaaaaanaaaannnntntttanaaaaaannngggtaccctntggcccgcttnttanaaatnnnngggattccccccngggcctggnagggaattttgantatnnaaagcttttttnatnnccncncnncccttangnggggggggngccccggccncccaaattttttttttccnntttnaanggggggntnaaantgcncccccttgggggnaaaaantnggggtantaancttntttnc

SEQ ID NO: 6885 - DNA, 1034 bp, Homo sapiens
  misc_feature 6, 9, 11, 13, 14, 16, 17, 18, 20, 22, 24, 26, 27, 28, 31,32, 33, 39, 40, 41, 42, 44, 46, 47, 48, 49, 50, 52, 53,55, 57, 61, 64, 69, 74, 75, 76, 79, 83, 86, 87, 91, 92,93, 97, 98, 105, 108, 109, 111, 112, 113, 122, 146, 166,501: n = A,T,C or G
  misc_feature 502, 528, 605, 699, 727, 757, 774, 787, 811, 822, 830, 843,853, 855, 858, 869, 905, 912, 918, 955, 957, 958, 959, 966,967, 986, 990, 1004, 1007, 1010: n = A,T,C or G
ccctcnctnantnntnnntnantntnnnatnnntatttnnnntntnnnnnannantnaaanccnttatnctttnnnctnttcnagnngagnnnggtnntatttcntannannnattatatanggcgaattggagctccaccgcggnggcggccgtttgagaagccngcgctcacccacccggggtctctgtgcattgacctttgggtgctgacttggagaaaagcacaaacacgaccagtcccatcctggctcccgtggggcttcttctatctacgcattgtatcgactgcattagttggactaagatgatgactcagttaaaggaggagacaaatgctgactgtctaagcaagaatggcccaagctggcaagaaaaagcacactgcatacataggatcccgcgtaccttgcccgggcggccgctctaagaactagtgggatccccccggggctgcaggaaatttcgatatcaaagccttattcgataccgtccgacctcnnagggggggggccccggtaccccagcnttttggttccctttagtggaggggttaattgcgcgccttgggcggtaatcattggtcatagcttgttttcctgtgtngaaaattgttatcccgctcacaattccacacaacattaccgaagcccgggggagccattaaaggtgtaaaagcctgggggtgcctaatggagtngagcctaacctcacatttaatttggcgnttggcgcttcacttggccccgcttttccangttcggggaaaaacccntgttccgtgcccnagcttgcaatttaattgaaattcnggccccaaccnccccgggngggaagaagggcnggttttgcgntnttnggggcggcttnttttcccgcttttccttcggtttaactttgacttcngttgggngccttngggtccgtttcgggcttggccggccgaagccgggttntnnnaactttnncttccaaaagggccggggnaatnaccggggttatttnccncangaaatttaaggggggattaaaccg

SEQ ID NO: 6886 - DNA, 1001 bp, Homo sapiens
  misc_feature 4, 6, 7, 8, 9, 14, 15, 16, 17, 18, 19, 21, 22, 25, 26, 27,28, 29, 32, 33, 35, 36, 37, 38, 39, 41, 42, 43, 44, 45,48, 51, 53, 54, 56, 63, 64, 67, 69, 70, 72, 73, 74, 75,76, 79, 87, 89, 90, 91, 92, 93, 94, 96, 98, 99, 645, 651,659: n = A,T,C or G
  misc_feature 771, 774, 791, 793, 794, 798, 827, 865, 888, 899, 904, 918,921, 933, 955, 961, 963, 975, 981, 982, 983, 996, 1000: n = A,T,C or G
ccangnnnntaaannnnnnannatnnnnnaanntnnnnnannnnnganatntnnanataccannttnanntnnnnnagnagaggaangnnnnnntncnnttcgactcctatagggcgaattggactccaccgcggtggcggccgcccgggcaggtacgcgggggagcacccaagcgtgacaagccctctcacagtggaatggagcgcacggtctgaatctgcacagagcaagatgctgagtggagtcgggggctttgtgctgggcctgctcttccttggggccgggctgttcatctacttcaggaatcagaaaggacactctggacttcagccaacaggattcctgagctgaagtgcagatgacaatttaaggaagaatcttcttccccagctttgcagggatggaaaagctttcccgcctggctgttattcttccacgagagagggctttctcagggacctaagtttgctactgggtttcaagcaacctgcaagaaaatgtcctcccttgtggcttcctcagttcctgcccttggcctgaaagttcccagcatttgatggcagcgcctcatcttcaacttttgtgctcccctttgccctaaaacccttatggcctcctgtgcattctggtaccttcggcccgcntctagnaactagtngggatcccccggggctgcagggaaattcgaatatcaagcttatcgataccgtcgaccttcgagggggggggcccccgggtacccccagcctttttggttccccttttaagtnganggggtttaaattggcgncnncttngggcggttaattccattggggtccaatangcctggttttccctggtgggtgggaaaaattggtttanttcccgcctcacaaaatttccancaccaaccaantaacngaagcccgggggangcnattaaaaggtgntaaaaggccctggggggggccnttaaangngggggaagcctnaactcnnnattaaaaattggnggtng

SEQ ID NO: 6887 - DNA, 793 bp, Homo sapiens
  misc_feature 2, 3, 4, 5, 6, 7, 10, 12, 17, 18, 34, 461, 462, 463, 464,465, 466, 467, 468, 469, 470, 471, 472, 473, 474, 475, 476,477, 478, 479, 480, 481, 482, 483, 484, 485, 486, 487, 488,489, 490, 491, 492, 493, 494, 495, 496, 497, 498, 499: n = A,T,C or G
  misc_feature 500, 501, 502, 503, 504, 505, 506, 507, 508, 509, 510, 511,512, 513, 514, 515, 516, 517, 518, 519, 520, 521, 522, 523,524, 525, 526, 527, 528, 529, 530, 531, 532, 533, 534, 535,536, 537, 538, 539, 540, 541, 542, 543, 544, 545, 546: n = A,T,C or G
  misc_feature 547, 548, 549, 550, 551, 552, 553, 554, 555, 556, 557, 558,559, 560, 561, 562, 563, 564, 565, 566, 567, 568, 569, 570,571, 572, 573, 574, 575, 576, 577, 578, 579, 580, 581, 582,583, 584, 585, 586, 587, 588, 589, 590, 591, 592, 593: n = A,T,C or G
  misc_feature 594, 595, 596, 597, 598, 599, 600, 601, 602, 603, 604, 605,606, 607, 608, 609, 610, 611, 612, 613, 614, 615, 616, 617,618, 619, 620, 621, 622, 623, 624, 625, 626, 627, 628, 629,630, 631, 632, 633, 634, 635, 636, 637, 638, 639, 640: n = A,T,C or G
  misc_feature 641, 642, 643, 644, 645, 646, 647, 648, 649, 650, 651, 652,653, 654, 655, 656, 657, 658, 659, 660, 661, 662, 663, 664,665, 666, 667, 668, 669, 670, 671, 672, 673, 674, 675, 676,677, 678, 679, 680, 681, 682, 683, 684, 685, 686, 687: n = A,T,C or G
  misc_feature 688, 689, 690, 691, 692, 693, 694, 695, 696, 697, 698, 699,700, 701, 702, 703, 704, 705, 706, 707, 708, 709, 710, 711,712, 713, 714, 715, 716, 717, 718, 719, 720, 721, 722, 723,724, 725, 726, 727, 728, 729, 730, 731, 732, 733, 734-792: n = A,T,C or G
gnnnnnnccncnttctnngacttactatatggcnaattggagctccccgcggtggcggccggggaaggtcagcgccgtaatggcgttcttggcgtcgggaccctacctgacccatcagcaaaaggtgttgcggctttataagcgggcgctacgccacctcgagtcgtggtgcgtccagagagacaaataccgatactttgcttgtttgatgagagcccggtttgaagaacataagaatgaaaaggatatggcgaaggccacccagctgctgaaggaggccgaggaagaattctggtacctcggccgctctagaactagtggatcccccgggctgcaggaattcgatatcaagcttatcgataccgtcgacctcgagggggggcccggtacccagcttttgttccctttagtgagggttaattgcgcgcttggcgtaatcatggtcatagctgtttcctggnnnnnnnnnnnnnnnnnnnnnnnnnnnnnnnnnnnnnnnnnnnnnnnnnnnnnnnnnnnnnnnnnnnnnnnnnnnnnnnnnnnnnnnnnnnnnnnnnnnnnnnnnnnnnnnnnnnnnnnnnnnnnnnnnnnnnnnnnnnnnnnnnnnnnnnnnnnnnnnnnnnnnnnnnnnnnnnnnnnnnnnnnnnnnnnnnnnnnnnnnnnnnnnnnnnnnnnnnnnnnnnnnnnnnnnnnnnnnnnnnnnnnnnnnnnnnnnnnnnnnnnnnnnnnnnnnnnnnnnnnnnnnnnnnnnnnnnnnnnnnnnnnnnnnnnnnnnnnnnnnnnnnnnnnnnnc

SEQ ID NO: 6888 - DNA, 1142 bp, Homo sapiens
  misc_feature 5, 6, 8, 9, 11, 12, 18, 21, 22, 26, 27, 28, 31, 32, 33, 35,36, 38, 41, 44, 45, 49, 53, 61, 68, 73, 77, 82, 84, 90,94, 99, 104, 105, 106, 108, 109, 115, 121, 122, 124, 126,134, 160, 173, 438, 449, 486, 495, 524, 535, 575, 608, 616: n = A,T,C or G
  misc_feature 617, 627, 634, 670, 720, 750, 786, 856, 865, 881, 901, 919,926, 939, 941, 956, 957, 967, 995, 1006, 1010, 1012, 1036,1082, 1084, 1100, 1117, 1118, 1126, 1129, 1137, 1140, 1142: n = A,T,C or G
ccccnncnncnnctgggnttnntttnnnttnnntnnantanctnnatantatnggtataanagttatncatantacntattntnttcaanaagntgtgnacaannngnnttatanatatanntntnaggcgaantggacctccaccgcggtggcggccgnccgggcaggtacncggggccttccaccatgtgaggacacagcaagaaggggctgactctgaaccaggaagctgtgctgtgctcaccagacactttgatcttggacttctcagcctccagaactatggggttctgctcttgtcacccagactggagtgaagtggcacaatctcggctcactgcaacctccgcctcccgggttcaaggcgattcccctgcctcagcctccagagtatgctggactgcaggcgccacgccaccacttcctggctaattttnttgtaattttntaagtaagagacgggggttttcacccatggtttggtncaaggatgnttcttggatcttctcaccttggtggatcncgcccaccttnaaccttcccaaagtggcttgaagaagactaaagacacccntttttcttagaccaagaaaaagggaaggcccgnattgggcnnagaacatttncttcaanaataagggttttgggtaagcctaatttggaaccctngggcttgccatttcaaaaaagggaagaattggaaaaaattccccctttangaaaaatttgggaccaaggcctttcctaantggaaaaattttaaccaacttcaaaggaaaaggggncattataggaaaccaaaccttggcctggccaagcctttcaaggaaaccttttggccaaggaaaaaaaatnaaaaaaatnggtcaaaccaaggccntgggggaagaaaaaaaaaantttccttaaaggggggangccaaancaaggaaggcccngngggaaaaaaaaatanntcaacccaangtttggaagcccagggcccccctggaanacaaagggggnaaantngggctccccccacctaagttggcnagggtcttaacagggggccttggaccctttggcaagaaccattttnantgggaatccccaaagnttcccaaaaaacccttnnttttgganttnttgaaacnggncn

SEQ ID NO: 6889 - DNA, 1082 bp, Homo sapiens
  misc_feature 1, 4, 5, 6, 11, 13, 19, 22, 27, 34, 41, 45, 48, 49, 53, 59,62, 63, 69, 70, 72, 73, 75, 78, 79, 80, 81, 83, 84, 87,88, 91, 93, 96, 97, 98, 103, 106, 110, 119, 125, 224, 520,534, 600, 660, 747, 764, 766, 775, 782, 800, 806, 807, 810: n = A,T,C or G
  misc_feature 816, 830, 848, 882, 886, 899, 900, 902, 910, 928, 929, 940,947, 959, 964, 966, 971, 981, 1013, 1014, 1034, 1041, 1045,1050, 1055, 1066, 1067, 1074, 1077: n = A,T,C or G
nccnnnatttntntttttnttntattnttttttnatttgtnttanatnngatntttttnttnnttttanntnnanttnnnncnnagnnagnangtnnnggatntancctnctcatattnaggcgnattgtatctccaccgcggtggcggcccgaggtacgcgggattccccagaccttctgcagattctgtggttatactcactcctcatcccaaagaatgaantttaccactctcctcttcttggcagctgtagcaggggccctggtctatgctgaagatgcctcctctgactcgacgggtgctgatcctgcccaggaagctgggacctctaagcctaatgaagagatctcaggtccagcagaaccagcttcacccccagagacaaccacaacagcccaggagacttcggccggcagcagttcagggggacagcccaaggtcacctcaagcagggcagggaacctaaaccccctgaaaattccataggtggaagaaaagtatcttacttaaccaggaancaagcccttgcaanaaagccagggaaaagggaaatggcaccgggagggcgttgcccaggttgggaaaaacaaattcattngaaaaatgggaagttgaatttgccaccaaaaaaattactggaaagaaaatttcagttctnttttaaaaaacccattgggggcattgaagaaaagcttggaaaaaagaaatgggggaatccattttgggacctttaaaaaggcccttnaaaattaccccctttgntnagccccaanaggcttnttaaaaaaaccggaaaancccatnnccngtaatnataatatacaaacnttaaatgaaattttgatnttgggttacccttggccccggggggcgggcccgncttnttaaaaaacttanngngggaattncccccccgggccttggcnngggaatttccnaattttnaaaaccctttantcgantncccgntccaaccctntaagggggggggggcccccggtaccccccaanncttttttggtttcccttttnaggggangggntttanttggncccccttgggnnggtaatncantgggg

SEQ ID NO: 6890 - DNA, 1103 bp, Homo sapiens
  misc_feature 5, 8, 9, 10, 11, 14, 18, 19, 20, 22, 27, 28, 32, 33, 35,36, 38, 42, 46, 48, 49, 52, 53, 54, 58, 62, 65, 68, 74,75, 77, 81, 84, 89, 96, 97, 98, 99, 103, 107, 109, 114,115, 117, 129, 135, 155, 162, 396, 494, 535, 600, 618, 624,638: n = A,T,C or G
  misc_feature 653, 698, 732, 740, 780, 807, 816, 830, 862, 864, 870, 877,929, 933, 936, 939, 943, 948, 954, 955, 969, 970, 971, 995,1000, 1004, 1007, 1008, 1014, 1016, 1019, 1023, 1039, 1042,1048, 1059, 1062, 1066, 1067, 1073, 1074, 1081, 1090: n = A,T,C or G
tcccnccnnnnctnaatnnntntgttnnattnntnntnatcnttcnannttnnntatntaantanttntttttnnanattnctntaatnagagagnnnngatnaatncntttanntntcatattgggcnaattgnagctccaccgcggtggcggncgaggtncatttgcttctgacacaactgtgttcactagcaacctcaaacagacaccatggttgcacctgactcctgaggagaagtctgccgttactgccctgtggggcaaggtgaacgtggatgaagttggtggtgaggccctgggcaggctgctggtggtctacccttggacccagaggttctttgagtcctttggggatctgtccactcctggatgctgttatgggcaaccctaaggtnaaaggctcatggcaagaaagtgctcggttgcctttagtgatggccctggcctcacctgggacaaccctcaaggggcacctttgccacacttgaggtgnagctgcacctgttgacaaagcttgcaccgttggatcctgangaacttcagggctcctgggcaacgtgctggtcctgtgtgctgggccccatcactttttggcaaanaaattcacccccacccantgccangcttgcccttattnaaaaaaaagtgggtnggcttgggttgttggggcctaaatggcccttgggcccccacaaangttattcaccttaaagccttccgccttttctttnggcctggnccccaaattttcttattttaaaaaagggtttcccttttgntttcccccttaaaggttcccaaacctnacctaaaancttgggggggggantaattttattgaaaagggggcccctttgaagncnattctntgggaanttccttggccccttaaataaaaaaaaaaccaatttttaatttttttcatttnggcnccnggncaanatcantacatnntaaaatacaaaaannntttccttgcccccgggggcggggnccggnttcnttnnaaaacntnagngggntatcccccccggggcntgncagggnaatttccattnatncaanngctttnntctgaanaccccgatntaaaccctttaag

SEQ ID NO: 6891 - DNA, 1131 bp, Homo sapiens
  misc_feature 1, 7, 9, 12, 13, 17, 20, 21, 22, 24, 25, 27, 30, 31, 32,34, 35, 36, 40, 43, 48, 53, 54, 57, 58, 59, 60, 64, 71,73, 74, 76, 83, 97, 98, 100, 111, 113, 117, 118, 120, 123,130, 131, 133, 137, 146, 222, 223, 226, 229, 238, 254, 264: n = A,T,C or G
  misc_feature 269, 308, 313, 315, 337, 344, 355, 375, 380, 405, 409, 417,435, 442, 454, 465, 474, 490, 493, 501, 528, 530, 532, 545,547, 548, 552, 557, 558, 563, 567, 579, 587, 607, 616, 617,619, 639, 643, 645, 656, 669, 672, 673, 675, 679, 699: n = A,T,C or G
  misc_feature 701, 712, 725, 726, 730, 732, 735, 747, 752, 755, 756, 757,764, 767, 780, 794, 795, 798, 804, 811, 816, 818, 834, 836,857, 858, 878, 879, 884, 887, 889, 901, 904, 928, 931, 934,941, 946, 951, 955, 959, 973, 975, 980, 989, 992, 1015: n = A,T,C or G
  misc_feature 1020, 1029, 1032, 1033, 1037, 1045, 1054, 1055, 1056, 1058,1062, 1068, 1074, 1075, 1086, 1087, 1089, 1090, 1096, 1101,1102, 1111, 1119, 1121, 1123, 1125, 1130: n = A,T,C or G
nttctancnttnntttntgnnnanntnttnnntnnnattnttnaatantttcnntannnncttntggatantnntntattatnacgttatatccccnnanttccctagttngngganntnttngtacttnntnctantcactatanggcgaattggtagctccacccgcggtggcggcccgaggtacttttttttttttttttttttttttttttttttttnnggnggntaaaaaacntgccttttaggggttnggcctaacanggagngctaccttttccctattaaccagcgacattttaatgaantcatntntggaggggtggaggtgaggaanctgtttntttttccatgngtctagggctacccaaactnagctntgcttgtctgctccctatggccaanagcncattgagnctaaggggagggtttttnacccagnttgctcagcttntggaaccctanaaggccatncccaaaccccaggganaanagttcagngggcccaaggcctggaacactgtgggngnanaaaaaaagtgggnannaagnagacnngaaancagnaaaaggaagggntgtcttgnatgttttgcaacctttccanttttgccannanctttgaaaccctttccaagncaanancccaagggggngtgccacaagcanttnntntttntaaggaggggggaaggcttncnatgggcctttnttttggggccccnnattngnggnattggggcctgncccanaannncccccanttngggggcccctttnacccaaaaacaagnnatnttcaanggggaanccctngnttagggccatttcccncnagttttcccttgggaaaaggnngggccttttttaaaaaaaanngggtncancnttgggggaaaanaanaaattaaaacctttaaaaaaaacnttnaantcccccntttgngcccntccnaaanttaaaaccctcttntnaaagnaaaaatttnggngccttgggaaaaaaaaaaaatanttctntttttaatncannaagnttatttanaatggaaannngnggtnaaaaanttaacnntttttttgganngnngccccntggtnnccctttccngggggggngngncnttttnt

SEQ ID NO: 6892 - DNA, 1146 bp, Homo sapiens
  misc_feature 10, 11, 15, 17, 19, 22, 25, 29, 32, 33, 34, 36, 37, 38, 41,42, 44, 45, 46, 50, 52, 55, 57, 62, 64, 65, 66, 68, 70,73, 77, 80, 86, 89, 92, 94, 98, 99, 104, 105, 115, 118,121, 125, 133, 185, 404, 432, 525, 589, 590, 608, 639, 653: n = A,T,C or G
  misc_feature 714, 717, 721, 728, 729, 737, 749, 787, 789, 790, 792, 801,813, 832, 848, 849, 866, 868, 878, 883, 890, 898, 904, 917,931, 940, 971, 972, 983, 985, 988, 990, 993, 1000, 1003,1013, 1017, 1021, 1023, 1024, 1031, 1053, 1062, 1064: n = A,T,C or G
  misc_feature 1086, 1087, 1089, 1104, 1108, 1109, 1110, 1112, 1115, 1120,1121, 1122, 1123, 1127, 1128, 1132, 1138, 1140, 1142, 1143,1145: n = A,T,C or G
cccccctctnnctanantntanatnattnctnnngnnntcnntnnnattncnctnanatacngnnntnancanatanatntgtttnttnctncntagnnagagnnggtggatgtncgnganttcngctcactncgggcgaattggagctccaccagcggtggcggccgcccgggcaggtacgcangggaggcattgaggcagccagcgcaggggcttctgctgagggggcaggcggagcttgaggaaaccgcagataagtttttttctctttgaaagatagagattaatacaactacttaaaaaatatagtcaataggttactaagatattgcttagcgtttaagtttttaacgtaattttaatagcttaagattttaagagaaaatatgaagacttagcaagnagtagcatgagggaagggaaaagataanaagggtttctaaaaacatggaccgggaggtttgagaatgaaagcttcttcatgggagtaaaaaaatgtatttaaaaaggaaaatttgaggagnaaagggacctaccaggagcccccgaatttaaatacccaattagaaagggccaatgcttttttannattaaaaatggaaagggnggcttaaaccaagcctttaaagggtttagtntttaaaaaagtttngttaagggtggaatttaaaaaaataaatttttggaaaagggccgaattccttttttaaaanaanggangaatttnnaaaccccnaaaggggtggantttaaaaaaagaaccctttgggaaaattccccttggancnncnagggggagngaatttgggcgntcatttttaaaaaagcccnttagttttaaacggcnnttttcccttaaaaccgncnggaccggaanattcnttatatnaaaatatnttttantggtttccctttngggccccggctttnttagaaaancttaaggggggaatcccccccggggccttgnnaagggaaattncnatntntcnaaggccnttnttcggattancccngtcngnncccttcnagggggggggggccccccgggntacccccancntttttgggttccccctttttanngngggagggggtaaaanttgnnncnccntgggnnnntaanncatnggggcnananncnc

SEQ ID NO: 6893 - DNA, 554 bp, Homo sapiens
  misc_feature 2, 3, 6, 8, 12, 14, 15, 16, 18, 19, 22, 24, 25, 27, 30, 32,33, 37, 40, 41, 43, 45, 46, 51, 53, 57, 58, 59, 61, 69,71, 78, 80, 83, 87, 89, 91, 94, 95, 104, 135, 149, 210,308, 417, 418, 445, 473, 491, 498, 541: n = A,T,C or G
tnnttnantgtntnnnannatntnntntananngttntanntnanntttgnantttnnnantaagggtncnggtattnancanatgncnantgnncttcccgcngcggcggcgcccgggcaggtactcgggtganaatgatagcccctntgatggagggacgcctgggcgcatgcccccacagcccctagtcaatgctgtccctgtgcanaatgtatctggggagactgtttctgtcacaccagttcctggacagactttggtcaccatggcaaccgccactgtcacagccaacaatgggcaaacggnaaccattcctgtgcaaggtaaggaaggcagagttggatattgagttccttctctgtggcatgtattgaaaagttacccgaggtttggctagagtgacataggggacagnngagtgatggggagagagggtttggganagcagaaatttgaaaacctttgccccgnaagaacctcttaattatnaacattnttcttcatgccttttttctctgtcacttaggtatttgccaatnaaaatggagggga

SEQ ID NO: 6894 - DNA, 459 bp, Homo sapiens
  misc_feature 459: n = A,T,C or G
ggagctccccgcggtggcggccgaggtacgcgggatttatcacatagccccttagccagttgtatattattcttgtggtttgtgacccaattaagtcctactttacatatgctttaagaatcgatgggggatgcttcatgtgaacgcgggagtcagccgcatcttcttttgcgtcgccagccgagccacatcgctcagacaccatggggaaggtgaaggtcggagtcaacggatttggtcgtattgggcgcctggtcaccagggctgcttttaactctggtaaagtggatattgttgccatcaatgaccccttcattgacctcaactacatggtttacatgttccaatatgattcccccatggcaaattccatggcacccgtcaaggcttgagaacgggaagcttgtcatcaatggaaatcccatcaccatcttccaggagcgagatccctccaaaatn

SEQ ID NO: 6895 - DNA, 442 bp, Homo sapiens
cggccgcccgggcaggtacagagcatagtgaagcatgatgggtggtagtattaggagaaaaacatcagtcaaattaaatttagcagagtttatttgagcaaagaagtgactcatgaatcggacaactccctaaaccaggagagacaccacacggcagtatgggcaagcagtattcacaggcagaaaaaggaggtgacatacagaaacagcctggctggccacagatcacagcttgccttacttggtcacagtctgaggaactagcagcctgtggtggactgaaagcccagctgctctgattagccaacatttggctacttgtcgcaagaatctattcatctgggccgggtgcagtggctcacgcctgtaatcccagcactttgggaggccaaggcggtggatcgcctgaggtcgggagtttgagaccagcctcgccatcatg

SEQ ID NO: 6896 - DNA, 1122 bp, Homo sapiens
  misc_feature 4, 6, 8, 10, 13, 15, 17, 19, 23, 24, 25, 26, 27, 28, 29,30, 31, 35, 36, 40, 41, 42, 43, 51, 52, 54, 55, 56, 59,60, 62, 64, 65, 67, 68, 69, 72, 74, 75, 76, 77, 78, 79,80, 82, 83, 84, 89, 90, 91, 92, 93, 94, 95, 98, 99, 104,120: n = A,T,C or G
  misc_feature 160, 186, 566, 616, 633, 645, 662, 694, 695, 722, 752, 753,756, 781, 785, 799, 826, 828, 832, 837, 846, 877, 878, 890,896, 907, 916, 919, 922, 925, 928, 936, 941, 944, 946, 971,983, 990, 1012, 1017, 1018, 1027, 1031, 1035, 1039: n = A,T,C or G
  misc_feature 1040, 1043, 1045, 1055, 1066, 1067, 1070, 1074, 1076, 1096,1098, 1099, 1105, 1116, 1117, 1120, 1121, 1122: n = A,T,C or G
cccngncncnatntncntntttnnnnnnnnntttnnattnnnnacactctnntnnnttnntntnntnnnttntnnnnnnnannnagagnnnnnnntannggctntaccctcttatatgtngaattggactccaccgcggtggcggccgcccgggcaggtnctgggtgcttggtagttaaggaagtntcagctgctggctcaagggtagattctaacaggaacttccaagctggagaaatatcaggctacaccgcagagaggggaggagggtgagggaggcgcctgctggtgtgagccgtgacctggcagcaaacagtggtctcttaccgatggaaaagggcacaaaagcatcactcttcttaaactgccccttctcattcaggaaatgctggggattgaagtccctgggggttggaggaaagaaactggggtctctcagcaccagagcccaagcataaggggtacccttcggcccgctctagaaaccttaggtgggatccccccgggcttgcaagggaatttcccatatcaaagcctttattccgattacccggtccgacccttcnaaggggggggggcccccgggtaccccaaacttttttggtttccccttttnaagtggaaggggtttanatttggcgcccnctttgggccgttaaatncattggggtcaattaagccttgtttttccctnntgttgaaaaatttggtttattccccgnttccaccaaatttcccccacaaacccattnnccnagccccgggggaagcctttaaaaangtgnttaaaaaggccctngggggggtgcccccttaaattgggagntngaanccctnaaaccttcnaccaattttaatttggcgggtttgccgcctnnccttggccccgncttttntccaagttcgngggaaaaanccnttntcnttngcccaagnctttncantnaaataggaaatttcgggccccaacnccccccgggggnaaaaaangcccgcttttttcccttatttngggcnnccttttttncccntttnctcnngtntnaattaaattncctttgcgccnntcngggncntttcgggtttcgcgggcgancnngggttnttaaactttcnnctnnn

SEQ ID NO: 6897 - DNA, 463 bp, Homo sapiens
ggcgaattggagctccaccgcggtggcggccgtgcatagactagtcagcttctggggtgactagagcagggctgttgtctccacaagcttcagccgtgcgcggactggtcagcttccggagtgaccagagcagggctgttgtcatctcactggcaccttggttccatcgtaggatcagctgggttgcatggtctaggtcctgttggctggtccacttgtcctgggctgctggtttcagctgactggatggatggatccaaggcacaattcctgcaacatttctaggcttccagtgggtcctggcgtcttagctgtggatctcccaatacctgcaggtaacgaggccacagaagctgggcctctaggagcagaagacacagagcagtgaagactacaccagaagctccgctgccgccagagacaaaggccccgccccccgcgtacctcggccgtctagaactat

SEQ ID NO: 6898 - DNA, 807 bp, Homo sapiens
  misc_feature 640, 669, 718, 731, 752, 771, 785, 799, 806: n = A,T,C or G
ggcgaattggagctccaccgcggtggcggccgaggtacctttaataatattttatttaacctcatatatccaaaacattatcctttaagcatgtaatcaatataaaaaattattaatgagacattttacatcctttgtttcacagtaggtctttgaaatctagagtgtattttatactcacagcacatctcaatgtagactagcatatttcaagtgctcggtggccatatgtgactagcagctaccatagagggccacaaagatctagacccttaagagttacacatacatacaacacccctttaataatctcttccatgtttctataatgatccaaagaggtagtgctctactctcgtttctatgcttacacacttctgggatgaaattacagggataccatccaatgaatgcctgaaattccaccatggtagcttacactcaattctttaaatatactgtgcttcaagttgtgtttaaacaaaaatgccccaaaagggggaatactctaagctaatatctgtctatcattaaaccttaggttacatgaagggaactgacagcacatccaggggagagccagtaggggcacagaaagacaaaaatcagatggctggacttttggcaaacctcatctcanattctattacaagtccctgttccaaattncctctcttctcaagaacctttaaaggaaatacttcaataacctccctgnccaagaatacctnttattcaagaaacccaaaccnggaacctcctgggggcttntctggattttcaancctaataaccttgnggcaaant

SEQ ID NO: 6899 - DNA, 1032 bp, Homo sapiens
  misc_feature 1, 2, 3, 4, 5, 6, 7, 8, 9, 11, 12, 13, 14, 15, 16, 17, 20,21, 22, 23, 25, 27, 28, 30, 32, 33, 34, 35, 36, 37, 38,39, 42, 43, 44, 45, 46, 48, 49, 50, 52, 53, 54, 55, 57,59, 60, 62, 63, 65, 67, 69, 70, 71, 73, 77, 78, 79, 80,81: n = A,T,C or G
  misc_feature 82, 83, 84, 85, 87, 88, 89, 90, 91, 92, 93, 96, 97, 100,103, 104, 106, 107, 109, 111, 112, 121, 488, 821, 879, 887,896, 910, 917, 936, 957, 970, 975, 982, 984, 1023: n = A,T,C or G
nnnnnnnnntnnnnnnnttnnnntntnntntnnnnnnnnttnnnnntnnntnnnngntnntnntntntnnntntttnnnnnnnnntnnnnnnnagnnggnggnngnntnanngatctactnactatagggcgaattggagctccaccgcggtggcggccgcccgggcaggtactttaggagacccaggcgggcagattgcctgaggtcaggagtttgagaccagcctggctaacatggtgaaaccctgtctctactaaaaatacaaaaattagccgggcatggtggctcacgcctgtagtcccaactgcttgggaggttgaggcaagagaatcgcttgaacccaggaggtggaggttgcagtgagccgagatcgcgccactgcactccagcatgggcgacagagcaaggactccatctcaaaataaagtaaagaaagaaacaaagaaaaggaaaagcttatattggaacttctctaaaaaaagaaaanaaaagaaagcctgatgcacacaaatcttaaatttgggcaagtcggatcaattaaagggatatttatttgcatcacaaaaattaatttcttttactccccccaaaaatcaataaaaaagttcaaaatagcaactttttccctaatgtgttttaaaatggtaatccacccaaaatacattgtgtccccaactttctttccagttataattctattgtgtaaaagtgaggtataccttgaaagttgaggcaataagaagagttgagctttcaagaccttgccctggaaaaggagccttgttcttttctttagagtcttgaaggaaaattgggtttngggggggccccaaaattcttctcaaatccttttttcttttttcccctcatccctggangcctcttnattttttcntgggcttcaaaccngcttttnttggggtaaaacctttttngtttcacccttggtatccctncgggcccggcttnttaanaacttantngggaatccccccccgggcctggcaaggaaattccgatanttcaagcct

SEQ ID NO: 6900 - DNA, 1140 bp, Homo sapiens
  misc_feature 3, 6, 8, 9, 11, 13, 14, 15, 17, 19, 24, 26, 29, 30, 34, 35,37, 40, 42, 46, 47, 52, 60, 61, 66, 67, 68, 73, 74, 75,77, 78, 80, 81, 82, 83, 84, 85, 87, 89, 90, 96, 100, 101,103, 104, 105, 106, 123, 124, 126, 127, 133, 204, 206, 212: n = A,T,C or G
  misc_feature 217, 218, 219, 223, 242, 364, 369, 401, 421, 432, 470, 472,487, 495, 595, 624, 640, 656, 662, 706, 709, 719, 727, 739,786, 787, 796, 815, 820, 823, 877, 887, 895, 897, 898, 912,941, 951, 959, 966, 990, 993, 995, 999, 1005, 1017: n = A,T,C or G
  misc_feature 1020, 1022, 1023, 1028, 1030, 1034, 1039, 1043, 1044, 1045,1047, 1049, 1050, 1057, 1062, 1067, 1071, 1075, 1080, 1096,1105, 1106, 1107, 1116, 1129, 1135, 1136, 1137: n = A,T,C or G
canccntnncntnnnantnttttngntanntatnntntcntntttnnattgnttgctgtnntattnnnttccnnntnntnnnnnntnannagggangganngnnnntattcgctttactatanntnnaattgntactccaccgcggtggcggccgcccgggcaggtacttttttttttttttttttttttggggggggggcggnanagcaanaaaannnggtntatgctgacggccaacatnatccaagagagacaagatgggaaagttgctgagacaagaaagcctagggaaactttaggctagatacaaaattcacacagggaaaggcacggactctggggagactgggaaggtcctcagcncattnagcaccatgtggaccgagctccgccccatggngcccgtcaccccggacaggnattatgccttnacaaaacgctttcataggtgtggattacaacccattgntngtcctcattgccccntgcacacncagcattctactaccttctttcctcttgtccattttgctcaccccagtggtggacaaagaaacatgcccgggattttcaagccacccccattgaacgggngccccattttccttccctttgtcaaacanccccggaagtcccttncgacataaatcctcantagggnggcccctgggtcctttggtttcttggccacttgtcttgcaaagncantggggccaanaaaaggtngcttcaaaaagntcccaacaaccctttttcaccatttccattctttcaattaacccttnnggggcccgncttcttaggaaacctaagntgggnatncccccccgggggccttggcaagggaaattttcgtattatttcaaaagcctttanttccggattnaccccggncnnaacccttcagaaanggggggggggcccccgggttaccccccanactttttttntttccccntttaaantggaaggggttttaaatttggccnccncntttngggcgnttaaatacaatnggncnnttaangnttgnttttncttnnngntnnaaaaatnggttntttcnccgnttcncaaantttcccacaccaaacnattaccgannncccgggggngcctttaaagggntataannnccc

SEQ ID NO: 6901 - DNA, 800 bp, Homo sapiens
  misc_feature 595, 651, 683, 687, 694, 710, 715, 742, 745, 749, 753, 758,765, 766, 768, 782, 786, 797, 800: n = A,T,C or G
ggagctccaccgcggtggcggccgcccgggcaggtacctcagttttgtcctctttaaaataaggaaaatataccttgtagggttactgtgagacttaaatgaattactaaatgtaaaaaactttataagattcttggcacatggtaactgccatacctattacccataactaactgattttttacacaatttactataatataaccacaattcttattcaaacatcctggacctagctaacagtgacacgtgatgatttctgaatgagttttgagaagaaactgagtcccaaagagtgcaactttctcccactgtcagaaggcctacacaccactcttctcagagaggtggaagaattgagctgtgctttggaactctcgattacatcaggaacagattgctgattggtgacagatagcaagtgttaataagtgatgttggtgctgagacaaagctgacatctcttcattcatgctccaatacaagcatcattcccttgtgcccaatgccgattggctgccttctattttaattaattgatgctggtaaactttctcttacaatgcggtggcaagtccctgcttcttatctttanagaacttcactcaggacaccactcagatgttgctctttgatctgaaaggatgttcncccagccacttaatgccccaatagaccaaganaaanggggggngatgaatgctcatganaagtngtgttccataactgccattaaaactgntgnactngggngcctngcctcanncnagggccccaggaanaaangggggggtttntcn

SEQ ID NO: 6902 - DNA, 570 bp, Homo sapiens
  misc_feature 3, 5, 6, 8, 11, 13, 15, 18, 23, 24, 27, 29, 32, 33, 34, 37,39, 40, 41, 53, 56, 57, 67, 68, 70, 71, 78, 79, 82, 86,87, 91, 92, 105, 111, 117, 118, 120, 127, 130, 143, 148,155, 157, 159, 160, 162, 163, 165, 166, 167, 169, 173, 174: n = A,T,C or G
  misc_feature 181, 182, 190, 195, 206, 213, 223, 227, 229, 230, 234, 265,285, 306, 364, 452, 462, 483, 495, 530, 566, 568, 569: n = A,T,C or G
tcntnnantcntntntgntgtannttntnttnnnttntnnngtctcttttgtntanntccagtaagnngnnggggatnnttnaagnnttgnngatttttctatcngcctcngctacnncncggacangtncatagccccatangggcngtctggncntnngnnannngntggnngccaacnnccccatancatanatcagcattgnactacangaagaggcanggananntcanggatcaaaatttaattaaaagaaaagccaantcattaaaaatagccccctnattgaagagtgggaaccgtangtgtgatgttctggcataaggagtgaaaaagaaaaagctctattacttgaagcttttnaccaggggcatgagagaatggccggaagtgagaaacgtgtgtgtggatgcttacaccgatgccggctcctaatatttggaacatgggntcccagaaangggagaaccaattattcctantttcaccggccnggattctcttgacttccatactccccaaagtgganggcatggagcttcccttaccttgagggaaactcatnanng

SEQ ID NO: 6903 - DNA, 1033 bp, Homo sapiens
  misc_feature 6, 9, 10, 11, 12, 13, 15, 16, 17, 18, 19, 21, 22, 23, 24,26, 27, 28, 30, 31, 32, 33, 34, 35, 36, 38, 39, 40, 44,50, 51, 52, 53, 54, 57, 59, 60, 62, 64, 65, 66, 68, 70,71, 73, 74, 75, 76, 77, 78, 79, 80, 81, 82, 91, 93, 94,95, 96: n = A,T,C or G
  misc_feature 97, 99, 100, 189, 190, 203, 205, 210, 593, 684, 824, 857,877, 895, 911, 926, 933, 936, 944, 945, 948, 955, 966, 973,977, 988, 989, 993, 994, 999, 1000, 1006, 1008, 1018, 1019,1022: n = A,T,C or G
cccatntgnnnnnannnnntnnnnannntnnnnnnntnnntttnttaaannnnngtntnntntnnntntnntnnnnnnnnnnagggggtantnnnnngnnttaacttagggcgaattggagctccaccgcggtggcggccgaggtacttttaattctagaaaagaaacccagctgcacactggcgcacnngaccttcatgcananaaaanctttggatgattccccatccaaaatattagagatgaaatgaaagcaaagtaggcatctgacaaaagttgctttttcccttctgcattttaggacctcaagtaatgtttatccagaaactgctatcataccagggattcattgtgtatttaacaacataggcatgcaatctggcaaatttgaaaaactcttaacatacaccccaaatcccttgcccaaatttaagaaacctaaggggtgggacacaggtgcgtttttccaatgtcgcatctttctgtggatgggggctacgaataccgtggggagcagaagaaatggggggaggggtgggagccgcatgcccagatgagggatcctattcaagcaaatggggacgggggccttncacttttaagccatcttcaccctgctcctcttcagaggacccgcctttcattgcattcagcctgtggatggtaggcaccgaacaccaggtncacccgagggaccgagggagagcaggagccttggtgctctcttctgcatcttgaggcagggaccagcaccaggggtacctggccccgggccgggcccgcttctaggaacctagtgggattccccccccggggcctgccanggaatttccgattattcaaagcttttattcgantacccggtcggaccttcgangggggggggccccgggtnccccaagcctttttgnttcccctttttagtngaggggnttnaatttgcnncgnccttggngcgttaaatcnaatgggncatnagcttggtttnnctgnnggtgnnaaaatngnttattcccgnnttnaacaaaattcg

SEQ ID NO: 6904 - DNA, 1155 bp, Homo sapiens
  misc_feature 2, 5, 6, 13, 14, 15, 17, 18, 26, 28, 29, 33, 35, 36, 37,38, 39, 40, 43, 46, 51, 53, 55, 57, 62, 63, 66, 67, 68,69, 70, 72, 74, 75, 76, 78, 82, 84, 89, 90, 91, 92, 93,94, 95, 96, 97, 98, 100, 102, 104, 112, 117, 120, 126, 128,160: n = A,T,C or G
  misc_feature 196, 380, 421, 426, 428, 429, 430, 440, 442, 445, 466, 472,475, 511, 541, 547, 573, 581, 590, 594, 607, 622, 630, 633,645, 649, 663, 665, 667, 673, 674, 678, 679, 687, 698, 699,702, 730, 740, 742, 749, 759, 775, 782, 783, 787, 802: n = A,T,C or G
  misc_feature 804, 805, 809, 812, 814, 831, 832, 848, 850, 859, 862, 868,869, 875, 879, 880, 883, 892, 895, 898, 899, 901, 907, 909,925, 930, 941, 952, 955, 957, 966, 977, 980, 1011, 1015,1023, 1034, 1035, 1037, 1039, 1042, 1044, 1047, 1050: n = A,T,C or G
  misc_feature 1054, 1055, 1057, 1058, 1060, 1061, 1062, 1068, 1075, 1077,1080, 1081, 1084, 1086, 1088, 1091, 1092, 1097, 1100, 1110,1112, 1115, 1117, 1118, 1120, 1122, 1125, 1126, 1135, 1136,1138, 1146: n = A,T,C or G
cnctnntactcannntnnctctaatnanntatnannnnnntanaanctgantnantnttatnntannnnnantnnntnttancntaatnnnnnnnnnngntnantttaattncttangcnaattgnanctccaccgcggtggcggccgcccgggcaggtncagctgaagaacattcagctccagcacgagaagatncagagcaacttggaaaccccaaagggagacacacccttaacactgccgtgctgtgctgtgcccgtgtcctgaaggaggagagagccctatctcctcctggttttgttgctgacattgcagctgatcatgccttgactccttcatctctaacagaggaagaacttgtattatcaaaccttatggnctacccaatgaataaataaaatatttggttcaaggcgcatntgganannntgaaaaaatngnaanggttcctcgggccgctctaanaacctnagngggattcccccggggctgcagggaaatttccgaatnttcaaaggcttttaatccggattacccgtnggaccnttcggaggggggggggggccccgggnaaccccangcttttttngttnccccttttaaagnggaggggggttaaanttggccgnccncctttgggccgntaantcaattgggtccantnangcctgnntttnnccctgggngtggaaaaatnnggnaaatccccgcttcaacaaaatttcccancaccaaccantnccgaagncccgggggangccaataaaaagtggnaaaaaanncccntggggggtggccctnanntgangtngnagccttaaacctccacnnttttaatttggcgttngncgcctcaantgnccccgnntttttnccanntcngggaaaaanccngtnncnggcccnancttgccaatttaaaanaaaancggggccaaancccccccccgnggnanaaaggccgntttttgctttnttnggggcccccttcttttcccgctttgccttgngttnaaaatggnaatccgctttnncncntcngnacnatncagnncnngnnngcaaangccggtntncannacntnanctnncaaanggncgggggatananccngnntntntcnncaaagaaanncngggggganaaaccccct

SEQ ID NO: 6905 - DNA, 808 bp, Homo sapiens
  misc_feature 383, 600, 642, 679, 712, 740, 764, 801, 803: n = A,T,C or G
gaattggagctccaccgcggtggcggccgcccgggcaggtacacgggggaggttaatttctttttctgtttgaaaagagtggatgttggtagacactggtcgtttctattacggcctcctgtaattttagaaaaccgatatttgtcatgacctgaggaaacatctcattcatggcttttataagacatagtcaaattcagcatcaactctcagaagatctttcttggagtctagaagaagaaatacagaaaggggtttattgatgtttcaaaaatcaagtgtgtggaaatagtgaagaatgatgatggtgtcattccctgtcaaaataagtatccatttcaggttgttcatgatgctaacacactttacatttttgcacctantccacaaagcagggacctgtgggtgaagaagttaaaagaagaaataaagaacaacaataatattatgattaaatatcatcctaaattctggacagatggaagttatcagtgttgtagacaaactgaaaaattagcacccggatgtgaaaaatacaatctttttgagagcagtataagaaaagcactaccttcagccccagaaacaaagaagccgaangcctcccccaccaattccactagaagaaggaagataatagtngaaggaaatcgttgtagccatgtttgattcccaagcngccagaaaggacatgatctcagattagagaganggccagagtttttttcattttagaaaanaaatgatggtttcatttggtgggngagccaggagataaaatttgggaaatggaaggatttntncccag

SEQ ID NO: 6906 - DNA, 887 bp, Homo sapiens
  misc_feature 563, 590, 612, 656, 662, 686, 698, 699, 701, 702, 703, 705,712, 717, 722, 726, 733, 741, 745, 748, 749, 753, 754, 755,773, 775, 783, 786, 792, 793, 794, 801, 802, 803, 804, 810,812, 819, 837, 839, 846, 847, 849, 853, 856, 859, 860: n = A,T,C or G
  misc_feature 861, 872, 874, 878: n = A,T,C or G
actcactatagggcgaattggagctccaccgcggtggcggccgcccgggcaggtaccagaagcgggacttggcgacgacatgattaggcgcaaagattcgcatgcggtagaggggcggcgtgtggcatttgggggtgggcaggcagcgacccctttcagcaggtccaggaaaccaaaggctagagcggcctttcgcaaacggttcagctccttatagaatgtctgtgttttttcaggtagtttccttgcatttcttaaaatcttctgtacctcggccgctctagaactagtggatcccccgggctgcaggaattcgatatcaagcttatcgataccgtcgacctcgagggggggcccggtacccagcttttgttccctttagtgagggttaattgcgcgcttggcgtaatcatggtcatagctgtttcctgtgtgaaattgttatcccgctcacaattccacacaacataccgagcccgggagcataaagtggtaaaagcctggggtgcctaatgagtgagctaactcaacattaattggcgttggcgcctaacttggcccgnttttccagttggggaaaaccttttcgntgcccaagcttgcatttaatgnaattccggcccaaccccccggggggaaaagggggggttttgggntatttngggcccttttttcccgttttcctnggttaaattaanntnnntnggccctnggggnttttngggntgggggnaagggggntttnaanntttnnntaaaagggggggggatantngggttttnccncaaaannnggggggnnnncccccngnaaaaaanattttttttaaaaaaagncncccaaanngngggnccnccnnncaaaaaagggngncttnttttttttt

SEQ ID NO: 6907 - DNA, 1062 bp, Homo sapiens
  misc_feature 1, 2, 3, 6, 8, 9, 10, 11, 14, 16, 17, 18, 19, 22, 23, 25,27, 28, 29, 30, 32, 33, 34, 37, 38, 39, 41, 42, 45, 47,48, 49, 51, 52, 53, 54, 56, 57, 58, 59, 60, 61, 62, 63,64, 67, 68, 70, 71, 73, 74, 75, 76, 78, 79, 82, 83, 86,89, 91: n = A,T,C or G
  misc_feature 96, 99, 100, 102, 104, 109, 112, 114, 118, 131, 134, 162,221, 399, 426, 464, 470, 488, 494, 517, 532, 570, 592, 610,611, 629, 677, 684, 689, 705, 730, 748, 767, 769, 770, 781,805, 818, 827, 832, 838, 849, 865, 867, 872, 885, 893: n = A,T,C or G
  misc_feature 901, 906, 911, 919, 922, 929, 937, 938, 942, 952, 957, 963,973, 975, 977, 983, 992, 1004, 1010, 1012, 1021, 1025, 1054,1058, 1061, 1062: n = A,T,C or G
nnnccnannnnatntnnnnttnngnannnntnnnaannntnntantnnntnnnntnnnnnnnnntanntnnannnntnntanntanggngngagtnaannananatatntantngaanggagctccaccgnggnggcggccgcccgggcaggtacgcggganagtctcgctctgttgtcggactggaggactgtggcgccatctcggctcactgcaacctntgactccctggttcaagcggttctcctgcttcagcctcctgagtggctgggattgcaggcacacgccaccacgcccagctaatttttatatttttagtagagacggggtttcaccgtgttggctaggatggtctcggtctcctgacctagtgatccgccagcctcggtctcccaaggngctgggattacaggcgtgagccactgngcctggcctaatgtcttctttattttttctttctttcnttcttntctttttttttttttaanacatanatgggaagtccctgcttcttgtngcccaggctgggaantgcaaatgggcaccgatcttgacttcactgcaaccttnccgcctccttgggaatcaaggnggattttttccctgcctnnagccctccccaaagttancttggggattaaccaagggggcccacccaaccccaccgcccttggggngccaagnaaagnacccattggggttttntggagggtgggccccttccaacttnccccccttggaaaaaacngaagtgcccccttgggcangnngaaccccccgnggcccaggattgcccaccccccgntttccaaaggaanggttttganggaancctttngaaaccaaggnttgggaccgcccattntntttanttttgccccccancccaaatngaccattnttttnggggnccccaacnccnaactttnccccaggnntttngggttttccnggganggggancccccaaagnangngggggntccttgggnacccttgggggncgggtntnttaagaaantaanggggggatccccccccgggcttttaaagnaaantann

SEQ ID NO: 6908 - DNA, 1113 bp, Homo sapiens
  misc_feature 2, 8, 9, 10, 11, 12, 13, 14, 16, 18, 19, 21, 22, 24, 25,26, 27, 29, 31, 32, 33, 34, 36, 37, 39, 40, 41, 42, 43,44, 46, 50, 51, 52, 53, 55, 56, 57, 58, 59, 60, 62, 63,66, 67, 68, 69, 70, 71, 72, 73, 74, 75, 76, 77, 78, 79,80, 83: n = A,T,C or G
  misc_feature 84, 89, 90, 91, 92, 93, 94, 95, 96, 97, 98, 99, 100, 101,102, 103, 104, 107, 112, 114, 116, 117, 119, 126, 132, 136,155, 215, 339, 697, 698, 708, 709, 728, 733, 744, 760, 773,782, 785, 809, 822, 831, 837, 846, 853, 861, 866, 871: n = A,T,C or G
  misc_feature 872, 874, 882, 884, 894, 919, 925, 928, 929, 931, 935, 936,937, 946, 955, 960, 969, 971, 979, 985, 1000, 1003, 1004,1006, 1009, 1019, 1023, 1028, 1032, 1035, 1037, 1039, 1040,1041, 1042, 1044, 1048, 1052, 1058, 1075, 1077, 1082: n = A,T,C or G
  misc_feature 1090, 1093, 1094, 1095, 1106: n = A,T,C or G
cnctctcnnnnnnnantnntnnannnntnannnntnntnnnnnntnctannnngnnnnnntnnttnnnnnnnnnnnnnnnttnnttttnnnnnnnnnnnnnnnnganggggngngnntntgcgatnactatngggngaattggatctccaccgcngtggcggccgaggtacgcgggtgagtcacgcttcctgattcctcggcgcaaaggagacgnttatcctttcaaattcctgccttccccctcccttttgcgcacacaccaggtttaatagatcctggcctcagggtctcctttctttctcacttctgtcttgaaggaagcatttctaaaatgtatnccctttcggtccaacaacaggaaacctgactggggcagtgaaggaagggatggcatagcgttatgtgtaaaaaacaagtatctgttatgacaacccgggatccgtttgcaagtaactgaaatccattgcggacattgtgaaaggcttaaatgagtttagatggggaaataagccgttgttatccgccttgggtttaaatttatttgaatggagttccacttgtatcattggccctacccgagggagaagaagggagttttggttaaactggggccctatgtaagtaagccctcattttacccatcgttttggtatttacctggaccaccattattgcctttggtcacttggggaaaannaaagcccctnnttttaaactttgcccttgnaaccncaagttttggngattgttttttttggngggacaaaaacantttggcccnggnaaaaccttcaagtttttttttttnttttttttcaaantttggcccntttacntggcccacntggattnttgggganaaaantgttnntntttttttngnaaaaaaaagngtttgggaacccttccccccggggncgggcncannanggtnnnttttgggcnccttttttnggggnataaaaaangntttttttnaaccgnggggccccccccaanaanngnggnggggttcccnaaanttttnaacntgntntnnnnanaaangggngggganaaaaaaaaaaaaaacananggggngccccccnccnnnttttttttttntttttct

SEQ ID NO: 6909 - DNA, 1077 bp, Homo sapiens
  misc_feature 6, 10, 12, 14, 23, 24, 28, 31, 32, 34, 36, 38, 42, 43, 45,48, 50, 51, 63, 65, 67, 68, 69, 72, 74, 75, 77, 78, 80,81, 86, 90, 92, 93, 94, 99, 100, 101, 102, 103, 120, 185,191, 504, 559, 632, 654, 727, 737, 740, 754, 759, 827, 835: n = A,T,C or G
  misc_feature 848, 850, 873, 878, 882, 900, 903, 907, 912, 917, 924, 942,962, 965, 969, 982, 983, 984, 989, 995, 1013, 1021, 1023,1030, 1043, 1045, 1046, 1048, 1049, 1055, 1058, 1065, 1068,1072: n = A,T,C or G
cccttnaaanantnaatgtatannatanttnnantnantttnntntantnnaatttatttttntnannnaantnntnntnntttanatantnnngctannnnntcttataggcgaattgnagctccaccgcggtggcggccgaggtacttatgtggcattcggcggagggaccaggctgaccgtnctaggncagtccaaggctgccccctcggtcactctgttcccgccctcctctgaggagcttcaagccaacaaggccacactggtgtggtctcataagtgacttctacccgggagccgtgacagtggcctggaaggcaagatagcagccccgtcaaggcgggagtggagaccaccacacccttccaaacaaaagcaacaacaagtacctgcccgggcggctcgctctaagaactaagtggggatcccccgggcttgcagggaattcgattatcaaactttattcgaatacccgttcgaccttcggagggggggggcccggnacccagcttttgtttccctttaatgaaggggtttaaattgccgccgcttggcgtnaatcatggtcataagccttgtttttcctgtgtggaaaatttgtatattcccgcctcacaaatttccaccacanacataaccgaagcccggggaanccattaaaagttgttaaaaagcctggggggtgcccttaattgagtggagcctaactcacaattaattgcgttnccgctcaacntgncccggcttttccangtccngggaaaaccctggttggtgcccaagcttggcattaaatggaaatttggcccaaccccccccgggggangaaggccnggttttggccgtnantttggggccgccttctttaccgnctttncctnggcttcaacttgaacttncgncttnccctncggtnccgtttnccggccttggcgggccgnagccgggtaattcaagctanacntcanaagggccggtaannntaccnggtttnttccaccagagaatacangggggatnanccgccanggaaaagaaacantnntnnagcaanaanggccccncanaaanggcct

SEQ ID NO: 6910 - DNA, 1044 bp, Homo sapiens
  misc_feature 6, 7, 8, 10, 11, 12, 13, 14, 15, 17, 18, 20, 21, 22, 23,24, 25, 26, 27, 28, 29, 30, 33, 34, 35, 36, 37, 39, 40,41, 43, 44, 45, 46, 47, 50, 51, 53, 56, 57, 58, 60, 65,66, 67, 68, 69, 70, 71, 72, 73, 74, 75, 76, 77, 78, 79,80, 81: n = A,T,C or G
  misc_feature 83, 87, 88, 89, 90, 96, 98, 99, 100, 101, 104, 105, 106,108, 112, 113, 125, 745, 811, 825, 879, 884, 924, 944, 958,976, 978, 994, 998, 1023, 1027, 1033: n = A,T,C or G
cccctnnntnnnnnntnntnnnnnnnnnnntannnnntnnntnnnnnttnnanttnnnantattnnnnnnnnnnnnnnnnntnattnnnnagtggntnnnnttnnntnctannggcgaattgganctccaccgcggtggcggccgaggtacgcgggggttctgaagcggcggccagagaagagtcaagggcacgagcatcggccatgcctttcttggacatccagaaaaggttcggccttaacatagatcgatggttgacaatccagagtggtgaacagccctacaagatggctggtcgatgccatgcttttgaaaaagaatggatagaatgtgcacatggaatcggttatactcgggcagagaaagagtgcaagatagaatatggatgatttccgtagagtgtttgcttcggcagaaaaacgatgagacgttgcaggttacccttgcccggggcggcccgctctagaaactaagtggggatcccccggggctgcagggaatttccgattatcaagcttatccgataccgtcgacctcgaggggggggcccgggtacccaagcttttgttccctttaagtggaggggtttaattgccgccgccttggccgttaatcatggtcattaggctgtttcctgtggtggaaaattggttatcccgctcaccaatttcccaccaccaacattaccgagcccggggaagccattaaaggtggtaaaagccctgggggtgccctaatggagtngaagctaacctcaccattaatttgccgtttgccgctcactggccccgcttttcccaagttccgggnaaaccctgtccgtngcccagcctgccatttaatggaaatccgggcccaaccccccccgggggaagaangccgnttttgccttatttggggccgcctcttttccgctttccttngcttcaacttgaccttcccnttgcgcctcgggtnctttccggcttgcgggcnangccggttttcaagccntccncttcaaaagggccgggaataacccnggtntttccncaagaattcct

SEQ ID NO: 6911 - DNA, 1189 bp, Homo sapiens
  misc_feature 5, 10, 12, 15, 16, 19, 22, 30, 35, 36, 41, 42, 43, 44, 45,48, 51, 53, 54, 55, 58, 59, 62, 63, 66, 73, 76, 77, 78,79, 82, 85, 86, 88, 91, 92, 93, 96, 105, 107, 108, 111,118, 123, 125, 127, 133, 157, 173, 178, 180, 188, 196, 202: n = A,T,C or G
  misc_feature 203, 217, 219, 220, 222, 225, 229, 232, 413, 603, 606, 607,632, 633, 672, 697, 713, 739, 748, 771, 872, 876, 882, 900,905, 912, 921, 925, 931, 933, 950, 971, 981, 989, 993, 1002,1013, 1015, 1033, 1043, 1051, 1063, 1064, 1065, 1066: n = A,T,C or G
  misc_feature 1070, 1079, 1083, 1085, 1088, 1095, 1103, 1106, 1117, 1118,1130, 1133, 1134, 1146, 1148, 1158, 1162, 1163, 1167, 1171,1175, 1176, 1177, 1186, 1187, 1188: n = A,T,C or G
ccctnccctnantannatntantgtttcanattcnnttatnnnnnttncangnnnccnnttnnttntttaacnttnnnnttnttnntnttnnntanaaggggggntnnaangtattcntatangncnaattgnagctccaccgcggtggcggccgangtacagtacaggcttntctgntntcctccangcagtgtngtagtnnaggaaaagggcaanannantgnatcnttncttagacactaatcagctggggaaagagttcattggcaaaagtgtcctcccaagaatggtttacaccaagcagagaggacatgtcactgaatggggaaagggaacccccgtatccacagtcactgtaagcatccagtaggcaggaagatggctttgggcagtgggctgggatgaaaagcangattttgaggatacccagctcccggaaaccgaggtcaatctttctacaagggtttcttcccttcacttggagacaaatggaaattcaaggggttggatcatttctcttggagggggcttgaagaagggtgcctttcccttccgaatttttcaacctacccaacaatttaagctttgggcttcttcttgtnctnnaagaagggggttatctttcttaaannaacttaggggggcttttgggttattattattggtggggnccaaaaaaacggaaatttaagtttncaatttaaatggggcntttcccgggcctttgggcctggaatngaaccgttncccccaacttggaccaaggaagnaaaaagggggaaggggcttgggttaaaagggaaaaccttgggggtttcccttttccttggggggtaagaacccttcttggggggaagccttcccccggcgnttanccttgncccccggggggccggggnccggntttcttnaggaaaacnttangtgggnantcccccccggggccttncaaagggaaatttcgaattanttcaaaggcnttttttcngatnacccggtcngaacccttcgnanggggggggggcccccggnttaccccaancctttttngttccccttttnnnnggangggtttaanttgncnccncttgggnggtaaatnatngggtccaattnnccttgttttccntgnnggtggaaaaaantnttttttccgntttnncaantttncacnnnaaacattannng

SEQ ID NO: 6912 - DNA, 1143 bp, Homo sapiens
  misc_feature 3, 10, 13, 14, 17, 18, 23, 24, 25, 27, 28, 31, 33, 34, 35,37, 38, 40, 44, 45, 46, 48, 49, 61, 63, 64, 65, 66, 70,73, 75, 78, 81, 82, 87, 91, 93, 97, 100, 101, 102, 108,109, 110, 114, 117, 137, 147, 163, 165, 178, 184, 196, 207: n = A,T,C or G
  misc_feature 215, 216, 218, 228, 245, 460, 478, 480, 503, 606, 651, 734,751, 773, 781, 792, 801, 818, 819, 820, 846, 857, 873, 877,879, 880, 886, 910, 912, 919, 923, 939, 941, 945, 960, 972,978, 998, 999, 1003, 1017, 1020, 1030, 1032, 1062: n = A,T,C or G
  misc_feature 1075, 1081, 1089, 1101, 1103, 1104, 1110, 1112, 1116, 1118,1128, 1135, 1136, 1143: n = A,T,C or G
ccnccccttnaannatnntaatnnntnntgntnnnanntngctnnntnnataacattagtnannnnaaanttntnttnganntatanctantnacanatnnntagggnnngagngcnggtaattctactcactatanggcgaattgnagctccaccgctggtncnaggtacaccttgnttggangcttcagtgacnacaaggcagtntgtcacannanctcactcatnaacttcttagtgaattntgacaggcaagaagatgacattcacttagtgacattatgtgtgacagaattaaatgacccgggaagaaaacgaaaaccactttccaagtaatatatggcattgctgtcaaccattaagactgcagagatttacagagcatcctttcaaggatcggggtcccggagggagcaagcttcgtgctgcgccgaactttagcagggaggaccaatggatnaagcatttatggatgcangnagacaggaacaacttcgttatangggacccgtacctgcaccgggccggcccgctctagaaactaggtgggatccccccggggctggcaggggaatttccggatatcaagctttatccgataccgtngaccctccgagggggggggccccgggtaccccaagcttttttggntccccttttaagtggaggggtttaaatttgcgccgcttggccgtaaattcaatgggtcaataagcctggttttcccttgtggnggaaaaattggttattnccgccttcaccaattttgcccncaccaaancattacccgangccccgggnaagccattaaaaggggnnnaaagcccctggggggggggccctaantggaggtggangcctaaccctccaccnttanannttggcngttggcgccttcaacttggccccncntttttcnaagntccggggaaaaacctngnctgnggcccagccttgcantttaattggaantccggnccaacccccccccggggganngaanggccgggttttgcngtntttggggccncnttttttccgctttcctcgggttcaacttgnactcccttgcgcntcgggnccgttccngctttgcggccnanncggtantnaacntnaactccaaanggcgggnnaataccn

SEQ ID NO: 6913 - DNA, 797 bp, Homo sapiens
  misc_feature 556, 593, 631, 659, 671, 713, 717, 747, 777, 778, 779, 786,797: n = A,T,C or G
gaattggagctccaccgcggtggcggccgaggtacctgtcatttgcctttgagcattgtcaccgttctagtcagaagaacaaaaggatgattctgatctatttgcttccagtaaaaatgctattgggtcacatgcccactgtggagctcctgaaaaagtatcacctgatgcagtttgcggaagtaaccagagctgtgagcgagggcaacctgctgctgctgcacgaggcgctggcgaagcacgaggccttcttcattcgctgcggaatcttcctcatcctggagaagctgaagatcatcacctacaggaacctctttaagaaagtgtatttgttactgaaaacacaccagctgtctctggatgcttttctggttgccttgaagttcatgcaggtggaggacgtggacattgacgaagttcagtgtattctggctaacttgatatacatgggacacgtcaaaggctacatatcgcatcagcatcagaagctggtggtcagcaagcagaacccatttcctcccctgtccacggtgtgttgaaagtacctgcccgggcngccggctcttagaactagtggatcccccgggctgcangaattcgatatcaagcttatcgataccgtcgcctcgangggggggcccggtacccagcttttgttncctttaagtganggttaaatgcgcgcttggcgtaatcatggtcatagctggttnctgngtgaaattggttatccgcttaccatttccncacacatacgagcccgggagccataaaagnnnaagcctngggtgcctaan

SEQ ID NO: 6914 - DNA, 1205 bp, Homo sapiens
  misc_feature 3, 4, 5, 6, 7, 8, 9, 10, 11, 13, 14, 16, 17, 18, 19, 20,21, 22, 23, 24, 25, 26, 27, 28, 29, 30, 31, 32, 33, 34,35, 36, 39, 40, 41, 43, 46, 47, 48, 49, 50, 51, 52, 53,54, 55, 56, 57, 59, 61, 63, 64, 65, 66, 67, 68, 70, 72,73, 74: n = A,T,C or G
  misc_feature 75, 76, 77, 78, 81, 82, 83, 84, 85, 86, 87, 88, 89, 90, 91,92, 93, 94, 95, 96, 97, 98, 99, 100, 101, 102, 103, 105,109, 113, 115, 117, 136, 138, 139, 144, 155, 222, 260, 387,391, 400, 405, 407, 408, 410, 425, 437, 442, 451, 461: n = A,T,C or G
  misc_feature 520, 535, 558, 600, 615, 622, 631, 654, 666, 683, 687, 696,710, 719, 720, 721, 740, 753, 757, 759, 776, 784, 788, 798,813, 821, 833, 841, 842, 851, 854, 867, 876, 881, 886, 894,914, 917, 931, 934, 935, 965, 967, 971, 976, 978, 987: n = A,T,C or G
  misc_feature 988, 989, 995, 999, 1000, 1007, 1016, 1021, 1022, 1042, 1045,1046, 1054, 1062, 1071, 1074, 1085, 1090, 1091, 1102, 1104,1111, 1117, 1119, 1120, 1125, 1126, 1133, 1137, 1155, 1162,1164, 1191, 1192, 1193, 1197, 1200, 1204: n = A,T,C or G
ccnnnnnnnnntnncnnnnnnnnnnnnnnnnnnnnnttnnnanttnnnnnnnnnnnntnantnnnnnntntnnnnnnnttnnnnnnnnnnnnnnnnnnnnnnngnaagnggangngngtaagacgactcactatangnntaagncgaattggcanctccaccgcggtggcggccgaggtacaagtagcatagaaagaccagtccttgctgaaagacaagtcngaatgctccactttttcaattctctctccattcttcantaagtcaacttcaatgtcggatggatgaaacccagacacatagcaattcaggaaatttgactttccattctctgctggatgacgtgagtaaacctgaatctttggagtacgccttcgtaaggcgtcncggncccccgggngtcananncntatcaccaaggctgngggcccgccttntaaanagccgtaancgggagtttntctggcttgctcttgaaaaaaagcgttgggcttgccgcccggctatggattgtggcagnaaaaacaacagccgnatcaaaacttgggtcctcaaagnagcccgggttgagcaaaggggccacttcttgggtgcaaaccnaaaaggccacccggntgcttcngggcttccnttttaaaactcaaccaaggaaanggcaagcccttnccggggggaaaggcccnaaancccccaaanggttttaaaaaaangggccgggnnncggggaaacccaaaaaccncttaaaaaaaagncccnangtttgggggggccaagncccaaaanaaangcccccaaanaaaaagggccgggcnttggggcngggggcccaaanctttcccnnaaaaaaaanaanaccccctttaaanaaaaaaccnccccnaaaanaaaaaagnccgaaaaaaaaaaccccggnccncctttttaaaaacntanngggggaaaccccccccggggctttttaagngnaaanttcgnanaattttaannncttttntccnnatacccnttaaaaccnctttnngggggggggggggcccccgnggnncccaaacntttttttnccccctttntanggggggggggnttaannttcgccccccncnggggggnaaaaanannagggnnccaacantggntgtttcccctgggggganaaaaaangngttttctctcttccaaaattcccccannnaaanaanaggng

SEQ ID NO: 6915 - DNA, 1011 bp, Homo sapiens
  misc_feature 2, 4, 5, 6, 7, 8, 9, 10, 11, 12, 13, 14, 15, 16, 17, 18,19, 20, 21, 22, 23, 24, 25, 26, 27, 28, 30, 31, 33, 34,35, 36, 37, 38, 39, 40, 41, 42, 43, 44, 45, 46, 48, 50,51, 52, 53, 54, 55, 56, 57, 58, 59, 60, 61, 62, 63, 65,66, 67: n = A,T,C or G
  misc_feature 68, 69, 70, 71, 72, 73, 74, 77, 81, 82, 84, 85, 469, 634,739, 778, 824, 860, 890, 938, 949, 989, 995, 1002, 1005: n = A,T,C or G
cntnnnnnnnnnnnnnnnnnnnnnnnnntnncnnnnnnnnnnnnnnantnnnnnnnnnnnnnncnnnnnnnnnnaanaggnncnnaagatcatatagggcgaattggactccaccgcggtggcggccgaggtactgccaccatctccgtttccaggagtcttctgcttgttctttctggtcttcctcacggatcctgaaggggggttctctgcagagcgaccaccccatcttcctgggagagctggttcaagatttttctgctgtggaccagctgtcttctttcctgaggaggcccctctcattttacttctctgcatgttgcttctagttggttttttgaagttctcttcttctgcagattgctgtccaccgaggttgagaaccctgctttctgggaactcattcaacccctgttttttattccaaccaacaatcttccttctttcccttccaagaaactccttagtngacccgcgttacctgcccgggccggcccgctctagaaactagtgggatcccccgggctgcagggaattcgatatcaagcttatccgataccgtccgacctcgaggggggggcccggtacccagcttttgttcccttttaagtgaggggttaaatttgcgcgcttnggcggtaatcatgggtcatagctggtttcctggtgtgaaaattggttaatccgctcacaaatttccacacaaacataccgaagccgggggagccattaaaaagtngtaaaaagccctggggggtggccctaaatggaagtggangcctaacctcacatttaaatttggcggtttggcgcctcaacttggnccggcttttccaagtccggggaaaaccctggtcggngcccaagcttgccatttaaatggaaattcnggcccaacccccccgggggggaggaaggccgggttttggcgttatttngggccgccttntttccgcttttcctttggcttcaacttgaactcgcttggngcttcnggtccgnttncgggcg

SEQ ID NO: 6916 - DNA, 1091 bp, Homo sapiens
  misc_feature 1, 2, 3, 4, 6, 7, 9, 10, 16, 17, 18, 21, 22, 23, 24, 25,26, 27, 28, 29, 31, 32, 33, 34, 35, 36, 37, 38, 40, 43,45, 47, 50, 55, 56, 57, 58, 59, 60, 63, 64, 65, 67, 69,70, 72, 73, 74, 75, 76, 77, 78, 82, 83, 84, 88, 90, 91,94, 95: n = A,T,C or G
  misc_feature 97, 99, 102, 104, 106, 107, 112, 120, 188, 443, 449, 450,455, 463, 472, 478, 508, 509, 524, 540, 553, 576, 593, 636,643, 677, 688, 693, 711, 715, 727, 744, 755, 769, 778, 779,797, 803, 818, 823, 825, 826, 835, 839, 842, 848, 856: n = A,T,C or G
  misc_feature 867, 879, 892, 898, 910, 917, 918, 921, 941, 944, 968, 970,979, 981, 982, 985, 986, 989, 991, 993, 997, 999, 1000,1007, 1020, 1021, 1022, 1023, 1030, 1032, 1035, 1043, 1045,1050, 1063, 1076, 1077, 1078, 1080, 1084, 1087, 1090, 1091: n = A,T,C or G
nnnntnnannttaatnnnatnnnnnnnnntnnnnnnnntnttntngnttnattannnnnntannnananntnnnnnnntttnnngggnanncgnngngngtnancnncttgnctaattgnatctccaccgcggtggcggccgcccgggcaggtacgcgggggccttcctttcgctcttcccgctgctncgcccctctctgtcttctctgcagtgggagcagctctcctgccacagctcctcaccccctgaaaatgttcgcctgctccaagtttgtctccactccctccttggtcaagagtacctcacagctgctgagccgtccgctatctgcagtggtgctgaaacgaccggagatactgacagatgagagcctcagcagcttggcagtctcatgtccccttacctcacttgtctctagccgcagcttccaaaccaagcgccntttttnnagggnacattcgncaacagcanccaagnttcatttgggaagcctggggctgccacaanntgggggtgggctggntctggggctgggattnggaaactgtgttntgggaagccctcatcaattggtnatggccaggaacccttncttctgaaagcaacaagcttcttttttctaacgcccatttctngggcttntgcccctctcgggaagggccccatgggggggctncttttttggtncctgnatgggtgaggcccttttnctcnatccctcttttngcccaatggtgggaaangggagccccgnttttcccacccctngcccataanntttctttccccgccgttnttgggnttggggccccccggnggggntnnccttttttncctnttncccctncccccaanggcaagccctnggggggaacccntggggtttgggcnttcaanggggtttttggnccccggnnggnaaaaagaaccaaaatcaaanttnccctgggggttttaattaagggangngttccactntnntanntanancntttntnngagaggnggtgtggtacccnnnnggccccntnttnaaacctangnggggncccccccgggccntgcaggggaattnnnanatcnaanccnn

SEQ ID NO: 6917 - DNA, 1007 bp, Homo sapiens
  misc_feature 1, 5, 6, 7, 8, 12, 13, 15, 16, 19, 24, 25, 28, 33, 41, 45,46, 47, 55, 60, 64, 68, 69, 70, 71, 75, 78, 79, 80, 86,87, 89, 90, 92, 94, 96, 100, 105, 106, 111, 112, 115, 116,120, 163, 166, 177, 187, 195, 209, 331, 356, 391, 403, 465: n = A,T,C or G
  misc_feature 495, 522, 536, 555, 583, 585, 592, 603, 616, 629, 671, 684,696, 758, 771, 772, 774, 777, 787, 802, 803, 805, 818, 819,824, 829, 833, 841, 843, 844, 847, 848, 851, 863, 865, 867,886, 887, 888, 889, 893, 913, 915, 917, 919, 926, 934: n = A,T,C or G
  misc_feature 939, 964, 966, 969, 972, 976, 985, 994, 997, 1005, 1007: n = A,T,C or G
ncccnnnnctannanntanattannacnatatnatagtttncatnnntataagtngtatntaantaannnncttnatnnntataanntnntnantntaanttaannatatnngcnnatgnactccaccgcggtggcggccgccggcaggtacgcgggggactntangagctgcagcngagcaggtancagctctngcacctgttttctnttgcacctgacgtgcagctgctcctacccacctctcctggctgagccttgcctgatacagcagcccggaggcaccacttgcttcccgagtctcaccctcccaggcagctcctacactcaacngcttctctaggaaaggtctcacctncagcctggagcagtcgggatttacagaaagccccntccttggcttangggagccgccatgaacgactgaaaattggttggtggaagctgactttcctccggaaaaaagnaaatccacttcccaaagtgctgttatgaanatccctgacaccctatgcccaaaacangaggggagatgcangaacccccgaggcctgacngctggaaggcccccaacaagccgacttntnacacccngcctggagaanattgtgggacaanaacacaaaagggnaaggcaccgtccaaggtctccaaactcaagggaccccttttnagggggaaagaanaaaaggtgagangcccccgcctggcagagaaacccttaaccctttttttggatggatcaccgagggaagggacnggtcattcaaaanntnaangggcctggangggagggggggcctnncnaaccttttttggnntcccntggcnattnagccagantnntgnnganaagggaccttgncncngctgggcctctttggccannnncttnaagcctggggggggccccgntnantncctgctnggccaggnaaaanggcctcggtttttttaaggttttgngnatntantgtngcccccccnctttttgtnaanggggcccncn

SEQ ID NO: 6918 - DNA, 1058 bp, Homo sapiens
  misc_feature 2, 3, 4, 5, 8, 12, 13, 16, 18, 21, 23, 24, 25, 27, 33, 35,37, 41, 42, 43, 44, 45, 47, 48, 54, 55, 59, 60, 61, 62,63, 64, 67, 74, 78, 79, 84, 93, 99, 172, 457, 488, 503,511, 535, 567, 569, 574, 617, 622, 639, 651, 666, 700, 708: n = A,T,C or G
  misc_feature 714, 716, 737, 744, 757, 774, 777, 782, 795, 824, 832, 833,849, 858, 865, 868, 870, 893, 898, 908, 924, 929, 931, 932,949, 969, 987, 988, 999, 1001, 1002, 1006, 1015, 1029, 1030,1035, 1044, 1045: n = A,T,C or G
tnnnnctntttnnttntnaanannnanttaatnananaaannnnntnntatatnntatnnnnnnttntttatantggnnggggnaaatccctntatagncgaatggactccaccgcggtggcggccgcccgggcaggtaccagcagcgcccgggcagttcccccaccactgngatctatgaggataaccaaagaccctctggggtccctgatcggttctctggctccatcgacagctcctccaactctgcctccctcaccatctctggactgaagactgaggacgaggctgactactactgtcagtcttatgatagcagcaatcagggggtgttcggcggagggaccaagctgaccgtcctaggtcagcccaaggctgccccctcggtcactctgttcccgccctcctctgaggaggcttcaagccaacaaggccacactggtgtgttctcataaantggcttctaccccgggagcccgtggacaagnggcctggaaaggcangatagcanccccgtcaagggcgggtagtgganaccaccatcaccccttcaaacaaaggcaacancnaagtnccttcgggcccgcttctaagaactagtgggatcccccccgggncttgnaaagggaatttcgaatnatcaaagctttnttcgaattccccggncgaccccttcggaggggggggggcccccgggggncccccaancttttntngttttccccttttaagttganggggttnaaatttgcccccncctttggccggtaaatncantgggnccaattaagcctngttttccctggtggtggaaaaatttgggntattcccnnttccacaaattttccncaaccaacnattaccngangncccggggaggccataaaaaagtngtttnaaaggccctnggggggggcccttaanttgangnnggaggcttaaacttccnaatttaaatttgcgggtggnggcttcaacttgcccccnnttttctcaatntnngggnaaaaacccntggtcggtggcccnnccggncatttaatnngaaaaccggccct

SEQ ID NO: 6919 - DNA, 1159 bp, Homo sapiens
  misc_feature 3, 4, 7, 9, 10, 11, 12, 14, 16, 19, 20, 21, 23, 24, 25, 26,27, 29, 30, 31, 36, 37, 38, 39, 40, 41, 43, 44, 50, 51,52, 53, 54, 56, 57, 58, 59, 60, 61, 64, 65, 66, 67, 68,69, 70, 71, 72, 74, 75, 76, 77, 79, 80, 81, 82, 83, 84,87: n = A,T,C or G
  misc_feature 88, 92, 93, 97, 98, 100, 107, 110, 111, 115, 119, 123, 135,378, 389, 421, 452, 478, 481, 505, 506, 508, 523, 525, 530,543, 545, 558, 560, 562, 565, 570, 575, 577, 580, 581, 586,590, 604, 606, 608, 609, 638, 648, 662, 668, 673, 680: n = A,T,C or G
  misc_feature 694, 711, 713, 728, 730, 745, 746, 749, 776, 783, 796, 799,800, 814, 821, 823, 831, 834, 841, 845, 865, 873, 897, 901,907, 920, 921, 941, 942, 960, 971, 975, 979, 989, 991, 995,998, 1013, 1017, 1018, 1029, 1038, 1047, 1054, 1059: n = A,T,C or G
  misc_feature 1063, 1066, 1072, 1075, 1077, 1078, 1080, 1084, 1100, 1106,1109, 1127, 1136, 1144, 1145, 1152, 1156: n = A,T,C or G
ggnnaantnnnngnanttnnnannnnngnnnttttnnnnnntnngaattnnnnnannnnnntannnnnnnnntnnnntnnnnnnaanngggnntcgnncncttatantgnnatanggcnactnggactccaccgnggcggcggccgcccgggcaggtacgctggatagcctccaggccagaaagagagagtagcgcgagcacagctaaggccacggagcgagacatctcggcccgaatgctgtcagcttcaggaatccccgcgtacctcatccacagggcctcctgccagccccagcccctggagaggatgcagaaatgaaagaaccagagcattatagcagaacgaatcctggaatgggaatggaatgcctggattngtggcacagtngggaagccgtcctggccatgccatgttaaagngtatggcctcatggcaatgttatttgagctntttctgagaatttttgtggaagttgnctnattggtgttggaattatgtgattnngntttgaagtaattttnanatganatgcaatttcccnancgtggaaaacccngnanccnaggtnacttntnttnnagatngttnattttcctatcctntngnncttttaatggacttttaggggcttgggantttggccctnaaatggactttggnctctgnaaccnatgctantttatttttgaacnttcgtggccttaaaacnanaaacgggattttttntntttttcagggaaaannccnaggaccggggcctttttattaccaatnaaaattnttttttaaaaccnggnnacccctccggggcngggttgntnaggaaacntanggggggnttgnccccccggggcttgcaaagnaaattttngattattcaaaaacctttatttgnatanccggtncaaaccccttttnngggggggggggccccggttnncccccaaccttttttganttccccttttnaatngaanggggtttaantnggcnccnccttgggggggttanatcnnttggggtcaantaaactggntttcctcgngggaagnaaaantggnttnatttcngcntnnanaaanttttccacaaaaaacnttaccnttngcccgggggggccatttnaagttgggnaaagcccnngggggtngccnaat

SEQ ID NO: 6920 - DNA, 1002 bp, Homo sapiens
  misc_feature 11, 17, 19, 20, 21, 25, 26, 29, 35, 36, 41, 47, 48, 55, 56,58, 61, 68, 69, 70, 71, 75, 76, 77, 80, 83, 84, 86, 89,90, 91, 93, 100, 107, 109, 128, 137, 152, 166, 170, 176,188, 191, 229, 304, 377, 472, 499, 517, 531, 547, 588, 594: n = A,T,C or G
  misc_feature 609, 625, 650, 658, 675, 685, 707, 731, 741, 771, 801, 809,810, 819, 820, 840, 854, 856, 861, 868, 870, 872, 884, 895,898, 904, 905, 908, 914, 929, 935, 938, 945, 947, 948, 959,974, 980, 983, 987, 990, 991: n = A,T,C or G
ccttttcctantaattntnnntgtnntantatttnnaagtntttatnnattgaannanaanatattcnnnnattnnncantannantannnanaaaatangcttttntnctccccgcttggcggccgnggtactttngggaggcccatgcangcggattacctgangttnggagtncgagaacagctnggncaacatggtgaaacccatattctattaaaacacacacncacacacacaaatcgggcatgattggcatgcacctgtaatcccagctacttgggaggctgaaggtgggaggatgngcttgagcccaggaggcaagaggctgcaataagacatattcaggctactgcactccaggctgggccgacacancgagaacccctccccaccccccaaaaaaaggaaaggaattaatttcccataaaacggggaaggggcagccggggcttggggatcttgcccacagnttcttaactcgaggccggcacttgaantaaggggaggctttttanagagctgggagcanacaaaaaccacccagntaaaacgaggcaacactatgctacaaggggtaagccctttncctcanggagctcaggtgctncgagcattccacagcnctcttttaaagaccaagcagaaaantaccccangggagaaaaagcaccgnccacaacggnataaagggccccgctgaaatcngggggggaccaaaaagccagaccngcccgcttcntagaactagtgggattccccccgggcctgncagggaattcgatttccaagcctttatcgnataccggnngaaccctcnnggggggggggcccccggtancccccaagcttttngnttccntttttantnanggggtttaaatntgccccccttnggncgtaanncantggggncataagcctggtttnccttgnggngaaaaantnntttattccgcntcaacaattttcccncaccancantacnganncccgggggact

SEQ ID NO: 6921 - DNA, 1116 bp, Homo sapiens
  misc_feature 2, 3, 8, 10, 11, 13, 16, 18, 19, 20, 21, 24, 27, 28, 30,31, 33, 34, 37, 44, 45, 46, 47, 48, 53, 54, 55, 56, 57,59, 68, 70, 71, 73, 75, 76, 79, 80, 81, 84, 85, 86, 87,88, 90, 92, 93, 94, 95, 96, 97, 99, 100, 101, 103, 104,105, 109: n = A,T,C or G
  misc_feature 111, 112, 113, 114, 115, 125, 167, 178, 201, 207, 211, 227,229, 410, 470, 495, 656, 669, 765, 797, 802, 833, 842, 867,897, 905, 908, 909, 917, 921, 941, 975, 997, 1016, 1028,1038, 1040, 1057, 1076, 1084, 1090, 1093, 1109, 1115: n = A,T,C or G
annttttntnnanttntnnnnttnttnntnntnnttnatttttnnnnntcttnnnnntntttaatatntnnanannttnnnttnnnnntntnnnnnngnnngnnntgtngnnnnnctatatcctnaatggcgaattggagctccaccgcggtggcggcccgcccggncaggtaccagnaggcgttggccaaggggagatgngacagnccanatagctcttcagcctncncttgaagttcaatggtggtggtcatatcaatcatagcattttctggacaaacctcagccctaacggtggtggagaacccaaaggggagttgctggaagccatcaaacgttgactttggttcctttgacaagtttaaggagaagctgacggctgcatcttgttgggtggtcccaaggctcangttgggggttggcttgggtttcaataaagggaaccggggggacaccttacaaaatttgcntgctttgtcccaaaattcagggatnccacctgccaagggaaccaaccaaggccctttattcccacttgcttgggggaattggatgttgtgggggaagcaccgccttacttaccttcagttattaaaaaaatgtcaaggccctgatttatctaaaaaagcctattttggggaaatggtaatcaactnggggaagaaatgntaacttgaaaaagatacattgggcttggcaaaaaaagtaaaacccacggatccgttattgcctgatcattaccccttaattggatccccagccaangataatggtccctgtccttcttaaagatgtgncattnaaagccttggttcccttcggcccgcttctanaaactagtnggatccccccccgggggcctgcaangaaattccgatattcaaagcctttattcgnttaccccntcnnacccttcnaaangggggggggccccccggttnccccagcttttttgtttccccttttaagtggaangggtttaatttgccgccccttnggccgtaaatccattgggncaataagcctgnttttcccttntngtggaaaaatttgtttnttccccttcaaccaatttnccaccacnaaacanttnccgaatccccggggancccttnt

SEQ ID NO: 6922 - DNA, 1133 bp, Homo sapiens
  misc_feature 5, 6, 8, 9, 10, 15, 16, 18, 19, 20, 21, 22, 23, 25, 26, 27,29, 30, 31, 32, 33, 35, 38, 39, 42, 43, 44, 45, 46, 47,48, 51, 52, 53, 54, 55, 56, 59, 60, 64, 65, 69, 70, 71,72, 73, 74, 75, 78, 79, 80, 81, 82, 83, 84, 85, 86, 87,88: n = A,T,C or G
  misc_feature 89, 90, 91, 93, 94, 97, 101, 102, 105, 108, 109, 110, 111,112, 191, 198, 219, 220, 224, 225, 226, 231, 595, 596, 600,605, 608, 616, 619, 626, 642, 654, 675, 678, 692, 701, 707,708, 725, 728, 734, 746, 753, 755, 766, 776, 788, 790: n = A,T,C or G
  misc_feature 812, 817, 820, 831, 832, 842, 853, 855, 871, 882, 892, 897,917, 918, 921, 923, 929, 930, 942, 943, 945, 950, 954, 955,963, 964, 977, 986, 1004, 1010, 1014, 1015, 1019, 1020,1030, 1033, 1037, 1040, 1043, 1050, 1055, 1056, 1057, 1058: n = A,T,C or G
  misc_feature 1063, 1073, 1075, 1077, 1080, 1081, 1082, 1093, 1095, 1109,1113, 1127: n = A,T,C or G
ttctnntnnnatttnntnnnnnntnnntnnnnntnttnnttnnnnnnntcnnnnnnttnntttnntttnnnnnnntcnnnnnnnnnnnnnntnnggngagnntangcnnnnnctactcctatatggcgaattggagctccaccgcggtggcggccgcccgggcaggtaccttgtcctcaaagagctttatnaactagnacattttcgaagagctctatnnttgnnnctcancatggcaggtttttttactgaaatctcttatctggaaggatgggcagtaaagagacccggacccttccccgagcccactggttgcttgtattcatatcacagctcgctttgagtaagtggtaaccaccagaataataagcagattgctcctccaaacccagctgggtgaagatagcttcatttttggaaaatcaactggaaatcatgaaaaacccttcctaatggtataatttgttccaagagttctttttggatacttaaggaaggggaaatatttaatccttggtgccacaggtccttttattacaaggcacttcttattttatgggtattaccaggaggttttctttcttccaagcccggnntttnttttnggngagggttnaantggcttntacccttggcccgctntaaaaaacctanggggggtcccccgggcctggnggnggaaattcggattnttcaaaggntttttnngaataccccggtaccanccnttcggngggggggggggncccccgngnttcccccaagnttttttggcnccccctttttangnggggggggggttttattttgcnccccnttngggccgttaanntcccgggggnccaatagcctngnttttcccctggggggngaaaaaattgngtttttcccncctcnccaaatttccccccacaaannaantntttatnnccccggggggcnntntaaanaaanngtgaaaannccccggggggggnccccccttngagggggggggccccccncccccncttnnattnngggggggggnggncccnctnggnccccccnttttnnnncaagngggggaaacncncnctnnnggccccccggntntttattaaaaaaanaacnccccccccccgggngggggg

SEQ ID NO: 6923 - DNA, 446 bp, Homo sapiens
  misc_feature 352, 363, 378, 385, 393, 398, 401, 402, 403, 406, 407, 412,424, 425, 429, 437, 440, 446: n = A,T,C or G
tagggagcaccccgcgtccgggttcggctcctggctgatcccactggggcctttgggaaggagacagacttattactagatgattcgctggtgtccatctttgggaatcgacgtctcaagaggttctccatggtggtacaggatggcatagtgaaggccctgaatgtggaaccagatggcacaggcctcacctgcagcctggcacccaatatcatctcacagctctgaggccctgggccagattacttcctccacccctccctatctcacctgcccagccctgtgctggggccctgcaattggaatgttggccagatttctgcaataaacacttgtggtttgcggccactanaaaaaaaaaanaaaaaaaaaaaaaanaaaaaanaaaaaaanaaacnaannnaannaaaanaggggcggcccnnaaantaattttnaanaaaaan

SEQ ID NO: 6924 - DNA, 1613 bp, Homo sapiens
  misc_feature 1, 2, 3, 4, 6, 7, 9, 10, 11, 12, 13, 14, 15, 16, 19, 20,21, 22, 23, 24, 25, 26, 27, 28, 29, 30, 33, 34, 35, 38,39, 40, 42, 43, 44, 46, 48, 49, 50, 52, 53, 54, 55, 57,58, 59, 60, 61, 62, 63, 64, 65, 66, 67, 69, 70, 71, 72,74, 76: n = A,T,C or G
  misc_feature 80, 81, 83, 84, 85, 87, 88, 89, 94, 95, 96, 98, 99, 101,102, 108, 111, 112, 113, 114, 115, 118, 119, 120, 121, 122,123, 127, 132, 133, 134, 142, 144, 145, 146, 148, 150, 152,154, 155, 162, 213, 223, 240, 244, 248, 253, 254, 255: n = A,T,C or G
  misc_feature 258, 265, 274, 283, 287, 326, 348, 353, 375, 397, 435, 459,530, 575, 608, 628, 637, 680, 736, 773, 817, 841, 860, 914,927, 934, 990, 1034, 1164, 1168, 1179, 1190, 1223, 1226,1266, 1294, 1327, 1364, 1387, 1394, 1430, 1433, 1498: n = A,T,C or G
  misc_feature 1506, 1521, 1522, 1531, 1581, 1590, 1600, 1604: n = A,T,C or G
nnnntnntnnnnnnnnatnnnnnnnnnnnnttnnnttnnngnnntntnnntnnnntnnnnnnnnnnncnnnntntnattnntnnngnnntttannngnnannattccntgnnnnntcnnnnnnttangaggnnntgcatctncnnntntntntnngggcganttggtagctccaccgcggtggccgggctcgaggtacgcgggggacccgatntagggaaagnaaggggtattcataaantatngatngtaannnagnaaccatngccctggcnaggaaaggnaaantggtttttctctcctggccgtaatggttaaaagaagggnaaaaatcaagttttaaaaaatngcctngcttaatcaaaaatggttccgnacttcaagccttaaaccccatnatggttccccaggggtttggccttgcaagaaagttttntctttttcaaaaatcttggaagtngttttggcccttgccttggaaacttccggggaagggggggaagttttttggggaagaaaaattttttaagnaccaaggccaagccttccttggtgggttttccttttttttttttnggccccgccaaaccccaaattaaaaggaattanaattaggccaaggaaatttnaagccccanaattccctttaaaaaaaacccctttccttaaaaaaggaaccgnaatttttttttggaagggcccatttccccccaccttggggggaattttaatttttnaaaatttttttttttccttttttttttggaaccggtnggttggttttttttttaaaggttttttaaggaaaaggttggccnttggttaattttccccacccaaangggggttttttaaaaaggnttccaaaggttgggaagggggttttgggggaaaaaggaaattaacccccccttnaattccttttttnttttttnaatttttccaaaaaaaaaaaaggcccacccaaaaattccaaaatttcctttttttnggtttttttgggaaaaaaaaattcccttaattaatttaaaaaanggttaacccctttggcccccccgggggggcccggggccccggcctttcctttaaggaaaaaccttaagggttgggggaattcccccccccccggggggccttgggccaagggggaaaaattttccggaanttanttccaaaaagnccttttaattncggaatttaacccccggttccggaaccccttcnggnaaggggggggggggggcccccccgggggtaaccccccaangcctttttttggttttcccccctttttnaagttgggaaggggggttttaaaatttggccgnccgcctttgggccggttaaattccaattgggttccantaagccttggttttttcccttgntggtggnaaaaatttggtttattccccgcttccaccaaatttnccnaccaccaaaccaattacccgaagcccccgggggaagccatttaaaaggtggttaaaaaggccctnggggggtnggccccttaaatggnnggtggaagnccttaaccttcaacaatttaaatttggccggtttggccgccttccacctnggccccgcntttttcccanttcncgggggaat

SEQ ID NO: 6925 - DNA, 1147 bp, Homo sapiens
  misc_feature 1, 2, 6, 7, 11, 17, 18, 19, 20, 24, 25, 27, 29, 31, 35, 44,48, 49, 52, 57, 62, 67, 69, 71, 72, 73, 75, 79, 81, 84,85, 88, 89, 90, 91, 92, 93, 96, 99, 103, 104, 109, 117,128, 172, 177, 188, 189, 201, 202, 208, 211, 213, 216, 220: n = A,T,C or G
  misc_feature 225, 228, 238, 278, 284, 334, 366, 367, 369, 405, 410, 428,474, 494, 579, 581, 629, 674, 684, 694, 708, 734, 745, 760,795, 817, 818, 842, 844, 865, 869, 872, 874, 883, 891, 902,911, 913, 930, 933, 937, 942, 950, 953, 957, 964, 965: n = A,T,C or G
  misc_feature 967, 972, 976, 979, 991, 999, 1002, 1011, 1019, 1023, 1031,1032, 1035, 1037, 1049, 1052, 1054, 1056, 1067, 1068, 1070,1078, 1079, 1086, 1092, 1110, 1112, 1121, 1122, 1123, 1132,1135, 1138, 1143: n = A,T,C or G
nnttcnntaanttcttnnnnattnngnanantctntatttcttnaatnnganatttnttaanttttntntnnngnatcngnagnntgnnnnnnganaantggnntcganaactactnactatatggcnaattggagctccaccgcggtggcggcccgaggtacttatttttnttttnttttttttttnnggggggggaagnnatctanctntntcncccnttttngantgcagtggcncgatctctgatcactgcaacctccgccttccgggttcaantgactntccagcctcagcttccagagtagctgaaactacaggtgagtgccaccacncccggctaattttgtttgtatttttttagtannanacagggtttcacagtgttagcccaggatggttctcnacctnctgacctcgtggattccnccccgtcttcgggccctcccaaaagtgatgggattaagaggccgtngaagcccaccgcgcacggcngggaaaaacgagaattttttaaaaatcaactttaccattgccaatgccccatggtattccctccacaacaaaaacttccacaagnantggctcaaaaaaagtcaaaacctttgtttatcagggtggatcttttangggacccccaaaagactactctttttctaccctttttccaagtgntttgccccanggcctggganatttgccacctaanccgttatttcacaatggttttcctgnccagggtcttnttaagcccccggaanagttttaaaagcctttttcccttacccaacccttnaaatccttaaccccggaggttnnaaaatggaattatgttaccccttngnccccgggggccgggggccgcnttcnttnanaaaccttangtggggantcccccccccngggcctggngnagggaaaattttccgantanttcnaaagncctttatnctngatnccccggnncngaccnttcnaangggggggggggnccccgggnaancccccaaanttttttgngttncccttttnnggngnaggggtttaaanttngngncccccttgggnngnaaattccnnggggccnttaacntggttttcccccgggggngnaaaattggnnntttcccccntcnccnaattnccct

SEQ ID NO: 6926 - DNA, 1123 bp, Homo sapiens
  misc_feature 1, 3, 4, 5, 6, 7, 8, 11, 12, 13, 14, 15, 19, 20, 21, 22,23, 24, 25, 26, 29, 30, 31, 32, 33, 36, 37, 38, 41, 42,43, 44, 45, 46, 47, 48, 49, 51, 52, 53, 54, 55, 56, 57,59, 61, 62, 63, 64, 65, 66, 68, 69, 70, 72, 73, 74, 75,76, 77: n = A,T,C or G
  misc_feature 79, 80, 81, 82, 83, 84, 85, 87, 92, 96, 100, 102, 158, 212,213, 364, 566, 589, 594, 607, 637, 672, 673, 688, 689, 694,698, 704, 715, 719, 750, 770, 778, 785, 786, 787, 790, 794,795, 798, 802, 805, 807, 811, 814, 819, 820, 825, 837: n = A,T,C or G
  misc_feature 843, 851, 869, 880, 900, 907, 914, 915, 916, 919, 921, 924,925, 926, 929, 933, 937, 941, 945, 948, 957, 958, 964, 966,967, 971, 978, 982, 995, 996, 1006, 1007, 1009, 1015, 1016,1022, 1024, 1026, 1029, 1031, 1032, 1041, 1049, 1051: n = A,T,C or G
  misc_feature 1055, 1056, 1064, 1069, 1073, 1080, 1086, 1089, 1110, 1114,1116, 1118: n = A,T,C or G
ntnnnnnnatnnnnntttnnnnnnnnttnnnnntannntgnnnnnnnnntnnnnnnntntnnnnnnannntnnnnnntnnnnnnnanggggntgtnatcncnaacttaggcgaattggagctccaccgcggtggcggccgccgcgatgcagaaatacnagaaaactggaaaagattggggaaggcacctacggaacttgtgttcaaggccannttccgggagactcatgagatcgtggctctgaaacgggtgaggctggatgacgatgatgagggtgtgccgagttccgccctccgggagatctgcctactcaaggagctgaagcacaagaacatcgtcaggcttcatgacgtcctgcacagcngacaagaagctgactttgggttttttgaattctgtgaccagggacctggaagaagttatttttgacaggttgcaatgggtggacctcggatccttgagaattggtaaaagtcatttccttcttccagctactaaaaaggggcctgggaattcttgtccattagcccgcaaatgtgctacaccaggggacctgaaagccccantaacctgcttaattaaaccaggnaaatnggggggagcctgnaaaattgggcttggatttttgggccctggnctcggaagccctttggggaatttccccgtccccgnntggttacctcaagcnntggangggnggggtncacccacttgngggnttaccctggccccgggggcgggcccgtcttnttaaaaaacttagggggggnaccccccncggggtnnnggnggannaanttcntantntaanacnttttnnttttngtattccccggnaacccnctttaggngggggggggccccccggncccccccattntttttttggccccccttttnttagggnggggggnnnaantntcnnnccncccnttgngggnaaanaantaagggggnncaaaantnngggnttccccncctnggggaaaaaaagnnttttcccccnncnccaatnnttcccncnanaantnnttaagaacncggggggnanttannaaagggtnaaaancccnggggggncccccntgngggggggggcccccccccccncttntntnggggg

SEQ ID NO: 6927 - DNA, 1118 bp, Homo sapiens
  misc_feature 2, 4, 6, 7, 8, 9, 10, 11, 12, 13, 16, 17, 18, 19, 20, 21,22, 23, 24, 25, 26, 27, 28, 29, 30, 31, 32, 33, 34, 35,37, 38, 39, 40, 41, 42, 43, 44, 45, 46, 47, 48, 49, 50,51, 52, 53, 54, 56, 57, 58, 59, 60, 61, 62, 63, 64, 65,66, 67: n = A,T,C or G
  misc_feature 68, 69, 70, 71, 72, 73, 74, 75, 76, 77, 84, 86, 87, 88, 435,488, 762, 845, 866, 867, 894, 911, 917, 924, 937, 943, 958,974, 975, 978, 988, 989, 991, 1002, 1013, 1022, 1024, 1032,1036, 1042, 1062, 1070, 1095, 1105, 1107, 1109, 1117: n = A,T,C or G
tntntnnnnnnnnttnnnnnnnnnnnnnnnnnnnntnnnnnnnnnnnnnnnnnntnnnnnnnnnnnnnnnnnnnnnnagaagangnnnacggggttcgactcactatagggcgaattggagctccaccgcggtggcggcccgaggtaccaatcctgaaattttttacagcaatcttcactgcagaaatctctcacaacaccatcgagttctttagttgctcccttcttacatagctgagaacaatagttgcaagtaacacatctcaatcctaaacgtctggcaaaatcctgtttgtataataatttgcagccttcactacagaaaggtctcttaaccgccagagaaatttactgtttcatgaaagagtcttctcctcttgacagtatttcgcaatatgtaactatgccaatgcaaccttcttatagtcatcctgnaacaagtttttgctgcaggaaacctggatgcactttgttctcccattccaggnatttctgggtttttggaaacaaaagggaattttttgccaggtagttgcattttcaactggaattatcactttgggcgcctaccaaactgggcccatttgggaggaatggacctggcattaccttaagaagccctggaaaatttaagcccacaccaaactggggaaatttggccaaaaaggttggtaccctggcccgggggccgggcccgctcttagaacctagttgggatccccccggggctggcaagggaaatttcggatattcaaagccttnatcgattaccggccgacccttcgaaggggggggggcccccgggttaccccaagctttttttggtttccccttttaagtggaanggggtttaaatttggcccccnnccttgggcggttaaatccatgggggcnattaagccttgggtttnccctgntggtggnaaaatttggttantcccgnttcacaaattccccncacccaaccattaccnnaanccccgggggnncnattaaaaggtngttaaaagccnggggggggngnccttaatngagntggaanccttaactccccaatttaanttggcggnttggccgcctcaacttggcccccgnttttttccantncnggggaaant

SEQ ID NO: 6928 - DNA, 1110 bp, Homo sapiens
  misc_feature 1, 2, 3, 4, 5, 6, 7, 8, 9, 10, 11, 12, 13, 14, 16, 17, 18,19, 20, 21, 22, 23, 24, 25, 27, 30, 31, 32, 33, 34, 35,38, 40, 41, 42, 43, 44, 45, 46, 47, 48, 49, 50, 51, 52,53, 54, 55, 56, 57, 59, 60, 61, 62, 63, 65, 66, 67, 68,69: n = A,T,C or G
  misc_feature 70, 71, 72, 73, 74, 76, 77, 78, 79, 81, 82, 83, 84, 85, 86,87, 88, 89, 90, 91, 92, 94, 96, 98, 100, 101, 103, 104,105, 109, 203, 216, 375, 635, 670, 684, 749, 758, 785, 791,877, 892, 893, 919, 922, 926, 943, 980, 983, 991, 1019: n = A,T,C or G
  misc_feature 1027, 1064, 1080, 1088, 1091, 1106: n = A,T,C or G
nnnnnnnnnnnnnntnnnnnnnnnntntannnnnnatntnnnnnnnnnnnnnnnnnntnnnnntnnnnnnnnnntnnnntnnnnnnnnnnnnanangngnngnnntaancgactcactatagggcgaattggagctccaccgcggtggcggccgggagccctcgcgtcgccgctgccgccaaaagacggcgagcgctcaaacnaaacagcccagcncgccatgacattatggttgcttgcagggtctcccccgcgttacctgcccggggcgggcccgctcgagctctaagaactagtgggatcccccgggctgcaggaattcgatatcaagcttatcgataccgtcgacctcgagggggggcccggtacccagcnttttgttcccttttagtgagggttaattgcgccgcttggcgtaaatcatggtcatagcctgtttcctgtgtgaaaattgttattccgctcacaatttcccacacaacaattaccgaagcccgggaagcataaaagtggtaaaagcctgggggtgcctaaatggagtggaagcctaacctcacaattaaattggccgttgcgcctcactgcccgcttttccagttcggggaaaacctggtccgtgcccaagcttgcatttnaatggaaatccgggcccaaccgcgccggggggagnaggccggtttgcgntattgggggcgcttctttcccgctttccttcgcttcactggacttcgctgcgctccggtccgttncggcttgcnggcgaagccgggtatcaaggcttcacntcaaanggcgggtaaattaccggtttattccaacaagaaattcaggggggaataaaccgccagggaaaagaaccattgttgagccaaaaaanggcccagccaaaaannggcccaaggaaaccccgtaaaaaaanggncccncggtttgcctgggccgnttttttcccattaaggcttcccgccccccccctgacngangcattcancaaaaaattcggaccgccttcaaagttnaagaaggngggggaaaacccccgcccggggacctttttaaaggantccccagggcggtttncccccctnggnaagcctcccttcgtnggcc

SEQ ID NO: 6929 - DNA, 1107 bp, Homo sapiens
  misc_feature 2, 7, 11, 12, 13, 16, 18, 23, 25, 36, 37, 43, 45, 46, 47,48, 56, 57, 62, 67, 68, 73, 75, 82, 83, 84, 85, 88, 89,92, 98, 100, 106, 113, 123, 125, 131, 132, 135, 142, 143,150, 155, 157, 162, 172, 185, 186, 194, 196, 197, 198, 228: n = A,T,C or G
  misc_feature 336, 353, 394, 400, 434, 488, 496, 556, 608, 651, 662, 717,724, 744, 751, 754, 769, 774, 778, 783, 800, 809, 837, 851,861, 863, 884, 890, 923, 931, 941, 951, 954, 955, 986, 1005,1007, 1013, 1015, 1021, 1036, 1038, 1040, 1041, 1047: n = A,T,C or G
  misc_feature 1053, 1062, 1075, 1078, 1079, 1085, 1087, 1088, 1093, 1098,1104: n = A,T,C or G
gntattngggnnnttngngaatntntctaattttgnnttttcnannnnggaatttnnggaanatttnnatttngntaatttnnnnttnnggngggggntnaacgantcactanatggcgaatngnagctcnnccntggaggnnggcggcnggccncnggccnggttctcggnggggccgtgtccnncgtggtcntnnnaggtccgaggggcaataagccctttggtancaaagacaatctcatgtgagataagaaagaagagcccacaagaccaaggatgtattctcagttttacagaccactgaccagaggccactccagggtgtcaggactaanacaagtcacaaaacagnagatttcccaagagcagcggaaaatgatccagtcacagatntcattngaggatgtggctgtggatttcaccgctggagganatggcagctacttaaatcctactcagaaagaaacttgtaccctcggccggctcntaggaacnaagttgggatccccccgggctgcaagggaattcgatatcaaagctttattcgatacccgncggaccttcgaggggggggcccggtacccaagctttttgttccctttaaganggagggggttaaatttggcgccgccttggccgttaattcaatngggtcaatagnctggttttccctggtggtggaaaatttggtttattcccgcttccacaaatttccnccaccanaccattaccgaatccccggnggagccnatnaaaggttgtcaaaangcccntggngggtngcccttaaatggaagtngaggctaanctccacaattaaatttggcgtttgccgncctcacttgccccncttttccaantncggggaaaacccctgttcggngcccanccttgccatttaaatggaaatccgggcccaacnccccccgnggaggaaggngggttttggngtnntttggggccgcttttttccccttttctttgntttaattgaacttcggctngnggcctncnggtccnttcgggttgccgggntnannccggtnttcaanttcaacttnaaaaaggccgggnaannacgggntnnttccncaagnattcanggg

SEQ ID NO: 6930 - DNA, 1262 bp, Homo sapiens
  misc_feature 2, 4, 7, 8, 11, 12, 17, 22, 24, 25, 33, 42, 44, 48, 52, 61,63, 66, 68, 70, 73, 77, 83, 87, 98, 103, 104, 105, 106,107, 112, 117, 220, 302, 333, 379, 401, 404, 423, 425, 427,430, 440, 445, 448, 463, 467, 482, 483, 497, 499, 506: n = A,T,C or G
  misc_feature 519, 537, 555, 562, 573, 587, 591, 596, 606, 622, 624, 625,626, 633, 636, 637, 639, 648, 654, 660, 666, 675, 687, 691,696, 725, 741, 748, 758, 773, 787, 792, 804, 830, 837, 843,853, 866, 868, 876, 880, 889, 899, 909, 911, 912, 914: n = A,T,C or G
  misc_feature 925, 936, 939, 945, 953, 962, 964, 988, 990, 996, 1002, 1003,1006, 1013, 1018, 1020, 1023, 1027, 1031, 1034, 1036, 1040,1048, 1049, 1053, 1054, 1055, 1056, 1078, 1081, 1083, 1096,1099, 1104, 1105, 1106, 1115, 1119, 1120, 1121, 1134: n = A,T,C or G
  misc_feature 1140, 1143, 1145, 1149, 1157, 1167, 1168, 1172, 1175, 1182,1184, 1187, 1193, 1196, 1198, 1201, 1205, 1207, 1208, 1211,1213, 1218, 1220, 1223, 1228, 1229, 1231, 1234, 1238, 1239,1245, 1249, 1253, 1256, 1260, 1261: n = A,T,C or G
gnanttnntgnnttgcnaaatntnnaattttgngatactgtnanattnatgnttttttgtnanttngngnttntgtntatttnttantatgagttgtngggtnnnnngatcnccatntagggcgaattggagctccaccgcggtggcggccgcccgggcaggtacgcggggctttcctagagtctctgaagccacagatctcttaagaactttctgtctncaaaccgtggctgctcggataaatcatgacagaacagttaatcctcaatttaagcctgatctaacccctagaaacagatatngaacaagtggaagtgacaacaagattgacantggaatgatgaaaattcatctgcgcaagctgcttggaaatgtttcntttgcagtctctcttctataanggncctagttgtatcattgggnangntanacaattttgnaaagnatnttgggtttgaaaacnagantcgcaagcctcgctnnaggggggattggtnanccgttcngggcccggctttnttaaaaaaaccttaagtngggtaattcccccccccnggggccntggcgaggggnaaattttcctattnattncaaangcctttaatnccgaaattaccccggncnnngaacccnttnngnaaggggggngggggncccccnggggtnaccccccangctttttttggngttnccccntttttaaggttggaaggggggttttaaanttttggccgcccgccntttgggnccgctaaaantccattgggggtccnataaaggccttggnttttncccctggtgggngaaaaaattttgtttatttcccggcnttcaacnaaaatntccccgccanctaaccatttccngnaaggcccngggnggaggccanttaaaaaggnggtaataaangnncntggggggggtngcccttaaatngangtgggnggccttanaacctttancnaattaaatttggctgtttggaggncnttaaanattggnnccngtttttncaaantncgngganaaanccntngttnggtggccnncttnnnnctttaaaatggaaaattgggcncancnccccccctggtanaanggccnnntttttttcnttannntgggggcggcctnttttgnctntnttcntaaatttnaactaaaatnncctnttnggggcantntgngtacantancntgncttngnntgntnaaacncnggnttttnntnctncatnntcaaantggngggngtnaatnng

SEQ ID NO: 6931 - DNA, 1200 bp, Homo sapiens
  misc_feature 3, 4, 6, 8, 9, 10, 12, 14, 16, 17, 18, 19, 21, 24, 25, 27,28, 29, 35, 36, 40, 43, 44, 46, 50, 51, 58, 67, 75, 77,81, 82, 83, 84, 85, 87, 89, 90, 91, 93, 95, 98, 102, 106,110, 111, 113, 114, 485, 501, 535, 537, 543, 574, 584, 600: n = A,T,C or G
  misc_feature 601, 608, 623, 631, 667, 723, 749, 760, 761, 788, 791, 808,812, 822, 835, 844, 845, 847, 848, 853, 856, 875, 900, 901,906, 907, 913, 915, 924, 928, 931, 966, 972, 979, 993, 1000,1003, 1007, 1010, 1011, 1015, 1023, 1025, 1026, 1042: n = A,T,C or G
  misc_feature 1043, 1052, 1055, 1062, 1067, 1076, 1078, 1085, 1095, 1097,1099, 1102, 1108, 1121, 1122, 1125, 1130, 1131, 1146, 1154,1156, 1157, 1161, 1162, 1165, 1170, 1176, 1177, 1179, 1185,1194, 1196: n = A,T,C or G
ttnnantnnnananannnntnaanntnnnaaatgnngaanttnnantttnnaatttgngataatttngttttttnantttnnnnntngnnntntnaantagngggntgtnntnnacgactcactatagggcgaattggagctccaccgcggtggcggccgcccgggcaggtacaatctgagggacctgaatcgctgcaccccagagggatggtcagaacatcgagtccaggaatacttcgagtgggcagcgcaggtggtgaaggggcttcagggaacaaaccggcaactggaagaggctctaaagcatctgttcaagcagcgggggctgacaatctgatcagtgcttgaagctatccagaggcacaactccagcctcgttcaggccggacaggattcataccgccatcttttctggtgttctcctgaagctccctccatcctttcccaagaatatttaggaggcccaaaaaaaaagacttggcantttttttcttcaagtnctggaaaggtccttcccttgcctaacctaaaagncntggaanccccccgccgttgggtgggggaaattccaanaattggttancccctccgggccccgnnttcttangaaaaccttaaggtngggaattnccccccccgggggccttggccaaaggggaaaatttncggaattattcaaaaggccttttatttcggaattaccccgttccggaaccctttcnggagggggggggggggccccccgggntaacccccaanncttttttgggtttcccctttttaaggnggnaggggggttaaaatttnggcngccgcctttnggcggtaaaaatncaattgggnncnntaagnccntgttttttcccctggtggnggaaaaaaattggtttatttcccgnntttcnnaaaaantncccacaacnaaanaantaccggaaacccgggggaagcctataaaaaggtgntaaaangcccttngggggggtgggccntaaaatnggngggnggnngccntaaacctncnncatttttaatttggcnntttggcgcntcnaattggncccgnttttccaangntcggggnaaaacccttntncnggnccaagnttggtaatttaanntgnaaatnngggccaaaaaccccncggggggngnnaggnnggnatttngcgttnntnggggcngcttttttncncttt

SEQ ID NO: 6932 - DNA, 1168 bp, Homo sapiens
  misc_feature 3, 4, 5, 6, 7, 9, 10, 11, 14, 15, 18, 19, 22, 23, 28, 30,31, 32, 35, 36, 37, 38, 39, 40, 41, 42, 45, 49, 54, 55,56, 58, 69, 71, 81, 82, 83, 84, 85, 89, 90, 91, 94, 95,96, 97, 102, 103, 108, 112, 118, 119, 120, 121, 133, 295,351: n = A,T,C or G
  misc_feature 430, 455, 485, 489, 506, 507, 523, 532, 550, 555, 561, 565,566, 568, 575, 576, 577, 578, 587, 592, 593, 595, 598, 600,604, 606, 614, 645, 654, 671, 673, 677, 681, 689, 698, 700,714, 719, 726, 729, 735, 738, 748, 762, 773, 774, 796: n = A,T,C or G
  misc_feature 798, 800, 802, 803, 804, 818, 837, 838, 839, 845, 855, 858,859, 860, 864, 867, 868, 875, 878, 881, 882, 884, 890, 892,898, 916, 918, 922, 928, 929, 935, 936, 939, 940, 944, 947,952, 958, 960, 961, 969, 970, 989, 991, 992, 993, 995: n = A,T,C or G
  misc_feature 996, 998, 1003, 1005, 1007, 1008, 1009, 1010, 1012, 1013,1016, 1017, 1019, 1029, 1030, 1035, 1038, 1040, 1044, 1045,1050, 1052, 1054, 1055, 1063, 1082, 1088, 1090, 1092, 1094,1095, 1098, 1100, 1117, 1123, 1133, 1135, 1136, 1139: n = A,T,C or G
  misc_feature 1142, 1145, 1146, 1147, 1156, 1162: n = A,T,C or G
tcnnnnntnnnttnnatnnttnnatttnannnctnnnnnnnngantatnttttnnngnttttttttttnanatttaacgtnnnnntaannnggnnnngattnntcagntagncgaatnnnnctccaccgcggnggcggccgcccgggcaggtacgcggggggagaaggaaggaggaagagcggaggccagggcgggctctaggcccgtggaatctggggccttaaagccccttcgtctccccagcacccactctctgggggcaggtgggcccggtgacaagtaaccttcaggganccctgaagaccatggaggactactgaccaaacaacctctggaccttcacccctctnggatgggggacgaaatcactaggccaaaggggaacaatgggaaggaagacaaaaatgggctgcctttacaagctgcagnaaagattgtgggaaaaccacctggnttcccctagggcacctccaatttgtctttncccngcccttttggggaagcnnttgaaaaaattaaaantaaaaggtngttgaaaaggggggaaancattngaccgntcannanaaaaaannnntttatatgntttannanaananaaangnttaccctntggggccccgtttcttaaaaaaccctaaggngggggaatntcccccccggggccttntnatgnaaantttcctantatttcaananggctttaattccgnattancccggtnccnaccccnttnaagggggggngggggcccccgggntacccccaaannttttttgtttccccctttttananangnnngggggggtataaantttttcccccccctttggnnngttaantaaaatgggncannnaaanttnnttttccnttntgnngnaaaatngntttttncctgttttaaaaattttncncccncaaaanntttacnnaannccgnggngcccntaaaangnngtttaaanncctcggggggtgggccccnannngnngnttggngncnnnncnnccnnantaatttttgnngtgtnggngnctcnncattngncnngtttttcnatatgcgggggaaaaaacnttgtcncntncnnacntnatttatatataaaaatnacctcntccccccccngnnaanggngcnnntttttttantatttnggaccc

SEQ ID NO: 6933 - DNA, 1255 bp, Homo sapiens
  misc_feature 2, 8, 9, 11, 12, 15, 19, 23, 24, 25, 26, 28, 34, 40, 42,45, 49, 50, 55, 60, 62, 71, 72, 75, 81, 82, 83, 90, 91,95, 100, 102, 103, 104, 106, 108, 115, 143, 180, 230, 268,302, 324, 335, 336, 342, 357, 364, 386, 395, 411, 480, 498: n = A,T,C or G
  misc_feature 526, 528, 546, 558, 559, 563, 573, 590, 593, 602, 606, 611,621, 627, 651, 656, 658, 660, 666, 676, 690, 691, 699, 746,747, 750, 751, 758, 761, 762, 764, 765, 783, 799, 800, 826,828, 850, 851, 852, 854, 857, 872, 885, 890, 896, 898: n = A,T,C or G
  misc_feature 905, 907, 908, 910, 911, 915, 918, 919, 924, 932, 938, 939,948, 960, 964, 975, 976, 987, 989, 992, 994, 995, 1022,1023, 1024, 1025, 1029, 1030, 1041, 1048, 1051, 1056, 1057,1063, 1065, 1066, 1069, 1078, 1089, 1093, 1094, 1099, 1105: n = A,T,C or G
  misc_feature 1112, 1117, 1124, 1127, 1129, 1142, 1144, 1154, 1161, 1166,1174, 1184, 1197, 1198, 1199, 1204, 1209, 1216, 1221, 1225,1226, 1232, 1235, 1237, 1241, 1242, 1252, 1253: n = A,T,C or G
ancttttnnannttngaanattnnnntnatgttnaatttnanatnattnnatatntgatntnggaattgannttnttttannnttatttnnttgnaagangnnntncntcgactnactatagggcgaattggagctccaccgnggtggcggccgcccgggcaggtacgcggggatattantgcatttctttgcagaggttacctctttttcttgtctctcgtcaggtctntgacattgacagagcctggacgttggaggaagccccangacgttggaggggtaaagtaaaatgtccacagtnccccgttgagagaaaacaaganggtggaaagcnntgcacncaaaacttgtgaaanaaaaganaggaggaaaaggactcgacttntcacattgnaacaaccctttctttncagtgctaaaaggggattctcttgatcttgggggaaaccaaacaccccttggaacattgggttccccanaagaatcaaatctttggnccgggggcccccaaattggaggcccttnanttttgattaaaccacttnatagggggccanncctngggttggggnttgaaaattcccaaggnaancctttttgnaaangcaantcccttattntttggnaaattttacccgcccatccctttntttgngntnggttgnggtttgggcntaaaattttggtannggggcccntttcttaattttggaaaccaaggggcaaaaaaatccttaaccccttnnatnnaaaaacnaanngnnttggtccttgggggaaangaaaaaaaaacggggnntttgtttcttttttaaggggttaccnancaggtgtgggaaaatttttttnnnanccnaatgggggaaaattncttggtatttgtngggtntttgtngnccctttnannanncccngannaaaanccccaaanaaaaannccccccttnaatattattggnattntaaaccccttnnaaggtcccctncngcngnnaaattttttattataaaggggggggtnnnnactnnagaaaaattcnaccctcnttngggtnncttttngnnccntttgggcgnaaatccccttnttgnnaaaanattganaactttntcctntaacccnttntngtcgggttatttntnaaaattttangggggtnttccnccaatggnccttgtatangaaaatttttggnnnttggnacccntttatcnccaanaccnnttttanccncnttgnngggggggggnncg

SEQ ID NO: 6934 - DNA, 1148 bp, Homo sapiens
  misc_feature 3, 4, 5, 6, 8, 9, 11, 12, 13, 14, 15, 16, 17, 19, 20, 21,22, 23, 24, 25, 26, 27, 28, 29, 30, 31, 32, 34, 37, 38,39, 40, 42, 43, 44, 45, 46, 47, 48, 49, 50, 52, 53, 54,56, 57, 58, 59, 60, 61, 62, 64, 65, 66, 67, 68, 70, 71,72, 73: n = A,T,C or G
  misc_feature 74, 76, 77, 78, 80, 81, 82, 83, 85, 86, 88, 89, 90, 91, 92,93, 95, 96, 97, 98, 99, 100, 101, 102, 103, 104, 106, 107,112, 113, 115, 117, 118, 120, 144, 157, 216, 513, 635, 637,652, 653, 698, 723, 821, 846, 870, 883, 886, 894, 898: n = A,T,C or G
  misc_feature 905, 918, 919, 941, 951, 955, 958, 960, 967, 972, 983, 995,1006, 1010, 1015, 1020, 1024, 1028, 1029, 1034, 1045, 1046,1047, 1050, 1058, 1062, 1071, 1073, 1078, 1081, 1089, 1092,1093, 1099, 1104, 1106, 1107, 1110, 1113, 1115, 1116: n = A,T,C or G
  misc_feature 1123, 1129, 1138, 1139, 1140, 1143, 1148: n = A,T,C or G
aannnnanntnnnnnnntnnnnnnnnnnnnnntnttnnnntnnnnnnnnnannntnnnnnnntnnnnntnnnnnannngnnnntnntnnnnnntnnnnnnnnnntnntaggnngncnncnttatacgactcactatagggcgantcggaactggcanctccaccgcggtggcggccgaggtacttatatcttttggtcttgggcttctcaaagttnacgacagacataggcactctcacagtatcaagcccatttaccgtcacctcacaccaatactcgccccaccgtgtggtaggctctgctggtaactttaatgtatgtggggcaaccacaacaccaagattcttaaagaagtggcgggcaactatttcagggttcagctcccatttgacattgttcttcatccctacctccagggcgacagctttttaagaaatttcactgtcgcctcacctgccttggtcctgggatcttctcttaattttccttcttggtctcaagcaccccgcggtnccctgcccgggccggccgctcttaataaactaggtgggatcccccccggggctgcaaggaaatttccgattatcaaagccttatcgataccccgtcggaccctcgaagggggggggcccggntnccccaagcttttggnntcccctttaattgaaggggttaaatttgcgccctttgggccgttnaaatcattggttcattaagcttgtntttcctgtggtgaaaaattgttatcccgcttcaacaaatttcccacaccaaacaataccgagcccgggggaggccataaaaagtggtaaaaagccctnggggggtggccctaaaatgggaggnggaagcctaaacctccaccatttnaatttgcctgttnggncgccttcncctnggccccngcttttttccaanncgggggaaaaaaccctggggcntgggcccaancttngcnanttaaatnaaaantcggcccaaancccccccgaagntaaaaaaaggngcgnttttncatanaatntggnntcccnacatttacccnnnttngggtttgnttcncatggaaananaaaantgngcttcggngtnnaaatgngggcntnncanaangnncccgggnattccnctttaaaannnganggggn

SEQ ID NO: 6935 - DNA, 878 bp, Homo sapiens
  misc_feature 417, 458, 478, 517, 528, 557, 571, 588, 608, 611, 624, 632,652, 654, 656, 658, 674, 683, 697, 705, 708, 712, 722, 738,746, 749, 756, 760, 767, 775, 802, 805, 813, 825, 832, 833,834, 839, 846, 865, 871: n = A,T,C or G
tccccgcggtggcggccgaggtactccaggatggcctcacgctcatacaggtagccatctggggtgacaacaggatcgtggcaaggctgcagggagagacaacagcagtcgaagtccttcacggcatcccggctcagtcgaatgttctgggtcccatagcccgaggccgctgtgtccttcttcttctcgtggtaggtgtagacggcccctgcggtgcagttcttgccatgccgcgtcatcctcactaacgactcccagtccctcggtcgcttcttcaactgtgccccgcgtacctgcccgggcggcccgaggtacctttcctgattttttttgtctaagcacatttaaaaaccaagacttttggttttgagcgatagctctgaatctcctttaaggtatgaagtgtaggaaattgtntttctgcagcaaaacttaggcttttgcaacatcaaggtgtnggattcactgggaaaaattntttttaaagtaaccacattaggcgaatccaataataagnccaaaaaaaanggttggggaaaattgaaaaaaaaggggtnggggtttttttttnaatttaaaaaaaaaaanttttttttttttttaaaganaanaagggttttttcngtttccantcaccccagggattggggantnancntgcccggggcgggccngtttcaatntggggctttcgtgnaaagcttnatncaancccattaaanccccaagtttgcttcnatttgggncgnaaaaaanaaangggttcnagggttcntttcccaagggggttaaagggagggcnttnaaagggantaccgtttgggnaaagaannntttgngggggcnaaaaagggggggggatttnaaatancccttta

SEQ ID NO: 6936 - DNA, 1212 bp, Homo sapiens
  misc_feature 1, 3, 4, 6, 9, 10, 17, 23, 26, 27, 28, 32, 33, 34, 44, 46,47, 48, 50, 52, 55, 56, 59, 61, 67, 73, 74, 75, 78, 81,83, 84, 85, 96, 101, 111, 116, 237, 256, 300, 301, 312,344, 359, 466, 478, 484, 490, 500, 527, 532, 549, 581, 585: n = A,T,C or G
  misc_feature 587, 606, 622, 626, 627, 634, 672, 674, 685, 686, 690, 691,696, 698, 699, 708, 711, 715, 720, 727, 731, 737, 747, 754,760, 765, 772, 773, 785, 792, 807, 808, 809, 814, 824, 834,838, 853, 854, 867, 868, 869, 877, 879, 882, 889, 893: n = A,T,C or G
  misc_feature 905, 909, 914, 924, 925, 929, 930, 934, 941, 953, 965, 974,982, 1001, 1016, 1033, 1046, 1049, 1051, 1057, 1060, 1061,1065, 1068, 1069, 1087, 1091, 1092, 1100, 1110, 1113, 1118,1121, 1133, 1141, 1142, 1155, 1159, 1162, 1166, 1167: n = A,T,C or G
  misc_feature 1168, 1173, 1186, 1189, 1190, 1192, 1194, 1195, 1200, 1201,1206, 1209, 1210: n = A,T,C or G
ntnntnatnnatatggnaaattnttnnnttgnnnaattaatagngnnntncnaannatnantttganaacatnnnttnttntnnnatgtattggtntttgnataccacttntattnggcgaatggagctccaccgcggtggcggccggcaccttggccgcgttcagagtgccgatgagctcccccagactctgcttccgcccgttcatcttccagttttcccccaacgaagaacttnctggagggcagccatggcnctggagccgaggcgctgaaggtcagtgtctgccccgcgtacctnnggccgctctanaactagtggatcccccgggctgcaggaattcnatatcaagcttatcngataccgtcgaccttcgagggggggggcccggtacccagctttttgttccccttttagatgatggggttaaattggcgccgcttttgggcgttaaatcatggggtcnataaggccttgnttttcnctggtngttgaaaaantttgttttattacccggcttccacaanattcnccaccaaccaaacaatnaccgaaagccccggggtaagccaattaaaaanttgntnaaaaaggccctgggggggntggcccttaaaattgnaagnnggaaagncttataaccttcaaccaattttaaaatttgggggtttngncggccttcaannttgnnccccngnnttttttccnaanttcntgggnaaaaacncctnggtctntggcccaatncttggcnatttanaaaanaaaattnnggtcccaaaacncccccgnggggaaagaaagggnnnatgtntttgccgttnattttggggnccgnccttctttttccggnntttttcctttggnnntcaacctngnaantttcggnttgncggccttcgggnactntttcngggcatttgnngccnnaagncggggtntttaaacctttnaatttcaaaaangggcggggnaaaattancggggttatttccccaagnaaattcaggggggantaaacccctagggaaanaaaaaccattttntancnaaaaantgnnccanttnnaaaaggggccacgggaancccnnataaaaangggccccgtnacnttggnccntatttttaccanttagggtnntcccgcccccctnttgnacngggnnnttaanaaaaaaaatttgnccnncntnnaaatnntcaanggnngg

SEQ ID NO: 6937 - DNA, 1166 bp, Homo sapiens
  misc_feature 2, 10, 11, 19, 23, 25, 26, 27, 29, 30, 32, 35, 42, 45, 47,49, 52, 54, 56, 60, 61, 62, 63, 64, 68, 71, 75, 80, 83,84, 88, 89, 95, 96, 97, 98, 99, 100, 101, 102, 103, 106,107, 111, 116, 117, 120, 127, 129, 135, 401, 514, 518, 546: n = A,T,C or G
  misc_feature 550, 559, 624, 631, 672, 704, 722, 733, 739, 752, 788, 799,823, 834, 878, 882, 901, 914, 945, 952, 956, 958, 977, 981,984, 985, 1000, 1006, 1010, 1016, 1017, 1025, 1034, 1044,1050, 1069, 1071, 1079, 1099, 1101, 1106, 1117, 1124: n = A,T,C or G
  misc_feature 1146, 1151, 1153, 1154, 1157, 1159: n = A,T,C or G
tngctggatnnggatttcntttntnnntnntnttnttttganttntntnatntnanattnnnnntatntangganattangtnntttnngggaannnnnnnnnagnnaggnattgnnatntaactantnactatngggcgaattggagctccaccgcggtggcggcccgaggtacttgcaatggggccaccatgttttctcccattagccagccccattcatcatggatgctatgagtcagccagggggcaggcttgccatgggttttgtgacacccccatccaaagctcaccatgttgcatcccgcccattgtctgtgggaccccaagtttctagccatgtccagttcttcacaaaagctggatgcacatgccaaggcaagccatccacagcttgctgcntggaagggtggtgcagatctaacagttggagacattgggcccaccctcagcataagggtgtgaagccccaagtccacaatgtttgttgggaagccatgccaaccctgtgggcntgangcaaaataaacctccccaaagaattttnggcnaggaacaanttacccgggccccttggggacccctttgggaattttaatttggatggggccccaaacttggcaancacttgnccaaaaaatggccttgttcaaccaaaggaaaggggggccancccaccccaactttcttaaaaattcttcattnccctggatggacctaacnaccccaaattnattcangggttttcaaagnccccccaaacttgaaggttcttgaaaggaaaaaagntggggttttgnatttaaggggggccaaggggaaancttgggaaagnaaacaactttgggggaggaacaagccaagggttaataattgaanaaancaccgggctttttaatttnaaaacccccccgncggttaccctttggggccccggtttcttaanaaacctnaagntngggaatccccccccggggncttngtnngggaaattttcgaanatttcnaaancctttnntccggaanaccccggtnccaaaccctnccaatngggggggggcccccgggtnanccccaacnttttttggttcccccttttnantgggngggggttaaantttgccnccccttggggggtaaaaaaatngggcnannaancntgttttc

SEQ ID NO: 6938 - DNA, 1174 bp, Homo sapiens
  misc_feature 3, 4, 7, 12, 13, 14, 15, 16, 17, 20, 22, 25, 26, 28, 29,33, 34, 35, 37, 39, 40, 41, 44, 45, 46, 47, 49, 50, 51,53, 54, 56, 57, 59, 61, 62, 65, 69, 70, 72, 73, 74, 77,78, 79, 80, 84, 86, 87, 88, 90, 91, 93, 98, 99, 100, 104,106: n = A,T,C or G
  misc_feature 118, 424, 535, 555, 568, 592, 616, 620, 677, 702, 705, 734,741, 751, 771, 773, 780, 796, 803, 824, 844, 903, 909, 918,929, 942, 959, 961, 975, 976, 983, 990, 996, 998, 1002,1014, 1021, 1028, 1031, 1034, 1051, 1054, 1074, 1075, 1078: n = A,T,C or G
  misc_feature 1080, 1084, 1086, 1094, 1095, 1101, 1102, 1105, 1110, 1120,1142, 1145, 1150, 1151, 1152, 1154, 1160, 1167: n = A,T,C or G
tgnnttnttaannnnnnaantntgnnannttgnnntntnnnaannnntnnntnntnnantnnttnaatnntnnnttnnnnaatntnnntnntngtaannngggntnttcgatcattanggcgaattggactccaccgcggtggcggccgaggtacacccagtgtcttaggcgggccaagcctagcactgtgggagcaaaaaacatggcttcatcgtcagggtgcgctatgaccagcagggtccggctttcggctcccagccgtcctccctgctcccgactcttcattcgttctgaggagtcccaaacccagaggaagccccatgccaagacccgccaacgccacacacaggagccacattgcttccatgatgggtaaagcccccgcgtacctgcccgggcggccgctctaagaaactaagtggnatcccccgggctgcagggaatttccgatatcaaagctttatcgataccgtcgaaccttcgaaggggggggggcccgggtaccccaggctttttggtttccccttttaggtngaggggtttaaatttggcgncgccttgggccgntaattccatggggtcataaggctngttttccttggtggtggaaaattngttnattcccgcttccacaaatttcccaaccacaaaaccattaccgaaagccccgggggangccataaaaaggttgttaaaaaagnccnttgggggggttggcccttaaattggaagntggaagncctaaacttncaccaattttaattttggcngntttggcngcccttcaaacttggnccccgcntttttccaaagttccgggggnaaaaaacctttggttcggtnggccccaaaccttggcaatttaaaattggaaaattcggggcccaaacccaccccccggngggaanaaaggcccnggtttttggcngttaatttggggnccgcttttttttcccgntnttcctttgggtttnnacttggnaattttngctttncncgcntttgggggtcgntttcccnggttttngcnggncaaaaaccggtttattnaanccttaacctccaaaaagggnnggntnaatnancgggtttnnttccannaanaaatncaggggggtntaacccctgggaaaaaaaaacntanttggnnncnaaaaanggccccnagcaaaa

SEQ ID NO: 6939 - DNA, 1074 bp, Homo sapiens
  misc_feature 4, 6, 9, 10, 11, 12, 13, 17, 18, 20, 21, 22, 23, 24, 25,26, 27, 28, 29, 30, 31, 32, 33, 34, 37, 38, 39, 40, 41,42, 43, 44, 45, 46, 47, 48, 50, 51, 52, 53, 54, 55, 57,59, 60, 61, 62, 63, 64, 65, 66, 67, 68, 69, 72, 73, 76,77, 80: n = A,T,C or G
  misc_feature 81, 82, 83, 84, 85, 88, 90, 94, 95, 96, 100, 102, 104, 105,106, 107, 108, 117, 118, 513, 562, 564, 566, 567, 568, 569,572, 592, 607, 617, 668, 678, 679, 685, 735, 740, 755, 757,769, 782, 804, 808, 818, 820, 835, 839, 856, 874, 875: n = A,T,C or G
  misc_feature 876, 881, 901, 902, 923, 929, 935, 959, 961, 970, 975, 977,985, 998, 1005, 1015, 1016, 1018, 1024, 1047, 1051, 1060,1068, 1069, 1074: n = A,T,C or G
cccncnccnnnnngttnntnnnnnnnnnnnnnnnatnnnnnnnnnnnngnnnnnntnannnnnnnnnnntannaanntgnnnnnnttntnaatnnngggnancnnnnncgtaatacnnctcctataggcgaattggagctccaccgcggtggcggccgaggtacctgtctataaggagtcctgcttatcacaatgaatgttctcctgggcagcgttgtgatctttgccaccttcgtgactttatgcaatgcatcatgctatttcatacctaatgagggagttccaggaggttcaaccaggatgtttctacacctgtgggttatgacaaagacaactgccaaagaatcttcaagaaggaggactgcaagtatatcgtggtggagaagaaggacccaaaaaagacctgttcctgtcaagtgaatgggataatctaatgtgcttctagtagggcacaggggcctcccaggcccaggcctcatttctcctctgggcctctaatagtcaatgaattgngtaagccatgccctatcaagtaaaaaaggattttttggaaatgaaaaanantnnnnaanaaaaaattagggtacccttngggcccgcttctaanaaacctaggngggaatcccccccgggcctggcagggaaatttcgatattcaaagctttatnggatacccgnngacctncgaggggggggggccccggtacccccaagctttttggtttcccttttaanggganggggttaaattgccncnccttgggccgtnaattcattggggnccataagccttgttttccctgngggngaaaaattgntntattcccgcttccancaanttttccccaccaaacanttaccgaagccccggggnnncattnaaaagtggtaaaaagccccnnggggggggcccttaaatgganggtggngccttnaacctcccccatttaaatttgggngntgggcgccntcacntngcccccgntttttccaagttncgggggnaaacccttgnngngggccnaccttggcatttaaatggaattngggnccaacgccnccgggggnnggggn

SEQ ID NO: 6940 - DNA, 1193 bp, Homo sapiens
  misc_feature 1, 5, 7, 15, 23, 25, 30, 36, 44, 45, 48, 49, 51, 60, 68,76, 77, 82, 85, 87, 90, 94, 95, 97, 104, 106, 116, 117,123, 321, 328, 336, 347, 370, 375, 459, 460, 491, 504, 507,514, 540, 558, 565, 583, 585, 588, 599, 605, 627, 654, 658: n = A,T,C or G
  misc_feature 667, 673, 692, 705, 727, 728, 736, 742, 757, 769, 793, 804,813, 818, 821, 827, 828, 829, 830, 836, 848, 855, 859, 868,869, 878, 894, 901, 902, 906, 907, 909, 921, 933, 941, 944,946, 947, 949, 953, 957, 962, 964, 965, 975, 978, 986: n = A,T,C or G
  misc_feature 1010, 1012, 1030, 1035, 1057, 1065, 1067, 1072, 1073, 1081,1095, 1097, 1103, 1104, 1105, 1117, 1118, 1121, 1122, 1123,1126, 1134, 1137, 1148, 1161, 1163, 1168, 1169, 1170, 1171,1173, 1174, 1182, 1185, 1186, 1189, 1192: n = A,T,C or G
ncggngnattttttnaaaattgnantttanagattnaatattcnnttnnanttctgtttnattttatntgttaatnntattnttntnatnaggnngntgaaatnancatatagggnnaattgnatctccaccgcggtggcggccgaggtaccggaatcttgctaggggtaggagatacaccccggaggaggggatccttcgtggcttgccgggtggtcatgatggcttaccgaggcccctcagggcctacccagcttcctccgcttttctcctgaccctctcgggtgctgctggagctactttctcagtttgtaaaatacnccaagcncttgattnggcccccccgncgtacctgcccgggccggcacgntctanaactaggtgggatcccccgggcttgcagggaattcgatatcaaagctttatcgataccgtctgacctcgaatggggggggcccnnggtaccccagctttttggtttccctttttangtggagggggatntanatttgcngccgcctttgggccgttaattcattngggttccattaagcctgntttttcncctggttgttggaaaaantntgntttattgcccnctttcnacaaatttttcccccaaccaanccattaaccgaaagccccgggggaagnccantaaaaaagntgttanaaaggcccttgggggggtnggcccctaaaatngaagttggaggccttaaacttnncaccaatntaaaanttggccgttttgcgnctttcaacttgnccccccggctttttttccaatttncgggggaaaancccttgggnccggnggnccccannnnttggcnttttaaatttgnaaattcngggnccaaaacannccccggggngaaagaaaaggcccgngtttttnngccnntnttttggggggcngccctttttttncgcttttnacntnngnttcnactngaacntnngaatgggggnttntgggtcantttccggctttgcgcgaattaaancnggtttttcaatatttgcncctancaaaaggggcggggtaaaaaancggggttntntcccnnccaagaanattaaggggggaananaccccnnnggaaaaaaaaannttnnntgnggccaaanaangggcccaattnaaaaaggggccangnaaccnnnntnnaaaaaggngcnnggnttng

SEQ ID NO: 6941 - DNA, 1159 bp, Homo sapiens
  misc_feature 1, 3, 5, 8, 9, 10, 11, 12, 14, 15, 16, 21, 22, 23, 24, 25,27, 32, 36, 37, 38, 40, 41, 42, 44, 45, 46, 47, 50, 52,53, 54, 55, 58, 59, 60, 62, 63, 65, 66, 70, 72, 74, 75,78, 80, 81, 82, 83, 84, 85, 86, 88, 93, 97, 99, 100, 102,206: n = A,T,C or G
  misc_feature 495, 529, 561, 595, 596, 643, 646, 647, 729, 752, 758, 777,782, 801, 815, 819, 824, 826, 854, 870, 880, 882, 889, 894,919, 920, 932, 972, 983, 993, 1001, 1016, 1024, 1057, 1059,1064, 1072, 1074, 1078, 1082, 1083, 1084, 1088, 1098: n = A,T,C or G
  misc_feature 1107, 1112, 1114, 1115, 1122, 1127, 1137, 1138, 1143, 1145,1148, 1149, 1154: n = A,T,C or G
ntntnaannnnngnnnttttnnnnntnttaanttgnnnannntnnnnatntnnnnatnnnanntnngaantngnntantnnnnnnngnaggtnggcnanncnatcactatagggcgaattggactccaccgcggtggcggccgcccgggcaggtacctgaaacgccctcctgagtctcctccaattgttgaggaatggaatagcanagctggtgggaaccaaagaaacagaggcaatcggttgcaagacaacagacagttcagaggcagggacaacagatgggggtggccaagtgacaatcgatccaatcagtggcatggacgatcctggggtaacaactacccgcaacacagacaagaaccttactatccccagcaatatggacattatggtttacaacccagcggccttccttaccggtttacttactgaatagaaaatgtttggccagctttttaagtaaaaaagccattttactcttgtttacccaattgnagaaaaagtttgggtggtcttctgttgggttcantaagttttttacatctggatttttttaccagnaatggggattaatttggatttttttttgggaaannttggaagactttttaaaaaaaaaaaaattaggaatcctttacctttngcnnaaaaaatgccgattggggtttggccttgggggaaattacccctgggaaaacctgggtggggaatttattatttgggcttttnggaactttcttaaccctttcaanaaaatnctttcctttttggtttttncaatngaacctttaaaatagggtnggctttttaaaggntttngggtnanttatttaatttttgggacccttttttangggaaatttctttttngtttttttancncccaggnaaaantaaaaaaatttttttaaaaaattannaaaaaaattgcnttttttaacttttttggtaaagggggtaaaaaaaaaaagnttttccccatnttgccttttnaaaaatgntgcccccggtttttnttaaaaanttttttaaaaggggtttggaattttaaaatccngnctttnatgggaantnggcnccannntttngccttttttnggggaaaanaattngnnacctttnggccngggtttttannaaaantnagnngggtnccccc

SEQ ID NO: 6942 - DNA, 1171 bp, Homo sapiens
  misc_feature 1, 2, 3, 4, 5, 10, 12, 13, 15, 16, 17, 22, 23, 24, 25, 26,27, 31, 32, 33, 35, 36, 37, 38, 39, 40, 42, 43, 44, 45,47, 48, 51, 52, 55, 57, 58, 61, 62, 65, 67, 68, 69, 71,73, 74, 78, 79, 80, 82, 83, 85, 87, 89, 91, 93, 95, 96,97: n = A,T,C or G
  misc_feature 99, 100, 102, 104, 106, 107, 109, 112, 113, 117, 118, 121,146, 219, 310, 476, 572, 574, 625, 641, 648, 651, 658, 685,686, 723, 739, 743, 746, 748, 752, 775, 784, 789, 806, 807,809, 816, 825, 831, 839, 860, 868, 870, 872, 881, 882: n = A,T,C or G
  misc_feature 886, 889, 897, 898, 900, 919, 931, 933, 934, 938, 951, 952,982, 984, 988, 1019, 1026, 1033, 1045, 1047, 1060, 1065,1069, 1087, 1096, 1098, 1110, 1111, 1114, 1119, 1120, 1139,1149, 1152, 1154, 1155, 1166, 1169: n = A,T,C or G
nnnnnggctntnntnnnttttnnnnnnaatnnngnnnnnngnnnntnnttnntananngtnntanannntnanntgtnnnanncntntntntnannnanntntnannanganntgcnnatncgactcactatagggcgaattgganctccaccgcggtggcggcccgcccgggcaggtacgcgggtgagattaaaaacaaggaagcagagaatggtcanagaatgggattcagattgggaacttgtggggatgagagtgaccaggttgaactgggaagtggaaaaaggagtttgagtcactggcacctanaagcctgcccacgattcctaggaaggctggcagacaccctggaaccctggggagctactggcaaactctcctggattgggccttgattttttttgggtgggaaaggctgccctggggatcaactttccttctgtgtggtggcctcaagggagttctttctgccagnagaatggccgcctatcttttcctccctccctgttgatgtccttgcttccccaacccaattttgttaccctccgggcccgcttcttagaaacttagntngggattcccccccggggccttgccaagggaaatttccgattattcaaaagnctttaattcgaattancccggtncgnacccttngaaagggggggggggccccccgggttnncccccaagcttttttttgtttccccctttttaagttngaaggggggtttaaantttngcngnccgnctttggggccgtaaaatccaatngggtccatnaagcnttggtttttcccttggnngnggaaaanttttgtttnttcccngccttcancaaaatttccccccaccaacnattacctnangncccgggganngccnttnaaaagttnntnaaaagcccttggggggtgnccctaaattgangnngaanccctaaacctctnnccatttaaattttggctttttgggcgcctncncttncccccgcttttttccaaatttgggggaaaanacccttntcgggtngcccaaacttgnantttaaattgaaanccggncccnaacccccccccggggggngaagggccngnttttggcgttanntgnggggnnccttttttccccctttccntggtttaaantgnanntcccttggggnctncg

SEQ ID NO: 6943 - DNA, 1106 bp, Homo sapiens
  misc_feature 1, 2, 4, 6, 7, 8, 10, 11, 12, 13, 14, 15, 17, 18, 19, 21,22, 24, 25, 26, 27, 28, 29, 30, 31, 32, 33, 34, 35, 36,38, 39, 40, 41, 42, 43, 44, 45, 46, 47, 48, 49, 50, 51,52, 54, 55, 56, 57, 58, 59, 60, 61, 62, 63, 65, 66, 67,68, 69: n = A,T,C or G
  misc_feature 70, 72, 73, 74, 75, 76, 77, 78, 80, 81, 82, 83, 84, 85, 86,87, 88, 92, 95, 96, 97, 98, 99, 101, 102, 103, 105, 106,107, 108, 109, 110, 111, 114, 196, 558, 605, 650, 658, 664,669, 679, 680, 681, 696, 704, 706, 720, 722, 729, 734: n = A,T,C or G
  misc_feature 740, 744, 748, 749, 752, 757, 758, 759, 764, 774, 778, 784,793, 795, 805, 819, 820, 828, 829, 831, 845, 861, 863, 867,870, 872, 897, 911, 912, 913, 915, 921, 926, 939, 941, 945,953, 975, 980, 983, 985, 1005, 1007, 1009, 1014, 1021: n = A,T,C or G
  misc_feature 1023, 1025, 1028, 1038, 1041, 1049, 1050, 1051, 1052, 1054,1058, 1059, 1060, 1061, 1064, 1069, 1075, 1083, 1088, 1090,1097, 1098, 1100, 1102, 1105: n = A,T,C or G
nntntnnntnnnnnntnnngnntnnnnnnnnnnnnntnnnnnnnnnnnnnnntnnnnnnnnnntnnnnnntnnnnnnntnnnnnnnnngtgnagnnnnnannntnnnnnnnctnatataggcgaattggactccaccgcggtggctggatttctcaactttcttggttttctggtagccaaatccaccaccacctnctcgctttttctgcttgccttcattaccccgcgtacctcggccgctctagaactagtggatcccccgggctgcaggaattcgatatcaagcttatcgataccgtcgacctcgagggggggcccggtacccagcttttgttccctttagtgagggttaattgcgccgcttggcgtaatcatggtcatagctgtttcctgtgtgaaattgttatcccgctcacaattccacacaacattacgagcccggggagcataaaagtgtaaagcctgggggtgccctaatggagtggagctaactcacattaattggccgttgcgctcaactgcccgcttttccaagtgcggggaaaacctggtccggngccagcttgcatttaatgaaatcgggcccaaacgcccccgggggaangaaggccggttttgccgtatttggggccccttcttttccgctttncctttggnttaaantgganttcggcttgnnncctccgggtcctttncggctttncngggcaaaacccggntntttcaancttcncctccnaaangggnnggntaaannncccgnttttttcccnaaanaaaatntaggggggngnaaaacccccnggggaaaaaaaaanntttgtggnncnaaaaaagggccccngccaaaaagggccccngnaaanccntnaaaaaaaaggcccccctttttttgnggcccttttttttnnnanaagggngtccnccccccccttggngngggntttttacnaaaaaaatttccccccccccanaattnaangnggggggggggaaaacccccncngnggggntttttanananaancccccggggnttnttcccccnnnngnaaannnnctnttggngccccntttttttngttcncnccccccnncngnttnt

SEQ ID NO: 6944 - DNA, 1081 bp, Homo sapiens
  misc_feature 3, 4, 5, 7, 9, 13, 15, 16, 19, 20, 21, 22, 23, 25, 26, 27,28, 29, 30, 32, 33, 34, 35, 36, 37, 38, 41, 43, 44, 45,46, 47, 48, 49, 50, 51, 52, 53, 55, 57, 60, 62, 63, 64,66, 67, 68, 69, 72, 73, 74, 75, 76, 77, 78, 80, 81, 82,85: n = A,T,C or G
  misc_feature 87, 88, 89, 90, 91, 93, 94, 97, 98, 103, 108, 110, 114, 115,135, 145, 336, 385, 507, 508, 527, 546, 564, 586, 662, 690,691, 717, 739, 748, 761, 868, 889, 891, 904, 905, 973, 974,986, 989, 991, 992, 1002, 1018, 1023, 1051, 1066: n = A,T,C or G
  misc_feature 1069, 1071, 1078, 1079: n = A,T,C or G
ccnnngnanaatnanntannnnntnnnnnntnnnnnnnttntnnnnnnnnnnntnanatnannntnnnnaannnnnnntnnngantnnnnnannagnnaaganaattngnaatnnatcatataggcgaattgganctccaccgcngtggcggccgcccgggcaggtacagatgagaacagcttacatgaacctatgatgaagaaagccacggaaatcaattcatcatgcccaccagcagaaaataatatgtctgttctgattcctgataggacaaatgttggggaccagataccggaagcccatccttccactgaagctccagaacgagtgggttncaatccaagatcacagcttttccatcagaaaccctcagtgggggacggngggcagattccacaccagctcacttccagactgatcttttgcacccagtttcaagtgatgttcctacctaagttcctgactgcttaagacaaaagtcattaggattatgttccaagggcatnnttcccaagaaaaacagttntacaaatccaattaccatntcttgggaccaccaagtngaataaagctggaggtaccctncggcccgctctaagaactagtgggatccccccggggctgccagggaattcgattatcaaagcttatccgataccgnccgacctttgaggggggggggccccggnnccccaagcttttggttccctttttantgaagggtttaatttgccgccncttgggcgnaaattcattgggnccattagcttgttttcccttggtggtggaaaaattggttattccccgccttcacaaatttcccaccaacaaaccattacccgaagccccggggagccatttaaaagnggttaaaagccctgggggggngnccttaatggaagnngaagcctaaacctcacaatttaaattttggcggttggcgcttcaacttggccccgttttttccaagtnnggggaaaaaccntgntnngggccccagnctggcccattaaaatngaaanttcgggcccaaaccccccccgggggaanaaggcccggtttttncgntnatttggnnct

SEQ ID NO: 6945 - DNA, 1157 bp, Homo sapiens
  misc_feature 1, 2, 3, 4, 5, 6, 7, 11, 13, 14, 16, 18, 20, 23, 24, 25,27, 30, 34, 35, 36, 37, 39, 40, 41, 43, 46, 48, 50, 52,54, 56, 57, 59, 65, 69, 70, 74, 75, 79, 80, 84, 85, 86,87, 88, 90, 92, 94, 98, 103, 110, 116, 118, 119, 127, 158,160: n = A,T,C or G
  misc_feature 173, 211, 225, 374, 378, 438, 464, 467, 496, 500, 529, 542,571, 598, 608, 623, 672, 678, 697, 712, 717, 736, 750, 756,787, 800, 801, 813, 816, 844, 862, 863, 864, 868, 872, 907,912, 913, 922, 925, 933, 935, 938, 944, 945, 955, 980: n = A,T,C or G
  misc_feature 988, 989, 999, 1006, 1028, 1045, 1046, 1054, 1066, 1076,1093, 1095, 1107, 1108, 1110, 1140, 1146, 1156: n = A,T,C or G
nnnnnnnggananntnantnaannnanttntttnnnntnnnantanantntnantnntnataatnatgnnttannattnnatcnnnnnantntnagtnagtanagcatanataatntnntttactanttggctaattggaatctccaccgcggtggcngntcgaggttacatnaaaaaatccaggtttgtggaagtcgcgttctttacatntgggagcggggctngtcccagcatcaggcgcagcagctgcacttgtccgacgcccctttgcagatgcagccctgggcacacttggcacagcccacagggcagcaggagcagcagcttttcttgcaggaggtacctgcccgggcggcccgctctaagaactagngggnatcccccgggcctgcaggaaattcgatatcaaagctttatccgatacccgtcggaccttngagggggggggccccggtgaccccangcnttttgtttcccttttagtggaaggggttnaatntgccgccgccttgggcgtaaattcatggntcataagctggtnttcctgttggtggaaaaattgtttattcncgcttcacaaattccacaacaacaatnaccgaagccncgggggagccattanaaaagtggtaaaaagccctgggggggtgcccctaattgaagtggagctnaaactncaccatttaaatttgccgnttggcgccttcaacntggcncccgcttttcccaagtccngggaaaaaaccctnggtcgntgcccaagcctggccaatttaattggaaatncggggcccaaacnnccgccggggggnaanaagggccggggttttggccgttatttgngggccgccttcttttccnnntttncttnggcttcacttgactttcgacttgcggccttccggnttccnntttcaggcnttnccgggcgnanccnggttanntcaaagcttnacttcaaaaagggccgggttaattnccggtttnnttccaccaanaaatttnaaggggggataaacccccaggnaaaaagaaaacattgtnngaacccanaaaagggcccanccaaaaaagnggcccagggaaaccctnanaaaaaaggcccnncngtttgcttgggcgttttttttccattaggncttccncccccccctnt

SEQ ID NO: 6946 - DNA, 1143 bp, Homo sapiens
  misc_feature 1, 3, 5, 7, 9, 12, 14, 15, 19, 20, 21, 25, 26, 29, 30, 32,34, 35, 36, 37, 39, 42, 48, 49, 50, 51, 52, 53, 54, 55,58, 59, 60, 62, 63, 65, 69, 71, 72, 75, 79, 80, 88, 89,91, 93, 99, 101, 102, 114, 118, 119, 121, 132, 133, 134,136: n = A,T,C or G
  misc_feature 140, 141, 146, 147, 161, 188, 195, 215, 235, 362, 392, 402,506, 592, 613, 629, 638, 642, 671, 675, 720, 741, 743, 746,756, 767, 772, 807, 815, 839, 854, 880, 893, 894, 907, 908,918, 924, 927, 928, 945, 959, 976, 986, 998, 1003: n = A,T,C or G
  misc_feature 1029, 1031, 1035, 1046, 1052, 1074, 1091, 1119, 1126, 1127,1128: n = A,T,C or G
ncncncncnacnanntaannnttanntanngnannnntnatntatggnnnnnnnnatnnntnntnatangnntanggannttattttnntncntttttntnngaaggggaggcnaatnntntaattattatnnngngaanngaatnngagctccacccgcngtggcggccgatgtaccaacagatttntcacggngctcccaaaactgtgatgtntggaaattctctgccctcanggatccctgaccgtttctctggctcaaagtctgggaccacagcctccctgactatttcgggcctccaagcctgaggacgaggctgattattactgttcaacatgggactataagcctcactggctcnagtgttcggcggagggaccaagctgaccgncctaggtcangcccaaggctgccccctcggtcactctgttcccgccctcctcttgagggagcttcaagccaaacaaagggccacacctgggtggtggtctcaataaggtgactntctacccccggggaagcccggtgacaagtgggcccttgggaaaggcaagattagccagccccccgtcaaagggcgggggaagtggnaagaccacccaccaccccttntcaaaacaaaagcaancaaaccaangttncccttgccccgggggccgggcccggttcntaanaacctaggtgggattcccccccggggcctggcaaagggaaaattnccgattattcaaaagctttantncgnattacccggngcggaaccctncgganggggggggggcccccggggtacccccaaagctttnttggtttnccctttttaagtggaagggggttnaaaattggccgcccnctttgggccggttaattcaatgggtncaataagcctggnnttttccttggggnngaaaattggnttattnccnncttcaccaattttcccnccaccaaaccattncccgaagccccgggaancctttaaaanttgtataaaagnccctngggggtggcccttaattgaaagtggnancttnaccttcaccanttaaanttggcgttgggggcctccactngccccgctttttccaanttgcgggaaaaacccttggtcgtggccnagcttgnnntaaaatgaaattccg

SEQ ID NO: 6947 - DNA, 1131 bp, Homo sapiens
  misc_feature 3, 4, 9, 11, 12, 18, 20, 31, 32, 34, 36, 37, 39, 43, 45,49, 50, 53, 54, 61, 69, 70, 71, 73, 74, 75, 76, 77, 78,82, 83, 84, 88, 89, 91, 92, 94, 98, 99, 100, 103, 107, 110,115, 116, 119, 121, 128, 167, 175, 184, 185, 186, 187, 192: n = A,T,C or G
  misc_feature 210, 367, 430, 443, 447, 453, 517, 560, 670, 681, 683, 741,744, 749, 778, 801, 867, 868, 879, 904, 910, 923, 930, 936,943, 953, 977, 995, 1007, 1013, 1023, 1032, 1043, 1044,1053, 1058, 1060, 1063, 1072, 1076, 1090, 1100, 1111, 1123: n = A,T,C or G
  misc_feature 1128: n = A,T,C or G
ccnncgggngnnaatatngntagtgtgtttnntntnngnaggntnattnnttnnttatatnaaggattnnnannnnnntatnnnattnngnngngggnnntgnatcnatnctagnnggngnattgtanctccaccgcggtggcggccgaggtacaccttttcagggncgttaaanaccacctgnnnngactngatcttcttgaacatcancatgatggaactgagttggttttaagagttagaaatgacggtggaagaaaaaaaagctccaaatcgaggaaacccctttgcaaaaaattatttcactttaaggaattaaggtattcttaagcagtttgagcttaaaaataaaataagatttaaacanaatgaatattaactactaggttttcagaaaaggcgccttaaaaaatatacgcccgctgggttnacactaaggcganattncagagnaaaaagccttctttttcccccaattgctggaggaaaaagatcccgatcctccacaaggcactcncttttgggaagaaaaagaggggggttaagtttttcccccgcgnttcccctgcccgggggcggcccgctcttagaaacttaggtggggatcccccccggggcctggccaggggaatttccggattattcaaaggcctttatccgaataccccgngccggaccctncngaggggggggggggccccccgggtgacccccaaggctttttttggttgcccctttttnagntggangggggttttaaatttggccgccgcccttngggcggttaaattgcattggggnccattaagccttgggttttccttgttggtggaaaatttggttaattcccggtttccaccaaatttnnccaccaccaancattacccgaagccccgggggagcnattaanaaggtggtaaaanggccctnggggtnggccctnaaatgaagtngaagccttaaccttcaacaatttnatttggcggtttggccgncttcaacttggncccccntttttcccangtcgggggnaaaaccttgtnngtggcccangcctngncanttaaattgnaaantccggggccaaccncccccgtggnaaaaaggccgngtttttgccttnttttngct

SEQ ID NO: 6948 - DNA, 1165 bp, Homo sapiens
  misc_feature 2, 5, 7, 10, 11, 17, 18, 21, 22, 24, 29, 30, 32, 33, 35,36, 37, 38, 42, 45, 46, 48, 49, 52, 56, 60, 67, 70, 76,79, 80, 82, 85, 88, 91, 93, 94, 98, 101, 102, 104, 107,110, 112, 114, 115, 117, 118, 132, 133, 134, 144, 145, 147,152: n = A,T,C or G
  misc_feature 156, 169, 170, 183, 185, 191, 192, 193, 195, 197, 205, 367,396, 398, 409, 424, 462, 491, 513, 552, 565, 570, 599, 601,602, 611, 614, 636, 641, 669, 684, 685, 687, 688, 692, 703,718, 723, 726, 731, 739, 741, 745, 751, 757, 762, 773: n = A,T,C or G
  misc_feature 776, 789, 801, 808, 813, 814, 815, 820, 829, 837, 841, 849,850, 851, 854, 857, 860, 880, 882, 885, 886, 887, 890, 892,896, 902, 903, 904, 906, 908, 913, 914, 924, 926, 931, 940,941, 942, 951, 952, 953, 960, 971, 974, 983, 990, 991: n = A,T,C or G
  misc_feature 1004, 1009, 1012, 1036, 1038, 1041, 1042, 1045, 1050, 1053,1056, 1062, 1063, 1065, 1066, 1069, 1076, 1078, 1079, 1080,1082, 1106, 1108, 1110, 1111, 1120, 1123, 1125, 1133, 1136,1137, 1138, 1139, 1143, 1148, 1149, 1150, 1151, 1155: n = A,T,C or G
  misc_feature 1156, 1157, 1158, 1164, 1165: n = A,T,C or G
cnacngngannaatggnntgnntnatatnntnngnnnnggtnatnntnngantcanaagngaaacgnaangaattngtnntncgntgnaangnnagcntgnnantanaantntnngnnaattgcactccccnnngggcagccgnngnacatngtcntatttttcccatnncacagtgcaactncngggcannnanancttgtccnaaaaaacaaagaacttgcttgtgtggtaatccagctccattcttctgcataattacacaggtcacgatgtatttaaatggttttcccagcttggtggagttggctttaaagtttgttctactacatttgtggtccactggttcactttgctgtgttgataangcgttaccaccaattgcgcttttctatancnctcttttacanatggttgctcacttnatcaacaaacaaaagcagtctcctcccgcagcctgggntagtcttccatctttcctccgggcgcccncgcgtacctgcccgggccgggncggttcttagaaactagtgggatcccccccgggggctgnaagggaaattccnaatanttcaaagcctttttcggattacccggttncnnaaccctttnganggggggggggggccccccgggnacccnaaagctttttttgttttccccttttaangggggaaggggtttnnannttgnccccccccttnggggcggggtaacantcaanggnggacntagagccntngttntccccntggagnggganaaaaatggggnttnttcccctttttcnacaatttccccnaacaaanaaaannntcccngggccccgnagagaaancttnaaaaaaannntcnaanggnggcgcggggtgggtgctctntnaannnggnanaccncccccnnnananttttnntggggggcgngnaaacnccccccccnnnttttctttnnntgtgganaaaaaaaaaanaanatccccccncccctcnnttttattataatntaatnccnccccccccccccgaagaaaagagngnagnnagnctttnttntgngccccnnannccnttttttntnnnangaaaaaaaaaataaaaaacacacnanannttgttggtnggngnggggggcnggnnnnatanataannnntaannnnaaaaann

SEQ ID NO: 6949 - DNA, 1056 bp, Homo sapiens
  misc_feature 2, 6, 9, 10, 13, 14, 15, 19, 20, 22, 23, 26, 28, 32, 33,34, 35, 36, 38, 41, 42, 44, 45, 48, 52, 53, 55, 56, 57,59, 60, 61, 62, 65, 66, 67, 70, 73, 74, 79, 80, 81, 84,87, 89, 94, 99, 103, 108, 110, 119, 120, 121, 123, 125,126, 129: n = A,T,C or G
  misc_feature 133, 135, 142, 163, 169, 170, 179, 205, 208, 221, 263, 293,322, 425, 426, 429, 478, 492, 507, 544, 564, 586, 598, 613,624, 631, 650, 669, 674, 678, 696, 702, 733, 741, 742, 745,752, 776, 777, 796, 803, 824, 834, 840, 856, 877, 880: n = A,T,C or G
  misc_feature 881, 882, 891, 894, 902, 914, 925, 926, 930, 946, 949, 954,960, 961, 970, 972, 978, 988, 994, 997, 999, 1002, 1017,1021, 1029, 1031, 1042, 1050: n = A,T,C or G
ancaanggnngannngatnngnnatnantatnnnnngngcnnannatnttanntnnntnnnnagnnnaanctnnacggnnnaanagnangtgancattnaaancctcncntttggagannngnannggngctncnccgctgnggcggccgcccgggcaggttntccagnnttggttatngtcatgggaaaggaaggtgtccacanaangcacacttaacangaaagcatatgaactcgctttatacctgaggaggtctgatgngtaagcagcctctccccatctacctagcanctgtcttcatcaacaaccctaattatggncacaatgctaccaaactgtagatggtagctaatttttctttacctattttctaatgtcatgattcctgtttgcccaatggatcatttgtatgttaaccactgnntgnaaccaacccttatctgggcaacataaattggcagcaccaataatgattntgcatgaatacctntggaaattggggggnagggggcatgccaagttggggcatcactttgtcttancaattaatggggatattganttacctaaaaataagttaatangtaagcaagggngcccggggtgggacnctagggcccgntcctagnaactaggtgggatcccccngggcctggcagggaaattnccganaatncaaaggcctttatccganacccgnccgaccctccgaggggggggggcccccgggnaccccaannctntttgggncccccttttgaggtggagggggtnnaaaattggcggccgccatngggcggnaaatcaatggggggcaattangctggtattncctggnggtgggaaaatttggntggattgcccgcctcacaaanttnnnccccaccangcnattacctnaggcccggggangccataaaaanntggnaaaaggcctggggggnggnccctnaatggnngtggaagcntnacctcnacaatttaanttggcntgngncgnctcacctgggccccnctgngccaaggncnggggaaaaccntgggcggnggccct

SEQ ID NO: 6950 - DNA, 1179 bp, Homo sapiens
  misc_feature 1, 2, 5, 6, 8, 13, 14, 16, 17, 18, 19, 23, 24, 25, 28, 29,30, 31, 33, 36, 38, 40, 42, 43, 45, 47, 51, 52, 66, 68,69, 71, 73, 75, 81, 84, 86, 88, 89, 90, 91, 92, 93, 95,96, 98, 105, 107, 108, 109, 112, 120, 122, 123, 124, 129,130: n = A,T,C or G
  misc_feature 132, 136, 139, 143, 152, 154, 164, 168, 170, 173, 174, 176,177, 187, 188, 195, 206, 239, 259, 374, 380, 411, 482, 488,519, 551, 571, 582, 589, 606, 623, 626, 659, 667, 669, 670,683, 703, 715, 720, 724, 725, 728, 736, 738, 751, 757: n = A,T,C or G
  misc_feature 785, 791, 850, 861, 867, 869, 879, 884, 905, 912, 928, 935,938, 940, 943, 960, 961, 970, 971, 973, 981, 989, 1002,1013, 1015, 1017, 1021, 1029, 1030, 1033, 1041, 1044, 1045,1046, 1052, 1053, 1062, 1067, 1070, 1075, 1079, 1095, 1097: n = A,T,C or G
  misc_feature 1101, 1114, 1123, 1126, 1135, 1145, 1157, 1158, 1167, 1169,1176: n = A,T,C or G
nnttnncnatttnnannnnaaannngtnnnntnatntnanannantntttnntattaattttatangnnanananaatatnttntntnnnnnntnnanaaagagngnnnggntaaatgtnannncaatnngncaanttngaanctccacctngntggcggccgnccangncanngnnccactacatnnttgcaanatctgggattnactgatggagacctattaatggaaaaaccctanaaaagatcaccaacaaccgncctccctgcgtcatcctgtgactgcacaggactctgggttcctgctctgttctggggtccaaaccttggtctccctttggtcctgctgggaagctccccctgcctctttcccctnacttanctcctttagcaaaaggaggacccttggcctncactttgccctttggggtaccctcgggcccgctcttaggaactaggtgggatccccccgggcctgccaggnaaattncggattatccaaagcttttatccggaatacncggtgcggacccttcggaagggggggggggcncccggttaacccccaagctnttgtggtttcnccttttnagatggaagggttttanatttgtcgccgctttgngcngttaattcaatggggtcaattaagcttgcttanccctggtngnngaaaaattggttnaattcccgcttcaacaaatnttcccacaccanccatnaccnnaanccccgggnangccattaaaaagntggttnaaaagccctggggggtggcccttaaatngaagtngaagcctaaccttaacaatttaaatttgccgttttggccgcctcaacttgcccccggcnttttccaaagngccggngnaaaaccctgnttcgntggcccaaaggctggcatttnaaattgnaaattcgggccaaacntccgccnggngnaanaaggcccggatttggcnntatttgggnncncctttttncccctttnccttaagcttcanatggacttttnantnacancctccggnnccnttcccggnttnnnctggcnnaaacccggnaatcnaancttcnactnccaaaagggcgggtgnantacngggtttattcccncaaaaattnaangggggattnaaccgcaaanggaaaaaaaacnnttgttaatncnaaaaaangct

SEQ ID NO: 6951 - DNA, 349 bp, Homo sapiens
  misc_feature 245, 255, 345: n = A,T,C or G
gccccgcgtccgcccacgcgtccgtacaagtgtttagaaatgcttctgggatttgctaatattatctgtccttgggaacagtattgaaaaaactgcttagtggtattacagctttagcaaacctacctcacagctgggatgagaggataaaatacaactaattttgtaccctatagtgcctagagcagtccaagtgctaaataaatatttactgattaaaaaccaaactatagctactcggggangctggaggangatcgcttgaacccaggagtttggaggccattctgggcaatattagcaagaccctgtcttcgaaaaaaaaaaaaaaaaggaaaaaacccnacct

SEQ ID NO: 6952 - DNA, 1171 bp, Homo sapiens
  misc_feature 1, 3, 4, 6, 8, 10, 11, 13, 14, 15, 16, 18, 19, 20, 21, 22,23, 24, 25, 26, 29, 30, 31, 32, 33, 35, 36, 37, 38, 40,41, 42, 45, 46, 54, 55, 56, 57, 59, 60, 63, 71, 72, 74,75, 78, 80, 82, 83, 84, 87, 94, 96, 97, 98, 100, 104, 106,107: n = A,T,C or G
  misc_feature 113, 130, 157, 393, 408, 469, 496, 503, 504, 512, 589, 590,611, 616, 618, 639, 657, 711, 810, 811, 829, 833, 891, 893,908, 947, 976, 985, 993, 1002, 1005, 1008, 1016, 1019, 1024,1027, 1032, 1042, 1050, 1076, 1091, 1101, 1117, 1119: n = A,T,C or G
  misc_feature 1122, 1123, 1124, 1126, 1140, 1162, 1163, 1164: n = A,T,C or G
ntnntntntnnannnnannnnnnnnnggnnnnntnnnnannnatnntgattttnnnngnnaangggaaggnnannaangntnnnggntttaaangnnngngggntnntggatnattagggcgaattgganctccaccgcggtggcggccgaggtacncggggggggtctcaggaggcagcgctctcaggacgtcaccaccatggcctgggctctgctcctcctcaccctcctcactcagggcacagggtcctgggcccatggggccctgactcagcctccctccgcgtccgggtctcctggacagtcaagtcaccatctcctgcattgggaaccttcaatgacattggtagttatgattatgtttcctggtacctgccccggggcggcccgcntctaagaaactaagnggggatccccccgggcttgcaagggaatttcgatatcaaagctttaatccgatacccgtgngaccctcgagggggggggccccgggtnccccaannctttttgntccccttttaagttggaaggggtttaaatttggccgccctttgggccggtaaatgcaatggggtccataagcctggnntttccctggtggtggaaaaanttggntnattcccgcttcaaccaaattngcccaccaacaaaccatnaccgaagccccgggggaagccaataaaaaggttggtaaaaagcccttggggggntggcccttaaatggaaggtggaaggccttaaacttcaaccaattttaaatttggccggttggccgccttcacttgggcccccgcttttttcccaggttnngggggaaaaacccttggnccgnggcccaagcttggcattttaaatggaaattcggggcccaaaccgccgcctgggggaananggccgggttttggcngttatttggggggccgccttcttttcccggctttccctncggcttcaactggaacttcggcttggcgncttcggggnccttttcngggctggcnggnccnaagccggntanttcangcntccancttccaaaangggcgggnaaataaccgggttattgccaacaagnaaatcaagggggganaaacccccangggaaaagaaaccatngntgnnncnaaaaaagggccaancaataagggcccaggaaacccnnnaaaaaat

SEQ ID NO: 6953 - DNA, 664 bp, Homo sapiens
  misc_feature 74, 366, 392, 419, 421, 446, 461, 465, 481, 484, 485, 490,491, 503, 513, 525, 541, 545, 548, 552, 553, 557, 558, 560,563, 564, 566, 568, 571, 573, 574, 575, 577, 578, 591, 596,598, 600, 607, 611, 619, 620, 622, 628, 630, 631, 633: n = A,T,C or G
  misc_feature 634, 641, 643, 647, 653, 655, 657, 659, 662: n = A,T,C or G
ggagctccaccgcggtggcggccgaggtacgcgggggaggaactgctcagttaggacccagacggaaccatggnaagccccagcgcagcttctcttcctcctgctactctggctcccagataccactggagaaatagtgatgacgcagtctccagccaccctgtctgtgtctccaggggaaagagccaccctctcctgcagggccagtcagagtgttggcaccaacttagcctggtacctgcccgggcggccgctctagaactagtggatcccccgggctgcaggaattcgatatcaagcttatcgataccgtcgacctcgagggggggcccggtacccagctttttgttccctttagtgagggtnaattgcgcgcttggcgtaattatggncatagctgttacgctgtgtgaaatcgnantccgctcacaatttccacacaacanacgagcccggtagcntaanagcgtaaagcactcgnggnngcctnntgagcgagctancttacattanttgcctcgaccntactgctacgcctccntttnganaacnnggtnntnctnntncnacntnnnannttcggccagcttnccgtngngnggttttntacntattgtgnngnccacgngnngnngcctgantnaccntttccntntntnacnac

SEQ ID NO: 6954 - DNA, 1252 bp, Homo sapiens
  misc_feature 7, 8, 9, 11, 12, 13, 17, 20, 25, 26, 27, 28, 31, 33, 40,41, 44, 47, 50, 51, 52, 54, 58, 59, 60, 65, 66, 67, 70,71, 72, 79, 81, 82, 85, 87, 88, 89, 90, 91, 100, 101, 104,105, 108, 109, 110, 118, 119, 120, 122, 123, 125, 129, 139: n = A,T,C or G
  misc_feature 319, 439, 473, 500, 503, 510, 516, 517, 524, 530, 534, 552,567, 579, 617, 626, 635, 638, 640, 643, 652, 659, 660, 663,666, 677, 678, 697, 699, 705, 709, 721, 726, 735, 737, 740,747, 761, 763, 773, 803, 810, 834, 836, 840, 845, 851: n = A,T,C or G
  misc_feature 852, 854, 858, 860, 862, 883, 888, 889, 892, 894, 905, 907,915, 918, 926, 928, 939, 947, 957, 960, 973, 976, 984, 987,988, 989, 997, 1005, 1006, 1012, 1016, 1021, 1025, 1030,1033, 1034, 1039, 1045, 1046, 1048, 1054, 1056, 1060: n = A,T,C or G
  misc_feature 1061, 1064, 1068, 1069, 1070, 1071, 1080, 1081, 1089, 1094,1095, 1101, 1108, 1109, 1110, 1112, 1116, 1117, 1121, 1124,1125, 1126, 1128, 1131, 1136, 1140, 1141, 1143, 1144, 1155,1158, 1165, 1166, 1174, 1177, 1180, 1187, 1188, 1197: n = A,T,C or G
  misc_feature 1198, 1201, 1202, 1203, 1209, 1211, 1214, 1218, 1228, 1233,1238, 1240, 1247, 1248: n = A,T,C or G
ccccctnnntnnntgtnatntttannnntananatatttnnatntanatnnncntatnnnttgannnttnnntacatgncnngantnnnnnacagtaagnngtnnacnnncttatacnnntnncnatanggctaattgnactccaccgcggtggcggccgaggtacaccgactacggcggactaatcttcaactcctacatacttcccccattattcctagaaccaggcgacctgcgactccttgacgttgacaatcgagtagtacctgcccgggcggccgctctagaactagtggatcccccgggctgcaggaattcnatatcaagcttatcgataccgtcgacctcgagggggggcccggtacccagcttttgttccctttagtggaggggttaatttgcgccgcttgggccgttaatcattgggtcataagcctgnttttccttgtgtggaaaaattgtttattcccgantcacagatttccaacaccaacatttcngangcccggngagccnntaaaatntggttnaaangcccctggggggtgcccntaaaatggagtgganggcttaaacctncaacaatttaaatttgccgtttgggcgcttcaacttgncccctgacnttttccaanttncnggnggaaaaacnttgttcnnatngcncaaatctggcnnatttaaatatgaaaaattngnggacanaaancgccgccggggnggaanaaaggcccngnttntttctgnttattttggggggncnacttcttttncccggcttttctcctacgccttcaaatttngaacttncgacttggcggccttccgggttcntntttncgtgnctatgnngngacnanangcccggtaaatttaagcttcnaactnnaananggccgggggantnattaactnggnttatttcncnccaagaaatanatgggggnaattaaaccntcnaatggaaaaaaanaanaattggtnttnnncaaaaagnggcccatnncaaaanaagnggccnattngaagnccnngttanaaaaanngncccccngngtgnnctntggnnnnttatttttnncaaataanatganntttcgntcccccnnngnggannaggntgnnntnaanatganaatnncnncctctcccctnaanagtttcnngaaggggntgnggngggaaanncccggaccnnggnnncttttnanagnatanacccaggggngtttncctcntnggaaaannttcg

SEQ ID NO: 6955 - DNA, 1142 bp, Homo sapiens
  misc_feature 3, 8, 10, 11, 13, 18, 20, 22, 23, 24, 25, 30, 31, 36, 38,41, 42, 45, 46, 50, 52, 53, 59, 60, 65, 66, 71, 72, 73,78, 79, 80, 83, 86, 87, 92, 93, 94, 95, 97, 99, 101, 103,107, 109, 114, 115, 116, 117, 123, 128, 456, 507, 533, 556: n = A,T,C or G
  misc_feature 581, 669, 698, 712, 721, 725, 798, 816, 855, 870, 893, 895,897, 899, 905, 912, 921, 930, 934, 936, 954, 977, 994, 997,1002, 1032, 1035, 1051, 1062, 1063, 1069, 1088, 1092, 1094,1108, 1125, 1131, 1141: n = A,T,C or G
ccnccccncnntncctgnantnnnntattnntcttncnacnnatnntttngnnttcttnnttagnntttannngtttnnntanatnnctatnnnntngntngngagngnggcgnnnncgactnctatngggcgaattggagctccaccgcggtggcggcccgaggtacgcggggattcttgtctgttctgcctcactcccgagctctactgactcccaacagagcgcccaagaagaaaatggccataagtggagtccctgtgctaggatttttcatcatagctgtgctgatgagcgctcaggaatcatgggctatcaaagaagaacgtgtgatcatccaggccgagttctatctgaatcctgaccaatcaggcgagtttatgtttgactttgatggtgatgagattttccatgtggatatggcaaagaaaggagacggtcctggcggctttggaanaattttgggacgattttgcccacgctttggaaggctcaaagggtgccattnggcccaaacataggcttgttgggacnaaaggccaacctgggaaattcantggaccaaaaggccgctcccaaacntattacctcccgatcaccaaatggtaccttgccccgggccggcccgctctaagaaactagttgggatcccccccggggctgccagggnaatttcctaattattcaaagcctttattncgattacccggtcngacccttcngaanggggggggggccccggttaccccaaccttttttggtttccccttttaagtggaagggggttaaatttgccgcngcctttggccgttaaatncaattgggtccaataaggcttgtttttcccttgttggtngaaaaattggtttanttcccggcttcaccaattttccncnancnaaccantaccgangcccggggnagccattanaaangngtaaaagccctggggggntgcccctaaattgaagtggaagnctaaacctccacaattnaanttggngtttgccggcttccctggccccggcttttncanttcggggaaaaacctnttcctggcccnncttggnattttaatggaatccgggnccancnccccccgggggganaaggccgggtttaggcntttatnggggcccccnc

SEQ ID NO: 6956 - DNA, 1300 bp, Homo sapiens
  misc_feature 2, 3, 5, 9, 17, 21, 27, 30, 31, 32, 33, 34, 37, 41, 42, 44,45, 48, 54, 55, 56, 61, 62, 67, 72, 73, 75, 77, 78, 80,81, 82, 87, 89, 93, 97, 98, 99, 101, 102, 103, 104, 108,109, 111, 114, 116, 117, 118, 119, 122, 123, 130, 133, 136: n = A,T,C or G
  misc_feature 151, 152, 156, 165, 169, 219, 330, 402, 426, 444, 445, 467,505, 520, 525, 542, 543, 548, 550, 553, 556, 583, 613, 624,635, 643, 654, 682, 694, 699, 702, 715, 725, 736, 741, 744,746, 763, 764, 765, 767, 769, 770, 785, 806, 822, 827: n = A,T,C or G
  misc_feature 833, 837, 839, 843, 846, 847, 850, 857, 877, 882, 889, 893,900, 915, 925, 926, 929, 937, 944, 945, 949, 955, 960, 964,970, 976, 977, 983, 991, 993, 995, 1001, 1002, 1004, 1006,1008, 1009, 1013, 1017, 1019, 1022, 1028, 1032, 1039: n = A,T,C or G
  misc_feature 1044, 1047, 1065, 1066, 1073, 1078, 1079, 1090, 1093, 1094,1104, 1107, 1110, 1111, 1113, 1125, 1127, 1131, 1135, 1140,1141, 1143, 1148, 1149, 1157, 1161, 1167, 1170, 1173, 1184,1186, 1191, 1202, 1204, 1213, 1214, 1215, 1217, 1221: n = A,T,C or G
  misc_feature 1223, 1228, 1230, 1232, 1234, 1239, 1244, 1246, 1247, 1251,1256, 1257, 1259, 1260, 1263, 1264, 1267, 1279, 1282, 1284,1286, 1298, 1299: n = A,T,C or G
cnncncccnttacttantgtntttaantannnnntantctnntnnatntttttnnntattnntattnatacnnantnncnnntaacntnactnctcnnnannnnagcnngnagntnnnntcnnttataanttnctncactttttgtctatnngcancttctccgngganagctgttctaagtactcgggtagagggtgggggctcatggtttccctctnctttgggcagagggcacattattgcagaggtaatgctgtggcatatatgcttctgcctcagggtatcacgtggagttcacaggaccctgcccacctgagttcccaataaanaaaaacctcccctttctgaggctgctttcccaaaactccccctgcatcttttatctcttcatctatcccacnctctttgtcttgaacatccccacnctttatcctcgtgtgtcnngcctttgtttttaaatttttanaccttcatggtttcaattgcctggcaaacaaggaaagncattttcttcttagngttcncccaagttttttcccanntttgnanttngcnattattcccctttggattcaaggcccnctttttttacaccaattctcctgggccccntaatgggggtntcctcctaagncccacccntggttggccantggccatggtagttaatttcttctggcncctggggcatancttantgnggtcgtttgttgnggaattgttnttggttgccanattgnaantncttggtccatttattannnangnngggggttctccggangccttgtgaaatcccctaaanaagccattttggcttngcccncttgtngggncnctcnganntgnttccttntggcgcttttatctcacaanaatgncattggntaanctagggnaaaattttaaaattnggggtattgnnacntgttcttngggtggnntggntatttngcggntccnttgaanggaaanntgttanttaaacantntnccaagnngngnannaatnttgntnatncaacantagncttcgtnggttntcnatatctttcccctggaanncaatttnatggnnttatattgtgnctnncctgtggagnagnccnngngctttttttggnanaatnaaanccctnntnttttnnatcggccngatnaaaatngcnatnattgtgataanantctcntaaccatatantnatttccccnnntnttgnanatatngntngngatgntaacnannattntgttnncnntgnntcncggtggtcgggnccntnantataaataaacnng

SEQ ID NO: 6957 - DNA, 1087 bp, Homo sapiens
  misc_feature 2, 3, 4, 6, 10, 12, 13, 14, 17, 19, 24, 25, 27, 29, 31, 32,33, 34, 35, 36, 39, 40, 41, 42, 45, 49, 50, 51, 55, 56,57, 60, 63, 64, 66, 70, 71, 72, 73, 74, 76, 77, 78, 79,80, 81, 82, 83, 84, 85, 86, 87, 89, 93, 94, 95, 96, 102,103: n = A,T,C or G
  misc_feature 455, 545, 553, 612, 691, 696, 712, 748, 751, 782, 794, 798,811, 812, 814, 826, 841, 849, 858, 863, 865, 875, 877, 883,887, 895, 910, 925, 935, 942, 945, 953, 954, 960, 961, 962,966, 973, 981, 984, 985, 1020, 1041, 1042, 1043, 1051: n = A,T,C or G
  misc_feature 1054, 1059, 1065, 1067, 1073, 1080, 1085: n = A,T,C or G
cnnncntctntnnnttntnttttnngntntnnnnnnttnnnnttntggnnntgtnnnttnttnnantttnnnnntnnnnnnnnnnnntnaagnnnnatcctnnctatcatatagggcgaattggagctccaccgcggtggcggccgaggtacgcgggggaaatggccgcgtccagtcaaggaaactttgagggaaattttgagtcactggaccttgcggaatttgctaagaagcagccatggtggcgtaagctgttcgggcaggaatctggaccttcagcagaaaagtatagcgtggcaacccagctgttcattggaggtgtcactggatggtgcacaggtttcatattccagaaggttggaaagttggctgcaacagctgtgggaggtggattttttctccttcagcttgcaaaccattactgggtaccttgccccgggccggcccgctctagnaactagtgggatccccccgggcttgcagggaattccgatatcaaagcttatcgatacccgttcgacctctgaggggggggggcccgggtncccaagcntttttgtttccccttttagttggagggtttaattgccgccgcctttggccgttaatcangggtcaatagccttgttttcctgtgtggaaaatttgtttatccgctcaccaatttccaccaccaacaatacgaagcccngggangcattaaaagtggttnaaagccctggggggttgcccttaatggagttgaagnctnaaccttccacatttaattttgcgtttggcgncttcaacttggncccnctttttccaagtnncnggggaaaaaccnttgtccgttgcccanccttgccnttttaattngaaantntggcccaaancncccccngggntaagaagngccggttttatgcgntatttggggcggccncttttcccgntttcctngcnttaaattnnacttcnnnttgncgccttngggttccnttnngggtttgcggcggaagccggtatttcaaccttttnttcaaaaggcggggtgaaatnnnggggtttnttncccangaaatnanaggggnaataccncccgngg

SEQ ID NO: 6958 - DNA, 1064 bp, Homo sapiens
  misc_feature 9, 10, 15, 17, 18, 19, 20, 22, 24, 25, 26, 27, 28, 29, 30,33, 35, 38, 39, 41, 43, 44, 45, 46, 58, 59, 60, 62, 63,64, 65, 67, 68, 71, 74, 76, 77, 78, 79, 80, 81, 82, 83,84, 85, 86, 87, 88, 90, 94, 95, 96, 99, 102, 104, 105, 110: n = A,T,C or G
  misc_feature 113, 115, 118, 120, 121, 124, 167, 604, 608, 717, 729, 740,814, 822, 834, 846, 867, 873, 879, 886, 891, 894, 898, 919,927, 940, 960, 977, 990, 1005, 1008, 1017, 1028, 1032, 1046,1047, 1048, 1056, 1063: n = A,T,C or G
tcctcctgnntatgntnnnntntnnnnnnntgnanganntntnnnngtatgatatttnnntnnnngnnttnttntnnnnnnnnnnnnntncagnnnggnttngnngtttngcntnctntnnggntaattggagctccaccgcggtggcggccgcccgggcaggtacngcggggaggctggccggcggcgctgggaggtggagtcgttgctgttgctgtttgtgagcctgtggcgcggcttctgtgggccggaaccttaaagatagccgcaatggctgaaaatggtgataatgaaaagatggctgccctggaggccaaaatctgtcatcaaattgagtattattttggcgacttcaatttgccacgggacaagtttctaaaggaacagataaaactggatgaaggctgggtcctcggccgctctagaactagtgggatcccccgggctgcagggaattcgatattcaagcttatcggataccgtcgacctcgagggggggggccccggtacccagcttttgttcccttttagtgaggggttaatttgccgccgctttgggccgtaatcatggtcataagcttgtttcctgtgtgaaaatttgttnatcncgctcacaattccacacaacaataccgaagcccggggagccataaaggtgttaaaaagcctggggtgcctaatgagtggagctaacctcacatttaatttgcgtttgcngcttcaacttgnccccgcttttncagtccgggaaacccttgtccgtgcccagcttgccattaaattgaaattcgggcccaacgcccccgggggaagnagggccgnttttgccgttantttggggccgcntttttcccgctttccttcggnttcacntgaacntcgcttngcgcnttncggntccgtttccggcttgcctggncgaagccnggtttttcaagcntcacttcaaaagggccggtnaattaccgggttaattnccccaagaaattnaggggggaattaacnccnagggaaaanaaaccaatgtngagncaaaaaagggcccnnnccaaaaanggcccant

SEQ ID NO: 6959 - DNA, 1194 bp, Homo sapiens
  misc_feature 1, 3, 6, 9, 10, 14, 17, 18, 20, 22, 25, 28, 30, 31, 32, 33,35, 37, 40, 43, 49, 53, 55, 59, 62, 63, 64, 70, 78, 82,83, 84, 85, 86, 88, 89, 90, 91, 94, 95, 96, 97, 103, 104,108, 109, 110, 116, 121, 127, 130, 136, 140, 150, 166, 169: n = A,T,C or G
  misc_feature 176, 177, 228, 284, 286, 340, 348, 408, 452, 493, 501, 506,542, 563, 579, 606, 609, 636, 639, 642, 668, 670, 697, 704,706, 707, 709, 711, 721, 736, 739, 740, 745, 751, 755, 756,764, 774, 776, 798, 800, 807, 817, 823, 838, 841, 843: n = A,T,C or G
  misc_feature 850, 856, 859, 863, 867, 876, 886, 887, 889, 891, 892, 905,908, 912, 915, 924, 945, 957, 961, 962, 963, 975, 990, 992,999, 1013, 1015, 1017, 1020, 1021, 1027, 1031, 1043, 1046,1049, 1051, 1052, 1055, 1059, 1065, 1066, 1075, 1076: n = A,T,C or G
  misc_feature 1081, 1086, 1089, 1090, 1092, 1094, 1098, 1103, 1107, 1108,1110, 1114, 1116, 1122, 1136, 1137, 1140, 1142, 1145, 1151,1152, 1153, 1154, 1164, 1171, 1174, 1177, 1179, 1181, 1183,1185, 1188, 1190, 1193: n = A,T,C or G
ntnccncgnntatntanntntntantanannnntncncanatnttttgntttntntatntannntagacngtgttaantttnnnnntnnnnagnnnnggtgtnngcgnnncgatcncttcncggtgngtnggaatngganctccaccgcngttggcggcacgacgnacncggggtnntttgtagcggacaacatggcggccttcatgctgggctcgctgctgtggacnttcaagcaggtcaggcctctacttttatccacaccgctacccctcaccgctgaatntnataacccacgggtcccccacggctctgccacctgtagtgctcgatggttccttnatcagctncaggccaagattcgaagtcactatgtagactggagaatgtggccgcgatgtgaagagacnacaaaatggcctatggaatacacaagattgaagcaggctacgtntttaatttcacttcagggaaggaaaataccatttttgccanaaaaattnctttnagggttagcctaatttaaggatggaggcccctttgntaccttgccccgggccggggnccgctcttaggaaacntagttgggatttcccccccggggcctngcnaggggaaatttctgaattaatccaaanccnttnattcggattaccccggtgcggacccntncgtaaggggggggggtcccccgggttntcccccnanncntnttttggtgtncccccttttatgttnganngggtnttaaantttnncgaccgcntttgggccgntnaaaatccacttgggggtcattnantgcttanggtttctccntggtcntgggggaaaaaattngtntngttcccngcttanaanaaantatnccaccaccnaaccattacnncnannccccggggggagnccntttnaantaggttttnaagccccttggggggtggccntcaaatgtgaantggnnncctaaaccttcncccatttgaaatttngncggtttngcgtcttcaacttngntncgnntttttnttanttttgggaaaanacnttntnnttncccnactttnnttttatttnnaaatntgtgntcnnancncccncgggnggannanggcngnttttgnccataattatgagnngcntnttnttcgannnntcttgtgttntaataanagnatntncntngnttntngtng

SEQ ID NO: 6960 - DNA, 851 bp, Homo sapiens
  misc_feature 1, 2, 3, 9, 11, 15, 18, 19, 25, 31, 35, 36, 40, 41, 76, 115,342, 374, 398, 404, 430, 458, 498, 502, 507, 513, 530, 542,551, 552, 554, 555, 556, 558, 569, 571, 572, 574, 575, 576,577, 578, 583, 586, 592, 593, 594, 595, 596, 601: n = A,T,C or G
  misc_feature 602, 605, 606, 607, 608, 609, 614, 615, 618, 619, 620, 621,622, 623, 624, 625, 626, 627, 630, 631, 632, 633, 634, 635,636, 637, 638, 639, 640, 641, 642, 643, 644, 647, 648, 649,650, 651, 652, 653, 654, 655, 656, 657, 658, 659, 660: n = A,T,C or G
  misc_feature 661, 662, 663, 664, 665, 666, 667, 668, 669, 670, 671, 672,673, 674, 675, 676, 677, 678, 679, 680, 681, 682, 683, 684,685, 686, 687, 688, 689, 690, 691, 692, 693, 694, 695, 696,697, 698, 699, 700, 701, 702, 703, 704, 705, 706, 707: n = A,T,C or G
  misc_feature 708, 709, 710, 711, 712, 713, 714, 715, 716, 717, 718, 719,720, 721, 722, 723, 724, 725, 726, 727, 728, 729, 730, 731,732, 733, 734, 735, 736, 737, 738, 739, 740, 741, 742, 743,744, 745, 746, 747, 748, 749, 750, 751, 752, 753, 754: n = A,T,C or G
  misc_feature 755, 756, 757, 758, 759, 760, 761, 762, 763, 764, 765, 766,767, 768, 769, 770, 771, 772, 773, 774, 775, 776, 777, 778,779, 780, 781, 782, 783, 784, 785, 786, 787, 788, 789, 790,791, 792, 793, 794, 795, 796, 797, 798, 799, 800, 801: n = A,T,C or G
  misc_feature 802, 803, 804, 805, 806, 807, 808, 809, 810, 811, 812, 813,814, 815, 816, 817, 818, 819, 820, 821, 822, 823, 824, 825,826, 827, 828, 829, 830, 831, 832, 833, 834, 835, 836, 837,838, 839, 840, 841, 842, 843, 844, 845, 846, 847, 848-851: n = A,T,C or G
nnngttagncnttgnatnngactcnacttantatnnggcnnattggagctccaccgcggtggcggccgaggtacangatcccatccacttgttctgagtcatacccgatctcacnaagctccaagtgagggaggacagaagtaaggagatagctgacgtggatacgtagccgcgtaagctttgccaaagccctttctaggtcatctccctctggggtccggtaggagacctgagccttctgcagcatttccaggtgtgtctctgtttccttcagtttctcttttaactcttgcttttcctctttggttctttccagctcaactttcaaaatctggaattcancttggcgataacccatgtgtttcttgctccantacctgcccgggcggccgctctanaactantggatcccccgggctgcaagaattcnatatcaagcttatcgatacccgtccaanctccaaggggggccccgtacccaacttttggttcctttantganggttnattgcncccctggcgtaatcatnggcataactggntttcccggnncnnnangggggggcccngnncnnnnnttttnttncctttnnnnnggggnnaannnnnccccnnggnnnnnnnnnnggnnnnnnnnnnnnnnnctnnnnnnnnnnnnnnnnnnnnnnnnnnnnnnnnnnnnnnnnnnnnnnnnnnnnnnnnnnnnnnnnnnnnnnnnnnnnnnnnnnnnnnnnnnnnnnnnnnnnnnnnnnnnnnnnnnnnnnnnnnnnnnnnnnnnnnnnnnnnnnnnnnnnnnnnnnnnnnnnnnnnnnnnnnnnnnnnnnnnnnnnnnnnnnnnnnnnnnnnnnnnn

SEQ ID NO: 6961 - DNA, 896 bp, Homo sapiens
  misc_feature 1, 4, 5, 6, 7, 8, 9, 15, 16, 22, 23, 30, 47, 67, 202, 269,295, 315, 331, 343, 362, 367, 368, 370, 380, 419, 421, 428,433, 436, 443, 446, 447, 455, 456, 457, 458, 459, 460, 461,462, 463, 464, 465, 466, 467, 468, 469, 470, 471, 472: n = A,T,C or G
  misc_feature 473, 474, 475, 476, 477, 478, 479, 480, 481, 482, 483, 484,485, 486, 487, 488, 489, 490, 491, 493, 494, 495, 496, 497,498, 499, 500, 501, 502, 503, 504, 505, 506, 507, 508, 509,510, 511, 512, 513, 514, 515, 516, 517, 518, 519, 520: n = A,T,C or G
  misc_feature 521, 522, 523, 524, 525, 526, 527, 528, 529, 530, 531, 532,533, 534, 535, 536, 537, 538, 539, 540, 541, 542, 543, 544,545, 546, 547, 548, 549, 550, 551, 552, 553, 554, 555, 556,557, 558, 559, 560, 561, 562, 563, 564, 565, 566, 567: n = A,T,C or G
  misc_feature 568, 569, 570, 571, 572, 573, 574, 575, 576, 577, 578, 579,580, 581, 582, 583, 584, 585, 592, 600, 601, 602, 603, 604,605, 606, 607, 608, 609, 610, 611, 612, 613, 618, 627, 628,629, 630, 631, 632, 633, 634, 635, 636, 637, 643, 644: n = A,T,C or G
  misc_feature 658, 659, 660, 661, 665, 666, 667, 668, 672, 682, 684, 685,686, 687, 688, 689, 697, 698, 699, 700, 701, 702, 703, 704,705, 706, 718, 719, 720, 721, 722, 723, 724, 726, 727, 728,729, 730, 731, 732, 733, 734, 745, 746, 747, 758, 760: n = A,T,C or G
  misc_feature 763, 769, 771, 772, 773, 774, 775, 776, 777, 779, 782, 783,784, 785, 786, 787, 788, 789, 790, 791, 792, 794, 795, 796,797, 801-806, 808-812, 816-818, 828, 831, 833, 839-841, 855, 856,859-860, 862, 864-865, 868-871, 876-883, 888-895: n = A,T,C or G
nagnnnnnnccttcnnggactnngacttantataaggcgaattgganctccaccgcggtggcggccncccgggcaggtacctctgtggaaatcccttccttccagaagcctccactcacttctgatgccaaggagcttctgcggcgccctgcacgcacctttacagatgcaggtggctgtttcctgtgtccccgcgtacctnggccgctctagaactagtggatcccccgggctgcaggaattcgatatcaagcttatcgataccgtcnacctcgagggggggcccggtacccancttttgttccctttaatganggttaattgccccttnggcgtaatcatngtcataaactgttcctganaactnnanggggggcccngtacccaacttttgttccctttagtgaaggttaattgcncncttggcntaaanatnggcatanctnnttcctggnnnnnnnnnnnnnnnnnnnnnnnnnnnnnnnnnnnnnannnnnnnnnnnnnnnnnnnnnnnnnnnnnnnnnnnnnnnnnnnnnnnnnnnnnnnnnnnnnnnnnnnnnnnnnnnnnnnnnnnnnnnnnnnnnaaaaaanaaaaaaannnnnnnnnnnnnnaaaanaaaaaaaannnnnnnnnnntttttnnaaaaaaaaaaaaannnncccnnnngggnaaaaaaaaantnnnnnngggggggnnnnnnnnnntttttttttttnnnnnnnannnnnnnnnggggggggggnnntaaaaaaaaananaancccccncnnnnnnnanaannnnnnnnnnnannnntttnnnnnncnnnnncccnnngggggggggnccncncccccnnntttttttttttttnnaannangnnaannnnccccnnnnnnnnaaaannnnnnnna

SEQ ID NO: 6962 - DNA, 823 bp, Homo sapiens
  misc_feature 4, 13, 14, 15, 18, 30, 478, 568, 569, 570, 571, 575, 576,577, 578, 579, 580, 581, 582, 583, 584, 585, 586, 587, 588,589, 590, 591, 592, 593, 594, 595, 596, 597, 598, 599, 600,601, 602, 603, 604, 605, 606, 607, 608, 609, 610, 611: n = A,T,C or G
  misc_feature 612, 613, 614, 615, 616, 617, 618, 619, 620, 621, 622, 623,624, 625, 626, 627, 628, 629, 630, 631, 632, 633, 634, 635,636, 637, 638, 639, 640, 641, 642, 643, 644, 645, 646, 647,648, 649, 650, 651, 652, 654, 655, 656, 657, 659, 660: n = A,T,C or G
  misc_feature 661, 662, 663, 665, 666, 667, 669, 670, 671, 672, 673, 674,675, 676, 677, 678, 679, 680, 681, 682, 683, 684, 685, 686,687, 688, 689, 690, 691, 692, 693, 694, 695, 696, 697, 698,699, 700, 701, 702, 703, 704, 705, 706, 707, 708, 709: n = A,T,C or G
  misc_feature 710, 711, 712, 713, 714, 715, 716, 717, 718, 719, 721, 722,723, 724, 725, 726, 727, 728, 729, 730, 731, 732, 733, 734,735, 736, 737, 738, 739, 740, 741, 742, 743, 744, 745, 746,747, 748, 749, 750, 751, 752, 753, 754, 755, 756, 757: n = A,T,C or G
  misc_feature 758, 759, 760, 762, 763, 764, 765, 766, 767, 768, 769, 770,771, 772, 773, 774, 775, 776, 777, 778, 780, 781, 782, 783,784, 785, 786, 787, 788, 789, 790, 791, 792, 793, 794, 795,796, 797, 798, 799, 800, 801, 802, 803, 804, 805, 806: n = A,T,C or G
  misc_feature 807, 808, 809, 810, 811, 812, 813, 814, 815, 816, 817, 818,819, 820, 821, 822, 823: n = A,T,C or G
ggtngcgcgcgtnnncgncatacgacttantatagggcgaattggagctccaccgcggtggcggccgaggtacgcggggactggagtgatgcagctacaaaccaaggaacaccaaggaccaccagcaatgactagagctaggagagaggcatggaatagattctcccacagagctgccagaaggaaccagcattgccaacatcttatttcagacttctagcctccagaattgtgagagaataaatttttgttgttttcagccttccaatttgtgataatttgctatggtagccctaggaaaataatacatctggattccagctttccactcacatcatcgttttctccatccttcccatgtctacatattgttgttccagattaaagatatcttgatgtcacaggtgctgctctagaactagtggatcccccgggctgcaggaattcgatatcaagcttatcgataccgtcgacctcnaaggggggccccggtacccagcttttgttccctttagtgagggttaattgcgccgcttggcgtaatcatggtcatagctgtttcctgggnnnnaaannnnnnnnnnnnnnnnnnnnnnnnnnnnnnnnnnnnnnnnnnnnnnnnnnnnnnnnnnnnnnnnnnnnnnnnnnnnnngnnnnannnnnannngnnnnnnnnnnnnnnnnnnnnnnnnnnnnnnnnnnnnnnnnnnnnnnnnnnngnnnnnnnnnnnnnnnnnnnnnnnnnnnnnnnnnnnnnnnngnnnnnnnnnnnnnnnnngnnnnnnnnnnnnnnnnnnnnnnnnnnnnnnnnnnnnnnnnnnnn

SEQ ID NO: 6963 - DNA, 1395 bp, Homo sapiens
  misc_feature 7, 8, 20, 23, 24, 40, 44, 46, 48, 49, 89, 131, 139, 162,274, 327, 345, 362, 371, 403, 410, 414, 415, 421, 435, 446,458, 515, 544, 563, 564, 586, 600, 607, 611, 621, 636, 637,638, 645, 646, 682, 692, 696, 709, 715, 719, 734, 756: n = A,T,C or G
  misc_feature 781, 787, 809, 810, 827, 832, 833, 837, 849, 851, 852, 859,865, 875, 876, 906, 907, 911, 912, 920, 926, 937, 940, 943,944, 948, 958, 985, 988, 1002, 1005, 1013, 1014, 1015, 1016,1017, 1018, 1019, 1020, 1023, 1028, 1039, 1045, 1049: n = A,T,C or G
  misc_feature 1050, 1056, 1059, 1066, 1071, 1072, 1076, 1077, 1082, 1102,1115, 1122, 1123, 1124, 1131, 1136, 1144, 1156, 1157, 1160,1161, 1166, 1176, 1182, 1183, 1210, 1220, 1221, 1222, 1223,1224, 1225, 1226, 1227, 1228, 1229, 1230, 1231, 1232: n = A,T,C or G
  misc_feature 1233, 1234, 1235, 1236, 1237, 1238, 1239, 1240, 1241, 1242,1243, 1244, 1245, 1246, 1247, 1248, 1249, 1250, 1251, 1252,1253, 1254, 1268, 1282, 1283, 1284, 1286, 1291, 1292, 1302,1311, 1319, 1328, 1335, 1336, 1339, 1341, 1346, 1347: n = A,T,C or G
  misc_feature 1348, 1351, 1352, 1353, 1354, 1355, 1366, 1367, 1368, 1369: n = A,T,C or G
gggtttnnggagcgcgccgntanntgcggacttcactatngtgngncnnaattggggaagctccacccgcgggttgggccgggcccganggttaccaaggggatgcttttgaaaaggatggaagggaaaanaagaaagnaagtccaaggcccacaaatttgnaataccccgcaagaatgatgcccacttggtcattgggcccagttggaaaaagccctcaaatggtccattgttccaagcaaaccgtcttccttttttcttggaagttggaaanttcttaagggaataagtttttctttcccccctttggtggtttttgaaaccaanggggccaagggttttaanggtttcctaagggtaanttggggaanggggcccaagggtgggggggcctccgaagggnaacccgnaaanngggttncctttttggccaanttttcttggtncccccattattngggggttggaatggtaaaaaaaaaatttttaacccctgggttttttttcaaaataanttttttctttaaaaaatggcctttttttncccttttttggaaaataannccaaggggtaagttttaagccnttttcaaaaaaaangggtttnaaanttttatttgnaaaattatttttaannnccccccnncccaatggtatttttggccttcctttttaattcctngggggttttnaaanaaaaattaaaacnaagggntttnggaaaaaattttttngggtttaaaaaaaaaaaaaatnggggaaaaaaaaacccccttttttncccccntttatttttttgggggggaaanncttggggaaaaaccaanggggnnaaangggggggggggnanntttgggnaaaaanaaaggggccnntttttttttttttttttttttttttttaannaaannggggggcnaaaaanaaacccccccnccncgnntttnaaaaaaatanggggggggggaaaacaaaaaatttttnaangggggggggggggnccnaaaaaaannnnnnnnaanttttnccccttggggncccccngggnnaaaaanatnttttttnggggnncccnnggganaaaaaatttttttttttttnccccccggggggnttttttnnntttaaanccttngggggggnaaaaaaaaaaannttnnccccnaaaaaaatanaaaaannttttttaaaaaaaaaaaaaaaaaaacncccccccccnnnnnnnnnnnnnnnnnnnnnnnnnnnnnnnnnnnattttttttttccngggggggggggggnnntnttttnnaaaaaaaaanggggggggncccccccnggggggggnggggggnnaantnttttnnntannnnnccttttttttnnnncccccccccccccccccggggggggg

SEQ ID NO: 6964 - DNA, 1516 bp, Homo sapiens
  misc_feature 2, 4, 5, 6, 7, 8, 9, 10, 11, 12, 13, 15, 18, 21, 23, 44,46, 51, 52, 64, 121, 162, 179, 192, 199, 269, 274, 296,334, 337, 344, 359, 378, 387, 413, 416, 426, 429, 436, 455,490, 491, 492, 493, 494, 495, 496, 497, 498, 499, 500, 501: n = A,T,C or G
  misc_feature 502, 503, 504, 505, 506, 507, 508, 509, 510, 511, 512, 513,514, 515, 516, 517, 518, 519, 520, 521, 522, 523, 524, 525,526, 527, 528, 529, 530, 531, 532, 533, 534, 535, 536, 537,538, 539, 540, 541, 542, 543, 544, 545, 546, 547, 548: n = A,T,C or G
  misc_feature 549, 550, 551, 552, 553, 554, 555, 556, 557, 558, 559, 560,561, 562, 563, 564, 565, 566, 567, 568, 569, 570, 571, 572,573, 574, 575, 576, 577, 578, 579, 580, 581, 582, 583, 584,585, 586, 587, 588, 589, 590, 591, 592, 593, 594, 595: n = A,T,C or G
  misc_feature 596, 597, 598, 599, 600, 601, 602, 603, 604, 605, 606, 607,608, 609, 610, 611, 612, 613, 614, 615, 616, 617, 618, 619,620, 621, 622, 623, 624, 625, 626, 627, 628, 629, 630, 631,632, 633, 634, 635, 636, 637, 638, 639, 640, 641, 642: n = A,T,C or G
  misc_feature 643, 644, 645, 646, 647, 648, 649, 650, 651, 652, 653, 654,655, 656, 657, 658, 659, 660, 661, 662, 663, 664, 665, 666,667, 668, 669, 670, 671, 672, 673, 674, 675, 676, 677, 678,679, 680, 681, 682, 683, 684, 685, 686, 687, 688, 689: n = A,T,C or G
  misc_feature 690, 691, 692, 693, 694, 695, 696, 697, 698, 699, 700, 701,702, 703, 704, 705, 706, 707, 708, 709, 710, 711, 712, 713,714, 715, 716, 717, 718, 719, 720, 721, 722, 723, 724, 725,726, 727, 728, 729, 730, 731, 732, 733, 734, 735, 736-1515: n = A,T,C or G
angnnnnnnnnnncnttnttnantacggacttcacttatttatngngcccnnaaattggggaanccttccaaccccgccggggtggggccggggcccgccccccggggccaagggttaccnccggggggggaaaaaaacaattggggaccgtttaaatattnggccccaacttccgccnccttgggggaacnaatttcntttccccggggtttcccgaatccgccttttgcccccgggcccgcttcttaaaaacttaagttggggaatnccccngggcttgcaagggaaatttccnaattatttaaaagcctttaatcggaataccccgtccgnaancctttcnaaggggggggggggnccccgggtacccccaaacnttttttggntttccccttttaaattggaaaggggnttnaaatttgccnccnccttttngggcggttaaatcaaattnggggccattaaaaccttggtttttcccttgggggnnnnnnnnnnnnnnnnnnnnnnnnnnnnnnnnnnnnnnnnnnnnnnnnnnnnnnnnnnnnnnnnnnnnnnnnnnnnnnnnnnnnnnnnnnnnnnnnnnnnnnnnnnnnnnnnnnnnnnnnnnnnnnnnnnnnnnnnnnnnnnnnnnnnnnnnnnnnnnnnnnnnnnnnnnnnnnnnnnnnnnnnnnnnnnnnnnnnnnnnnnnnnnnnnnnnnnnnnnnnnnnnnnnnnnnnnnnnnnnnnnnnnnnnnnnnnnnnnnnnnnnnnnnnnnnnnnnnnnnnnnnnnnnnnnnnnnnnnnnnnnnnnnnnnnnnnnnnnnnnnnnnnnnnnnnnnnnnnnnnnnnnnnnnnnnnnnnnnnnnnnnnnnnnnnnnnnnnnnnnnnnnnnnnnnnnnnnnnnnnnnnnnnnnnnnnnnnnnnnnnnnnnnnnnnnnnnnnnnnnnnnnnnnnnnnnnnnnnnnnnnnnnnnnnnnnnnnnnnnnnnnnnnnnnnnnnnnnnnnnnnnnnnnnnnnnnnnnnnnnnnnnnnnnnnnnnnnnnnnnnnnnnnnnnnnnnnnnnnnnnnnnnnnnnnnnnnnnnnnnnnnnnnnnnnnnnnnnnnnnnnnnnnnnnnnnnnnnnnnnnnnnnnnnnnnnnnnnnnnnnnnnnnnnnnnnnnnnnnnnnnnnnnnnnnnnnnnnnnnnnnnnnnnnnnnnnnnnnnnnnnnnnnnnnnnnnnnnnnnnnnnnnnnnnnnnnnnnnnnnnnnnnnnnnnnnnnnnnnnnnnnnnnnnnnnnnnnnnnnnnnnnnnnnnnnnnnnnnnnnnnnnnnnnnnnnnnnnnnnnnnnnnnnnnnnnnnnnnnnnnnnnnnnnnnnnnnnnnnnnnnnnnnnnnnnnnnnnnnnnnnnnnnnnnnnnnnnnnnnnnnnnnnnnnnnnnnnnnnnnnnnnnnnnnnnnnnnnnnnnnnnnnnnnnnnnnnnnnnnnnnnnnnnnnnnnnnnnnnnnnnnnnnnnnnnnnnnnnnnnnnnnnnnnnnnnnnnnnnnnnnnnnnt

SEQ ID NO: 6965 - DNA, 1061 bp, Homo sapiens
  misc_feature 8, 19, 28, 133, 217, 265, 286, 292, 305, 314, 324, 356, 369,378, 386, 393, 399, 403, 404, 422, 444, 453, 466, 469, 494,510, 520, 532, 543, 556, 557, 568, 595, 605, 610, 614, 619,638, 651, 656, 675, 693, 725, 733, 749, 750, 751: n = A,T,C or G
  misc_feature 753, 780, 789, 810, 827, 828, 830, 848, 864, 879, 916, 917,918, 919, 920, 924, 931, 932, 933, 934, 935, 936, 937, 938,939, 940, 941, 942, 943, 944, 950, 951, 952, 953, 954, 955,956, 957, 958, 959, 960, 961, 962, 963, 964, 965, 966: n = A,T,C or G
  misc_feature 967, 968, 969, 970, 971, 972, 973, 974, 975, 976, 977, 978,979, 980, 981, 982, 983, 984, 985, 986, 987, 988, 989, 990,991, 992, 993, 994, 995, 996, 997, 998, 999, 1000, 1001,1002, 1003, 1004, 1005, 1006, 1007, 1008, 1009, 1010: n = A,T,C or G
  misc_feature 1011, 1012, 1013, 1014, 1015, 1016, 1017, 1018, 1019, 1020,1021, 1022, 1023, 1024, 1025, 1026, 1027, 1028, 1029, 1030,1031, 1032, 1033, 1034, 1035, 1036, 1037, 1038, 1039, 1040,1041, 1042, 1043, 1044, 1045, 1046, 1047, 1048, 1049: n = A,T,C or G
  misc_feature 1050, 1051, 1052, 1053, 1054, 1055, 1056, 1057, 1058, 1059,1060, 1061: n = A,T,C or G
cgcgatantggacatactntagggcctnattggagctccaccgcggtggcggccgcccgggcaggtacctcaagcacagccctggtcaactatgtggttttcatggtggcaaaggctcaccaaggagtctcancttgaaggatggtgacaatcttaacacccttcccctccaaacataaagaagccttccaaaggctcctatagttttcaaaataanatgcccaaaaagttttaagatgcaagggcaaaatttgaccactttgtnggaaaatgtcttaaggcccancacttnggtgtcactcttnttggggctngggcctattnaacattgggaaaggcaaccaaggggcaaggcngtttttttttttnttccatttncccccccngaaaccncccgangccnnaaccccccgccccaaaanttttaaaaaaaatttttttttnggggggaanccaaaaaccctgnatnccccttgtttggaactttaacaacnaaaaacctttgggcantttttaaaanggggggggaaanccctttccccnggaaatttacccnnaaaaatttggnctttccttcaaaaaaaaaaaaaaaaangggcttttanttttntttnccacnaaccccttttttttttttnaaaaacccccatnttttnccccctttttttttttaancccccccttttgggttancctttggggcccggttttttaaaaaaataaanggggaatncccccccgggcttttnnngnaaattttccattttttaaaaccctttntttaaaaancccggggaaaaccctttaaanggggggggggcccccgnnancccaaacttttttttttnccccttttaagggggnggggttaaattttgncccccctttgggggaaaaaaaatgggggccaaaaacnnnnntttnccggggnnnnnnnnnnnnnnagaagnnnnnnnnnnnnnnnnnnnnnnnnnnnnnnnnnnnnnnnnnnnnnnnnnnnnnnnnnnnnnnnnnnnnnnnnnnnnnnnnnnnnnnnnnnnnnnnnnnnnnnnnnnnnnnnn

SEQ ID NO: 6966 - DNA, 883 bp, Homo sapiens
  misc_feature 1, 5, 7, 8, 11, 19, 21, 22, 34, 38, 263, 289, 353, 369, 385,392, 394, 402, 425, 443, 444, 445, 446, 447, 448, 449, 450,451, 452, 453, 454, 455, 456, 457, 458, 459, 460, 461, 462,463, 464, 465, 466, 467, 468, 469, 470, 471, 472: n = A,T,C or G
  misc_feature 473, 474, 475, 476, 477, 478, 480, 482, 483, 484, 485, 486,487, 488, 489, 490, 491, 492, 493, 494, 495, 496, 497, 498,499, 500, 502, 503, 504, 505, 506, 507, 508, 509, 510, 511,512, 513, 514, 515, 516, 518, 519, 520, 521, 522, 523: n = A,T,C or G
  misc_feature 524, 525, 526, 527, 528, 529, 530, 531, 532, 533, 534, 535,536, 537, 538, 539, 540, 541, 542, 543, 544, 545, 546, 547,548, 549, 550, 551, 552, 553, 554, 555, 556, 557, 558, 559,560, 561, 562, 563, 564, 565, 566, 567, 568, 569, 570: n = A,T,C or G
  misc_feature 571, 572, 573, 574, 575, 576, 577, 578, 579, 580, 581, 582,583, 584, 585, 586, 587, 588, 589, 590, 591, 592, 593, 594,595, 596, 597, 598, 599, 600, 601, 602, 603, 604, 605, 606,607, 608, 609, 610, 611, 612, 613, 614, 615, 616, 617: n = A,T,C or G
  misc_feature 618, 619, 620, 621, 622, 623, 624, 625, 626, 627, 628, 629,630, 631, 632, 633, 634, 635, 636, 637, 638, 639, 640, 641,642, 643, 644, 645, 646, 647, 648, 649, 650, 651, 652, 653,654, 655, 656, 657, 658, 659, 660, 661, 662, 663, 664: n = A,T,C or G
  misc_feature 665, 666, 667, 668, 669, 670, 671, 672, 673, 674, 675, 676,677, 678, 679, 680, 681, 682, 683, 684, 685, 686, 687, 688,689, 690, 691, 692, 693, 694, 695, 696, 697, 698, 699, 700,701, 702, 703, 704, 705, 706, 707, 708, 709, 710, 711-883: n = A,T,C or G
nagtntnnganccgcgttntnngacttactatanggcnaattggagctccccgcggtggcggccgcccgggcaggtacgcggggaccagagacaaaaacagaagaggggaaacatgtttcctactgacgacaggtgattacacgtgtgcttctgatggagggatcaggaaagataactgcaaagaggttgtcattactggttacacccaagcccgaggccagatctcttacttaatgacttggggaaggcacaaaaacatganaaaaaagtgttgtaccttggccgctntaaaactagtggatcccccggcttgcaggaatttcatatcaagcttatcataccgtccaccttnaagggggggcccggancccactttttgttccntttatgnangggttaantgccccctggcgtaatcattggncatagcttgtttcctggnnnnnnnnnnnnnnnnnnnnnnnnnnnnnnnnnnnntngnnnnnnnnnnnnnnnnnnntnnnnnnnnnnnnnnnannnnnnnnnnnnnnnnnnnnnnnnnnnnnnnnnnnnnnnnnnnnnnnnnnnnnnnnnnnnnnnnnnnnnnnnnnnnnnnnnnnnnnnnnnnnnnnnnnnnnnnnnnnnnnnnnnnnnnnnnnnnnnnnnnnnnnnnnnnnnnnnnnnnnnnnnnnnnnnnnnnnnnnnnnnnnnnnnnnnnnnnnnnnnnnnnnnnnnnnnnnnnnnnnnnnnnnnnnnnnnnnnnnnnnnnnnnnnnnnnnnnnnnnnnnnnnnnnnnnnnnnnnnnnnnnnnnnnnnnnnnnnnnnnnnnnnnnnnnnnnnnnnnnnnnnnnnnnnnnnnnnnnnnnnnnnnnnnnnnnnnnnnnnnnnnnnnnnnnnnnnnnn

SEQ ID NO: 6967 - DNA, 926 bp, Homo sapiens
  misc_feature 2, 3, 4, 7, 18, 19, 23, 26, 29, 109, 191, 228, 235, 324,390, 395, 402, 404, 411, 413, 432, 444, 446, 449, 450, 452,460, 467, 476, 481, 501, 545, 561, 597, 599, 602, 603, 648,677, 689, 693, 697, 702, 709, 715, 738, 739, 754, 769: n = A,T,C or G
  misc_feature 777, 789, 790, 796, 801, 811, 817, 819, 829, 834, 836, 850,852, 855, 859, 864, 875, 878, 885, 890, 891, 901, 903, 909,916, 925: n = A,T,C or G
gnnnganaccccattcanngacntanttnttggctgattggagctccccgcggtggcggccgcccgggcaggtacgcggggagagctggggatgcgggcacctgtcttncaggccctcttgctgtgtggccgcagactggtggttcagcctcttaactctgacatgaggaaactgaaaaacagagtagcanctcagactgccagagatcgaaagaaggctcgaatgantgagctngaacagcacgtggtatgatttagaagaagagaaccaaaaacttttgctagaaaatcagcttttacgagagaaaactcatggccttgttnttgagaaccaggagttaaaacagcgcttggggatggatgccctggttgcttaaaaagaagcggacncccangggaatnanttgaggncnctggcccggttttgctganttcccaacactnanacnncntgcccttntgaatcnggtgccggnccttntgttacccttcaaaaaattntgcccattggatttttgccgtttttgacttctttcaaattcagnagtcttgattttcctntttggggccatttttgggacaaacttttggaacccnanttnnttttttttttcaaaatggcccttttcccccaaaaaccttggccancccttgggaaggaaccttccccaaaaggntctttcccccanaaangganccccngtttccnttaacnaacccttcccttttttttttttnnggggggggaacgttnttttaaccccaaacntggggaanccccttttaatnnaacttnatttntttttttgancccaantnttttcccaanccccntnttttttaaaaaaananccntttngaaanaaaaaaacccnccnttttttngggtnntaaaaaaatngngaaaanccccttntcccccccna

SEQ ID NO: 6968 - DNA, 994 bp, Homo sapiens
  misc_feature 2, 3, 4, 9, 15, 17, 19, 20, 27, 29, 37, 169, 187, 189, 194,199, 206, 213, 221, 226, 240, 247, 250, 254, 274, 287, 290,332, 334, 337, 338, 339, 340, 342, 344, 345, 351, 352, 354,359, 360, 361, 362, 363, 364, 365, 366, 367, 369, 376: n = A,T,C or G
  misc_feature 377, 379, 380, 381, 382, 394, 395, 397, 398, 401, 413, 423,430, 431, 437, 438, 442, 443, 449, 450, 454, 456, 460, 461,462, 469, 470, 473, 488, 495, 497, 514, 520, 527, 528, 529,532, 533, 541, 543, 544, 549, 551, 553, 557, 572, 578: n = A,T,C or G
  misc_feature 579, 580, 581, 582, 586, 589, 591, 592, 593, 594, 595, 596,608, 611, 612, 613, 614, 615, 616, 618, 620, 623, 625, 627,628, 629, 630, 632, 633, 634, 635, 636, 637, 638, 641, 643,644, 647, 648, 649, 650, 651, 652, 653, 654, 655, 665: n = A,T,C or G
  misc_feature 666, 668, 669, 671, 672, 673, 674, 675, 677, 678, 679, 680,681, 684, 685, 686, 689, 690, 694, 695, 696, 697, 699, 700,701, 703, 704, 705, 706, 707, 708, 710, 712, 718, 719, 721,724, 726, 727, 729, 730, 732, 734, 736, 738, 739, 741: n = A,T,C or G
  misc_feature 746, 747, 749, 750, 753, 754, 755, 758, 760, 765, 766, 773,777, 780, 781, 782, 785, 787, 788, 789, 790, 791, 792, 793,796, 797, 801, 803, 805, 807, 808, 809, 810, 812, 813, 814,816, 818, 819, 824, 825, 826, 831, 834, 835, 836, 837: n = A,T,C or G
  misc_feature 839-841, 849-852, 855, 858, 860, 862, 865, 866, 871, 873,875, 878, 881, 883-885, 888, 889, 893, 895, 896, 900, 902, 906,907, 909, 913, 916, 918-920, 922, 927, 932, 945, 951-956, 959-961, 966, 968, 971-974, 976-977, 980-981, 987, 989, 993-994: n = A,T,C or G
gnnnagaanccgcantnanngacatantntatggctnattggagctccaccgcggtggcggccgcccgggcaggtacgcggggccatatgatgtgaccttactcaactgattatcaccctccctgtcatacaatacttcctggctcgatttcctggggggtggtctcancccactccaccccccctnanccgancctanagtaaangggccangcatcctncccangggaggggcagttnaaacaangancctnttctgggcttgcctaacctnacatttacttgancanaataacctggcaaggaagaactggttggaaaaggattgaaananccnnnnanannaataannanaaaannnnnnnnntngcccttnngnnnntttaaaaaaaanntnnggnactccccccggnggttagaaanaaatatnnaaatannaaanntttttnntaanancccnnnaaacctnnaangggggggggggcccnaaaaaananaaaattttttttttccncttttnaaaaaannnggnnaaaatttngnnccccntntngggnaaaaaaaaaaagaanaaaatnnnnntatnttntnnnnnnaaaaaaaaaaantannnnnnananaananannnnannnnnnntanannaannnnnnnnngaaaaaaaannannannnnnannnnnaannnaanntaannnnannnannnnnnananttaaannanaanannannanananannanaatannannaannnaantnaaaannaaaatanaaanatnnnganannnnnnnaannaaanananannnnannntntnntaaannnaaaanatnnnnannnaaaaaatnnnnaanaananangannaaaanananaanaanannnaannaaanannaatnanaaannanaatnatnannnanaatanaaaanaaaaaaaataaanataaannnnnnaannnaatananaannnnannaannaaaaananatann

SEQ ID NO: 6969 - DNA, 903 bp, Homo sapiens
  misc_feature 2, 3, 4, 7, 8, 10, 19, 20, 21, 27, 31, 36, 37, 249, 313,326, 339, 429, 440, 458, 466, 467, 503, 531, 558, 574, 592,603, 604, 605, 606, 607, 608, 611, 613, 614, 616, 619, 624,640, 651, 655, 657, 658, 659, 664, 666, 667, 668, 669: n = A,T,C or G
  misc_feature 670, 671, 672, 676, 686, 687, 690, 691, 692, 697, 698, 700,702, 703, 704, 705, 706, 708, 716, 719, 720, 721, 722, 725,726, 728, 729, 730, 731, 742, 743, 744, 745, 751, 753, 755,756, 757, 759, 768, 773, 778, 792, 793, 795, 796, 798: n = A,T,C or G
  misc_feature 804, 818, 827, 832, 834, 835, 836, 837, 838, 842, 843, 846,847, 851, 852, 853, 854, 855, 856, 857, 858, 861, 864, 865,866, 869, 870, 872, 873, 877, 878, 886, 887, 889, 900, 902,903: n = A,T,C or G
gnnnagnngngcccgcttnnngactantatngggcnnattggagctccccgcggtggcggccgcccgggcaggtacccctgaacttaaaataaaagttaaaaaaatgcaaagtgcttaggaaactctctttagtgcttatctcattgaaaagtattagaagctctttaagtgaccagagaagggcttgtgcttcttactttagagatgaggaaattaagtaacttgttcacagtcacctacttacaganaagtggagctggttctcatatacataatattctaaagtactttaatcggcccccaatagacatnttggcaggaaaanaagttcggctctngcctacttttctttttttcggcccctgcgaaaaaatcttccgcgaaagcgttagttaagccaaatgggcccccgttcccttgggccgctnttaaactaatnggattcccccggcttggnggaaattnnatattcaagcctttttgatacccgccaacctccaanggggggggcccggtaccccaccttttgnttcccttttatgaagggttaatttgcnccccttggggggtaanaattgggcataaacttgntttcccggggnnnnnncgntnntnacntgggnaaaaaacccctggccnttaccccaacnttantnnnccttngnnnnnnnaatncccccttttnnccnnntgggnntnannnnncnaaaaaggnccnnnnccnnannnncccttttcccnnnnaatttncncnnncntaaatgggnaaaanggganccccccttttaaanngnncnattaanccccgggggggggnggggggttnccccnannnnnaacnnttnntttnnnnnnnnccnttnnnccnntnntttnntttttttnncnttcttttttancnn

SEQ ID NO: 6970 - DNA, 983 bp, Homo sapiens
  misc_feature 2, 3, 4, 7, 13, 15, 16, 18, 22, 30, 34, 35, 333, 336, 359,366, 368, 422, 438, 475, 484, 487, 498, 501, 511, 513, 515,517, 553, 568, 572, 574, 577, 578, 599, 607, 636, 640, 641,647, 655, 656, 661, 667, 695, 696, 697, 710, 721, 728: n = A,T,C or G
  misc_feature 733, 757, 760, 763, 765, 766, 768, 773, 795, 797, 804, 821,824, 825, 829, 836, 852, 856, 869, 870, 871, 873, 878, 880,884, 885, 886, 890, 892, 893, 895, 902, 926, 941, 942, 943,944, 945, 946, 947, 954, 956, 958, 959, 964, 967, 977: n = A,T,C or G
gnnngangcgcgntnntngacntactatanggcnnattggagctccccgcggtggcggccgcccgggcaggtacaagtggtccttttcagagttggacttctagactcacctgttctcactccctgttttaattcaacccagccatgcaatgccaaataatagaattgctccctaccagctgaacagggaggagtctgtgcagtttctgacacttgttgttgaacatggctaaatacaatgggtatcgctgagactaagttgtagaaattaacaaatgtgctgcttgggtaaaatggctacactcatctgactcattctttattctattttanttngggtttgtatctttgcctaaagngccgtantnccaactctttgggattaccccttcctaaatagtcatactaagtagtccatactnccctgggtggtaaggngtattcttcttaaaaacctttaaaatggtctttgcantgcaagccnagnccattcaaaanaantggaatgggncntntntttttgggcttgggaaatttccaaaaaactcaaaanaaaaattgtggttcntttnanggnnaaaaaccattcttaaaccccntttgaaangggaaaaaaaaagccccccaaaatggggngggnnaacctnggaaaaannaaccncttaanggccttttaaaaaaatttggggcaacannntttttacctttanggggaagcccnctttggnacccnggggggggcctaaaagggttccanacnccnanntngaaanttttttaggggaaaaaaaaaananaatcccntttttaaaaaaaatttnaanncccnttttttnaaaaaaaaaaaaaaanccgngggggaattcccnnntnctttntntttnnncaantnnanaaaaaancccccctttttttttttttttttnaaaaaaaaaaacccnnnnnnntttttgntntnnccccnggntttttttttngggggg

SEQ ID NO: 6971 - DNA, 618 bp, Homo sapiens
  misc_feature 1, 5, 34, 433, 484, 511, 516, 517, 519, 520, 534, 547, 549,552, 563, 564, 566, 582, 584, 596, 601, 604, 607, 608, 609,610, 614, 615: n = A,T,C or G
ntaancgacctcctatagggcgaattggactccncgcggtggcggccgagtcatttttaaagaaaatcctttctgaataagacctaatgtctatacctgaagagaggagaccagcatgtcatcctcctttttttggcctctctcaaaagttacctgcccaaactgccatgagaacagaacctccagtttgcagccctgtggtgcgcaggtctctcccgccactgattcatacctatgtgtcagtcaggaaatctggctgatgacttgtcacaaacagcagatgaggaaaacgtcaaaaggaacgtaatttgggggtggtggtggggggggaacaaaatgtacctgcccgggcggccgctctagaactagtggatcccccgggctgcaggaattcgatatcaagcttatcgataccgtcgacctcgaggggggnccggtacccagcttttgttccctttagtgagggttaattgcgcgcttggcntaatcatgggcatagctgttcctgtgngaaanngnnatccgtcacaattncacacaacatacnanccnggagcataaanngnaaagcctggggtgccnangaggagctactnacatnatngcnnnngctnntgc

SEQ ID NO: 6972 - DNA, 643 bp, Homo sapiens
  misc_feature 22, 27, 42, 55, 56, 57, 536, 573, 643: n = A,T,C or G
gactcctatagggcgaattggnctccncgcggtggcggccgngtaccaggcccannnactttatgatgatggatgatgctgtcctctgcatgtgtttcagcagagatacagaaatgttagcaactggggcccaagatggaaaaatcaaggtgtggaagattcagagtggacaatgtttaaggagatttgagagggcacacagtaagggtgtcacctgtctaagcttttctaaggatagcagtcagatccttagtgcttcttttgaccagacaattagaattcatggtttaaaatctgggaaaaccctgaaggaatttcgtggccattcctcctttgttaacgaagcaacatttacacaagatggacattacattattagtgcatcctctgatggcactgtaaaggttaagtatttgctatcagtttattttgggatgtctaccccatctttgtcctttgaggagttttcagtggtgataatgggaatgattgtgctgtagtaaacctctttcctggctattttagctggaattgangggagtctgaaacacaccagtattctgtgggtaattnccattggcctgggaccccatctcaacctttcaatcaaacaacttatcatgtgtggaaaagaggaaggtgn

SEQ ID NO: 6973 - DNA, 603 bp, Homo sapiens
  misc_feature 10, 11, 53, 77, 81, 167, 227, 342, 453, 461, 510, 582, 599: n = A,T,C or G
actacttggnnaattggactcacgcggtggcggcgagtccggggctgtagtgnttgtcttggtttttctcttcttcnctangcctccggctctcgtagcctccgcggcgctctagactagtggatcccccggctgaggaattcgatataagcttatcgatccgtcgncctcgagggggggccggtcccagcttttgttccctttagtgagggtaattgcccccttgngtaatcatggtcatagctgtttcctgtgtgaaattgttatccgctcacaattccacacaacatacgagccgggagcataaagtgtaaagcctggggtgcctaatgagtgagctanctacattaattgcgttgccctcactgcccgctttccagtcgggaaacctgtcgtgccagctgcattaatgaatcggccaacccccggggagaggcggttgcgtattgggcnctcttccntttctcgtcactgactcgctgcgctcggtcgttcggctgcggcaacggnatcactcattaaaggcggaatacggtatccacagaatcagggatacgcaggaaagacatgtgagcaaaggcngcaaaaggcagaaccgnaaag

SEQ ID NO: 6974 - DNA, 561 bp, Homo sapiens
  misc_feature 4, 16, 28, 61, 92, 97, 108, 163, 220, 229, 242, 280, 348,415, 417, 437, 450, 499, 510, 518, 526, 528, 552, 557: n = A,T,C or G
gtancactactatggngaattggactcncgggtggggcgccggcaggtcatttttgaatgnctaaaaatctcattctgctgctgtcagttgnttttnacctgctgagnggcactgaaacagaagactcggggtgacacccgctgatcttaacaaggattctgnaggaaactacaaaaaggagaactgaaaatttagacatacagttggcattgtaaaaancatcagttnctctcataccttncaagtaaaccaagtaaaataagtgttggagtacacttnccttaaaagaatttaaggagtgatagctctttctgttctgcattcccaacattcctggggaaaggagntcaatgagtaatcctatttcactgacccaagatggaacttggttgcctaaacatctgataatatagncngctgattcttaaaattcgtnattgaggtatttnatgctgtacacctgcaatctggttgattgttctgtatctgcactgctcntgtattggcanacactttnagaatatntnctctcgggcaaatctgtttttagnatggncaac

SEQ ID NO: 6975 - DNA, 595 bp, Homo sapiens
  misc_feature 2, 4, 28, 34, 70, 164, 188, 225, 415, 416, 420, 427, 431,432, 439, 448, 453, 461, 463, 495, 505, 515, 516, 518, 519,520, 523, 524, 528, 529, 530, 532, 536, 537, 539, 540, 543,558, 563, 568, 571, 572, 573, 576, 578, 581, 585, 588: n = A,T,C or G
  misc_feature 589, 591: n = A,T,C or G
tnancgactcactatagggcgaattggncctccncgcggtggcggccgagtccacagcaccccaggcaancccccaactcatgatttatgaggtcagtaatcggccctcaggggtttctaatcgcttctctggcctccaagtctggccaacacggcctccctgncatctctggactccaggctgaggnccgaggctgattattactgcagctcatatacaatcancagcagtccttgggtgttcggcggagggaccaagctgaccgtcctaggtcagcccaaggctgccccctcggtcactctgttcccgccctcctctgaggagcttcaagccaacaaggccacactggtgtgtctcataagtgacttctaccgggagctgtgacagtggcctggaaggaaatagcacccccgnnaagnggggagngganncaccacnccttcaaanaaagnaacaaaantncctgcccggggggccgttttaaaactaggggncccccgggcnggagaaattnnannnaanntttnnnancccnncnnccngggggggggcccggnccccnttttnttnnnttnanggngggnaanngncccg

SEQ ID NO: 6976 - DNA, 544 bp, Homo sapiens
  misc_feature 7, 8, 9, 18, 53, 62, 77, 103, 109, 138, 145, 154, 159, 162,168, 188, 191, 200, 202, 219, 254, 260, 342, 355, 372, 394,415, 459, 462, 514, 516: n = A,T,C or G
acttggnnnattgactcncgcggtggcggcgagtcttttgccttgtagaattnctgagtttntttctgagtctggtnatactgtgagacacggcaatggattncggcgnctcggatcttagagagcttggaggccgcnccgctgnactttggcnacgcncanctgggncagctccaccttcaggtcgncanctgtttcanantcctccttcttcttccncgaagactcgaccttgacttggcattgctgacaanccgcangccgcccccgcgtcctgccggcggcgtctagactagtggatcccccggctgaggaattcgattcaagcttatcgatccgcgncctcgaggggggnccggacccacttttgtncctttagtgagggtaattgccncttgccgtaatcatggcatanctgtttctgtgtaaattgtatccgtcacaattcccacacacatncanccggacataaagtgtaagctgggtgctaagaggagctactcacattattgcntngctactgccgtttcagcggaaactgcga

SEQ ID NO: 6977 - DNA, 618 bp, Homo sapiens
  misc_feature 2, 8, 9, 20, 28, 35, 61, 114, 233, 287, 300, 566, 583, 590,598, 603, 617: n = A,T,C or G
tntgggcnnattggagctcncgcggtgncggccgngtctataatactgctgcagtaataanctgcccatcttcagcctgcaggctgctgatggtgagagtgaaatctgcccagncccgctgccacctgaatcggtcagggacccccggattcccgggtagatgcccagtaaatgagcagcttaggaggctgcctggtttctgctggtaccctgcccgggcggccgctctagantagtggatcccccggcctgcaggaattcgatatcaagcttatcgataccgtcgncctcgaggggggnccggtacccagcttttgttccctttagtgagggttaattgcccgcttggcgtaatcatggtcatagctgtttcctgtgtgaaattgttatccgtcacaattccacacaacatacgagccgggagcataaagtgtaaagcctggggtgcctaatgagtgagctaactcacattaattgcgttgcgctcactgccccgctttcagtcgggaaacctgtcgtgccagctgattaatgaatcggccaacgcccgggagaggcggtttggnattgggcgctcttccgnttctcgntactgatngctgngctcggtcgtcggnt

SEQ ID NO: 6978 - DNA, 623 bp, Homo sapiens
  misc_feature 5, 29, 51, 245: n = A,T,C or G
acctnctatagggcgaaattggagctccncgcggtggcggccgagtccagnttctttcaaaagtcagattgagtaagggatagaaaattaagttcatcttaaggaacagccaagcgctagccagttaagtgaggcatctcaattgcaagattttctctgcatcggtcaggttagtgatattaacagcgaaaagagatttttgttaaggggaaagtaattaagttaacactgtggatcaccttcgnccaagggacacgactggagattaaacgaactgtggctgcaccatctgtcttcatcttcccgcccatctgatgagcagttgaaatctggaactgcctctgttgtgtgcctgctgaataacttctatcccagagaggccaaagtacctgcccgggcggccgctctagaactagtggatcccccgggctgcaggaattcgatatcaagcttatcgataccgtcgacctcgagggggggcccggtccccagcttttgttccctttagtgagggttaattgcgcgcttggcgtaatcatggtcatagctgtttcctgtgtgaaattggtatccgctcacaattccacacaacatacgagccgggacataaagtgtaaagcctg

SEQ ID NO: 6979 - DNA, 560 bp, Homo sapiens
  misc_feature 2, 4, 13, 55, 60, 70, 114, 123, 185, 200, 243, 281, 289,292, 402, 473, 486, 504, 533, 551: n = A,T,C or G
gncnattgactcncgggtggcggcgagtcgcggggagaagagaggcagcagccanagtcnagtaccctgncagacatcctggactaagctctctcaaagaggtggcagagaagncagcagagncatgggacccccctcagcccctccctgcagattgcatgtcccctggaaggaggtcctgctcncagcctcacttctanccttctggacccacccacactgccaagctcactattgaatccncgccgttcaatgtcgcagaggggaaggaggttcttctnctcgcccncanctgccccagaatcgtattggttacagctggtacctgcccgggcggccgctctagaactagtggatcccccgggctgaaggaattcgatatcaagcttatcgataccgtcnacctcgagggggggcccggtcccagcttttgttcctttagtgagggtaattgccccttgcgtaatcatggnatagctgttctgngtgaaattgtatccgttnaattcaacacatacagccggggcataagntaagctgggtgctatgangactactaa

SEQ ID NO: 6980 - DNA, 582 bp, Homo sapiens
  misc_feature 11, 13, 14, 20, 21, 22, 23, 24, 27, 28, 32, 33, 34, 37, 43,44, 45, 46, 47, 49, 50, 55, 57, 60, 61, 65, 66, 67, 68,69, 72, 73, 75, 76, 81, 86, 88, 90, 92, 96, 99, 111, 118,128, 154, 158, 195, 236, 238, 387, 437, 459, 484, 499, 500: n = A,T,C or G
  misc_feature 505, 506, 547, 564, 572, 582: n = A,T,C or G
gcgtcggtgcntnntctcgnnnnnttnnagtnnnttntttgannnnntnngtganantanntatnnnnnagnnanngtatntgttncntntntttnttntaactatacgtngaattgnagctccaccncggtggcggccgcccgggcaggtacncggngtggggagcctagctgtgctgtgggtccaggaggcangaactctgggtgcctcaccatggcctggatccctctacttntncccctcctcactctctgcacaggctctgaggccgcctatgagctgacacatgcctccctcggtgtcatgtgtccccaggacggacggccaggatctcctgttctggagatgcactgccaaagcaatatgctttttggtggcagcagaanccaggccaggcccctgtgttggtgatatataaagacagtgagaggccttnagggatccctgagctgattctntggcttcagctcggggacaacaaancacgttgaccatcanntgganntcaggcagaagacgaggctgactactactgtcaatcagganacattagtggtacctcnggccgctntagaactagn

SEQ ID NO: 6981 - DNA, 503 bp, Homo sapiens
  misc_feature 3, 13, 17, 25, 27, 35, 40, 51, 56, 57, 60, 67, 76, 103, 177,244, 328, 350, 404, 406, 417, 422, 431, 434, 442, 443, 450,463, 495, 498: n = A,T,C or G
ccngtttaccctntaantccccccntnttggaaantcccnccccccgcggnggttnncgnccgggcntgtccatantttttacggactaaattgtattccctnacatatgctgaggtcctaacccctcaatatgattatatttggagatagggccttgaggaaggtattaaaagtcnaatgaggttataaggaagggccctatcgggtaggaatggtatctgtccttataagatgagagagctngctctctctctgtatgcatacagaagaaaggccatgtgaggatacagcaagaagatggccatctataagccaggaagaggcctnaccagaaaccaaacctgatggnatcttgatcttggactactagcctttgaaaatgggagaaaataaatttctgttnanagacaaccagnctggnggtgttccnctnaggcagcnncaagctngcctaaaccaaanctattatcaaccccattttgtagatgaggganccngaggg

SEQ ID NO: 6982 - DNA, 547 bp, Homo sapiens
  misc_feature 3, 4, 5, 7, 8, 9, 10, 11, 12, 13, 17, 18, 19, 22, 23, 25,26, 27, 28, 29, 31, 34, 35, 36, 37, 38, 39, 40, 41, 43,44, 45, 46, 47, 48, 49, 50, 53, 57, 58, 60, 61, 63, 65,66, 68, 71, 72, 73, 74, 82: n = A,T,C or G
ttnnntnnnnnnntgtnnnatnntnnnnntntcnnnnnnnnannnnnnnnagntagnnanngntnngnggnnnncgaatggntaggcgaattggactccaccgcggtggcggccgcccgggcaggtacagaaagaagtctcatcttcctttgaccacgttatcaaggagacaactcgagagatgatcgctcgttctgctgctaccctcatcacacatcccttccatgtgatcactctgagatctatggtacctgcaggcctcctacacctacctctctctggacttctatttcgaccgcgatgatgtggctctggaaggcgtgagccacttcttccgcgaattggccgaggagaagcgcgagggctacgagcgtctcctgaagatgcaaaaccagcgtggcggccgctctagaactagtggatcccccgggctgcaggaattcgatatcaagcttatcgataccgtcgacctcgagggggggcccggtacccagcttttgttccctttagtgagggttaattgcgcgcttggcgtaatcatggtcat

SEQ ID NO: 6983 - DNA, 461 bp, Homo sapiens
attggagctccccgcggtggcggccgaggtactctgtcaccatgtggaggctgttgatctcaatgaaacggctcaatttggtggcatcaatgctttcaatgtcttcgtcctctaaattcagttgttcattgtctaccaggcgaaagaggcagatggtgttcccagtgatgttgtagtgtgtcagaacctcagaatcagtgctgatcccaaatgacacgcctgggaatttttgcaccatgctatggagtatgggcactgctggtatttctaaatcctggaagaagcctatgacagccacctcagtggcagcaatgaattccatggcagctgggacatctgtgagccacgtgggttcctgggcagcaccaggaccatctgaggatttctcaacttctgcagcaacttctgcagccagctcacacgtgaggagaaataagaggaacatgaacctggacggggct

SEQ ID NO: 6984 - DNA, 579 bp, Homo sapiens
  misc_feature 1, 6, 7, 8, 12, 14, 15, 16, 19, 20, 22, 23, 25, 27, 28, 29,31, 32, 35, 37, 39, 41, 45, 46, 47, 48, 50, 54, 56, 61,63, 65, 66, 67, 68, 74, 77, 78, 80, 83, 84, 85, 86, 87,88, 89, 90, 92, 94, 98, 100, 106, 108, 124, 136, 139, 154: n = A,T,C or G
  misc_feature 304, 496, 545: n = A,T,C or G
nacgcnnngganannntcnngnncngnnntnnganantnancgannnntnatcngntcttngntnnnntttagnagnntnatnnnnnnnntntntgtntntctttngncgaattggagctccancgcggtggcggncgnccgggcaggtaccancaatcagggaactcctatctgttttgaatggattcacaccagccacaagcctggaaagatggtgtcacaatctacagtcaggcaggattctcctgtggagccctgggaagggatcagcgatcactctggcattattgatggttcgcccanactcctgaacactgaccatcctccttgccaattagacatcaggctcatgaggcacaaagctgtctggattaacccccaggatgtgcagcaacagccgcaggacttgcaatctcaggtgccagcagcagggaacagtgggacccattttgtgacagatgctgcctctccctcagcccttcaccttcgtgcctnggggactccctggcagagacaacgttgtctgaggataccacagactccngttggcagcgcttctccccatggctcgagtgaat

SEQ ID NO: 6985 - DNA, 1170 bp, Homo sapiens
  misc_feature 2, 6, 10, 16, 18, 21, 23, 26, 28, 32, 33, 34, 36, 41, 45,47, 54, 57, 58, 61, 62, 67, 69, 70, 75, 79, 91, 96, 97,98, 99, 101, 106, 109, 110, 112, 114, 118, 126, 127, 128,129, 204, 205, 214, 228, 231, 233, 462, 515, 526, 577, 585: n = A,T,C or G
  misc_feature 593, 611, 667, 710, 722, 774, 786, 807, 816, 819, 828, 855,907, 912, 913, 920, 928, 937, 944, 954, 959, 977, 1003,1005, 1009, 1011, 1018, 1049, 1050, 1054, 1055, 1067, 1070,1073, 1105, 1107, 1109, 1112, 1129, 1149, 1152, 1165, 1170: n = A,T,C or G
cncccntaanactganantananagntntatnnntnttacngttntntgttaanatnnatnntttantnnatttnttantttttttttagntagtnnnntntgatnatnntntnctanttactatnnnnctaatatggagctccaccgcggtggcggccgcccgggcaggtacccttggaagatgggaaaggtgagggaaatanngggaagcanggtcagaacatccnctnanaacatagcacctcagtagagcttacattatagtgccagggtagagttattactgaatagcttaggatgatgaacattaaccttcctacaggagtagtagcagctgatttggtgaccatcattggtcaccttttagtgtaactgcaaactaagaacaattattggcttgacatatactccatgtaggggaaagtgatggggagaaggccagcactctgtgtgggtccatncttggaaagccactgcatccgattttgcttccccctctggttttaaggggagnatcttttttanaccttttcctttgcttaaccttgccttttcaggtaaaatttctttggatgngcctttcngattttcntgggatttcaaggaccanttctactttcttcaccccctttctttttttttcaattttggttaaaccaaattggnatccttcaaaaccaccggttggggaccaaaaaaatttgggacntttgccaagggnaaattaaattttttccaaggttttttttccttaaaaaggacccctttggggnattttaaacaanggtttggaatctaccttaaantggccttgnatnggccaaggnttaccctttcgggcccggattcctaanaaaacttaggtggggaattcccccccgggggccttggcaagggaaattttcnaattnntccaaangcctttanttcgaaatncccgggnccgaaccctntgaanggggggggggcccccggnttacccccaagctttttttggtttcncntttnangtggaanggggtttaaaattgccgcgcctttgggccgnnaaanncaattggggccntangcntgttttcctgggggggaaaaatttggttattncncnttnacaattcccacacaaancattacgaagccccggggangcnattaaaagtggtnaaaan

SEQ ID NO: 6986 - DNA, 1103 bp, Homo sapiens
  misc_feature 1, 2, 4, 7, 8, 9, 11, 12, 13, 15, 18, 24, 25, 26, 27, 31,37, 39, 40, 41, 42, 45, 48, 51, 53, 54, 56, 59, 62, 63,64, 67, 68, 70, 74, 75, 78, 80, 83, 85, 86, 88, 89, 90,91, 94, 95, 97, 99, 100, 101, 104, 105, 106, 107, 115, 116,117: n = A,T,C or G
  misc_feature 118, 120, 124, 127, 128, 129, 131, 135, 136, 137, 138, 142,147, 155, 221, 242, 467, 569, 634, 691, 789, 794, 841, 855,857, 879, 925, 952, 954, 1007, 1015, 1023, 1027, 1037, 1057,1069, 1077, 1078, 1079, 1081, 1084, 1095: n = A,T,C or G
nncncannntnnntngantatgtnnnntgtnatatanannnnaanatnttntnnantgnttnnnttnntncatnncgnanaanannannnnacnnantnnnaannnnggagggtnnnntntgcnctnnntntacnnnntatnggtcntattgganctccaccgcggtggcggccgaggtacaaaaatacatttttccacatacaaaagagagaaaaaaagnaagacatgtggcgggtggcanaggggaggcccaatcccaacaccctacaaggttccatggaatggagaaggaacaaaaaaatccccaattattttggggtaagatgtgccccagaaaaggtgaaatctatgcaataaaacccaggttttcttcaaatctagcatctagggatttctatcagagtttcaaataatcagaatttctatcagaatttctacccctgagggtgacaccctactaactgtnagggtttcttttcattaaaaaatgaaggaccatctttttcacccagaatgtattcaagcttataaaaactgggcttcaagaagcctacactttaagcccagnagtgggaaaaaaaaaaatagtgcatatttttccgacaggcaaatttttggaattggatgccttgnaggttctcaaatcccacccaagcaccccagatatcatgtttacctccctcaagttgnaattacaagtttaaaaatgatgatcttatccgaagatcctcaataagaagccacagtgccccttttcaatgttttccgggttaaagaagggttggggnagggnagggaaattgaaagccggggttttttaccacccccagcccccaagtngaccagcctttaangncctttaaaccattgccggggcnattctttaacaaatggaccctttaaaacaaagggggaagggggccnaaagggcaagggggtttgggcggatcnanttagccttttggccccacaagaaatgcccatggttttttccccttggcccaancataaaangccaaaancctngtttttagtnaccctgccccgggggcgggnccggttcttaanaaactagnnngnatnccccccggggncttgcaag

SEQ ID NO: 6987 - DNA, 1089 bp, Homo sapiens
  misc_feature 1, 2, 3, 5, 10, 12, 13, 14, 18, 19, 23, 24, 25, 27, 29, 30,31, 33, 34, 36, 39, 40, 41, 47, 48, 51, 52, 55, 61, 62,63, 65, 66, 67, 68, 69, 70, 71, 72, 74, 75, 76, 77, 82,83, 86, 87, 89, 92, 96, 97, 98, 99, 106, 109, 111, 112,114: n = A,T,C or G
  misc_feature 185, 189, 190, 213, 503, 538, 607, 619, 695, 774, 788, 800,820, 828, 853, 864, 868, 876, 918, 919, 921, 925, 939, 942,960, 965, 993, 994, 1012, 1019, 1029, 1036, 1046, 1055,1062: n = A,T,C or G
nnntntctantnnntttnntttnnntntnnntnntntannnttgttnnagnnttnagttannnannnnnnnntnnnntttannagnntngantatnnnntgttctnctntnngncgaattggactccaccgcggtggcggccgcccgggcaggtacgcggggcaccccggacagagacgtgaagnaggnnaataaatagatcagaatgactgnaaaagccccagagccacatgtggaggaggatgacgatgatgagctggacagcaagctcaattataagcctccaccacagaagtccctgaaagagctgcaggaaatggacaaagatgatgagagtctaattaagtacctcggccgctctagaactagtggatcccccgggctgcaggaattcgatatcaaggcttattcgatacccgtccgacctcgagggggggggccccggtaccccaagcttttgttccctttagtggaaggggtttaattggcgccgccttgggcgntaatcattggtcattagcctgtttttccctgtgtngaaaattgtttatcccgctcacaaatttcccacacaaaccattaccgagcccggggaagccattaaaantgtaaagccctnggggttgccctaatggaagtggaagcttaactcacattaattgcgtttgcgctcactgccccgctttcccagtccngggaaaaccctggtcgttgcccagcctggcatttaaatggaaatcgggcccaaacgccgcggggggaggaagggccggntttggccgtaattngggggccgcctntttcccggttttccttcggncttcaacntggaccttcgcttgcggcttcgggntccgttccggncttngcgggccnaagccggttatttcaagccttcaccttcaaaaagggcgggtnnantacngggttattcccacnagnaattcaagggggggattnaccgncaagggaaaaggaaaccaattgttggannccaaaaaaggcccacgcnaaaaaanggccccaggnaacccgntaaaaaaaanggccccgcngtttgcnttggcgttttttttccaataaaggccc

SEQ ID NO: 6988 - DNA, 1229 bp, Homo sapiens
  misc_feature 12, 17, 20, 21, 24, 30, 33, 35, 37, 40, 44, 45, 46, 47, 49,52, 54, 55, 57, 63, 65, 68, 70, 74, 76, 79, 81, 84, 86,87, 88, 90, 91, 92, 93, 97, 103, 104, 105, 106, 110, 111,112, 114, 119, 120, 124, 129, 130, 139, 141, 202, 234, 235: n = A,T,C or G
  misc_feature 236, 422, 437, 443, 475, 476, 512, 517, 519, 532, 550, 552,560, 564, 569, 572, 579, 586, 591, 607, 615, 616, 631, 676,677, 686, 689, 703, 735, 789, 803, 828, 877, 896, 900, 927,939, 953, 954, 973, 980, 983, 991, 993, 996, 1000: n = A,T,C or G
  misc_feature 1001, 1002, 1014, 1015, 1029, 1041, 1043, 1044, 1045, 1047,1052, 1083, 1087, 1101, 1102, 1106, 1110, 1116, 1117, 1121,1122, 1124, 1139, 1161, 1166, 1185, 1186, 1199, 1203, 1205,1222, 1225: n = A,T,C or G
ctctctgatgcnaaaancgnntgntttgtntangnantantatnnnntngtnanngnatttananatntnacancntantntantnnnannnnaagncagagnnnnagannntngtgtnntcantatanncagaatagnanctccaccgcggtggcggccgaggtacgcggggtaacataccgtgattttcatgaagaaatncttctgaagggagagttctcccctgctgcttnnnatgccagagctgtgttgttgcacacctgcaaaacaaggcacatttccccctttctctttaaagccaaagagagatcactgccaaagtgggagcactaaggggtgggtggggaagtgaaatgttaggcgatgaattcctgagcaccttgtttttcttccaaggttcgtaagctcctctcttgccctntccaagcctgtaacnctcggnagggactaatcttttggtttcctttatccctnntgtccttggtttagagtggggttcaagcccccaagnagggnancttggaattaaanccaaaaattgggctaagntnttttttanaaangggantgnaggttgnggaaaangttancccttgccccccgggngccggggnncggccattcttaatnaaaccttaagttggggaattcccccccccgggggcctggccaagnngaaaatttncgnaataattcaaaagncctttaattcggaatttccccggtccggaccnttcggaggggggggggggccccccgggttaaccccaagcctttttttggtgtcnccctttttaaggtngaagggggttttaaatttgccgccngccttttgggccgtaaattccattgggttctataagccttgtttttccntggtgggtgaaaaatatgnttanttccggcttcacaatttccccaccacnaaaccatttacngaagccccgggggnngccatttaaaagttgtttnaaaggcnctnggggggtngnccntaannnggaggttggaanncttaaacctttcanaatttaaatttngnnntntggcnccttccacttggcccccggctttttacccanttcngggggaaaaacccnngttncttngcccanncttnncntttaaatggaaaatncgggccccaaacatccgccggnggganaaaaggggcctgttttggnnggtatattggggncccncntcttttccgcttttccnttngttc

SEQ ID NO: 6989 - DNA, 1217 bp, Homo sapiens
  misc_feature 4, 6, 8, 10, 11, 12, 14, 19, 24, 30, 32, 33, 39, 40, 41,46, 48, 50, 52, 55, 57, 59, 66, 69, 71, 74, 77, 78, 80,83, 84, 95, 96, 98, 100, 101, 102, 105, 107, 116, 118, 121,122, 123, 126, 132, 137, 138, 144, 145, 146, 167, 203, 213: n = A,T,C or G
  misc_feature 226, 237, 239, 241, 242, 244, 246, 248, 251, 254, 305, 400,473, 481, 526, 532, 537, 550, 558, 602, 637, 647, 672, 684,732, 752, 755, 775, 787, 792, 815, 824, 832, 840, 847, 865,878, 908, 914, 917, 919, 920, 921, 925, 936, 937, 946: n = A,T,C or G
  misc_feature 961, 970, 972, 975, 979, 1003, 1013, 1017, 1032, 1037, 1049,1053, 1060, 1071, 1074, 1079, 1089, 1098, 1102, 1104, 1109,1112, 1135, 1139, 1149, 1160, 1164, 1168, 1183, 1194, 1199,1211, 1216: n = A,T,C or G
cacncncnannntntatanatatnattatntnnataagnnntttanantntntantntnctctttncananttnttnncnttnntccatctcttnncntnnnttnantagaggttntngannnagngttacnctttnntggcannnttggagctccacccgcggtgncggccgcccgggcaggtacgcggggttgggcctcangaagcagcangggaggagggggnagccatggcangnanncntntnttnctnggcgtccttgcttactgcacaggatccgtggcctcctatgagctgactcanccaccctcagtgtccgtgtccccaggacagacagccagcatcacctactctggagataaatctggggaataaatatgcttgctggtatcaagcangaagccaggccagtccccttgtgcttggtcatctatcaaggataacgagccggccctcagtggaatcccttgnagccgaantcctcttggctccaaacttcttggggaacaccaagccacttcttnacccantcagncgggggaccccangcctatgngatggaggccttgaccttatttacctggtcaagggccgtggggnacaagcaagcccacttggaagggatgttgggttantttcggggcnggggaagggggaccccaaagccttntaccccgttccnctaagggtccaaggctcccaaaggccttgccccccccttccgggttcnaacctttttgatttcccccngcncccttcccttccttggagtngaaggctttttnaaagncccaaaccaaatggggccccacnaacctgggntggatggntcctcaantaaagtntgaacatttccttacccncggggaagccccnatcggacaaaggttggtcccttgtgtaaangccaanaantnnncaanccccccccttnnaaagggccngggtaagtttggganaaaccaaancnaanaacnccttttctaaaaccaaataagtcnacccaaccanaggntccccttgtggcccntttcntaagaaacctangttngggaatnccccccggggnttngcaangaaatttccnaaatattcnaaancnttatntcntaatttccccggtccgaaccttnaaangggggggggncccccgggtancccnaaanttttttgtttctccntttataagggnggggnttaaatttgccnccccnc

SEQ ID NO: 6990 - DNA, 1143 bp, Homo sapiens
  misc_feature 3, 6, 8, 11, 12, 18, 19, 20, 21, 22, 31, 33, 34, 35, 37,43, 45, 46, 47, 48, 50, 52, 53, 58, 59, 61, 66, 69, 73,78, 79, 80, 81, 82, 83, 84, 89, 90, 95, 98, 99, 100, 102,103, 113, 121, 124, 197, 199, 200, 217, 223, 224, 278, 453: n = A,T,C or G
  misc_feature 461, 515, 532, 546, 566, 573, 575, 658, 684, 713, 718, 727,732, 772, 785, 792, 817, 825, 839, 844, 848, 870, 874, 875,879, 880, 882, 883, 917, 921, 934, 935, 940, 945, 965, 968,973, 979, 1012, 1019, 1021, 1033, 1037, 1039, 1045: n = A,T,C or G
  misc_feature 1047, 1050, 1051, 1052, 1061, 1072, 1079, 1081, 1091, 1094,1104, 1107, 1108, 1111, 1112, 1116, 1125, 1126, 1129, 1132,1134, 1138, 1142, 1143: n = A,T,C or G
canctncnatnnaagtannnnnttttttgtntnnnantatatnannnntnannttatnntngtaantcnaacnttccnnnnnnntaatnnagggngannngnntgcgaatacnatcacttnggncgaattggactccaccgcggtggcggccgcccgggcaggtacgcggggcaagttggcagtcaacatggtccangnnccacgtctccataaacnttattnntggctttgcccctctcaccagccgtggaagccagcagtatcgagctctcacagngccggaactcacccagcaggtcttcgatgccaagaacatgatggctgcctgtgactcccgccacggccgctctagaactagtggatcccccgggctgcaggaattcgatatcaagctttatcgatacccgtcgacctcgagggggggcccggttacccagcttttgtttcccttntagtgagnggttaatttgcgccgcttggccgtaatcatggtcaataagctgttttcctgtgnggaaaaatttgtttatnccggcttcacaaanttcccacacaaacataacgnagccggngnagcattaaaaggtgttaaaagccctggggggttgccctaatggagtgaggctaaacttcaacatttaattttgcggtttggcngcctcaacttgccccccggctttttncaaggaccgggggaaaaacccttggtccnttggnccaagcctngccantttaaattgaaaatacggggcccaaaccgccggccggggnggagaaaggcccngtttttnggccgttatttgggggccgccttcntttcccgntttttccctccgcntcaanttgnactttcggcttgggcgccttcngggnnccgnntnngggcattgcaggccgaaggccggggtaattcaangctncaatttcaaaaannggtcnggganaattaaccgggttattccancangaaanttcacnggggggaataaaccgcacgggaaaaaaaaaacntttgtgnangccaaaaaaggnccancncaaaangnccnnnggaaacccnttaaaaaaaanggccccncnttgcttggcnatnttttcccatnaannganntccngcccccccnnggncananagantcann

SEQ ID NO: 6991 - DNA, 1124 bp, Homo sapiens
  misc_feature 2, 5, 12, 14, 15, 16, 17, 18, 23, 24, 28, 29, 30, 31, 32,33, 34, 36, 37, 38, 39, 45, 46, 47, 48, 49, 50, 52, 54,55, 56, 62, 63, 64, 65, 67, 68, 71, 74, 75, 76, 79, 81,82, 84, 85, 86, 87, 89, 90, 91, 92, 93, 98, 100, 106, 107,108: n = A,T,C or G
  misc_feature 109, 110, 114, 117, 125, 133, 207, 208, 209, 210, 234, 508,540, 685, 713, 722, 742, 749, 753, 774, 814, 821, 823, 824,828, 830, 864, 884, 887, 891, 896, 936, 939, 940, 967, 988,999, 1000, 1007, 1009, 1020, 1040, 1049, 1069, 1070: n = A,T,C or G
  misc_feature 1071, 1092, 1093, 1095, 1100, 1112, 1117, 1121: n = A,T,C or G
cnctncctcctnannnnntattnnttannnnnnntnnnnttatannnnnncntnnnacattnnnnannttnatnnnatntnncnnnntnnnnnctagntnagggannnnngggnggngctcactntagggcgnattggagctccaccgcggtggcggccgaggtacctcagttttccagggcctgacagtcctggatgaacttatannnngcaaaccagaaaagcaagggcttnttaccctggcaccaaggctgctccatgtaaagaatgctaccccgtgtggccagactcgggtaagccacctttcaactgcttcagtgtaatttattttcccacatcccagaaagctctggaaaaacacataaatgaatacatttattctctcacaggatactacactgttacccagtgtgaagggagcagcccatgtggctcccaagctccctttagcaaaaaggggtgggtttcttcagaaactgctccattcaccgaagtcctgcaacccagnaggcctgggcttcaaactcacacaaaggttcntgagccaatggccagcaccctttgggaatacttcgccttccccgcttgcgcaagctggtgggggatggggttgtctttaattcggtgttcccccaccaggggtttccccgttgtcccttcaaatggagggacccaccgtttgttntggggaagtccaaaattcttgggggggnttcaatttncgggggggcccaaggcccantggccangttngccccccaccaaatgggaagncgccctttttttttctttttcttgggccccctttggaatngggcccnanntaantnttctttgggttccggcccccaccctttggccccnacttcccatttctttttttnacnccgngggtnccccttgccccggggccgggcccgcgttcttaaaaaactnagnngggaatccccccccgggccttgccaangaaaatttcgatttttcaaancccttaattcnnatacccngncgaacccttcnaaggggggggggcccccggntaccccaancttttttgtttccctttaannngaaggggtttaatttgccgcnncnttggnggtaaattcaantgggncaanaag

SEQ ID NO: 6992 - DNA, 1306 bp, Homo sapiens
  misc_feature 2, 5, 10, 13, 14, 15, 16, 17, 18, 21, 22, 23, 24, 25, 26,29, 34, 36, 43, 45, 46, 49, 50, 51, 54, 57, 65, 67, 75,76, 78, 79, 80, 86, 88, 89, 91, 93, 94, 97, 98, 102, 103,107, 110, 115, 117, 118, 120, 121, 125, 130, 132, 138, 139: n = A,T,C or G
  misc_feature 145, 147, 165, 177, 207, 211, 212, 219, 233, 235, 240, 245,252, 253, 256, 271, 274, 280, 288, 290, 300, 304, 307, 374,380, 385, 386, 399, 402, 406, 412, 418, 437, 451, 462, 463,465, 481, 483, 493, 496, 502, 527, 534, 570, 584, 605: n = A,T,C or G
  misc_feature 612, 615, 617, 619, 624, 633, 650, 677, 720, 736, 740, 742,756, 769, 774, 788, 797, 805, 806, 807, 818, 839, 840, 842,843, 849, 850, 855, 862, 867, 882, 893, 920, 972, 975, 988,992, 993, 995, 1001, 1040, 1043, 1062, 1079, 1082: n = A,T,C or G
  misc_feature 1094, 1102, 1111, 1113, 1124, 1133, 1139, 1140, 1146, 1149,1157, 1171, 1178, 1179, 1182, 1185, 1188, 1190, 1193, 1195,1202, 1209, 1210, 1211, 1233, 1235, 1255, 1257, 1261, 1271,1287, 1289: n = A,T,C or G
cntcncttcnctnnnnnngtnnnnnntantttangnaattatntnngannntcnatntctatctntnttatttanntnnnccactntnntncnnctnnagtnnagtntcnttggngnngnntacnattcntnttagtnnatttantncctccaccgtcgttggcnggcccgcccggncaggtaccagcatccccagcgtctggcatngggnngaaaaangggtcctgaggccnanaaaanttttntttttcnntanccggcctacaggggnccncatgcnctcatctntnttcttttgcncttnacnccttgcgccatttcgcttcttcactccacttggcttctcatggcgcaagcagcgttttcccaaaaanaaaatngggcnnctaatgtgccccngancagnaaaagngccganagttttcccgccctaccgngcgtatttttaatngggaggcgccnngnttgttctccccccgcngntaacccttcnggncccgcnttcttaggaaacctaagttggggantcccccncgggggcctgccatgggaaatttccgaataatacanagcctttaattccnaataacccggtccggaccctnctgaagnggngngnggtcncccgggtcncccccagtcttttttgntttccccctttttaagatggaaggggntttatattttgccgccggcctttggggccgtttattcaattgngttccattaaggcttngttntncccttggtggttgnaaaaaattgtttnattcnccgccttccacccnaatttcccnaccaccannncattaccctangccccgggggggagcccatcnnanngttgcnnaaaangcccctnggggnggttgcccttaaatnggagggtggangcctaaaaccttccaccaattttaatnttggcggtttggcggccttcaaccttggcccccggcctttttcccaagttcnggngaaaaacccttgntccnntngcccanggcctggccattttaaattggaaattcgggcccaaaccnccnccgggggggaagaagggcncggtttttgccgttatnttnggggcccgcttnttttcccncttttctcngncttcacttgancttccgctngcggcnnctcggnccntttccggnttttgccgggcgangccggtnnatncanccntncancntccaaanggccggnnnaaattcccgggttatccccccncnaattctaggggggtttaccncncggnaaaataaacntttttaatccaaaaangncccacccataaaaggcg

SEQ ID NO: 6993 - DNA, 1100 bp, Homo sapiens
  misc_feature 2, 5, 7, 8, 9, 10, 12, 15, 16, 20, 22, 26, 27, 28, 29, 32,35, 36, 41, 46, 49, 50, 51, 57, 68, 71, 75, 77, 78, 83,84, 86, 87, 88, 89, 101, 102, 104, 109, 110, 111, 113, 118,119, 121, 123, 193, 194, 195, 200, 224, 226, 462, 585, 612: n = A,T,C or G
  misc_feature 700, 726, 731, 736, 759, 767, 827, 846, 904, 906, 915, 936,939, 966, 971, 976, 988, 989, 1006, 1011, 1015, 1016, 1023,1024, 1028, 1037, 1039, 1040, 1050, 1051, 1055, 1066, 1072,1075, 1089, 1091, 1095, 1096: n = A,T,C or G
cnccncnnnncncgnntgtntntttnnnntgntgnnaatantagtnttnnnaattgnccacattagtnacnctantnnttttnntnnnngcagaggggatnnanaaggnnnancggcnnantntaggtcgaattggagctccaccgcggtggcggccgcccgggcaggtacgcggggtccggttcctagcgtnnnctgcnaggggggttcagcgctcggatgangntctggtggcgtcggcaggttcgaggcgattcgagctccagctaggatgatcgaggttgtttgcaacgaccgtctggggaagaaggtccgcgttaaatgcaacacgggatgataccatcggggaccttaagaagctgattgcagcccaaactggtacctcggcccgctctagaactagtggatcccccgggctgcaggaattcgatatcaagcttatccgatacccgttcgacctcngaggggggggcccgggtacccagctttttgttcccttttagtggaggggtttaattgcgccgcttgggccgtaatcaatgggtcataagcctgttttccttgtgttgaaaattgttattcccnctcacaaattcccacaccaacattacngaagcccggggagcataaaaattgtaaaagcctgggggtgcctaaatggagtgaagctaactccaccatttaaattggcgtttggcgnctcaaacttgccccgctttttccaangttcnggggnaaaaccttggtccgttggccccngcctggcnattttaaattgaaaatttcgggcccaaaccgccgccggggggaagaagggccgggttttngcggttatttggggccgcntttttcccgccttttcccttcgcttcaacttggaccttcggcttggcgcctccgggtncntttccggcnttgccgggccgaagcgggttntcnaggcttcaccttcaaagggccggggtnataancgggnttattcccccannaaattcagggggggatnaaccncccnnggaaaannaacnattttggancnnaaaagggccnngcanaaaagggcccnggaaanccngtaaaaaagggccncntttnncttg

SEQ ID NO: 6994 - DNA, 1203 bp, Homo sapiens
  misc_feature 1, 2, 5, 6, 9, 13, 15, 16, 18, 19, 20, 22, 23, 25, 27, 30,32, 34, 35, 39, 40, 41, 43, 44, 46, 48, 49, 50, 56, 61,63, 64, 65, 68, 69, 75, 76, 77, 78, 79, 83, 87, 92, 93,94, 95, 98, 99, 100, 103, 104, 377, 387, 458, 502, 515,553: n = A,T,C or G
  misc_feature 568, 583, 611, 612, 622, 628, 633, 640, 653, 660, 665, 666,670, 674, 680, 681, 710, 718, 729, 757, 759, 761, 773, 778,783, 786, 792, 794, 797, 809, 815, 817, 825, 849, 859, 861,862, 865, 866, 869, 882, 888, 892, 898, 900, 901, 903: n = A,T,C or G
  misc_feature 910, 938, 940, 952, 962, 968, 970, 971, 972, 979, 981, 983,987, 988, 1002, 1004, 1007, 1009, 1013, 1015, 1016, 1020,1023, 1045, 1054, 1058, 1059, 1069, 1070, 1075, 1078, 1085,1088, 1094, 1097, 1098, 1102, 1104, 1117, 1119, 1124: n = A,T,C or G
  misc_feature 1126, 1130, 1131, 1133, 1134, 1135, 1140, 1145, 1146, 1149,1157, 1163, 1164, 1167, 1168, 1170, 1173, 1178, 1179, 1180,1195, 1200: n = A,T,C or G
nntannttnactnanntnnntnntntnttntntnntatnnnanngncnnncttaanatatntnnnatnnattttnnnnntagnaagnggggnnnncgnnngannacaatatggcgaattggagctccaccgcggtggcggccgcccgggcaggtacgcgggggcacggagagcggtgcccgcgtcagtgaccgaaggaagagaccaagatgaatacagagcccgagaggaagtttggccgtggtggtggttggtgttggccgagccggctccgtgcggatgagggacttgcggaatccacacccttcctcagcgttcctgaacctgattggcttcgtgtcgagaagggagctcgggagcattgatggagtccagcangatttctttngaggatgctctttccagccaagaggttggaggtccgcctatatctgccagttgagaagctccagccattgnaggactaccatcaggccagtttcctttaattgcttggccaagcnaccgtttctttgntgggaaatacccccccattgaacaccttgttccatttnggccgggcccgcttnttaagaaacctaagntggggaatcccccccccgggggccttgnnaaggggaaantttccnatatnatcaaangccttttatttcngaattanccccnnctcngacncctttnnaagggggggggggggcccccccgggttanccccaaancctttttttgntttccccttttttaagtgggaagggggntntnaaaattttggcncccgnctttnggnccggtnanttnaaatggggtccnattagncntgggtttncccttggtggtggaaaaatttggntttatttccngnnttnnacncaaattttcccancaaccnaaanaataancnnangcccggnggtgaggccttaaaaagtttgttaaaangnccctgggggggntgggcccttnaattgnannnggaggcntnanctcnncattttaatttggngnttngncgcntnnactngcnccccctttttccaaatccgggngaaaacccntgtnntttggcccanncttgncanttttaantgnaattcnggnnccanancccccgggggaananggcgngntttnngnnnaattnggggnnccntttttccncttttnnttnngnttncattnnnatttgcttgggcctnggagnccg

SEQ ID NO: 6995 - DNA, 1089 bp, Homo sapiens
  misc_feature 5, 6, 7, 10, 11, 12, 13, 16, 17, 18, 21, 22, 23, 28, 29,30, 31, 33, 34, 35, 39, 41, 47, 49, 50, 53, 54, 56, 58,59, 60, 61, 62, 63, 65, 66, 67, 69, 73, 74, 75, 79, 80,82, 83, 84, 85, 86, 87, 88, 89, 92, 93, 94, 97, 99, 103,107: n = A,T,C or G
  misc_feature 109, 110, 111, 112, 113, 114, 115, 116, 124, 182, 202, 203,204, 228, 406, 831, 870, 914, 921, 927, 929, 932, 947, 954,972, 977, 980, 983, 994, 995, 997, 1017, 1032, 1043, 1050,1053, 1081, 1083, 1085, 1088: n = A,T,C or G
tcccnnnttnnnnatnnntgnnngtttnnnntnnnttangntatatntnnctnncntnnnnnnannntntttnnntctnnannnnnnnnagnnnagngngtcnaacntnnnnnnnncatcactntaggcgaattggagctccaccgcggtggcggccgaggtacacacagtcatgaccctanaacagcaggacatggtctgnnnatacagctcagactctcgtccgantcctctcacatggtggctttaggaagatccttggccaggagggtgatgccagctatcttgcttctgaaatatctacctgggatggagtgatagtaacaccttcagaaaaggcttatgagaagccaccagagaagaaggaaggagaggaagaagaggagaatacaggaagaaccacctnaaggagaggaagaagaaaggcatggaaactcagggaagtggacattccctttcactccttttcctacccaaggggggaagactggagccctaagctgcctgctacttgggcttttacatggtggacaggacatttcccgtggggaatagggggaaagaatagccagggaaggaaaagttaaacctcccatagaaagtggtccattcccactgggttttgatattgaccttagctgccaagtcttccccatttgtggaccctatgcccatccatctataaatgggagggataccaacattttctttcctaaatatttctattaatctcccaaccttccttgaaaaacccccccttttcttcaaaccttaaatactttttgcttggtttggaaaatggtttggtggaaaatggtttaaaagttgttnttgggaaaatttttttttttttttcttaaggaaaaaaanctattttaaaagttacccttgcccccgggccggggccgcccccngggccangggtancnccngggcccctttttccntttcaanccgggaaccgccgggcgnggccnaangantgggcaagttnncnaaaatttttccaaagaaaanagggaaagtttttgnttccccttgantggggcnttnttttcaaaaagccttggaacctggaatngnanttnt

SEQ ID NO: 6996 - DNA, 1212 bp, Homo sapiens
  misc_feature 1, 5, 6, 11, 14, 19, 20, 25, 26, 33, 35, 36, 39, 40, 42,43, 47, 51, 60, 61, 65, 69, 71, 73, 74, 77, 80, 86, 88,89, 90, 91, 93, 96, 97, 99, 102, 107, 108, 109, 110, 112,113, 122, 126, 127, 132, 134, 135, 149, 153, 158, 161, 166: n = A,T,C or G
  misc_feature 173, 178, 184, 196, 203, 207, 208, 213, 214, 229, 232, 234,235, 246, 283, 292, 417, 424, 441, 445, 519, 521, 525, 537,550, 552, 565, 576, 584, 588, 598, 606, 631, 636, 677, 681,689, 690, 723, 739, 742, 807, 818, 825, 850, 853, 871: n = A,T,C or G
  misc_feature 890, 915, 916, 925, 927, 935, 941, 945, 962, 963, 972, 973,978, 1000, 1007, 1010, 1016, 1018, 1023, 1029, 1042, 1047,1057, 1061, 1065, 1071, 1081, 1097, 1098, 1104, 1112, 1121,1126, 1130, 1133, 1139, 1141, 1156, 1164, 1165, 1171: n = A,T,C or G
  misc_feature 1174, 1181, 1186, 1191, 1201, 1206, 1207, 1209, 1210, 1212: n = A,T,C or G
ncctnntatanaantgtanntattnnttaatantnntanntnncatnattnattcggatnntttngtantnannttntancatatntnnnntnagnnanagnaaaannnngnncgcggccgnttannacccntnntactccacctcttnggcngcctntgntaccncaagtanatggnacagcngcgttcatttcntacttgngggnnaaaannggggcttgacagaanaanannatctttttctnttactcctggaggtgtcccaagcccctgaagaaccgngatgtcatnaccctccgctcctcgctccccatgggcgctgattacatcattatgaactactcagtcaaacatcccaaatacccacctcggaaagacttggtccgagactgtgtccatccagacggggctacctnatccagnagcacaagggccccaangaanctggcagtcatcaccttaccttggctccagggttggacccccaaaagggccttcctttacccccaaagtggggntngggnggaaattaaaantcttttccttcangntttcccttgggcnttcccccaaanggccccanttgnaaaagaaaanaaatggtnaacccttggcccccgggggcccggngccgncttccttaataaaacctaagttggggaattccccccccggnggcnttggcaannggaaattttccgattattcaaagcctttattcngaataaccccggtccngancccttcgaaagggggggggggcccccgggttacccccaaacctttttgggtttccccttttaaanttgaaggggtnttaaatntgcccccgcctttggccgtaaaatncantggggccattaagcctgngtttttccctggtggtggnaaaattgggtttttcccgcttcccnnaattttccncncaccaaanaatttncctnaaacccccggggaagcnnttaaaaaannggtanaaagcccctggggggtgggccnttaaatngangttgangncctanacctcncccatttaaattngccgntttgcggccntaanctgnccccgntttttccaantgcggggaaaaacccnnttcgtntggcccancttggaatntaaangaantcnggcccnanccccccccgggaaanaagccggnntttgangtnttggggngcctntttcncctttcctcnctttnnanngn

SEQ ID NO: 6997 - DNA, 1118 bp, Homo sapiens
  misc_feature 5, 7, 8, 10, 11, 12, 14, 15, 18, 19, 20, 22, 24, 25, 28,30, 31, 33, 35, 36, 38, 39, 40, 41, 43, 45, 46, 47, 48,50, 52, 55, 56, 59, 60, 63, 67, 69, 72, 73, 74, 75, 76,77, 78, 79, 80, 82, 83, 84, 85, 87, 88, 89, 91, 92, 98,108, 109: n = A,T,C or G
  misc_feature 112, 119, 592, 593, 607, 619, 639, 665, 669, 678, 732, 747,756, 768, 801, 809, 826, 832, 836, 838, 848, 866, 873, 879,882, 895, 907, 929, 938, 942, 944, 945, 947, 950, 956, 960,968, 971, 972, 980, 986, 996, 1002, 1015, 1019, 1027: n = A,T,C or G
  misc_feature 1031, 1041, 1048, 1055, 1059, 1060, 1070, 1071, 1072, 1081,1092, 1097, 1098: n = A,T,C or G
ccgcntnnannntnnttnnntngnntgntnnantnnannnntntnnnncntngtnnatnnaanattngnaannnnnnnnncnnnntnnngnngagggngcgggcgagnntantcacttngggcgaattggagctccaccgcggtggcggccgcccgggcaggtacctggacctgctgaatcatagcccacatgtccaggtggaaagcagcgtttaatgaagaaactcattcttacgaaattagaacgacttcacgttggagaaagcatgaagaggtattcatctgttacggccctcacgataatcaacggctgttcctggaatacggatttgtttctgtccataatcctcatgcttgtgtttatgtctcaagagaaatacttgttaaatatcttccatcaacagataaacaggatggacaaaaagatttctattttaaagggatcatggctatataagaaaattttgacatttgggatgggatgggacccatcttgggaggctactcacaagcccttaagttgttatgtctgggaagctggagaaaaatttaccatgcctgggaaaaaaaagtaccctcggccgcttcttannaacctagtgggatnccccccggggcntgcaagggaatttccgattnttcaaggctttattcgattaccccgntcgnacccttcgnaggggggggggggcccccggttaccccaaacctttttggtttccccttttttangtggaagggggtttnaattggcgncgcctttggccntaaatccaatggggccataaagccttggttttncttggggntgaaaaaaattggtttnttcccncttnancaaatttccnccaacaaacaattacccnagacccngggggngcnatttaaaggttgntaaaaagccctnggggggggcccttaaatggggntgggggccntaancnncncantttaanttgnggtttgcngcnncacttggncccgcnttttttcaangccggnaaaaaacctgggnctgngccccccntgcnatttaaatgnaaattcngggcccnaccnncccccggggnnngagggcggnttttgcgttcnttccnnccccccccccccccccccct

SEQ ID NO: 6998 - DNA, 1067 bp, Homo sapiens
  misc_feature 3, 4, 6, 7, 8, 9, 10, 11, 12, 13, 14, 15, 16, 17, 18, 19,20, 21, 22, 23, 24, 25, 26, 27, 28, 29, 30, 31, 32, 33,34, 35, 36, 37, 38, 39, 40, 41, 42, 43, 44, 45, 47, 48,49, 50, 51, 52, 53, 54, 55, 56, 57, 58, 59, 60, 61, 62,64, 66: n = A,T,C or G
  misc_feature 67, 68, 69, 70, 71, 72, 73, 74, 75, 76, 77, 78, 79, 80, 81,82, 83, 84, 85, 86, 87, 88, 89, 90, 91, 92, 93, 94, 95,97, 99, 101, 104, 107, 110, 112, 114, 117, 123, 648, 757,786, 816, 845, 847, 863, 885, 950, 970, 972, 977, 986, 1009: n = A,T,C or G
  misc_feature 1016, 1021, 1033, 1041, 1061, 1066: n = A,T,C or G
ctnntnnnnnnnnnnnnnnnnnnnnnnnnnnnnnnnnnnnnnnnntnnnnnnnnnnnnnnnntntnnnnnnnnnnnnnnnnnnnnnnnnnnnnnngngngnggnggnggntncnatnacttanggcgaattggagctccaccgcggtggcggccgaggtacgcgcaggaggccgtcaagaagggctcgaccgcggttggtgttcgaggaagagacattgttgttcttggtgtggagaagaagtcagtggccaaactgcaggatgaaagaacagtgcggaagatctgtgctttggatgacaacgtctgcatggcctttgcaggcctcaccgccgatgcaaggatagtcatcaacagggcccgggtggagtgccagagccaccggctgactgtggaggacccggtcactgtggagtacctgcccgggcggcccgctctagaactagtggatccccccgggctgcaggaaatttcgatatcaagcttattcgatacccgtccgaccttcgaaggggggggccccggtacccaagcttttgttcccttttaagtgaggggttaattgccgccgctttggcgtaatcatggtcattagcttgttttccttgtgtggaaaattgttatcccgctcacaatttccaccacaacantaccgagccggggagccataaaagttgtaaaagccttgggggttgccttaatgaagtgagcctaactcacattaaattgcgtttgcgcttaactggccccgcttttcantccgggaaaaaccttgttcgttgcccaancttgcatttaaatgaaatcggggccaaacncccccgggggaagaagccggtttttgccntntttggggggcgctttnttttccgcttttccttcacttnaacttgaactttcggtttgcgccttcgggttcggttttcggctttgcgggccgaagccggttttncaggctttaactttcaaaangncgggnaaataaacnggtttttccccaaaaaaattaangggggantaacncccagggaaaanaaaaattntggaaaccaaaaaaggcccnccccnt

SEQ ID NO: 6999 - DNA, 1075 bp, Homo sapiens
  misc_feature 3, 5, 8, 9, 10, 12, 13, 16, 17, 28, 29, 30, 32, 33, 35, 38,40, 42, 44, 45, 46, 47, 48, 49, 53, 56, 57, 58, 60, 61,63, 64, 68, 71, 72, 73, 74, 76, 77, 79, 83, 85, 91, 92,94, 95, 96, 97, 98, 104, 106, 107, 108, 110, 114, 118, 134: n = A,T,C or G
  misc_feature 135, 490, 492, 511, 566, 671, 759, 793, 797, 803, 804, 808,851, 864, 872, 881, 893, 904, 914, 918, 943, 961, 977, 981,982, 983, 986, 993, 1004, 1007, 1012, 1014, 1033, 1036,1041, 1052, 1070, 1075: n = A,T,C or G
ccntntcnnntnnttnntattttatagnnntnntnatnancnannnnnncgtnttnnntnntnntttnctnnnntnntncagnangggggnngnnnnnttcttntnnnantatnctcnaattggagctccccgnngtggcggccgcccgggcaggtacgcggggactcccgagctctactgactcccaacagagcgcccaagaagaaaatggccataagtggagtccctgtgctaggatttttcatcatagctgtgctgatgagcgctcaggaatcatgggctatcaaagaagaacatgtgatcatccaggccgagttctatctgaatcctgaccaatcaggcgagtttatgtttgactttgatggtgatgggattttccatgtggatatggcaaagaaggagacggtctggcggcttgaagaatttggacgatttgccagcttttgaggctcaaggtgcattgggccaacataagctgtggacaaagcncnacctgggaaatcatgacanaaagcgctccaactatactccgatcaccaatgtacctcggccgctcttagaactngtgggatccccccggggctgcagggaaatttccgattatcaaagccttatcgataccccgtcgaccttcgaaggggggggccccggttaccccaaactttttggntttccctttaagtggaaggggtttaaatttggccgccccttggggccggtaaaatccattggggccaataaggcttggttttccttgnggtggaaaaatttgtttaattccccgcttcaacnaaantttccnncaancaaaccaattaccggaggcccgggggaggccattaaaaaggtngttaaaaagcccntggggggngcccttaantgaaggtggagnctaaacctccnccatttaaanttgnggtttgcggccttcacctgccccgntttttccaattccggggnaaaaccctggtccgtngccnnngcnttgccantttaattgaantcngcccnancccccccggggaagagggncgnttttncctttttcccnccgcctttttcccttttntttgn

SEQ ID NO: 7000 - DNA, 1078 bp, Homo sapiens
  misc_feature 5, 8, 14, 15, 16, 17, 18, 19, 21, 27, 28, 29, 31, 32, 33,34, 35, 36, 37, 38, 42, 43, 44, 46, 47, 48, 50, 54, 55,56, 58, 59, 61, 62, 64, 66, 71, 72, 75, 78, 79, 80, 81,82, 83, 84, 86, 95, 96, 101, 102, 108, 113, 121, 198, 675,680: n = A,T,C or G
  misc_feature 865, 870, 900, 908, 923, 945, 953, 966, 978, 981, 994, 999,1003, 1023, 1032, 1050: n = A,T,C or G
ccccnctnctctannnnnngntttttnnntnnnnnnnntttnnntnnntnttannntnngnngntntaatnntcnttnnnnnnntnagtagggtnnttgtnnttttcntctcncactatanggcgaattggagctccaccgcggtggcggccgaggtacagcaggtgaagcattgcagtaacatacattgaaacatanagagtcgagttatacaggactagccatctaacaggtcatctggtctccgacggttgtttaacgacacacagtagaaatagagaatagaacccatatctgtttccagagtccaaagtagtatatcaggctgacagcactcaatcagtgagggctcctgaggttgcaatgattctgcaacggagtagattctctagggaaaaaagaccttgctgctaagggaaagagaattaaaaacaaaaacaaaacgaaaggctccccaaaggaggtaccctgcccgggccggcccgctcctagaactaagttggatcccccgggcctgcagggaattccgatatcaagctttatccgattacccgtcgacctcgagggggggggccccggtacccaagcttttgttcccttttagtggagggttaatttgccgccgccttggcgttaattcattggtcatagcttgtttcctggtgtgaaaattgnttatnccgcttcaccaattccaccaccaacatttacgaagcccggggaggcattaaaaggtggtaaaagccctggggggtgcccctaaatggaggtggagccttaaacttcaacatttaaatttggcggttggcggccctcacctgggcccgctttttcccaagttccgggggaaaaaccctgttcggtngcccnagcttgccatttaaattggaaattccgggncccaaccncccccggggggaagnaaggccgggtttttgccgttantttggggncgccttttttccncttttcttcggntcnacttgaccttcgnctggngccntcgggccggttccggcttgncgggcgganccggtttttcaaggcttncacttcaaaaggggcggggtaattaccg

SEQ ID NO: 7001 - DNA, 1185 bp, Homo sapiens
  misc_feature 2, 4, 5, 7, 9, 10, 11, 14, 17, 20, 23, 24, 27, 28, 29, 31,32, 33, 39, 41, 42, 43, 47, 53, 56, 61, 62, 64, 66, 72,73, 75, 76, 79, 80, 82, 83, 84, 85, 87, 95, 99, 101, 103,104, 106, 115, 121, 129, 140, 410, 508, 551, 583, 673, 678: n = A,T,C or G
  misc_feature 696, 707, 722, 763, 798, 878, 886, 892, 919, 925, 946, 949,974, 1009, 1021, 1033, 1052, 1058, 1066, 1068, 1083, 1087,1088, 1094, 1097, 1105, 1111, 1116, 1118, 1124, 1134, 1142,1152, 1164, 1170, 1171, 1181, 1183: n = A,T,C or G
cncnncntnnnaanttntanttnnatnnncnnnttttgntnnngagntatttnttnttatnnananatcaanntnnttnntnnnntngagggggnaggnangnntnaatctcacnatatgnctaattgnagctccaccgnggtggcggccgcccgggcaggtacaggcccttcccgaccgtagcgagggtgctgctgcgctgggggaaggaaaacgccgctttgactgtgccttgttctcacagctggcgggaagcaagcgccttttcgaaagccagaggctcgagttacccctcttaccaccgtcatggcagtcccaggttgcaacaaggacagtgtcagagcaggctgtaaaaaatgtggctaccctggtcacctgacttttgaatgccgcaattttctccgagtagnaccctaaaagggacatagttttttgggatgtcagcagttaccctcgggcccgcttctagaactaagtgggatccccccgggcctgcagggaatttcgnatattcaaagccttttatcggattaccccggtcggaccttcgnaagggggggggcccccggttaacccccaagcnttttttggtttcccctttttaagttggagggggtttaaaatttggccgcccgccttttgggccggtaaaatccaattggggtccattaangcctnggttttcccttggtggtnggaaaaaattnggtttaattccccgncttcaaccaaattttccccaccaccaaccattacccgaagncccgggggaagccattaaaaaggtggttaaaaagnccctgggggggtggcccctaaattggaggttggaagccttaaactttcaccatttaaaatttggccggtttgccgccttnaacttggnccccgnctttttccaaatccggggaaaaacccnttggtncgttgccccagccttggccanttnaatgaaaattcggccccaacccccncccgggggaagaaaggggcggggtttttggcggtnttttgggggccncctttttttccncttttcctttggctttcanctgganctttggcntngggccttggggtccntttnnggcttnccnggccaaancgggtnttaancnttaacnttcaaaaggnggggtaanttccgggttnttcccccccccncccccnnggggattaancnct

SEQ ID NO: 7002 - DNA, 1141 bp, Homo sapiens
  misc_feature 1, 2, 9, 11, 13, 14, 15, 16, 17, 18, 19, 25, 29, 30, 31,32, 34, 36, 38, 40, 42, 43, 46, 48, 49, 57, 58, 59, 60,61, 63, 64, 66, 70, 74, 75, 80, 81, 82, 85, 86, 89, 90,98, 101, 103, 105, 113, 114, 123, 125, 497, 524, 617, 635,640: n = A,T,C or G
  misc_feature 655, 682, 684, 691, 718, 721, 731, 752, 760, 780, 786, 787,796, 798, 818, 822, 833, 836, 844, 850, 855, 860, 861, 867,870, 882, 893, 896, 897, 910, 911, 913, 919, 920, 921, 927,935, 937, 938, 939, 948, 952, 960, 962, 963, 978, 980: n = A,T,C or G
  misc_feature 984, 987, 988, 992, 1000, 1011, 1012, 1037, 1038, 1039, 1041,1044, 1046, 1059, 1060, 1067, 1073, 1075, 1077, 1078, 1088,1089, 1090, 1091, 1094, 1097, 1102, 1105, 1121, 1127, 1129,1131, 1137, 1138, 1139, 1140: n = A,T,C or G
nncctaccncnannnnnnntacttnttannnntnanantntnnatntnntgtatttnnnnntnnangttntgtnnatttnnnttnnagnngagggggnggnantnggttatannttcctatangncgaattggagctccaccgcggtggcggcccgcagcagcgaaaggaaagagctcccccgcgtacctgcccgggcggccgctctagaactagtggatcccccgggctgcaggaattcgatatcaagcttatcgataccgtcgacctcgagggggggcccggtacccagcttttgttccctttagtgagggttaattgcgcgcttggcgtaatcatggtcatagctgtttcctgtgtgaaattgttatccgctcacaattccacacaacatacgagccgggagcataaagtgtaaagcctgggggtgccttaatgagtgagctaaacttcaccattaatttgccgtttgcgctcactgcccgcttttccaagttncggggaaaaccttgttcgtgccaagcntgcatttaaatgaaatcgggcccaaacgccgccgggggaggaggcggttttgcgtatttgggccgctcttttccgctttccttggctcacctngacttccgcttgcggctncgggnccgtttccggcttgnccgggccgaagccgggtattccaagcntnaaacttnaaaaggggggggtaaattaaccgggtntanttcccccaangaaattcaagggggggaattnaacccccnagggaaaaagaaaaccattnttttannccaaaaaangngcccaggccaaaaaaggggncccngggaaaccccnttnaaaaaaanggcccnccggntttgnnttgggncgnttttttttccantaaggggcttnccnngccccccccttgnncnggaggnnnttaacnaaaaaaantnnnaccccctcnaaanttcaaaangnngggggaaaaaccccngncccnggnncctntttaaaanattccccaggnnggtttttccccctgggaaaagctcnnntnggngncgctttttttttnntttccanaccctntncnntttaacccgnnnnacntgnttccnccntttttttcccccccgnggaaancngngggccnnnnt

SEQ ID NO: 7003 - DNA, 1177 bp, Homo sapiens
  misc_feature 3, 7, 9, 11, 12, 13, 15, 16, 18, 19, 22, 24, 26, 30, 31,32, 36, 37, 38, 39, 41, 42, 44, 45, 49, 50, 55, 56, 59,61, 65, 67, 68, 69, 70, 76, 77, 78, 79, 82, 84, 85, 90,95, 96, 97, 98, 100, 103, 105, 108, 110, 112, 114, 115,116, 117: n = A,T,C or G
  misc_feature 118, 122, 124, 125, 127, 159, 470, 525, 554, 561, 569, 575,695, 707, 736, 741, 751, 763, 764, 778, 782, 792, 814, 836,858, 862, 868, 891, 934, 936, 938, 942, 948, 949, 951, 952,958, 973, 996, 998, 1002, 1032, 1045, 1047, 1076, 1087: n = A,T,C or G
  misc_feature 1091, 1096, 1107, 1109, 1111, 1112, 1122, 1124, 1141, 1148,1154, 1172, 1174, 1175, 1177: n = A,T,C or G
canctcncnannntnnanntantntnttannntttnnnncnnannactnnttaanntantnaaantnnnnttattnnnnggncnnatagnttttnnnnanctnanagngngngnnnnntgangnngnattcactatacggcgaattggagctccaccgnggtggcggccgggcaacccgaggctgcaatagctccagaactggcctccacagtgtcttcctctacgggagtcagctggttgtgtcacttgacccctcttgttgctaagaggcagcagggacacccattttcacttccgcttccggttgtcccccgcgtacctgcccgggcggccgctctagaactagtggatcccccgggctgcaggaattcgatatcaagcttatcgataccgtcggacctcgaggggggggcccggtacccagctttttgtttccctttagtgagggttaatttggcgccgccttggncgtaattcatgggtcaatagcctgtttttcctgtggtggaaaaatttgtttatcncgcttcaccaaattttccaccaccaacantactgangccggggnagccantaaaaagtgtaaaaggccctggggggtgccctaaatgaagtggaagctaaacttcacaattaaatttggcgtttgcgcctcaactggccccgcttttccaagtcgggggaaaacccttgntccgtgcccaancttgcattttaaatgaaaatcggggcccnaaccncccccggggngaaagaaggccnnggtttttgcggtantttngggggccggncttcttttcccggttttccctncggccttcaacttgaaccttcngccttggcggccttccgggttnccgntttccngctttggccgggcggaaaccggntattcaaagcctttaacttcaaaaaagggcgggggtaaaaaancngntttntttccnncnngaaaanttcaaggggggaatnaaccgccagggaaaaaaaaacantnttgnaagccaaaaaaggggccccccaaaaagggnccaaggaaacccngnaaaaaaaaaggcccccgttttctttggcngtttttttccnaaanagggnttccccccccntngnngagggcattnanaaaaaaatttgaacgcnttaaaantaacanggggggggaaaacccccncnngn

SEQ ID NO: 7004 - DNA, 1120 bp, Homo sapiens
  misc_feature 2, 3, 4, 6, 7, 8, 9, 10, 12, 14, 15, 17, 19, 22, 24, 25,26, 28, 30, 33, 35, 39, 40, 42, 43, 49, 50, 51, 53, 54,55, 56, 57, 59, 63, 66, 67, 72, 73, 74, 76, 77, 78, 81,82, 83, 84, 86, 87, 88, 89, 90, 96, 97, 98, 99, 101, 102,103: n = A,T,C or G
  misc_feature 104, 105, 106, 110, 111, 113, 115, 118, 119, 359, 483, 502,583, 610, 658, 669, 680, 691, 741, 743, 765, 795, 796, 809,826, 841, 845, 848, 850, 873, 877, 880, 907, 912, 918, 921,932, 936, 947, 951, 952, 964, 973, 982, 983, 986, 989: n = A,T,C or G
  misc_feature 991, 994, 1030, 1033, 1034, 1047, 1052, 1061, 1065, 1072,1078, 1079, 1099, 1100, 1118: n = A,T,C or G
annntnnnnnantnntngntangnnngntntantncttnntnntttacnnnannnnnantttntcnnttttnnncnnngtnnnnannnnnttaatnnnngnnnnnnaagnnantnatnnccctcactatagggcgaattggagctccaccgcggtggcggccgcccgggcaggtacgcgggggtcgtgaaaaaaaaggtcttggtgaggtgccgccatttcatctgtcctcattctctgcgcctttcgcagagcttccagcagcggtatgttgggccagagcatccggaggttcacaacctctgtggtccgtaggagccactatgaggagggccctgggaagaatttgccattttcagnggaaaacaagtggtcgttactagctaaagatgtggtttgtacctcggccgctctagaactagtggatcccccgggcctgccagggaaattcgatatcaagcttattcgatacccgtccgacctnggagggggggggccccggntacccaagcttttgttccccttttaagtgaggggttaaattggcgccgcttgggcgttaatcattgggtcaataggcctgntttccctgttgtgaaaattgtgtatcncgcctcaccaatttcccaccaccaaccattaccgaagcccgggggagncattaaaaggnggttaaaaggncctgggggggnggccctaattgaagtggaagcctaaacttccacatttaatttggcgtttncngcttcaccttgccccgcttttnccaaggtccgggggaaaacccctggtccgnngccccaagcttgncattttaaatggaaatncgggcccaaccgccncccnggngnaggaaggcccgggttttggccgnttanttnggggccgccttctttttcccgcttttnccttnggcttnaantttggacttcngctnggcggcctccngttnnttttccggtttngctggccgnagccgggtnnttnaancntcnccttccaaaaaggccgggtatattacccggtttatnccnncaagaaattcaanggggnaataaaccnccangaaaaanaacatnntggaacccaaaaaggcccannctaaaaggcccagggaanct

SEQ ID NO: 7005 - DNA, 1137 bp, Homo sapiens
  misc_feature 3, 8, 10, 13, 15, 16, 17, 20, 22, 24, 26, 28, 31, 33, 34,42, 43, 44, 46, 48, 50, 52, 54, 58, 59, 65, 67, 69, 71,72, 74, 78, 80, 84, 86, 87, 89, 91, 92, 96, 97, 100, 101,108, 111, 113, 114, 115, 116, 117, 118, 120, 124, 132, 133: n = A,T,C or G
  misc_feature 136, 142, 370, 407, 434, 445, 454, 490, 535, 538, 555, 591,615, 636, 641, 652, 666, 667, 671, 678, 680, 681, 687, 710,712, 747, 754, 756, 765, 784, 809, 816, 835, 862, 879, 880,895, 897, 975, 980, 999, 1013, 1059, 1063, 1069, 1070: n = A,T,C or G
  misc_feature 1078, 1081, 1084, 1085, 1099, 1102, 1121, 1130, 1132, 1136: n = A,T,C or G
ccnccccncngtngnnnaantngntngnctncnntttaatannntntntnancntatnntatatntntnanncncatntntaantnncntnncatnnagnnggaatanganannnnnncntctnactataanngcnaattgncacctccaccgcggtggcggccgaggtacgcgggcaaagaatttctcaggctcaaaatccaatacaggagtgacttggaactccattctatcactatgaagaaaagtggtgttcttttcctcttgggcatcatcttgctggttctgattggagtgcaaggaaccccagtagtgagaaagggtcgctgttcctgcatcagcaccaaccaagggactatccacctacaanccttgaaagaccttaaacaatttgccccaagcccttnctgcgaagaaaattggaaatcattgcntacactgaagnaatggaggntcaaacatgtgctaaaccccagatttcagcaggatngttgaaagggaactggattaaaaaagtgggggaaggaaaccaggncangctcaaaaaggaaaaanagcaaaaggaatgggggaaaaaaaccatcaaaaaanaaggaaaagtttctggaaagtttncgaaaaattttcaaacgttcntcgtncaaaaaggaangacctaccattaannaagncccactntnnacccanataaaagttatttcttggtggtntnaaaaaaattggtttcttatttttttaaatttaatnaccccgntnattcatttnccaaaaggggaggggattnggccattattaaaattaccaaaaanggccttnaatttaaattttggacttngggaaaaattttaaaaaaaccatttancttcttggaaaatttgnnaaacctaaaaggttnangaaaaagttttgattttttaaagaaatcccaaaaccgtttaaaggaatttggtttaaaagggcctaatggaattgggnctttntggttcctttcttacccanccccccccaggttngaaattttgcaattccattggctttaaaagggcccatgaatttttnaagncaaatnncccccatnggnttnnacaccaagaattgnttnacccccaaacccaccattncccacttcnancaant

SEQ ID NO: 7006 - DNA, 1182 bp, Homo sapiens
  misc_feature 4, 7, 8, 11, 14, 15, 16, 17, 18, 19, 22, 24, 26, 29, 33,34, 35, 36, 37, 38, 42, 43, 44, 45, 46, 47, 49, 50, 51,54, 55, 57, 59, 62, 67, 73, 80, 81, 82, 85, 87, 89, 91,92, 93, 94, 95, 96, 102, 106, 108, 113, 119, 120, 121, 453,496: n = A,T,C or G
  misc_feature 513, 675, 687, 695, 698, 705, 715, 716, 718, 728, 730, 733,748, 759, 764, 776, 782, 784, 807, 809, 812, 819, 839, 851,864, 870, 872, 879, 892, 902, 929, 934, 937, 953, 956, 957,968, 981, 989, 996, 1000, 1014, 1035, 1046, 1060, 1074: n = A,T,C or G
  misc_feature 1079, 1082, 1087, 1092, 1093, 1096, 1111, 1113, 1122, 1127,1131, 1132, 1145, 1147, 1148, 1153, 1162, 1172: n = A,T,C or G
cccntannacnttnnnnnnttnantnaanatannnnnnatgnnnnnntnnngtnnantntangttgnatatanataattnnntgnangngnnnnnntatatngagngnttttnaatgtnnnattatcgactcactatagggcgaattggactccaccgcggtggcggccgaggtactttccaatgccgtgggtgggctttgtcttgtagggccgactgatacttagtagaattccacctacagaatagatgggcttctctcctgaagttctaaaccttaagagagaaaaggcttgcttaaaaatggtattgttcctcaggcacagcaccttttccaaggttccgctcatcctttgctgctgcgcggcctctagctgtgcaaaccgaagaccggaccctgcagcccgcgttcccagggcgtgctgaaaacactgaccggaaccggccttggacncaggtgcagccccccgcggtaccttgcccgggccgggcgcgcntctaagaactaagtggnatccccccgggctgcaagggaatttccgattattcaaagcctttatccggatacccgtgcggacccttcgaggggggggggccccgggtaccccaagcttttttggttcccctttttaagtggaagggggtttaaatttgccgcccgcctttgggccggtanatccattggggnccattaangcntggtttnttcccttggnngntggaaaaatntngtntaatttcccggcttnaaccaaatttncccancaaccaaaccanttaccngnaggccccggggggaggccatttnanaangtggttnaaaaaggcccctgggggggntgccccttaaantggaaggtgggangcctananccttcancattttaaatttngccgtttggngggcttcaacttgggccccgctttttncaagntcnggggaaaaaccctggncgnngcccaagcctngccatttaaaatngaaaaatncgggccnaacngccccccggggganaaaagggccggtttttggccntttatttgggngcccgccttttttncccgcttttccttnggctnaancttgnacttnngcntgctgcttccgggtncntttccggcnttgcnggcnnaaaccggtttttnannttcanttccaaaanggccgggtanataccgggct

SEQ ID NO: 7007 - DNA, 1259 bp, Homo sapiens
  misc_feature 1, 3, 6, 10, 11, 13, 19, 24, 25, 26, 31, 32, 33, 36, 37,38, 40, 41, 42, 43, 44, 45, 51, 52, 54, 55, 57, 61, 65,67, 73, 77, 80, 81, 82, 84, 85, 86, 87, 88, 89, 91, 102,103, 112, 119, 120, 126, 127, 132, 133, 141, 143, 166, 178,196: n = A,T,C or G
  misc_feature 197, 208, 217, 218, 238, 241, 243, 249, 265, 312, 330, 348,364, 411, 413, 419, 420, 436, 458, 474, 475, 477, 494, 509,525, 528, 531, 533, 544, 546, 556, 569, 576, 582, 589, 592,604, 617, 629, 651, 659, 673, 683, 688, 712, 724, 735: n = A,T,C or G
  misc_feature 746, 751, 752, 758, 793, 800, 805, 816, 819, 832, 839, 840,846, 857, 870, 876, 887, 908, 914, 925, 935, 944, 953, 966,969, 974, 976, 979, 986, 987, 988, 990, 999, 1000, 1002,1014, 1016, 1032, 1033, 1053, 1057, 1067, 1073, 1087: n = A,T,C or G
  misc_feature 1099, 1103, 1128, 1129, 1131, 1138, 1142, 1150, 1154, 1155,1156, 1157, 1178, 1179, 1193, 1197, 1198, 1199, 1209, 1211,1212, 1223, 1225, 1240, 1241, 1242, 1245, 1248, 1249, 1250,1255: n = A,T,C or G
ncntcnactnngnaaatantatgnnnatgtnnntcnnntnnnnnntacctnntnnantagngatnanttaatntcanttnnngnnnnnnangtctattagtnnagtaaagtnattattnnctattnntttannggataatngnaactccacccgcggttggctggngcgcccgggcangttcacttgtgggcttgnnggcctcccggnaaggtctcnngaggtgaagcgcaccaacanaanangttttncccacagcagagtcgnccaccaacacgcacttgatggaactcagcatcttcccagcctgctgntcctactctgaagtccangaatcccaggggaaaaanagccctcaatgggcanctgcaagctacacgccattcagcaaggggggaatgcaagccaaggtnangtctgnngtcctcagggaccttnttgaccggcagattttgggcangaaatggttaactttnntncccttgcccattctcanaggcacccgtcttgncttttgaaaaaacccntcncananaggccctaagntnctttcaaacntgggtaggttggntggaaanggtaanaaaagtnttncccaaaaacaangcattcttcttgngacggggcattncctgaccttcccaaaggaaagntgggctanaaaaggcccccccngagtgaggcngtttncttccaaccggggctttttccaanttttttccttgnatggggaaatnttgggccccantgggnngggggnaaaaacctttatttgcaccttggggaatggttaancctcccntaaantggggcctggntcntcccttaaaaaancaaaaanntccacntcttaaaaaangggaaaaacaagnattttntgtccaaattncaattttgggaccaaaaagtntttttnaaaaaagaatntgggtggccnggcaaaggncttttggangaaagtgggatgntcncaagnanggnaagggannntnttaaaaaanngntgaggtggcttnangtataaagaacccaanntatttcttttttggggggtnaaangggccccccnagcctncctttagggaaaanggaaccttggcnaaangtaaccaaggggacaattgccccanngnggatggntagnaaaatttnaatnnnnaacggtgtgaagaaggggaannaaaaaaaagggggnttcnnnttccccccgngnnacccttgtggncngttttttagaaacannnagnggnnntcccnccct

SEQ ID NO: 7008 - DNA, 1093 bp, Homo sapiens
  misc_feature 2, 5, 6, 7, 10, 14, 24, 25, 27, 30, 31, 34, 35, 37, 38, 39,40, 43, 44, 45, 47, 48, 49, 50, 51, 52, 53, 54, 55, 57,58, 59, 60, 64, 71, 72, 73, 76, 77, 79, 80, 85, 86, 88,92, 93, 98, 99, 101, 374, 419, 420, 439, 447, 620, 643,677: n = A,T,C or G
  misc_feature 684, 712, 748, 756, 798, 819, 823, 839, 840, 864, 868, 872,880, 905, 909, 915, 926, 927, 940, 943, 945, 968, 978, 992,996, 1002, 1012, 1018, 1019, 1026, 1040, 1045, 1050, 1060,1067, 1088, 1089, 1092: n = A,T,C or G
antcnnnatngatnattgatatgnngngtnntanntnnnntgnnnannnnnnnnnannnngaantttatgnnnatnnanntagannangagnnggagnnanactatcatatagggcgaattggagctccaccgcggtggcggccgcccgggcaggtacttagtattttccccctcttctttctccacatcctcttctctgattcttggtggtcctgaggaggaggaggtgccctctggtgtgataccaaatcttaccgagagcattcccagtagtcctccacagggtcctccacagggtccttcccagagtcctctgagctcctgctgctcctctttttcatggagctcattcagtgaggagtccagcagccangaaaggggaggatacaggccacctgtcagggcctgccaagacagnngagtcctctttcacatatnaccactangatgaaaaaggtggcccgagtttagtgggagttcctgctcctcaaataccgaaggcagaaggagccctgtaacaggagggcaggagatgcttggatggattgtcatcaaagtaccttcggccgcttcttaggaaactaagtggatcccccccgggctggccagggaattttcngatattcaaagccttaatccgantacccggtccggaccctcggaaggggggggggcncccggtnccccaggctttttggttcccctttttanttggaagggtttaatttgccgcccctttgggccgtnaatcaatngggtcaataggcttggtttcccttggggttggaaaattggtntatccccgcttcacaaatttnccancaacaaaacaataccnnaggcccggggggaagccaattaanaagngggntgaaaagnccctgggggggtggcccctaaaatngaantgggangcctaaacctnnaccatttaaattnggngntggcggcctcaacctggccccgnttttttccanggtcgggggaaaancctnggtcgntggccccgcnttggcnntttaaanggaaatccgggccnaaccnccccngggggaaaangcccggntttgcgttattgggggccccnnctnt

SEQ ID NO: 7009 - DNA, 1105 bp, Homo sapiens
  misc_feature 1, 6, 10, 13, 14, 21, 24, 27, 28, 29, 30, 33, 34, 35, 39,43, 47, 49, 51, 52, 59, 61, 62, 64, 66, 68, 71, 72, 74,76, 77, 79, 80, 84, 89, 90, 93, 94, 95, 96, 98, 99, 100,101, 107, 108, 109, 429, 544, 568, 584, 597, 599, 605, 618: n = A,T,C or G
  misc_feature 625, 627, 639, 668, 678, 681, 697, 726, 730, 742, 745, 815,816, 820, 822, 836, 863, 877, 878, 879, 882, 887, 893, 894,921, 938, 956, 959, 965, 967, 990, 999, 1006, 1010, 1015,1027, 1028, 1030, 1032, 1036, 1050, 1060, 1066, 1068: n = A,T,C or G
  misc_feature 1076, 1079, 1100, 1101: n = A,T,C or G
ncattncttnttnngttgttnttnaannnnttnnntacntgtntggntntnntatgtgnanngnangnatnnantnntnngtgnttatnnagnnnngnnnntggaannnttactataggcgaattggactccaccgcggtggcggccgcccgggctggtacgcgggtagtattaactgcccatatgctcatagtatgatgagccctgtatagcacaaggtcaacaggtcctctccttgtccttacaatctaaagcagatgacactgacatggacaaacaagtgcacatgcatagttgcggcagttttagagaaatctagaaagctaggtagcaacactatgcataaatgttgtggtccaatgcattagtttgctttaacaaaaatctgggaggtattttttctctttattcaggaaggcttcatgaagncagggaagttggtcaaagggaggggaagggttactggttaaattatgatagggaagaacttttcgcataacctagttgcaaaaattggagtgctgggtggggtttgagggaatgngggaaaaaaaaggggggagccaanggtgtttttgtgttanaatgggaaccaanangggccnaaagggattgtanctggtananggaaaagggccnacgaataaaagcctttgggagttaagccnttgaaaaaanctntggaagggaaattagntaatggaattattgggggcttgtggccanccangggccagtaagnagnaaatccaccctttaaggctggaaaaccaattggggttggtttaagggaagccaagacccaatggaagggnngggnangaaacccattccantcttattaggtgaaaaattcaagggtnaccctccggggccnnnttnttagnaacctnnagtgggatccccccccggggccttggnaagggaatttccaatanttcaaagcctttatccgnatncccggncngaccctcggaagggggggggggnccccgggtnccccaancttntttgnttccccttttanntnangggnttaaattggcgccnctttgggcgntaaatntnatggggcnaanaaacttggttttccctggggnngaat

SEQ ID NO: 7010 - DNA, 836 bp, Homo sapiens
  misc_feature 650, 674, 692, 693, 700, 707, 720, 738, 761, 764, 770, 780,785, 787, 796, 800, 805, 807, 816, 818, 822, 824, 826, 833,834, 836: n = A,T,C or G
gaattggagctccccgcggtggcggccgcccgggcaggtactttggcctctctgggatagaagttattcagcaggcacacaacagaggcagttccagatttcaactgctcatcagatggcgggaagatgaagacagatggtgcagccacagttcgtttgatgtccaccttggtcccactgccgaaagaagaaaaactatcatactggtgacagtaataagttgcaaaatcatcaggctgcaggctgctaatggtgagagagaattttgtcccagatccactgccgctgaaccttgatgggacgccactttctaaaatagacgccttatagagcagcagtttaggggcttggcctgctttctgctgataccaggacaaccaggagctaatattctgactggcccggcaagtcattatgactctgtctcctacagaagcagacacgatggaaggagactgggtcatccggatgtcacaattgggcacctgggagccagagcaagcaggagccccaggagctgagcggggaccctcatgtccatgctgtgtcctgactggggtctgactcccccccgcgtacctttgggcccgctctaaaactaagtggaatccccccgggcctgcaagggaaatttcggatatcaaagcttnttcgataacccggcgaccctttgnagggggggggcccccggnnccccaanctttttntttccccttttangtggaagggtttaaattngccccccttgggcggtaatcatnggnccatangctggtttcntgtgngnaaatttttntccntccananttcccaacnanattncnangccgggnncn

SEQ ID NO: 7011 - DNA, 1199 bp, Homo sapiens
  misc_feature 2, 6, 7, 8, 14, 22, 23, 25, 29, 31, 33, 35, 36, 37, 42, 43,45, 49, 51, 54, 56, 60, 64, 65, 73, 88, 92, 94, 95, 102,108, 109, 112, 132, 134, 164, 216, 224, 261, 269, 271, 285,288, 289, 298, 306, 320, 326, 334, 337, 349, 353, 363: n = A,T,C or G
  misc_feature 374, 378, 383, 401, 408, 412, 422, 431, 433, 437, 443, 448,458, 471, 476, 477, 503, 518, 520, 522, 524, 530, 531, 539,540, 545, 554, 559, 561, 562, 571, 574, 575, 581, 584, 585,586, 589, 595, 599, 600, 603, 613, 616, 618, 627, 630: n = A,T,C or G
  misc_feature 632, 640, 641, 646, 647, 670, 678, 685, 693, 700, 701, 718,720, 725, 737, 746, 765, 770, 783, 798, 806, 817, 829, 846,852, 863, 878, 880, 893, 910, 911, 922, 923, 931, 944, 951,957, 967, 969, 981, 994, 995, 998, 999, 1009, 1029: n = A,T,C or G
  misc_feature 1032, 1033, 1034, 1040, 1047, 1053, 1058, 1065, 1069, 1071,1073, 1075, 1078, 1088, 1093, 1094, 1096, 1105, 1111, 1115,1117, 1134, 1141, 1143, 1146, 1147, 1154, 1165, 1166, 1170,1190, 1193, 1194, 1199: n = A,T,C or G
cnccannnttcttnacatttgnnanttcngntncnnnttgtnntnggtnantanantgtnaaanntagtttgnacgtatattatttantttngnngaggggngggggnnggngattctattgggcgaattgnanctccaccgcggtggcggccgaggtactttnttttttttttttttttttttcttttttttttttttttttttttttttttttngcccaaanagcaagtttatttggtgaatgctgacggcaaacattntccaaaananacaagatgggaaanttnntgaaacaanaaagcctngggaaactttaggntagatncaaaattnacncagggaaaggcncggnctttgggganactgggaaggncctnagccnttcagccccatgcggacnagctccncccnatggggcccntccccccgnanaggnattttnccctnaacaaaacgnctttttattagtntgaannacaaaccactttggggtgtcccttanatggccccttgcccncncnanaaaaannttttttannttttnttttccctnctggnannattcttttnttnnaccccnaannnggntggaanaaannaancaattgtccncgngnaattttttnaancncacccccnnttggnncgggggggcccaattttttcccnttcccctntgggggnaaaaaacnacccccnnaaggttccctttttcgnancaatnaaattccctttnattaagggntggcccccctgggggtccntttgnttttcttttgggncccacttgttttttngcaaaaanatttggggccnaaaaaaaggtgncttttaataaaggttcncaaccnacccttttcancaattttaatttttnanttaaactttttgnggggggttccccccaannacccttttgtnncccccttntggctattttggngaggggntttttnggggccccangnggcccccttttnaaaattcccccannacnngggtttttanccattggcccggggcggggntcnnntttttntaaaaantaaagnggganccccccngggntntngnggnaaattttctnttttnnanttttttttntatccncttnanccttaaagggggggggncccggananccnnctttttntttccctttanngggngggggtttatttgccccttnggnnttaan

SEQ ID NO: 7012 - DNA, 1078 bp, Homo sapiens
  misc_feature 4, 5, 7, 8, 9, 10, 11, 15, 16, 20, 24, 25, 26, 27, 28, 29,30, 31, 33, 34, 35, 36, 37, 39, 40, 41, 42, 45, 47, 48,49, 52, 54, 55, 57, 58, 59, 63, 64, 66, 67, 68, 69, 71,72, 73, 74, 76, 77, 85, 86, 87, 89, 90, 93, 95, 99, 100,107: n = A,T,C or G
  misc_feature 111, 113, 557, 569, 703, 707, 708, 723, 762, 791, 813, 818,840, 841, 845, 850, 860, 865, 868, 871, 872, 873, 888, 897,908, 909, 917, 924, 927, 931, 933, 938, 942, 946, 954, 960,971, 984, 990, 996, 1001, 1004, 1016, 1017, 1020, 1031: n = A,T,C or G
  misc_feature 1036, 1038, 1039, 1040, 1041, 1046, 1047, 1049, 1054, 1056,1058, 1065, 1074: n = A,T,C or G
tccnnannnnnattnnttantttnnnnnnnntnnnnnannnnttnannnatntnnannntttnntnnnntnnnntnntaaagggnnntnnctntntatnnttaggcnaatngnactccaccgcggtggcggccgcccgggcaggtacaattcctagatcggctgatcatcccccaaagttatatcacagtgctctcaacagacagaaggaacaacaaaggattgagagagaaaacttggctttattgaaaaggcttgaggccgtgaaaccaacagttggtatgaaacgttcagaacaactgatggactatcatcgcaatatgggctatctcaactcatcaccattgtcaagacgggccaagatccactcttggccaatatagcccattaagagcttccaggacatccagtgctacgagtggtctcagttgtaggagtgagcgatcaagccggtttggaccccctccagtgggcccaccctcgaaagaagacctaaaaccccctaatgtcccgtacccttcggcccgcttctagaaactagtgggatcccccgggctncaggaattcganatcaaagctttatccgatacccgtccgaccctcgaggggggggggccccgggtacccaagctttttgttcccttttagtggaggggtttaatttggcgccgccttttgggcggtaaattcatggggccaataancctnnttttccctggtggtngaaaaattggtttattccccgcttccaccaaatttcccncaccaaacaattaccgaagccccggggangccattaaaagttgttaaaaanccctngggggggggccctaaatggagnntgangcctnaaacttcacnatttnaanttnnnggttggcgccttcanctgcccccncttttttccannttcggggnaaaaccntgntctntngcccnaacnttgnatttaaantgaaanccgggcccaanccccccccggggnaaaaangcccgnttttnccntaatttgggggnnccnctttttccccnttccntnnnnttaanntnaaacntncntggcgcnttcgggggnggtt

SEQ ID NO: 7013 - DNA, 1168 bp, Homo sapiens
  misc_feature 4, 6, 7, 8, 15, 16, 17, 19, 24, 30, 32, 34, 35, 37, 39, 41,47, 51, 62, 68, 71, 73, 74, 78, 79, 80, 83, 85, 92, 95,96, 97, 104, 105, 106, 107, 109, 112, 113, 114, 115, 120,126, 127, 165, 228, 484, 531, 574, 575, 593, 615, 665, 669: n = A,T,C or G
  misc_feature 686, 694, 731, 761, 776, 797, 807, 809, 821, 837, 839, 860,865, 875, 877, 896, 908, 910, 912, 918, 941, 944, 946, 950,959, 962, 966, 979, 989, 1000, 1001, 1003, 1012, 1019, 1020,1024, 1026, 1029, 1031, 1044, 1054, 1056, 1057, 1058: n = A,T,C or G
  misc_feature 1059, 1068, 1070, 1081, 1088, 1094, 1095, 1098, 1105, 1114,1115, 1117, 1123, 1130, 1132, 1138, 1140, 1146, 1148, 1167,1168: n = A,T,C or G
ctcncnnnatactgnnntnaaatnaccctntntnntnantntaattntacnttataattttnatcttnttntnnattnnnttnanttttcanttnnngtagggnnnngntgnnnngatangactcnntatagggcgaattggtagctccacccgcggtggcggcncgaggtacgcggggggcagtctagaggcgcagaagaggaagccatcgcctggccccggctctntggaccttgtctcgctcgggagcggaaacagcggcagccagagaactgttttaatcatggacaaacaaaactcacagatgaatgcttctcacccggaaacaaacttgccagttgggtatcctcctcagtatccaccgacagcattccaaggatagatcagatactgattcatcagcaaattgaacttctggaagaatagaaatccaagcttccttcctggtgtaccttgcccgggccggccgctctagaaactagntgggatcccccggggcctgccaggaaattcgatatcaaaggcttatnggatacccgtccgacctcgagggggggggccccggttacccanncttttgtttccctttagntggagggggtttaaattttgcngcgctttggggcgttaaatcaatgggtccaataggcttggttttccttgntgtngaaaaatttgtttaatncccggctncaaccaaattttcccaacaaccaaaccataaccgaangcccggggggaaggccaattaaaaaagttnggtaaaaaaggcccntggggggttgggccctaaaantggagggtgnangccttaaacttnaacaaatttaaatttngncggtttgcgcctttaacttgnccccncttttttccnanttccggggaaaaacccttngacggttggccnancnttgccnttttaaattgaaaattcgggccnaancncccnccggggganganggcngtttttgccgttntttgggggcngctttttttcnncnttttacttngcctcannttgnanttncntttggggccttcnggtccgtttncnnnncttgttggncncaggcgggtanttaaagnttttannttnaaaaggngggctaatnncngggttnttcccananaaattnangggggntntacctccaggaaaaagaann

SEQ ID NO: 7014 - DNA, 1103 bp, Homo sapiens
  misc_feature 2, 5, 6, 7, 8, 10, 11, 14, 16, 21, 31, 34, 39, 45, 47, 48,50, 52, 53, 54, 55, 63, 66, 71, 72, 73, 76, 77, 83, 86,88, 92, 93, 95, 96, 100, 106, 107, 114, 117, 124, 200, 508,545, 595, 644, 652, 659, 676, 681, 693, 698, 717, 732, 769: n = A,T,C or G
  misc_feature 779, 792, 807, 813, 815, 833, 849, 855, 866, 867, 884, 888,889, 893, 900, 904, 907, 912, 915, 916, 918, 928, 931, 939,940, 942, 944, 951, 962, 966, 974, 976, 979, 986, 989, 992,993, 995, 996, 997, 1001, 1003, 1004, 1006, 1011, 1022: n = A,T,C or G
  misc_feature 1024, 1025, 1026, 1027, 1032, 1037, 1038, 1039, 1040, 1041,1045, 1051, 1055, 1056, 1061, 1067, 1077, 1085, 1087: n = A,T,C or G
cnccnnnntnnatnanaattnaaactacttntcntcttntatcangnnantnnnnttatacanaanttgtnnnctnnctagtnggngngggnngnngggnaattanntctttangtnaaattgnagctccaccgcggtggcggccgcccgggcaggtacgcggggcagtgattgagtaggattggcctgcttcaaagcanaggtttctcatgggaatatgcttattaaactcccactggtgcagaaaccatgaacagaggatgagcaagtgaagttgcaatctcctccatcacagctcagttccccaacaacaggatcacaagctggagatgcctttaaggaagatgaagatccctttcctcctactgttctttctgtgggaagccgagtagccacgcaagcatcaaggcccgaacatcatcctggtggatggctgaccgacctcggcattggagatcctggggtgctatggggaacaaaaacttatcaggactcccaaatatcgacncggttgggccagtggggggaagtgaaaactcactcangcaccttggccaagcattcaaccactgtgccaccaccccaaggcaggggncagcctttcatggacttggcccgggtaaccctccgggcccgcttttaanaactagtngggaatncccccccggggctggcnagggnaatttccgaatnattcnaaagcttttatccgtatancccgttcgaaccctncctaagggggggggggggccccgggttacccccaaancttttttgtnttccccttttaantggaaggggggtttnaatttngncgccggccttgggccgtnaaatcaatggggccanaaggcntggtattcccnnggggtggaaaaaattgngttnntccncttaacnaaanttnccccnacnnancaattatcgnaancccggggnngncntataaantggataaaacncccngggggggngnccntaatganagnggnncnnnaacntnncnatttnaaattgggcgntnnnncctcnaaatnnnnncccntttttnctannagggngaaaancttttatcgncgcccccncnccccccccccccccct

SEQ ID NO: 7015 - DNA, 1193 bp, Homo sapiens
  misc_feature 11, 13, 15, 18, 21, 24, 29, 32, 35, 36, 37, 38, 39, 42, 44,47, 51, 54, 59, 60, 65, 67, 68, 69, 70, 71, 81, 82, 84,97, 98, 102, 103, 105, 106, 109, 114, 126, 127, 128, 138,149, 161, 334, 411, 428, 448, 473, 476, 537, 553, 562, 607: n = A,T,C or G
  misc_feature 678, 681, 684, 691, 756, 759, 768, 776, 783, 797, 798, 806,810, 822, 825, 826, 828, 859, 872, 896, 901, 903, 910, 923,927, 933, 937, 946, 955, 957, 973, 979, 981, 983, 989, 990,1000, 1004, 1007, 1013, 1029, 1032, 1037, 1038, 1052: n = A,T,C or G
  misc_feature 1053, 1063, 1066, 1074, 1085, 1087, 1088, 1094, 1096, 1097,1100, 1112, 1121, 1132, 1138, 1140, 1142, 1147, 1151, 1154,1156, 1157, 1159, 1168, 1169, 1171, 1176, 1177, 1178, 1179,1182, 1184, 1190: n = A,T,C or G
cacctttctcncngntantcngtntctcnacnctnnnnnctntntantatntgncttcnntgtantnnnnngttttttttnntntttttataaaganngggnnannaanagacnttcaatttattnnncgaattgtanctccccgcggnggcggccgcccnggcaggtaccattagaccaatggacatggaaaccatagaagccagtgtcatgaagacaaatcatcttgtaactgtggaaggaggctggccacagtttggagtaggagctgaaatctgtgccaggatcatggaaggtcctgcgttcaatttcctggatgctcctgctgttccgngtcactggtgctgatgtccctatgccttatgcaaagattctagaggacaactctattaccttaaggtcaaagacatnatatttttgcaataaangaaaacattaaaatatttanttttgggactttgaatatcaaagtncgntttgaaatttttattttgaaaataccttgcctggcacctggcaccctgggattttggtacncttcggccgcttctangaactagtngggaatcccccccggggccttgccagggaattttccgataatcanagcctttaattccgaattaccccgttccgaccccttcggaggggggggggggccccccgggtaacccccanacnttnttttggntccccctttttaagatggaagggggttttaaattttggcccgccgccttttggggccgttaaaanccnattggggtncaataaanccttggnttttcccttggtgnnggaaaaanttgntttaattccggnctnnancaaaatttctcccctaccaaacatttacctnaagccccgggggnggccattaaaaaaggtggttaaangcccntnggggggntgcccttaaattngaangtggangccntaaacctcnaccattttnantttggggggtgggccncttaancntncccccnntttttcaacntccnggnaaaaancctggtccttggcccnacnttggnnattttaaatgaaanncctgccccanccncccccggngggagaagggncnngttatngnnctntttagggccgcncttttcccnctttccatttnctattncntngaacntctnctncnncncccgggccnntntcgannnnttntnctaaanccg

SEQ ID NO: 7016 - DNA, 1162 bp, Homo sapiens
  misc_feature 2, 4, 7, 8, 9, 11, 12, 13, 14, 15, 16, 17, 20, 23, 24, 26,27, 30, 32, 33, 34, 40, 44, 47, 48, 49, 51, 52, 53, 54,58, 64, 68, 70, 71, 72, 74, 84, 87, 88, 89, 90, 94, 95,99, 116, 439, 543, 562, 564, 590, 602, 612, 641, 678, 680,719: n = A,T,C or G
  misc_feature 726, 754, 756, 761, 774, 797, 798, 804, 814, 826, 833, 840,842, 858, 863, 873, 888, 925, 936, 937, 945, 949, 961, 963,972, 975, 981, 985, 986, 991, 1001, 1002, 1006, 1025, 1033,1039, 1048, 1049, 1050, 1076, 1094, 1098, 1110, 1125: n = A,T,C or G
  misc_feature 1130, 1137, 1139, 1144, 1147, 1152, 1154, 1156: n = A,T,C or G
cntnctnnntnnnnnnnagntannanntanannnaggagngatngannntnnnngcanatatgnaacncnnncnagagaggggnggnnnngggnngtanattcttagggctaatgnagctccaccgcggtggcggccgaggtacctagccaccacaaattccagccagaatcagtcctagcttaattcaactctccaaatttcaggggaattatcttccgtagagtccctccagaggcaaatttgtattagtgacagtggcccaggatgctgtgtcctcatcttaggaatctggacttgcctctgcctggaatgtccttaactccctcttgccggcaatttcaccagatttttgatttcttatccagtctcacgggaagcctttccggcatctcccaccctaccgatcttcccggtctaatctcgccttgctacactgntgagtttcaagacagcacgggattggaaactcttcatcttttcggtggtcggcgttctgcacaagggggccccccggccgtaccctgccccggggccgggccgnctttctaaaaaaactaagntngggaatccccccccggggcctggcangggaaaatttcngaattattcnaaaggcctttattcggaataaccccggtnccggacccttccgaagggggggggggcccccgggttnancccccaagccttttttggtttccccctttttaagttggnagggggntttaaatttggcggccgccctttggggngntaaantcaattggggccnaataagcttggttttcccttggnngggggnaaaaatttgntttattcccggntttcaanaaatttncnaccaacaaacaataancgaancccccggggnagccaataaaaagtnggttaaaaaggcccctggggggggtggccccttaatnggaggtggaanncctaaacntcancatttaaaattngnggtttggcngcnttcaanttgnncccgntttttccaannttcnggggaaaaacccggtccgnggcccaancttggnatttaaaannnaaattgggcccaaacccccccggggnaaaaagggcggttttgcngtanttggggcggccntttttcccgttttcntcggntttaaantnagacncgnttggngncntcgggg

SEQ ID NO: 7017 - DNA, 1239 bp, Homo sapiens
  misc_feature 2, 3, 4, 15, 16, 18, 19, 24, 29, 30, 41, 42, 43, 52, 53,56, 59, 61, 64, 69, 76, 81, 84, 88, 89, 95, 97, 99, 102,103, 107, 112, 118, 121, 124, 146, 165, 171, 175, 197, 199,208, 209, 305, 335, 363, 372, 392, 398, 404, 410, 411, 422: n = A,T,C or G
  misc_feature 427, 442, 456, 457, 461, 485, 493, 503, 505, 520, 529, 530,535, 542, 560, 570, 571, 598, 601, 609, 618, 621, 622, 629,636, 639, 644, 654, 659, 662, 665, 687, 693, 714, 715, 718,720, 721, 729, 731, 746, 757, 760, 772, 796, 798, 799: n = A,T,C or G
  misc_feature 805, 813, 815, 816, 819, 822, 826, 831, 836, 842, 844, 848,851, 860, 864, 866, 868, 869, 879, 891, 892, 894, 895, 898,927, 931, 937, 938, 955, 958, 967, 974, 983, 984, 1010,1013, 1028, 1030, 1038, 1039, 1040, 1044, 1046, 1047, 1050: n = A,T,C or G
  misc_feature 1065, 1070, 1087, 1098, 1099, 1113, 1118, 1119, 1120, 1123,1125, 1132, 1134, 1136, 1143, 1144, 1145, 1146, 1152, 1161,1172, 1173, 1178, 1179, 1180, 1185, 1194, 1202, 1207, 1213,1216, 1220, 1222, 1229, 1232, 1235, 1238: n = A,T,C or G
gnnntgaaaaatgtnntnngcaanccctnntttttattctnnntttatattnntcnttntnttncgttnttttttnttttnagnattnngtgggntngnttnntccntaatncatgtnatntanaagctccacccgcggtggcggnccgcccgggcaggtactcnggaacngggnaattctggccctacgtgcattnanaggcaatgnngggtttgtgtgtatggtgtcatgagatcctctacctcataacaaaaggacagtgggttagactaaggcagtagctcaaagggcttttgcaaaattntaatatattaaaacaagaggcatctgctanaaaacattctattgtataaatacccganttcttcaanaaaaacttactatttacccnagaatnataatnctggtnnagtttaagaanaagtnaccctcgggcccgcntcttaaaaacctanngtgngattccccccgggcctggccaganaattttcnaatatttcanangcttttattcttatnccccgttcnnaaccntctaagngggggggggcccccgggntaacccccannccttttttggtttccccttttaagganggnggggggtnttaaatttnccnnccccccnttgggcngtnaaatnaattgggggnccaantanggnctgggttttccttgttggtggnaaaaanttggtttaattcccggtgttnnacnanntttctccncnaccaaaccattttcngaggcccgggngangccattaaaaanttgggttaaaaagcccctcggggngnnggcccntaaaatgnannttnagncctnaaccntcacncatttnanattnggnggtctgggngccntnannttggccccgntttttttcaaanncnnggnaaaaacccttgttctttggccccaccttntcantttaanngaaaattcgggcccaanccncccccgggnggaaganagccgggtnnggctgtttttgggggccccctttttnccngctttctcttggggntnaatttacnnnggtngnnccntctggttcttttttngcttncaaggccaaaaacgggntttttaacccnnccttcaaaaggggnggtgnnnttncnggttttncncnaaaaaannnngggggntaactcccngtttaaaaaannattgnnnggccnaaaagggcnttctctantaggngccctnaancccntntaaaaanggnccngant

SEQ ID NO: 7018 - DNA, 1172 bp, Homo sapiens
  misc_feature 1, 3, 4, 6, 9, 13, 14, 15, 16, 17, 20, 26, 33, 37, 39, 40,41, 43, 44, 45, 46, 50, 52, 57, 59, 61, 63, 64, 67, 69,71, 73, 83, 84, 88, 90, 92, 93, 98, 102, 106, 110, 116,118, 126, 129, 130, 134, 139, 140, 152, 251, 377, 439, 464: n = A,T,C or G
  misc_feature 514, 615, 641, 647, 685, 688, 689, 702, 724, 737, 743, 784,785, 787, 798, 802, 815, 819, 822, 824, 829, 847, 863, 875,878, 879, 881, 891, 908, 910, 916, 919, 940, 942, 945, 946,953, 965, 1008, 1010, 1011, 1017, 1021, 1030, 1039: n = A,T,C or G
  misc_feature 1055, 1062, 1064, 1084, 1088, 1094, 1106, 1111, 1114, 1117,1131, 1136, 1138, 1155, 1157, 1161, 1167: n = A,T,C or G
ncnnantanttannnnntgngcctantgatttnaacnannntnnnngtgncntatanananannaantngngnttttggtgtnngttntnanngtagnaggnaggnaggnggcggncngttcgtanttnntttnctatnnggcgaattgganctccaccgcggtggcggccgaggtacgcgggggaggtggatttgagagatacctcccctccttctgctcagctgccttgcagtaattaaactctttctntgctgcaacacccctactgttctccgtgtattggcttttctgggcagcaggaaggaaaagctgatgcgatgctctcagtgccgcgtcgccaaatactgttagtgctaagtgtcagaaaaaagcttnggccagtaccacaagcgggaatgcaaatgccttaaaagctgcaaacccagtatatcctccanactccgttcgacttcttggcagagnttgtcttcaaaactttattggatgggagcaccgctggccgccccgggcanggtaccccctggccagacaaaaagttcctgtttttttgtataggaaagaactttccccccaaccaggttctggtggaagaaaccttcggtttttttttccncaccaggttcccatggggggaccctncccggngccaggggagggaccaccaccaccacccttgggggggnggnnggggtgccacctngttatggcccggtttcttcaancaaaccttggagnattgantgtttgccttgggaacaaggggaatggcaaggcttggaaannantggtttgaaangttnctttttaaagggntttnggnangccancttttcaaagggcttgtngggttagaaaatccantacccccccatnggnntncccacaattnttttaaaaccattggtntnattctnggngggaaattacctccaaatggngngtnncccttcnggggccggcttncttaagaaaccttagttgggaatcccccccccgggggcctggnannggaaanttcngatattcanaagctttantcggaataccccgtcnggacccntncaaagggggggggggcccgngttnccccanctcttttgggtnccccnttnagnggggggggttaaantggcncnccttgggcggtaaatcnangggncattanctggg

SEQ ID NO: 7019 - DNA, 1188 bp, Homo sapiens
  misc_feature 2, 4, 5, 8, 11, 17, 20, 21, 24, 25, 27, 28, 31, 34, 38, 41,42, 43, 47, 49, 50, 53, 54, 58, 59, 60, 62, 65, 66, 68,72, 74, 76, 77, 80, 84, 85, 86, 87, 89, 90, 94, 95, 98,101, 102, 103, 107, 108, 113, 114, 117, 119, 120, 121, 122: n = A,T,C or G
  misc_feature 123, 124, 125, 126, 128, 130, 132, 135, 432, 469, 535, 545,552, 568, 571, 582, 585, 590, 687, 704, 707, 710, 720, 723,727, 732, 740, 741, 761, 764, 771, 773, 775, 780, 788, 789,790, 791, 795, 805, 814, 816, 828, 831, 850, 852, 853: n = A,T,C or G
  misc_feature 886, 903, 908, 910, 919, 923, 927, 932, 934, 935, 940, 946,947, 954, 960, 967, 980, 984, 991, 993, 995, 1010, 1015,1019, 1025, 1041, 1045, 1047, 1056, 1061, 1067, 1069, 1076,1079, 1085, 1086, 1110, 1121, 1122, 1123, 1126, 1138: n = A,T,C or G
  misc_feature 1139, 1147, 1154, 1155, 1160, 1168, 1169, 1171, 1172, 1178,1187, 1188: n = A,T,C or G
cngnnctnttntatgtnacnnacnngnngtngancgtnttnnnatantnncanngatnnntnatnncntctntncnnatntttnnnntnntagnntcnagnnngtgnntttgnntcncnnnnnnnncntntnctntagggcgaattggagctccaccgcggtggcggcccgcccgggcaggtacgcggggagaaaagccctatgaatgtagtgagtgtgggaaagccttcagtcttaactccaaccttgtcctgcatcagaggatccacacaggagagaaacctcatgaatgtaacgagtgtggcaaggccttcagccacagttccaatctcatcctccatcagcgcatccactctggagagaaaccttatgaatgtaatgagttgcgggaaggccttcagccaagagctcgggacctcaccaagcatcagnagaattcacacggggggaagaaaccctatgaatgtangtgaatgtgggaaaaagcttttcaaacccgaaacttcataaccctggatttttgcattcgggtganatttccaccncttcggnagaaaaaagccccctnacnaaaggtgccanctnaatgntggtggggcaaagggcccttttcaacccccggcaaaacttcccacccccttcaccttctttgccatttaaccaagaaattcccattggcccccggangaagaagaggccccctnganttnacccttcggncgntttnttaanaaactagnngggggaatcccccccggggnctngcaaagnananttccngatttttnnnngccnttatttcggnttaccccgntnggaacccctttnaangggggggggggcccccggntnncccccaacctttttttggtgtcccccttttagntgggaggggggttaaantttgncnccccccttngggncggnaaaancnnatggnccaaannaaccctngtgttnccctggngtgggaaaatttnttanattcccntncnacaattttcccccancaaanaatnccaaancccgggggagccattnaaantngttaaaagnccccngggggngncctcaanggngggggnncctaactccccattttaatttgtngttttcggctnnntgngcccccttttcnnattggggnaaaaccnnggttnggccccanntnngatttnaatataaann

SEQ ID NO: 7020 - DNA, 1215 bp, Homo sapiens
  misc_feature 2, 3, 8, 9, 14, 15, 16, 17, 25, 31, 34, 35, 37, 38, 42, 56,57, 60, 63, 64, 67, 68, 69, 73, 76, 77, 88, 90, 91, 95,96, 97, 98, 99, 100, 106, 117, 118, 123, 153, 376, 399,427, 469, 481, 492, 523, 540, 556, 566, 568, 575, 579, 611: n = A,T,C or G
  misc_feature 615, 621, 629, 630, 631, 643, 657, 661, 663, 666, 674, 682,685, 696, 708, 714, 725, 727, 730, 736, 745, 756, 765, 792,794, 797, 806, 807, 808, 812, 813, 824, 827, 830, 847, 848,854, 867, 873, 879, 883, 888, 898, 900, 901, 904, 911: n = A,T,C or G
  misc_feature 915, 919, 920, 924, 931, 944, 954, 962, 963, 976, 980, 981,991, 993, 998, 1004, 1014, 1027, 1031, 1033, 1035, 1037,1038, 1043, 1046, 1050, 1052, 1053, 1055, 1064, 1067, 1070,1079, 1085, 1088, 1089, 1101, 1108, 1109, 1112, 1135: n = A,T,C or G
  misc_feature 1136, 1137, 1138, 1139, 1146, 1147, 1150, 1154, 1156, 1157,1160, 1161, 1175, 1177, 1180, 1182, 1195, 1199, 1200, 1203,1210, 1212, 1213, 1214: n = A,T,C or G
annatatnnttaannnngattttcnattttntannannaggntttttttttatgtnnatnttnnaannntttnttnntctatttaggngnnatgnnnnnnggattnttatttagtgnnattgnagctccaccgcggtggcggccgtggtaggnaagcatctgcagctcatctggaatactacaagtcttgaggacgtgctttccatacgccctgtgtctggtctacatgcaggcgtgtcttgtgataaatcctgttacgggcatgtgtgtgtgagggcttctatgtggccccccgactccattttattagagtttggcataagtgactccattttggttccagcaactttcacataaggaaactgaggcttcaganaagtcaagggactttgcccccangttcccactaacaacttgtgcaagttgngaagttgatgccaaaccccagttttccccagttgggattggnaagcctgcctgntgggggtgaanttgccaagggttgccggtgttggaacccaanaaaggggttgggtggcnaataagaacccaagtngttgggggantntcggaangaangggatcccccctgggggggggaagggccaagnttgncttggnttggccannntttgggggattnggggggccaagaanaggntnggnaaaaggtnggccgccnttnttgccctaaanaagggggggaanaaggcnaaaagggcccntnggnaggggncttcccatnatcctttcttnaaaacccgnttcaatggggctttggaatggcccccntnaanaaaaggggnnngggnncactttgttanccnttngggcccggggttttagnnaacctnaagttggggattncccccnggggcnttgnaaggnaaaatttccnannatncaaaggncttnattnngatnacccgtncgaacccccctangggggggggnccccccgnntccccaaaatttnttgnntttccctttnanggggnaggggnttaaattttncccccccttgggnggtnantnanngggancanaaangnntnttttccctngtntanaaaaaatgnttattntcnntttcaaaaaatntttgcanncanaccaaaatattctagccgggggnnnnnattaaanntgngttnannccnntggggggtggcctnanaananggggagcctaatntttnnaantaatttncnnng

SEQ ID NO: 7021 - DNA, 1150 bp, Homo sapiens
  misc_feature 2, 4, 5, 6, 9, 11, 13, 16, 18, 20, 23, 26, 27, 28, 31, 32,33, 34, 36, 38, 40, 41, 44, 45, 55, 57, 58, 59, 60, 62,68, 70, 74, 77, 81, 84, 87, 91, 92, 93, 94, 97, 98, 100,104, 109, 111, 113, 478, 552, 607, 610, 630, 659, 679, 686: n = A,T,C or G
  misc_feature 687, 689, 705, 713, 744, 750, 751, 763, 781, 783, 788, 814,829, 834, 835, 840, 849, 857, 866, 869, 873, 878, 891, 893,902, 920, 925, 930, 950, 953, 955, 959, 963, 967, 974, 975,982, 983, 985, 996, 997, 999, 1009, 1015, 1023, 1025: n = A,T,C or G
  misc_feature 1026, 1027, 1034, 1040, 1043, 1048, 1050, 1052, 1068, 1077,1081, 1085, 1092, 1097, 1098, 1100, 1105, 1108, 1119, 1140,1144, 1146: n = A,T,C or G
cntnnnttncntnttntntnttntannnttnnnntntntnnttnntgtaataatncnnnntncgattntnttanttntcanagnatnagcnnnnggnngnttgnctcantntngggcgaattggaagctccaccgcggtggcggccgaggtacgcggggacatcacagaagtagaggcagaccttgcttcatgagcaagctcatctctggaacaaactggcaaagcatctctgctggtgttcatcagaacagacaccatggcagagcatgattaccatgaagactatgggttcagcagtttcaatgacagcagccaggaggagcatcaagacttcctgcagttcagcaaggtctttctgtcctgcatgtacctgcccgggcggccgctctagaactagtggatcccccgggctgcaggaattcgatatcaagcttatcgataccggtcgacctcgagggggggggcccggtacccaanctttttggttcccttttagtggaggggttaaattggcgccgccttggcggttaattcattgggtcattagctgnttttcttgtggttgaaattggtttattcccggcttaacaaaatttcccaccacanacnattaccgaagcccgggggangcaattaaaaaggtggtaaaaaagccctnggggggtggccccttaaatngaaggtnnangccttaaaccttccancaatttanaatttggccgttttgccgcccttcacctggnccccgnntttttcccaagntccggggaaaaaaccctngntcggnggcccaaggcttggaatttaaattgnaaattcgggcccaanctccnnccggngggaagaanggcccggnttttggccnttntttngggcnggcttttttcccncntttcctcgngatttaaattgaacttcngcttncggcntttggggccgtttctgggantgncngggncgangcgnggttttnnaaatttnnanttcaaaagggnngnggtgtaatanccgggntatttccncnnngaatttngggggnttnacccnangnaaaaaaaaccttgggnagcccaaanggcnccancaaaaanggccnngnaaccngtnaaaaaaggccncgtttggctgggcgttttttnccanangccc

SEQ ID NO: 7022 - DNA, 1158 bp, Homo sapiens
  misc_feature 1, 5, 7, 8, 9, 13, 15, 22, 26, 30, 36, 38, 40, 44, 45, 47,50, 51, 62, 68, 69, 74, 77, 78, 81, 83, 84, 88, 89, 96,99, 100, 101, 102, 103, 106, 107, 110, 373, 439, 450, 487,508, 579, 593, 620, 650, 661, 673, 679, 718, 724, 739, 765: n = A,T,C or G
  misc_feature 767, 769, 781, 795, 808, 809, 812, 816, 828, 834, 847, 850,853, 856, 859, 868, 870, 876, 877, 911, 913, 919, 947, 948,953, 962, 964, 966, 967, 970, 976, 978, 979, 997, 1016,1029, 1039, 1046, 1049, 1052, 1062, 1064, 1067, 1070, 1077: n = A,T,C or G
  misc_feature 1078, 1080, 1083, 1085, 1090, 1094, 1098, 1102, 1103, 1112,1115, 1118, 1120, 1123, 1124, 1125, 1127, 1128, 1130, 1139,1142, 1143, 1151, 1155, 1156: n = A,T,C or G
ntttntnnnaatncnattatanactntgtntttttnancnaaanntngtnnattgggttttnttcttnnttttnatnnacntnngggnntatatanctnnnnnttnngcncttttggcgaattggagctccaccgcggtggcggccgcccgggcaggtacgcggggtagcagttgatgatgagctgtgtggcttgatagccattgcagacacagtgaagcctgaagcagaactggctatccatattctgaaatctatgggcttagaagtagttctgatgactggagacaacagtaaaacagctagatctattgcttctcaggttggcattactaaggtgtttgctgaagttctaccttctcacaaggttgctnaagtgaagcaacttcaaggagggagggggaaaacgggtagcaatggtggggaagatgggaatcaantgactccccanctctggcaaatggctaatggtggggaatttgctattnggcacagggcaccagatgtangccattggaaagccagcctgatggttggttttgataaggaatggatcttctggaatgtaagtggccaagtntttgacttatcaangaaaggaacagttcaatgaaggaattncgggataaaaattttttggggccttttgcncctaaattttnattaaaatcctngggttnggggaaattttccccattaaggccttggtttggggaagntttttntaattggccccccantttgggttttttggggtttttttgcnananccccttggggantggggggaatcctntccaaaccaaatnnggncttngcctttcaattncttggntttttttggttanatnacnccntcngggcccgcntncttaannaaacttaagttggggaaaccccccccggggcctngncaaggnaaattttcttatatttccaagggccttnntttcntatttcccngntnnaanccttcnannggggggggggcccccggntatcccaaagctttttttngttcccctttttnttgaaggggntttaaanttngcncgccttgggncntanaancaaaagnncntanangctgntttnctgnaggnnaaaaaatangtnttncnccnnntnncnaatttcctnacnnaaaaattncggnncc

SEQ ID NO: 7023 - DNA, 1172 bp, Homo sapiens
  misc_feature 9, 15, 17, 21, 23, 24, 25, 27, 32, 33, 39, 46, 47, 55, 56,60, 65, 72, 73, 76, 78, 84, 86, 89, 90, 91, 93, 98, 101,104, 105, 109, 110, 111, 112, 113, 117, 123, 329, 398, 440,631, 636, 645, 647, 677, 705, 714, 727, 736, 762, 764: n = A,T,C or G
  misc_feature 766, 769, 779, 797, 817, 824, 835, 844, 856, 888, 890, 891,896, 909, 913, 915, 919, 931, 935, 952, 953, 966, 967, 975,986, 995, 998, 1010, 1016, 1024, 1026, 1035, 1042, 1046,1049, 1052, 1061, 1064, 1065, 1070, 1073, 1091, 1093: n = A,T,C or G
  misc_feature 1096, 1098, 1103, 1108, 1112, 1113, 1115, 1116, 1122, 1146,1148, 1157, 1163, 1164, 1171, 1172: n = A,T,C or G
ttcatatgnttattnancttngnnngnccttnntttttnctaatanngggtcgcnntttntttcnaatttannttntntgctangnggnnntnatatnatnctnnatgnnnnntttnaggcgnattggagctccaccgcggtggcggccgcccgggcaggtacgcgggggttggtccgcgcgttgctgcgttgtgaggggtgtcagctcagtgcatcccaggcagctcttagtgtggagcagtgaactgtgtgtggttccttctacttggggatcatgcagagagcttcacgtctgaagagagagctgcacatgttagccacagagccncccccaggcatcacatgttggcaagataaaagaccaaatggatgaccctgcgagctcaaatatttaggntggagccaacacaccttatgaggaaaggtgtttttttaagcntaggaaggttatcattccctgaagaggtacctcggcccgcttctaggaaactaagtgggatcccccggggcctgcagggaattttcggataatcaaggctttattcgaataaccccggtcggaacccttcgaaggggggggggggcccccggttaccccaaacttttttggttccccctttttaagtgganggggnttaaaattngncgccgccttgggccgttaaatccatgggtncaattaggcttggttttcccttggtggngaaaaattnggtttattcccgngcttcaacnaatttttccaccaaccaaaccatttncncnagncccgggggangccaataaaaaaggtggntaaaaaagccctgggggggnggccccntaaatggaggngggaagccntaaaccttcaancattttaaattttggcggttgtggcggccttnanntggcnccccgttttttcnggtncngggnaaaacccttgtnttgnggcccaagcctggggcnntttaaatttaaannccggcccnaaccccccccngggggaaanaanggcagggttttncccttntttggggncnctttttttnccctttncctnggntcnacttggacnttnntttanccntcggttcgtttggggttntnagncnaaacnggganttanncnnccctcnaaaaggcggggtaaattacggggntntccccaaanaaatcnnggggatnn

SEQ ID NO: 7024 - DNA, 1260 bp, Homo sapiens
  misc_feature 2, 4, 5, 7, 8, 9, 10, 13, 17, 18, 20, 25, 27, 30, 31, 35,40, 42, 44, 46, 48, 51, 55, 58, 61, 62, 67, 68, 69, 70,74, 76, 77, 78, 79, 81, 85, 86, 93, 94, 96, 98, 100, 105,107, 108, 114, 116, 122, 313, 367, 375, 380, 387, 403, 428: n = A,T,C or G
  misc_feature 452, 485, 503, 570, 593, 602, 611, 612, 631, 647, 648, 660,672, 703, 713, 717, 722, 725, 728, 739, 741, 743, 767, 770,774, 779, 780, 791, 792, 795, 805, 821, 834, 845, 853, 865,866, 883, 885, 890, 892, 902, 907, 914, 915, 916, 920: n = A,T,C or G
  misc_feature 925, 929, 930, 939, 942, 948, 955, 959, 967, 972, 985, 987,1004, 1010, 1022, 1024, 1025, 1041, 1050, 1053, 1056, 1058,1059, 1060, 1062, 1066, 1086, 1089, 1093, 1094, 1096, 1101,1102, 1109, 1139, 1153, 1159, 1162, 1173, 1178, 1179: n = A,T,C or G
  misc_feature 1181, 1189, 1192, 1193, 1210, 1217, 1220, 1223, 1232, 1233,1236, 1237, 1239, 1247, 1248, 1249, 1250, 1257, 1258: n = A,T,C or G
cntnncnnnnaanatcnnanatatntncanntttnatgangnantngntgnagtnttntanntatannnntttntnnnntntagnnaggatgnngntnanatctntnntttagncnatttanggctaattggagctccaccgcggtggcggccgaggtacgcggggggagcccagcggcgggtgtgagagtccgtaaggagcagcttccaggatcctgagatccggagcagccggggtcggagcggctcctcaagagttactgatctatgaaatggcagagaatggaaaaaatttgtgaccagaagacgtgtnagcaatggaacaaaggaaacatcataatgggaaattttcaacaggacccccttntttcagtngaatnaaaaagnaaaaagggaggggganccgggaaagaaaaagggccagaaantattttgttcccttggtggggaanaacaaggcccgcttcaatttaccctttggccangtaatttttttcctcctngggaaaaatccctttgttaaattcctttggaaagggaaaatggggacccctccaaaaaaatttattnggggccattcggttcaaaaaagncaatttggnggggtgggnncttttttttttaccttgcnttggcctttggcttgnnggcctttattangcctacccttantttaatggttttggaaaggggagggtggcanttcaaaccangttnttgtngcnaancgggtatttangnangaaaaaccaaggtttccttttttnggnaatngcccnnaccctgggaannaanggcccttaangggaaattttttgggncctttcctgggtngggggcctttnggggaaanaaagggggcctnncaaccaacccttttctngnctttnantcttgggggncccanaattttnnncccncaagntttnnctttaaccntgntttttntgaaaangccnattctaanttaantttttttcccggnancccccccctttattcgngtaatnaaattttttttntnnccccaaaaaaaaaaangggggcccnctnganannncncccnttttttttttgggggggggnttnctcnncnaaaannttaatgnatgtcccccccccccccctgtggggggggnatattaaagacgcnccccgncgnggggggggtgntctannanaaataaantgnnggcccccccccccccgncgggaantanatnatttttaannttnnanttttaccnnnnccccctnncg

SEQ ID NO: 7025 - DNA, 456 bp, Homo sapiens
  misc_feature 20: n = A,T,C or G
tccccgcggtggcggccgancttgatgagcggagagacctgcaccggtggcaccatcttgtccctgacctccgcaccggaagcacaacctgcagacgccccgcgtacctcggccgctctagaactagtggatcccccgggctgcaggaattcgatatcaagcttatcgataccgtcgacctcgagggggggcccggtacccagcttttgttccctttagtgagggttaattgcgcgcttggcgtaatcatggtcatagctgtttcctgtgtgaaattgttatccgctcacaattccacacaacatacgagccgggagcataaagtgtaaagcctggggtgcctaatgagtgagctaactcacattaattgcgttgcgctcactgcccgctttccagtcgggaaacctgtcgtgccagctgcattaatgaatcggccaacgcgcggggagaggcggt

SEQ ID NO: 7026 - DNA, 1209 bp, Homo sapiens
  misc_feature 1, 2, 3, 7, 11, 14, 15, 16, 19, 20, 24, 25, 26, 29, 30, 31,34, 35, 37, 41, 42, 48, 49, 51, 52, 56, 60, 61, 62, 68,69, 71, 74, 77, 78, 79, 81, 88, 89, 90, 91, 98, 103, 105,106, 109, 116, 503, 511, 522, 525, 600, 607, 614, 618, 632: n = A,T,C or G
  misc_feature 634, 655, 659, 680, 684, 694, 697, 698, 708, 724, 731, 732,741, 743, 757, 762, 765, 772, 774, 783, 784, 788, 789, 791,794, 802, 806, 807, 808, 810, 812, 820, 821, 828, 829, 839,851, 856, 866, 884, 891, 894, 904, 905, 910, 922, 923: n = A,T,C or G
  misc_feature 929, 930, 933, 954, 965, 969, 972, 979, 986, 997, 998, 999,1004, 1011, 1012, 1014, 1024, 1025, 1043, 1055, 1060, 1063,1080, 1083, 1086, 1087, 1089, 1090, 1100, 1108, 1110, 1112,1118, 1120, 1121, 1124, 1125, 1127, 1128, 1132, 1134: n = A,T,C or G
  misc_feature 1140, 1144, 1162, 1163, 1165, 1167, 1176, 1177, 1180, 1183,1185, 1190, 1191, 1196, 1199, 1200, 1201, 1202, 1207, 1209: n = A,T,C or G
nnncttntaanaannntgnnattnnnttnnntcnntnacanntttctnnannaggnatcnnnttttannanatnttnnntntgagagnnnntggggtngagantnnttntggcganttggagctccaccgcggtggcggccgaggtaccagtaaatgtggtggcttgtgagagtataggacgagtgctggcacagagatgcttagaggcgggaatcaacttcatggtctaccaaccaaccccgtgggaggcagcctcagactcgatgaaacgactacaaagtgccatgacagaaggtggtgtggttctacgggaacctcagagaatctatgaataaatggaagcattaattgttttgaacatgtaaatataaatctgtcagccacctacagcccatcaaaagagagcatctgggaagaaacaagcccagcttgggaagttttttacaggcaattaattgttgcagtggggaatatttatttgttagtttaaagggtacattcncttccttnccctttttctngtntttttttttaaaaatccaaaggaaaccttaccattttcttgccccccttcttctttttggggggcctttccaagnaaaggcnattcttnaaanaaaaaaaaggccangntaccattccaaattttattanattnttaaacctttttccaaaaagngggnccaaaggttncannaaaaagtttngttttttattaaaaantttaacnnaaaataatnanaaaggggccctttnttttnttngaaaacntncctttttannttanntnaantaatttantttnnntntnttcataanntttttannttcgtacgtnctatatattatntattntatttaatcnaagagtttcccctttgtnccccggngcncgggccccgnnttttntaagaaaacctnngggggnnttncccccccgggggcctgtggcngggaaatttanattnttnaaaaacnttttttntgtattccccnnnctacncccctcnnangggggggggnnccccggtttccccccaanttttttgtggtnccccnttnatatggggggggggttntanttnncnncccccttggngttataantntntgggtncnnatnnanntttntntcgctnggtngggaaaaataggttattnncncntttaaactnnttnccncncactnnttttntgnnnnggggnan

SEQ ID NO: 7027 - DNA, 1145 bp, Homo sapiens
  misc_feature 1, 3, 4, 5, 6, 7, 8, 13, 15, 21, 22, 23, 24, 26, 27, 28,31, 36, 37, 44, 46, 47, 51, 54, 58, 60, 62, 63, 64, 65,66, 67, 69, 70, 71, 72, 73, 75, 79, 81, 83, 84, 91, 97,98, 100, 103, 104, 105, 110, 113, 169, 420, 502, 504, 530,583: n = A,T,C or G
  misc_feature 599, 641, 680, 705, 728, 734, 750, 764, 786, 801, 811, 826,831, 833, 834, 838, 863, 866, 876, 890, 891, 905, 911, 921,947, 952, 962, 963, 974, 981, 982, 985, 990, 993, 998, 1001,1025, 1026, 1027, 1029, 1030, 1031, 1040, 1041, 1051: n = A,T,C or G
  misc_feature 1059, 1074, 1089, 1091, 1096, 1097, 1102, 1105, 1111, 1116,1124, 1137, 1141, 1144: n = A,T,C or G
ntnnnnnnatatntnttctannnntnnntanatttnnttatttnanntcgncanacgntnannnnnntnnnnntntttntntnnagagatngggtannanggnnnttctntanggcgaattggactccaccgcggtggcggccgcccgggcaggtacaaataattgcantgtgtcttaatattctgtgccgtatttttggctgctttttgacactttcatagtaaaacaaaaagttaatttcatggacaccttcttcatcaggcccacgtaaccacattggcagctgcactgaggctccgggtaaaagaacagttgtcaggaaggggaacaggaatcacctctggttgacttccttgtgccaatgccaaagtctacagaagaagctgatgatatgagtgctgtacctcggccgctctagnaactagtgggatcccccgggcttgcagggaatttcgatatcaaagcttatcgatacccgtcgacctcgagggggggggcccngntacccaagcttttttgttccctttantggaggggtttaattggcgccgccttgggccgttaaatcatgggtccattagnctggtttttcctggtngtggaaaattggtttaatcccgcttccaccaaattttcccancaaccaaaccaattaccggaagccccggggggaggccantaaaaagttgttaaaaaggcccctnggggggtgggccctaaaatggangtggangccttaaccttcaacnattttaaattttgncggtttggcggccttcaccttngccccggcttttttnccaagttcgnggggaaaaccctttnttccngnncccnagccttggcatttaaaatggaaaanttngggcccaacncccccccgggggannaaaggccgtttttncgttanttttggggcngccttttttcccccttttcctttggntttcnattggaattnncctttgggccntctgggnnccnattcnggntttgnggnggaaagcgggggttatcaaacttnnncnnntaaaagggnnggggtatatnccggggtntttcccccaacaatntctaaggggggtttnanccccnnggganaanaaatcnctttntgggaccntaaaaaaggcccncaanaang

SEQ ID NO: 7028 - DNA, 1214 bp, Homo sapiens
  misc_feature 5, 6, 8, 9, 10, 22, 23, 31, 33, 37, 38, 39, 45, 49, 51, 55,58, 61, 64, 66, 69, 72, 75, 88, 89, 91, 101, 103, 104, 106,107, 108, 109, 111, 117, 120, 123, 136, 138, 139, 141, 143,162, 166, 168, 174, 181, 184, 190, 300, 305, 312, 313: n = A,T,C or G
  misc_feature 338, 459, 512, 569, 590, 607, 639, 640, 655, 659, 663, 682,693, 703, 717, 724, 729, 733, 734, 743, 746, 750, 763, 768,775, 781, 793, 802, 807, 808, 814, 827, 828, 842, 855, 856,859, 866, 871, 875, 877, 882, 896, 900, 906, 915, 922: n = A,T,C or G
  misc_feature 925, 928, 930, 934, 938, 939, 941, 947, 949, 951, 956, 963,969, 981, 982, 983, 984, 986, 987, 989, 990, 991, 993, 995,1006, 1011, 1012, 1013, 1019, 1022, 1025, 1027, 1029, 1040,1041, 1045, 1047, 1053, 1057, 1061, 1062, 1079, 1080: n = A,T,C or G
  misc_feature 1083, 1086, 1087, 1089, 1094, 1102, 1105, 1108, 1109, 1110,1111, 1116, 1119, 1133, 1135, 1136, 1138, 1141, 1148, 1150,1151, 1156, 1161, 1168, 1174, 1181, 1182, 1195: n = A,T,C or G
actcnncnnnattttaaacttnnagctttanancatnnnataatntttntncaangtnacntgntnganttnatnatatacatttatnntncagcagaggngnngnnnntntttttnganaanttaatatataatnanntntnacctccaccgctgtggctngccngncaccangcccgcntcngctgtnttcattcttggacgttaagggcaagccatttgatcagcacgcaactacaagggcgatgtggccatgagcaagattgagcacttcatgccttttgctggtacctcggccgntctanaactagnnggatcccccgggctgcaggaattcnatatcaagcttatcgataccgtcgacctcgagggggggcccggtacccagcttttgttccctttagtgagggttaatttgccgcgcttgggcgtaaattcattggtcataagctgttttcnctgtgtggaaatttgtttatcccgctcacaatttccacaacaaacattacgancccgggggaagccattaaaaagttgtaaaaagccctgggggggtggccttaaattgnaggtggaagccttaaacctcnaccaattttaaaatttngccggtttggccggccttcaacttggcccccnncttttttccccaggntccngggngaaaaacccttgtacggtnggcccaaaccnttgcaatttnaattggaaaatacngggcccnaaacngccnnccagggggntangaanggcctggtttttngccgntaatttnggggcngcctttcttttnccgcctttnccttnngtcttnaacttggaccttnngcctggcggcttcnggtcccgttatcnnggncttggcnggcanaagncngggtntttcaggctttcancttnaaaaangggcggggntaaattnccnggntnattncccnnanaaaatncncnggggngataatnccccangggaaaaaaaannnntnntnnnancntaaaaagggcncacgnnnaaaaanggngcnantnaaacccacttnnaaananggcccngctntttnncttgggccttttttttnncanaanngnttccncccccccnctntannnngactnttnacaaaaaaatttgncnncnttntatattntnnaaggnggggnggaaaancccccncacgggnnctttttaaaaatnaccgtcgggttttttcccg

SEQ ID NO: 7029 - DNA, 1195 bp, Homo sapiens
  misc_feature 2, 3, 10, 11, 15, 17, 21, 22, 25, 28, 29, 32, 37, 39, 41,42, 45, 47, 53, 56, 59, 61, 62, 64, 74, 75, 80, 85, 91,92, 95, 96, 97, 99, 110, 112, 141, 143, 146, 149, 150, 155,162, 163, 165, 189, 203, 210, 246, 320, 378, 416, 459, 479: n = A,T,C or G
  misc_feature 554, 613, 617, 621, 638, 640, 641, 650, 657, 688, 703, 739,740, 742, 744, 748, 765, 767, 769, 772, 775, 778, 791, 803,817, 823, 830, 831, 836, 849, 853, 855, 856, 888, 894, 896,901, 911, 912, 920, 929, 934, 939, 944, 948, 959, 962: n = A,T,C or G
  misc_feature 963, 981, 987, 988, 990, 994, 998, 1002, 1004, 1008, 1021,1023, 1025, 1027, 1029, 1031, 1034, 1048, 1051, 1058, 1062,1068, 1072, 1076, 1083, 1086, 1087, 1091, 1094, 1104, 1109,1113, 1116, 1121, 1127, 1129, 1135, 1136, 1149, 1156: n = A,T,C or G
  misc_feature 1160, 1162, 1165, 1168, 1170, 1178, 1180, 1185, 1188, 1191: n = A,T,C or G
cnncgttccnnatanantatnnaancgnngtnttttnantnnttntnatttanaantantnnanatattgtatnnttctnttaanaagggnnagnnntnggttttctatnantttttccactgtagctccacgcggtggcngncgnccnngctgntacccanngnggaccccactcctgcaccagcatnatctgctgcactgntctgtgncaggcttctatccaggggatatcaagatcaagtggntcctgaatgggcaggaggagagagctggggtcatgtccactggccctatcaggaatggagactggacctttcangactgtggtgatgctagaaatgactcctgaacttggacatgtctatacctgccttgtncgatcactccagcctgcttgagccctgttttttgtggnagtgggtaggtgaagaaatttagttttcttagtacctccggcncggctctaagaaacttagtnggatccccccgggcttgcaagggaatttccgataatcaaagcctttatccggaattaccccgtcctacccttccnaagggggggggggccccccgggttaccccccaagacctttttttggttttccccctttnttanattngaaggggggttttaaantnngggcggccngcctttnggccgttaaattcaattgggttccattaaanccttggtttttcccntggtggtggaaaaaattggatttatttcccggcctnnancnaaanttttcccaccaaccaancnanttnccnganggccccgggggangccattaaaaantttgttaaaaaagncccctnggggggnngcccntaaaattgaaagntggnanncctaaaccttcaacaattttaaattttggcgntttggngnccttnaactggcccnncttttttncaaatcccnggggnaaaanccttngtcntggcccacccnagnnatttaaaatggaaattcngggccnnancccncccngggnanaaangccggggttttgncntntntngnggngcctcttttccccnttncccttgncctncacttnaacntccnatttggnctnngcanttnattttcttantttancggncgnaaacngttatntnactctnntcacttccaaaanggggggngaantntanggntnttttcccncnaaaanaanggngggg

SEQ ID NO: 7030 - DNA, 1192 bp, Homo sapiens
  misc_feature 1, 3, 5, 8, 9, 14, 16, 18, 21, 23, 26, 27, 28, 30, 31, 32,33, 34, 35, 40, 44, 45, 46, 47, 48, 50, 51, 54, 55, 57,59, 60, 61, 64, 67, 68, 73, 76, 78, 79, 81, 84, 85, 86,87, 91, 96, 99, 101, 105, 107, 108, 109, 112, 113, 118,123: n = A,T,C or G
  misc_feature 127, 515, 524, 534, 535, 554, 565, 601, 610, 617, 622, 631,659, 662, 677, 720, 721, 762, 771, 779, 780, 785, 796, 804,806, 818, 834, 840, 846, 847, 852, 853, 855, 885, 889, 902,909, 918, 928, 931, 933, 941, 956, 963, 964, 965, 986: n = A,T,C or G
  misc_feature 987, 992, 997, 999, 1004, 1005, 1007, 1012, 1020, 1026, 1027,1028, 1031, 1055, 1064, 1069, 1078, 1079, 1087, 1089, 1096,1097, 1098, 1106, 1113, 1117, 1120, 1132, 1142, 1143, 1145,1146, 1155, 1163, 1164, 1172, 1176, 1177, 1179, 1187: n = A,T,C or G
  misc_feature 1189: n = A,T,C or G
ncncnacnnttttntntnatnantannntnnnnnnaaatnattnnnnnanntanngnannnacnttnnttttnatnannanctnnnntagnagagnaangngggngnnnggnnttacnatttnttanggcgaattggagctccaccgcggtggcggccgcccgggcaggtacgcgggggagtcagacccagtcaggacacagcatggacatgagggtccccgctcagctcctggggctcctgctgctctggctcccaggtgccagatgtgacatccagctgacccagtctccctcctccctgtctgcatctgtaggagacagagtcaccatcacttgccgggcgagtcgggccattagcaattctgtagcctggtatcagcagaaaaccaggggaaagcccctaaactcctactctatttctgcatttagattgggaaaagtgggggtcccatccaggttcaggtgggcaagtggttctggggccgggattaacactcttacccatcaagcaagnccttgcaanccctggaaannattttttgggttaccttcnggcccgcttcntaaagaaaccttaggtggggattccccccccggggncttggccangggaaantttcngaataatcnaaaagcctttaattccgaattaccccgntcnggaaccctttcgaangggggggggggcccccgggttaccccccaagcctttttttggnnttccccctttttaggtggaggggggtttaaaatttggccgnccgcctttngggcggtnnattcnatggggtccantaggcctngnttttcccttggngggtggaaaaaatttnggtttntttccnnctttnncnaaattttccccccaaccaaaccattatccnaaancccccgggggaangccattnaaaaagttngttaaaaagnccntnggggggtnggccctaaaatggangggtggnnncttaaccttcaacatttttannttggngtgtngnggccnncnacttnggcccccntttttnnnaanttcgggggaaaaacctgttcgggnggcccaacnttggnaattataannaggaaatnangggccannnaccccccnggggggngaanggngggtttttcggnttttggggcnncnnttttccccnttatcttnnatttaaantgannanggttgggngnttc

SEQ ID NO: 7031 - DNA, 570 bp, Homo sapiens
  misc_feature 3, 4, 5, 6, 8, 9, 12, 13, 16, 19, 21, 22, 23, 24, 25, 26,28, 29, 32, 34, 35, 41, 45, 48, 51, 52, 53, 54, 55, 56,57, 58, 59, 60, 61, 62, 63, 72, 74, 78, 79, 80, 82, 83,84, 85, 87, 88, 89, 91, 92, 93, 97, 131, 570: n = A,T,C or G
ttnnnntnntannaanaantnnnnnntnntgntnntttaanaaanaanaannnnnnnnnnnnnatttatggntnatgnnnannnnannncnnntatnggcgaattggagctccaccgcggtggcggccgancctccgctcaggctggcagccccagctctgcacgaggaaggcaatgttctgtccttcagcagaagtcatacaaaataaggatccaaagtgaactcaagaaaaaaaaaaaaacaaaacaaaataaaagtacctgcccgggcggccgcaggctacgacgtggagaagaacaacagccgcattaagctgggcattaagagcctggtaagcaagggaacgttggtgcagacaaagggtacctcggccgctctagaactagtggatcccccgggctgcaggaattcgatatcaagcttatcgataccgtcgacctcgagggggggcccggtacccagcttttgttccctttagtgagggttaattgcgcgcttggcgtaatcatggtcatagctgtttcctgtgtgaaattgttatccgctcacaattccacacaacatacgan

SEQ ID NO: 7032 - DNA, 654 bp, Homo sapiens
  misc_feature 24, 455, 461, 464, 466, 467, 468, 469, 470, 471, 472, 473,474, 475, 476, 477, 478, 479, 480, 481, 482, 484, 485, 486,487, 488, 489, 490, 491, 492, 493, 494, 495, 496, 497, 499,500, 501, 502, 503, 504, 505, 506, 507, 508, 509, 510: n = A,T,C or G
  misc_feature 511, 512, 513, 514, 515, 516, 517, 518, 520, 521, 522, 523,524, 525, 526, 527, 528, 530, 531, 532, 533, 534, 536, 537,538, 541, 542, 543, 544, 545, 550, 551, 552, 554, 555, 557,558, 559, 560, 561, 563, 568, 570, 571, 573, 574, 575: n = A,T,C or G
  misc_feature 576, 577, 579, 580, 581, 583, 584, 585, 586, 587, 588, 589,590, 592, 593, 594, 595, 596, 597, 599, 600, 602, 603, 605,606, 607, 608, 609, 610, 611, 613, 614, 615, 616, 617, 620,621, 622, 623, 624, 625, 627, 629, 630, 631, 632, 633: n = A,T,C or G
  misc_feature 634, 635, 637, 639, 640, 642, 643, 644, 645, 646, 647, 648,650: n = A,T,C or G
gcgcaattaaccctcactaagggnaacaaagctgggtaccgggccccccctcgggtcgacggtatcgataagcttgatatcgaattcctgcagcccgggggatccactagttctagagcggccgaggtacccatataaaccccaaacctcgggctccagaagcagatgagcagatgaggagacgcctctattccgtgtcgtttagaatgagcaaacagttgtcttcaccatcccagacaagcagatgaatggtgaaacgatgcagcagagaaagagagaagaggaacatttgaacgccgagaggagttcagccgagggtggtcggagaggtttggccacccagcaggaagattatcttcccgtgccatccccgcttccagctctgcatccatccttcagagaaccacctccaccactcaataaaaccctgcattcaaccttcaaaaaaaaaaaanaaaaanaantnnnnnnnnnnnnnnnnntnnnnnnnnnnnnnncnnnnnnnnnnnnnnnnnnnngnnnnnnnnncnnnnngnnnccnnnnnggggnnntnnannnnncntatgngnntnnnnntnnnannnnnnnntnnnnnnanncnntnnnnnnncnnnnnttnnnnnntntnnnnnnntnanntnnnnnnntntggg

SEQ ID NO: 7033 - DNA, 1214 bp, Homo sapiens
  misc_feature 6, 14, 15, 18, 19, 20, 21, 22, 24, 25, 26, 34, 36, 38, 42,46, 52, 59, 65, 67, 68, 69, 72, 78, 80, 84, 85, 90, 91,94, 95, 97, 103, 105, 107, 110, 111, 112, 113, 115, 130,132, 133, 137, 145, 156, 229, 383, 389, 443, 447, 457, 481: n = A,T,C or G
  misc_feature 493, 505, 525, 527, 548, 563, 566, 580, 585, 616, 650, 664,668, 673, 679, 689, 701, 707, 720, 725, 730, 741, 773, 794,797, 806, 817, 822, 830, 873, 874, 881, 887, 898, 905, 914,924, 927, 937, 947, 980, 987, 988, 989, 990, 996, 1008: n = A,T,C or G
  misc_feature 1016, 1018, 1021, 1030, 1034, 1039, 1051, 1053, 1056, 1076,1081, 1083, 1095, 1096, 1097, 1103, 1108, 1110, 1119, 1127,1129, 1136, 1141, 1146, 1148, 1149, 1152, 1163, 1164, 1166,1171, 1175, 1176, 1177, 1179, 1189, 1192, 1193, 1202: n = A,T,C or G
  misc_feature 1205, 1207: n = A,T,C or G
cccccnttctaaanncannnnnannnatgatgantnanattngtcnaccggnttatgcntcattnannnaanggactncngttnnaatgnntcnnancaagananantannnngntgtttctcatttaantnnatgncaaattgnagctccaccgnggtggccggcccgctggcccaggagagaacacggggaggtttgtttgtgtgaaaggaaagtagtccaggctgnccctgaaactgagtctgtggacactgtggaaagctttgaacaattgtgttttcgtcacaggagtctttgtaatgcttgtacctcggccgctctagaactagtggatcccccgggcttgcaggaattcgatatcaagcttatcggatactcgtcngcctcnagggggggcccgggtaccccagcttttggttcccttttagtggaagggttaatntgcncgcttggcgntaatcatgggttcattaagcttgntttccttgtggntggaaaatttgnttattcccgcttcacaaatngncaccacaaacaataaccgaanccccggggaagccantanaaaggttggttaanaggcncttggggggggttggcccttaaaatggaagnttgaaggccttaaaccttccaccaattttaaatntgggcgttttggcngccntccanctggcncccgcttttnttcccaagttcngggggnaaaacccttggtncggtnggccnagccttggcantttaaaatggaaaatccgggcccaaccgccanccgggggggaaagaaggggcnggnttttgccgntatttgggggncggcnttttttcncggtttttccttcggcttcaaccatggaaccttcggcttggcnncctttcnggttcngttttccaggncttggcnggggttganagccggttanttnaaccttcacntttcaaaaanggccgggtaaattacccggttttattccaccangaaaatnnnngggggnattaacccccanggaaaaananaancattttttnaagncaaanaaaggccccaancnaanaagggcccaagggaaacccnttaananaaaaggcccctnnntttgcnttggncnttttttttncaaatatngncttcccntcccnccctngnnctntggtcatcacnnanaaaantcannnangctctcaaanctnnatagggtgngcngnaatacct

SEQ ID NO: 7034 - DNA, 860 bp, Homo sapiens
  misc_feature 557, 566, 580, 584, 585, 632, 640, 653, 668, 671, 675, 728,731, 743, 757, 782, 791, 795, 821, 828, 830, 831, 844, 846,858: n = A,T,C or G
actactatagggcgaattgggccctctagatgcatgctcgagcggcccgccagtgtgatggatatctgcagaattcgccctttcgagcggcccgcccgggcaggtacaggcacaccgtgggtgatcaggccacgcttccactcaaatggagtaggcaagttcccaagaccagtcctgtcaagtaatcaaaccaagtcaaaaccaaaaccaaaatcaaagtgccgataaaggcatgccatgggtgatcaggccacgcttccactcaaatggagtgggcaagttcccaagactggtgctgtcaagcaattcaaaccaagtcaaaaccaaaaccaaaactaaatcaaagtgccgataagggcacgccatgggtgatcaggccacgcttcactcaaatggatggagtaggcaaagttacaaagactagtcttaccaagtttcagatgtctggactccaagtgccagttccttcccggtgttcaaccactgtgttaatccttcacagggaactgctacacgctgctctggtgaagcattccaccggggcaatttcctacccnggagtgctnttttggatcgcgtnactnnggcttggccggagtccgcttaaggattcttcacaagggaaggctaancccgcctnaagggcttgcttngcttgtccatttaantancttngtttctgagcaaaagtaattgggtgaaaattgttcattggaggcattggttgnttntttaatcctggnaactacaagtgggnccaattattattgccaaaaggtccngtttagganggtntttgttccaagttttggaaattcccngaagaantnngggcccttgagtntngctttctttctnat

SEQ ID NO: 7035 - DNA, 858 bp, Homo sapiens
  misc_feature 137, 182, 183, 184, 185, 186, 187, 188, 209, 211, 212, 217,219, 224, 225, 236, 237, 238, 240, 241, 242, 248, 250, 252,253, 259, 276, 279, 281, 294, 298, 304, 306, 315, 318, 319,320, 321, 327, 338, 349, 350, 352, 355, 363, 378, 379: n = A,T,C or G
  misc_feature 380, 386, 389, 393, 398, 399, 400, 408, 410, 414, 434, 441,443, 446, 451, 459, 466, 488, 490, 497, 498, 499, 501, 503,506, 509, 513, 517, 526, 527, 528, 529, 536, 550, 557, 562,564, 565, 573, 576, 588, 599, 604, 607, 616, 617, 619: n = A,T,C or G
  misc_feature 627, 628, 643, 649, 661, 668, 672, 680, 689, 698, 706, 719,722, 735, 739, 750, 763, 765, 769, 771, 772, 774, 784, 787,790, 791, 792, 795, 798, 805, 814, 816, 819, 820, 822, 830,832, 833, 838, 842, 847, 849, 850, 853, 856, 857: n = A,T,C or G
tattcttactatagggcgaattgggccctctagatgcatgctcgagcggcccgccagtgtgatgggatatctgcagaattcgcccttagcgtggtcgcggccgaggtactttttttttttttttttttttttctttnttttttttttttttttttttttttttttttttttttttttttttnnnnnnnttataaaaaaaaaaaaaaaangnntttantntttannaaaaaatttannntnnnaaaatntntnntaaaancttaaaaaattaaaaanaantnttttttttttttnaacnaaaaanantttaatttntgnnnncttttnaaaaaaaattnttttaattccnncnaantttttttntattttttttcaaannnataggnaantttntccannntttttttnanaaanccaaattccccctaaaaaanaaatttntnttnagtanaaataaanttttttnttttttttttaaaaaaaaaccncnttttttnnnananaanaancccnaaanaatttttannnnatttgtnaaaaaaattttttncccaaanaatcncnnaaaaaaanaantttttttttggnaattttttagnggttnttnaaaaaagtnnanaaatcccnnttttgtttttcacanctggantttaaaattttnttttganattnaaaccccnttttataanaaaaccaanttttcccnatttttattaacngtntatttacaggggnggtnttttaaagggngttatttcaaatncnggtngnntngtattagtgnatnacnnntanggntacaagnttagggaananaanntnaaataagnannttttntggnaaaananntanccnnt

SEQ ID NO: 7036 - DNA, 877 bp, Homo sapiens
  misc_feature 4, 483, 494, 497, 499, 500, 501, 648, 673, 690, 694, 734,747, 751, 779, 802, 810, 824, 854, 866, 873: n = A,T,C or G
tatnactcactatagggcgaattgggccctctagatgcatgctcgagcggcccgccagtgtgatggatatctgcagaattcgcccttagcgtggtcgcggccgaggtacgcggggaagagaacaagtatcggagagatgcaggagaaaacaaaaagccattttacaggacaatttgaaggatcacagtctgtattaacagttttgccattcatataattcaaatcatatttgattttcaggtttatttatttgaatttaacttccacatgccatattatataggaataactggagaagtgatggctccttttgtctcttagttccaataacttgaaatatttttttccacatatttcagttttgttcatgaatattcaagaagacatcctcagcttgctgtctcagtaattctaagagttgctaaaggataccaggagttattggagaagtgtttccagactgaaaaccctcttgaatgccangaaaaaaaaanaanannnaaaagtacctgcccgggcggccgctcgaaagggcgaattccagcacactggcggccgttactagtggatcccgagctcggtaccaagcttggcgtaatcatggtcatagcctgtttcctgtgtgaaattgttatccgctcacaattncacacaacataccaacccggaaacnttaaagtgtaaaacccngggngcctaaatggagtggagcttaactcacattaattgcgttngcgcctcactggncccncttttccaatcggggaaaacctgtcctngccacctgcattaaatgaaatcnggccaccnccccggggagaggncggtttgcgtttttggggcgcctttttccntttcttggtcanttgaatnggtg

SEQ ID NO: 7037 - DNA, 854 bp, Homo sapiens
  misc_feature 286, 586, 641, 685, 687, 693, 717, 737, 763, 775, 806, 818: n = A,T,C or G
agactactatagggcgaattggccctctagatgcatgctcgagcggcccgccagtgtgatggatatctgcagaattcgccctttcgagcggccgcccgggcaggtacaaaaattagctgggcatagtggcacatgcctgtagtcccagctactcgggaggctgatgaacaagaatcacttgaacctgggaggaggaggttgcagtgagctgagatcgtgccactgcactccagcctgagcgacagagcaagactgtctcaaaaaaataaaaaagaaaaaaataatnaaaaggaaaacaaagtctttagaaaaacaaagcctttgaaaaaggatgtaaaattgaatatatagatacaattatttttaaaaagttttatagaaaaatatcctggattgttgatgttgttttaatatattttaatcatttttgtataatgtcatgtataatatgttataatgaaagtaaaaaaaaaaaaaggtcttagcagagcaggcagaaaaatgccaaactcagtgccttttagttattttgatatgtgggaaagatcatgcataaggctccttttagctcattgctttgagctangaagggtaatccccctgaaggtcaccttggaaagggtcctcggccgcgaacaccnctaagggcgaattccagcacactggcgggcggttctagtggatncnagcttngtaccaaagcttggcgtaatcatnggccatagctgtttcctggntgaaaatggtattccgttcacaattncacacacatccnagccggaaccttaagtgttaaaccctggggngccttaatgggnggctaactcacttaattgcgttgcgctcacttgccc

SEQ ID NO: 7038 - DNA, 875 bp, Homo sapiens
  misc_feature 4, 8, 134, 428, 493, 505, 578, 606, 610, 655, 661, 665, 676,682, 704, 716, 735, 742, 744, 758, 767, 770, 777, 791, 793,813, 827, 828, 836, 841, 843, 844, 853, 855, 857, 858, 859,869: n = A,T,C or G
tatnactnctatagggcgaattgggccctctagatgcatgctcgagcggcccgccagtgtgatgggatatctgcagaattcgcccttagcgtggtcgcggccgaggtactttattttttttttttttttttttngggctatgttctcctcttccaattttaagtagatctgctttattctgatggtgccttctgttcagaggctccagcagacttacctgagtcctaacactatcactgtgatgggggtggtagagagacaggaccagcagaacagactggggctgctcgtctttttccagctggtgaagtttttatagggataaagcctcccagaatagaatggcccattgaacagcaaacacaaaatactggttttaggagaacattgtcagctgttgctttggctttttaaattcttcattttanaaagaactcgcatatgaatttaatttgtttctgacttaatattttcccatttgaactttcactgnatttttttcttnttgagcaagcaaattcaggaaaactccaatatttgtctgcttctttcccagtccttctaaactccccccaaanccgcgtacctgcccgggcgggccgctcnaaanggcgaaatttcacacactggcgggccggtcttagtggaaccccanctcggnaccnaaccttggggnaaacangggcaaaacctgtttcctgggnggaaaattggtnttcccgttaacaatttccnaacaaananaccaacccggaagncataaaagngtnaaagccngggggggcctaatngngggggcctaacccaccattnaatgccttgggccnntggccccntttcnanncgggaaacngntnnngcccacttgntttaat

SEQ ID NO: 7039 - DNA, 903 bp, Homo sapiens
  misc_feature 4, 446, 493, 495, 510, 532, 541, 568, 575, 576, 586, 590,598, 615, 620, 621, 622, 624, 641, 652, 655, 667, 668, 677,680, 681, 694, 699, 700, 716, 721, 729, 740, 751, 753, 755,758, 762, 763, 767, 772, 773, 774, 781, 783, 784, 789: n = A,T,C or G
  misc_feature 793, 801, 815, 819, 820, 823, 845, 860, 861, 862, 867, 876,880, 886, 889, 898, 902: n = A,T,C or G
ggtnatcactactatagggcgaattggccctctagatgcatgctcgagcggccgccagtgtgatggatatctgcagaattcgcccttagcgtggtcgcggccgaggtacgcggggacctgctgtgctcttgcttgcacagtgtcctggagctggacccggctctgggtttccaggaagcagtttgactaaaggcagcaagctgcttcctctgctgcctgagataccagattcccaatggcgaagattgagaaaaacgctcccacgatggaaaaaaagccagaactgtttaacatcatggaagtagatggagtccctacgttgatattatcaaaagaatggtgggaaaaagtatgtaatttccaagccaagcctgatgatcttattctggcaacttacccaaagtcaggtacctgcccgggcggcccgctcgaaagggctaattcancacactggcggccgttactagtggatccgagctcggtaccaagcttngncgttaatcaatggtncatagctgtttccctggtgtgnaaaattggnaattccgctcacaatttccacacaacnattccannccgggaagcnatanaattttanaagccttgggggtgccnaaatnnntngaacctaactcacattnaatttgcgttngcncttacttgcccnntttttcaanatnnggaaaacctgtcnggccnncctgcattatatgaantctgncaaacccnccgggggagangccggtttggntntnttngggnncctnttccnnnttccttngnntactnaatntatttgcnttaggccgtttganattnnggnaagcgggatttaatcttcattnaaagggggggatatnnnggttnttctacaanatantaaggngtnataccccangaant

SEQ ID NO: 7040 - DNA, 884 bp, Homo sapiens
  misc_feature 2, 3, 12, 13, 34, 660, 666, 707, 742, 756, 774, 781, 783,805, 838, 842, 845, 850, 851, 862, 864, 881, 883: n = A,T,C or G
tnnatattgtanncgactcactatagggcgaatngggccctctagatgcatgctcgagcggcccgccagtgtgatggatatctgcagaattcgccctttcgagcggccgcccgggcaggtacgcggggtcacctgctgtgctcttgcttgcacagtgtcctggagctggacctggctctgggtttcaggaagcagtttgactaaaggcagcaagctgcttcctctgctgcctgagataccagattcccaatggcgaagattgagaaaaacgctcccacgatggaaaaaaagccagaactgtttaacatcatggaagtagatggagtccctacgttgatattatcaaaagaatggtgggaaaaagtatgtaatttccaagccaagcctgatgatcttattctggcaacttacccaaagccaggtacctcggccgcgaccacgctaagggcgaattccagcacactggcggccgttactagtggatccgagctcggtaccaagcttggcgtaatcatggtcatagctgtttcctgtgtgaaattgttatccgctcacaattccacacaacatacgagccggaagcataaaagtgtaaagccctggggtgcctaatgagtgagctaactcacattaattgcgttgcgctcactgcccgctttncagtcnggaaacctgtcgtgcccactgcattaatgaatcggccaacnccccggggagaagcggtttgcgtatttgggcgctntttcgctttcttgnttaactgacttcgcttgngcttggncnttcgggttgcggcgaaccgggnttaacttcacttaaaagggggtaataccggttntccncanaatcnnggggattacgncnggaaaaaacatgtgaancnt

SEQ ID NO: 7041 - DNA, 909 bp, Homo sapiens
  misc_feature 324, 344, 348, 350, 353, 356, 357, 358, 359, 360, 363, 365,368, 373, 376, 383, 400, 467, 484, 513, 520, 531, 537, 550,554, 562, 565, 571, 589, 594, 599, 602, 608, 613, 620, 622,625, 626, 639, 640, 652, 653, 656, 658, 664, 667, 670: n = A,T,C or G
  misc_feature 678, 682, 684, 692, 698, 702, 705, 710, 718, 719, 721, 732,735, 740, 742, 749, 756, 757, 759, 760, 763, 767, 770, 778,786, 792, 795, 799, 802, 807, 809, 813, 824, 826, 840, 852,853, 859, 862, 863, 868, 875, 877, 885, 891, 900, 901: n = A,T,C or G
  misc_feature 902, 906: n = A,T,C or G
tatagggcgaattgggccctctagatgcatgctcgagcggcccgccagtgtgatggatatctgcagaattcgccctttcgagcggcccgcccgggcaggtacgcggggagaggtgaaaggctgtaggaggagcaatatgtgggaaagatcagaagttcagttttggacatgccaaatattacttggccaaatggttgggtggatgattggggatcaggagtcatcctgataaaattggcatgcagatagtattaaaaaactccagactggatgagatcaccaagtgtagatagaaaagagagactgaattgtgaagtgctccancattaaagcagtttgggaancctnancanatnnnnnaananttntaaanatngtacctnggccgcagaccacgctnagggcgaattccagcacacttggcggccgtttctagtgggatcccgagctcgggtaccaagcttggngttaatcattggacatngcttgtttcctgtgtgaaaattgatattnccgtttnacatttccccncaacanttccaagccgggnaggnataaagtngtnaaagcntggggtgccttaattgangtggngcctnacnccacanttaanttggcgntnggnncttacttggcccnnttttccaagttnnggngnaaaacnttnatnggggcccngctngntatttaantgaatnctgnccnacccnccccgggnnanaaggccgggtnttntcttntngggggcnctttttnncnnttntttnttnaaataacntggctggnctcggncanttcnggntcggngntgangcggatttccntnttattcaaagggcngttattctcggnnattccnccnntattnggggggntntccccggnaaaaancttttttcnnnaggncct

SEQ ID NO: 7042 - DNA, 910 bp, Homo sapiens
  misc_feature 3, 8, 10, 395, 495, 511, 534, 542, 548, 554, 569, 630, 676,677, 682, 713, 717, 724, 733, 737, 739, 741, 761, 764, 771,779, 784, 794, 796, 797, 800, 806, 820, 821, 830, 832, 834,840, 841, 845, 849, 856, 876, 878, 882, 888, 891, 894: n = A,T,C or G
  misc_feature 906: n = A,T,C or G
ggntagantngtatacgactactatagggcgaattgggccctctagatgcatgctcgagcggcccgccagtgtgatggatatctgcagaattcgccctttcgagcggcccgcccgggcaggtactgagctccacaaacgtggccatggttggtgcggaaatgattctgagtgagcaggtagaagtctcacgtcctgctgtgtccagagttggttccttccagagggttcgtggtctcgctggcttcaagaatgaagccgtggaccttcacagtgtgtgttacagctgttaaagatgttgtgtctggagtttgttccttcagatgtgtctggagtttctcccttctggtgggtttgtggtgtcgctgacttcaagaatgaagcccgcaaactgtcngtggtgatccgtttgtagctcttaaaggtggtgtggacccaaagaagttgaagcagcagcaatgattttttcgtcaagaagggtaaagaaacaaagtttncaccggtgtgggaaangggtattttgaaccggttccctncccgcgtncccttnggccgngaaccaacgcttaangggccgaaattccaagcacactgggcgggccggttactaagtgggatcccgagcttggttnccaacctttggcgtaattaattggtcataacctggtttccctgtgnnaaaantggttatccggtttaaaaatttccaaacaanatantaggccngaaaccatnaaantntnaaagccctgggggtgcctantgnagggaanctaactcncattnaattgcgttngnnctnacttgnccgttttcaaatcnngaaaacctntngngccaanntggnattnaatgaantgggccaccccccggggganangcgntttggnganttnggcgcttttccnttct

SEQ ID NO: 7043 - DNA, 868 bp, Homo sapiens
  misc_feature 2, 3, 7, 26, 115, 458, 635, 649, 661, 688, 706, 729, 753,770, 775, 858, 859: n = A,T,C or G
tnnatangactactatagggcgaatngggccctctagatgcatgctcgagcggccgccagtgtgatggatatctgcagaattcgccctttcgagcggcccgcccgggcaggtacncgggagcagctgtgtccggcagtctagaggcgcagaagaggaagccatcgcctggccccggctctctggaccttgtctcgctcgggagcggaaacagcggcagccagagaactgttttaatcatgggcaaacaaaactcacagatgaatgcttctcacccggaaacaaacttgccagttgtgtatcctcctcagtatccaccgacagcattccaaggtaaagcagttgctgaaagaagaaaaagtaaaattaattgagagacagagagagagagtgagagtgggagagagagagtaagagagagagagaattgtgtatttgtttttattttagtagttctttntttaaaattatattaatgaaattttggcagcctagttgttcttgattatttttatttggctatcattttgcacagaagtaatttttatttatagaggacagtaaaggtataaagaaagctagtaaaaacaacattaggtttacatttagcaaatgaaatacaagactgtccctcggncgcgacacccttanggcgaatttcancacactggcgggcggtactagtggatncgagctcggtccaagctngccgtaatcatgggcatagctgntttctgtgtgaaatttgtatcccnttcacaatttccacacncattncgagccggaagccattaaagtgtaaaagccctggggtgccttaatgagtggacctaacttacatttattggcggtgcgcttanntgcccgttt

SEQ ID NO: 7044 - DNA, 955 bp, Homo sapiens
  misc_feature 6, 8, 10, 344, 372, 397, 401, 403, 447, 448, 452, 461, 474,479, 489, 490, 496, 511, 514, 515, 517, 522, 529, 534, 542,543, 547, 552, 556, 557, 558, 561, 563, 566, 569, 572, 575,576, 577, 581, 582, 586, 592, 594, 599, 602, 603, 606: n = A,T,C or G
  misc_feature 607, 611, 613, 615, 617, 626, 627, 630, 638, 640, 643, 649,653, 655, 657, 662, 670, 671, 677, 680, 683, 687, 691, 693,702, 705, 707, 709, 718, 719, 723, 724, 725, 729, 730, 731,732, 736, 738, 742, 747, 753, 755, 760, 762, 769, 775: n = A,T,C or G
  misc_feature 776, 777, 779, 784, 790, 793, 795, 797, 802, 812, 813, 818,820, 821, 823, 828, 831, 832, 836, 839, 844, 845, 855, 857,866, 867, 869, 870, 874, 876, 878, 883, 890, 893, 899, 901,902, 903, 904, 906, 915, 916, 919, 920, 922, 923, 925: n = A,T,C or G
  misc_feature 926, 931, 935, 939, 940, 947, 950, 953: n = A,T,C or G
gtgtancnantactatagggcgaattgggccctctagatgcatgctcgagcggcccgccagtgtgatggatatctgcagaattcgcccttagcgtggtcgcggcccgaggacactccctaatgttagagtcggggcctaggtggaaaaagctttaatcataaaggagtgggagtggatccttcacaaatggcaaagcaccaagcccttaatgccatcctcctgatagtgagtgagttctcatgagatctagtaggtttaaaaggctgtggaacctctttcctctctctgtcttgttccaacttctgccatatgaaacatgtcattgccgcttggatttccggcnttggttaaggaggggcctgatcagtgtngggcctggtcaagtgtacctaggtnagtnanggactatttagtggggatcgtggacagcaagggggtctgcttannaaangggtctcanttatcgggggtcntaggnattggggttnntggggnaattttggcattttntgnntnatcgnttatttngatgnatactggnntttnccttncatnnnccntnaangtnctnaannntatnnaggnatattngngaatnttnntgnnttanantntnaaatctccnnttnattgaccngntanattgantttnantntaaanatattggnnaataangtnttntaantttnangtttaatgngangnanatatggggnnaaannntttnnnnaaantntagnaaatntggggnanatatntntggtaantggttnnnantattntggganatntncntattntgcattgganntttgntnntnactgnctnngaantantggcnntatatgtctntntatttctgnntnnatcntntncaaantttatcngantattcntnnnntnaattcgggnnatnntnncnntattnctcncacnnttttgcnganttnct

SEQ ID NO: 7045 - DNA, 877 bp, Homo sapiens
  misc_feature 601, 610, 630, 631, 644, 659, 673, 684, 711, 716, 717, 729,732, 736, 765, 788, 792, 793, 801, 802, 808, 832, 833, 838,847, 863, 865: n = A,T,C or G
gtgatcgactcctatagggcgaattggccctctagatgcatgctcgagcggcccgccagtgtgatggatatctgcagaattcgcccttagcgtggtcgcggcccgaggtaccttacaggggttaggtagctttcttcaggtgaattagagagttgctggcagtgagttcaatgttaatgattcaacagtgtatattaaataaggcatttttaaacagaaacataaaataagtttatgtattgatggttgaccaatatgtgaccagaggcttgcaggaacctaaccctccctgtatttcccgtaggagtagtggttcaatattcactaattcaggttctcagtgactttataaaacataactgctgtgaataacaagactctactgtgtgttattctatatttgatgtccactgtcataggacagggtatattgtaatcaaaaattggaattcctagaattagccttccaagccttctttctttctttctttctttttgagacggaattttgctcttgttgcccaggctggagcacaatggcccaattgttggctcacttgcaacctccgtctccggggttcaggcaattttactgcctcancctcacgangttagctgggattacagggnntgttccacccccncccaacttaattttngaatttttttagtnggagaccggantttcttcattgttgggccaaggctggnttttnnaacctccccggnctnaggnggatcccccccccctaaaccttcccaaanggggctgggaattaccagggcgntgannccaccttnnccgggnccccctttttttattttttaagcnnccctnaaaaaaaantgaacctgggaagtgncnttaggaggggga

SEQ ID NO: 7046 - DNA, 1073 bp, Homo sapiens
  misc_feature 1, 3, 6, 7, 9, 20, 21, 25, 31, 32, 35, 40, 41, 43, 46, 51,56, 62, 67, 68, 69, 73, 76, 78, 79, 81, 83, 85, 91, 97,99, 118, 121, 185, 223, 239, 275, 289, 304, 313, 315, 329,355, 360, 390, 403, 407, 415, 421, 449, 453, 465, 466, 469: n = A,T,C or G
  misc_feature 488, 499, 514, 515, 529, 539, 550, 553, 567, 569, 571, 577,580, 587, 590, 596, 604, 609, 610, 611, 614, 623, 626, 630,637, 644, 650, 651, 652, 660, 661, 666, 693, 694, 696, 698,705, 709, 711, 713, 717, 725, 726, 727, 730, 733, 735: n = A,T,C or G
  misc_feature 744, 747, 748, 749, 756, 760, 765, 766, 775, 779, 781, 787,790, 802, 807, 809, 813, 814, 816, 819, 824, 827, 831, 838,852, 855, 860, 861, 867, 868, 870, 876, 879, 888, 899, 906,910, 912, 914, 921, 926, 927, 931, 933, 947, 948, 949: n = A,T,C or G
  misc_feature 958, 960, 962, 965, 967, 969, 970, 972, 974, 977, 983, 986,987, 988, 993, 997, 1000, 1008, 1010, 1011, 1012, 1019,1022, 1023, 1024, 1028, 1030, 1031, 1032, 1034, 1038, 1041,1042, 1050, 1056, 1057, 1065, 1068, 1071: n = A,T,C or G
nanganncnaaaaatttcgnnattntttttnnttntttannangtntaganttttnataaanttatnnntttnaantnngngntnatcatntatcgnangggccttggagcatgctcnacngccgcagtgtgatggatatctgcagaattcgcccttagccgtggtcgcggcccgaggtaccttnctcagggcactgactttatatcctcctctggctgactnaaactgaggttccttngtatctgatcagtttcactttctctgctccaaacanaccttcttcattcnaagtatctgtttgantgccatacncngctgttactgtaangactaaacgaaggaggacaaatgcanaaatnaagaccaagacaaaagaatttgtttaaaanaaggggtcaaganggcncccttggnttctanagaaacaaggggcccaccgctttacctncccnggggcgggtccnnttngaaaagggcgaatttccancacacttggcngggcccgtttactannttggaatcccgaancttcgggtancccaagctttngcngtaatcattggggnantntcctgnatnccctgtngtngaaaanttggtttnatccnnnttnaccaaattnccnccanatacttncctaaancctggnnnccaatatnnggtgnataaagccctgggggtggccctattgnnangngaagccnaacntnanaatntaatttgnnnttngcncntcacttggnccnnncttttanagtncggannaaacccttnttgntngcccanccntgcttttaaaanaatcngncccnncnccnccttntgnaaangcacggntttggaataatttnggncaacnntttgcnntnttcctnganttaatttancattatttgtnccaaatntacntntncatcttntgtgnnaaananggtaatttactctnnntaaataaangngnggnantnncngngtnattctnacnnnagaanttgnggngataaacncnnnggaaaanacnnntgtnannnanagangcnnattttgtngtcccnngacacctntanatngg

SEQ ID NO: 7047 - DNA, 908 bp, Homo sapiens
  misc_feature 549, 591, 600, 607, 613, 632, 716, 731, 751, 755, 757, 765,849, 850, 864, 865, 866, 875, 876, 887, 896, 897: n = A,T,C or G
atatgactactatagggcgaattgggccctctagatgcatgctcgagcggcccgccagtgtgatggatatctgcagaattcgcccttagcgtggtcgcggccgaggtactgaggctggggaaggtgagaaagggctttgttcaacccagtgatcattgctccttggggaaggcagttcttttataacgtttcaattccttttgaactaggaagtagtccatctgaataggtaatcatctactgagcctctgagtcattccttagtgatatctttgctaatccatcatccctttccccaaatccttactctttctcaggtttcttactagaaacttcccaattgctttttgagggtgttaacctgagctggaagagattgcacaggacatgttgtttcttgtaagctggtgctaataagctggtctgttccaggtgatgtcagtgttggcattaagtgtgatgcccgggtgttaagtgaagatgaggaagacgtggattttgacattattcacaatgccaatgatacgttcacagtcaaatatgtgcctnctgctgctgggcgatcactatcaaagttctctttgcatcttnaggtcctgnccgggcnggccgntcgaaaaggccaattccancacactggccggccgttactagtggatccgagctcggtacccaaccttggcgtaatcatggtcaatagctggtttcctgtgtgnaaattggtattccgntcacaatttccacacaacantacnanccgggaanccttaaagtgtaaaagcctgggggggccctaatgagtgggcctacctcacatttaatgcgttgcgctcacttgcccgttttcannccgggaaaccctgnnnggccacttnntttaatgaatnggccacccnncggggagaggg

SEQ ID NO: 7048 - DNA, 897 bp, Homo sapiens
  misc_feature 2, 3, 24, 29, 68, 70, 119, 631, 633, 634, 638, 640, 641,642, 647, 648, 649, 650, 652, 653, 656, 657, 658, 662, 663,666, 667, 668, 669, 670, 686, 710, 740, 743, 749, 759, 775,785, 788, 789, 790, 806, 816, 826, 841, 844, 846, 851: n = A,T,C or G
  misc_feature 868, 875, 880, 885: n = A,T,C or G
gnnagtgggggttagggcgaattngccgnatagagccctctagatgcatgctcgagcggccgccattntnatggatatctgcagaattcgcccttcggccggccgggcaggtacgcggnggccatagtgaagaaggaactgctgtctgtggtggctgggggagacaactacagggtcaataacaagcacgatgacagatacacaccactgccttccaacaaaatcgtcaagcgggcagaggagttggtggggcaggagttgccttattcgctgaccagtgacaactgcgagcacttcgtgaaccatctgcgctattgcgtctcccgcagtgaccaggtcactggtgcagtcacgacagtaggtgtggcagcaggcctgctggctgccgcaagccttgtggggatcctgctggccagaacaagcgggaaaggcaataaatccaagaaattgtcccaacaaccaccaattcttacggaggaatattatttagccagcaggagtggagtttggtttactgattttactgttttgtgttcatgaatctttattttaatggagttaaaagcccaggaaaatgtatttggaaatgcagcttaatatgaattctattaaagacacaattgggctctgnannaaanannnggaannnncnnacnnnatannaannnnnggtccttcggccgggnacaccgctaagggcgaaattccancccactgggcgggcggttctagtggatccnagnttcggnaccaaacttnggcgtaaacatgggcntaactggttnctnnntgaaatttgttatccncttcaaattncccaaaaaantccaacccgaacatnaangntaaanctggggggccaataagngaccaancaatnatttngttggctcactc

SEQ ID NO: 7049 - DNA, 391 bp, Homo sapiens
  misc_feature 386, 387, 388: n = A,T,C or G
tacgactactatagggccgaattgggccctctagatgcatgctcgagcggccgccagtgtgatggatatctgcagaattcgcccttagcgtggtcgcggccgaggtacgcggggagctctgggagaggagccccagccttgggattcccaagtgttttcattcagtgatcaggactgaacacagaggactcaccatggagtttgggctgagctggattttccttgctgctattttaaaaggtgtccagtgtgaggtgcagctggtggagtctgggggaggcttggtaaagcctggggggtccctgagactctcctgtgcagcctctggattcacctttagtgactattggatgaagtgggtccgccaggctccagggaaggggttnnnagt

SEQ ID NO: 7050 - DNA, 912 bp, Homo sapiens
  misc_feature 3, 4, 21, 24, 588, 628, 669, 675, 679, 704, 808, 910: n = A,T,C or G
tannttagtatacgactactntanggcgaatagggccctctagatgcatgctcgagcggccgccagtgtgatggatatctgcagaattcgcccttagcgtggtcgcggccgaggtaccctaagacgctgctaattgactgccacttcgcaactcaggggcggctgcattttagtaatgggtcaaatgattcactttttatgatgcttccaaaggtgccttggcttctcttcccaactgacaaatgccaaagttgagaaaaatgatcataattttagcataaacagagcagtcggcgacaccgattttataaataaactgagcaccttctttttaaacaaacaaatgcgggtttatttctcagatgatgttcatcccgtgaatgggtccagggaaggacctttcaccttgactatatggcattatgtcatcacaagctctgaggcttctcctttccatcctgcgtggacagctaagacctcagttttcaatagcatctagagcagtgggactcagctggggtgatttcgccccccatctccgggggaatgtctgaagacaattttggttacctcaatgagggagtggangaggatacagtgctactaccaactagtggataaaggccanggatgctgctcaaccttctaccatgtacctgcccgggcggncgctcnaaanggcgaaattccagcccactggcggncgttctagtgggatcgagctcggtaccaagcttggcgtaatcatggtcatagctggttcctgtgtgaaattgtattccgcttacaattccacacaacatacganccggaaacctaaaagtggaaagcctggggtgcctaatgagtgacctactcacattaattggggtggcgcttactggcccgttttcaatccgggaaaccgccngg

SEQ ID NO: 7051 - DNA, 922 bp, Homo sapiens
  misc_feature 662, 674, 676, 703, 711, 725, 740, 747, 758, 759, 771, 775,781, 785, 789, 792, 797, 808, 814, 849, 886, 890, 916, 918: n = A,T,C or G
tatcactactatagggcgaattgggccctctagatgcatgctcgagcggccgccagtgtgatgggatatctgcagaattcgccctttcgagcggccgcccgggcaggtactttttttttttttttttttttttggggaataacacacactggagcttgctgagggagggtcgggggagagcattaggacacacagctaatgcatgctgggcttaatacctaggtgatgggttgataggtgcagcaaaccaccatggcacacgtttacctatgtaaaattagtttcaatacatagacaatttcaaaatcttaaaaataatgctttgagggaaggagagactcttttcgtaaaagtgtttcttaggagaagcatgtcattttttactttttgatttttttcatacttacccctccacccgcgtacctcggccgcgaccacgctaagggcgaattccagcacactggcggccgttactagtggatccgagctcggtaccaagcttggcgtaatcatggtcatagctgtttcctgtgtgaaattgttatccgctcacaattccacacaacatacgagccggaagcataaagtgtaaagcctggggtgcctaatgagtgagctaacttacattaattgcgttgcgctcactggccgcttttcaatcnggaaacctgtcntnccactgcattaatgaatcggccaaccnccgggaanagcggtttgcgtantgggcgctttttcgnttcttgnttaattgactnnttggcctcggcnttcnggttgngggnaacnggnttaanttaccttaaangggggnaatccggtttttcccaaaaaataaggggattaccncaggaaaaaaaattgtgagccaaaaggcccccaaaanggcncggaaaccctaaaaaagggcccgttntnttgg

SEQ ID NO: 7052 - DNA, 906 bp, Homo sapiens
  misc_feature 14, 16, 17, 19, 21, 23, 27, 29, 122, 559, 586, 593, 606,614, 643, 647, 650, 657, 670, 674, 675, 682, 689, 698, 702,709, 721, 723, 732, 734, 737, 740, 741, 745, 746, 749, 765,767, 769, 771, 775, 777, 780, 784, 791, 799, 801, 803: n = A,T,C or G
  misc_feature 805, 806, 818, 820, 821, 825, 827, 828, 830, 834, 835, 836,838, 845, 846, 847, 848, 850, 851, 852, 853, 854, 857, 858,859, 860, 861, 862, 863, 866, 873, 878, 879, 880, 883, 884,886, 887, 888, 890, 891, 892, 893, 895, 896, 897, 898: n = A,T,C or G
  misc_feature 899, 900, 902, 906: n = A,T,C or G
atactactatacgncnnantntncggngnatagggccctctagatgcatgctcgagcggcccgccagtgtgatggatatctgcagaattcgcccttagcgtggtcgcggccgaggtactttnttttttttttttttttttttttgagacagggtctcactctgtcacccagtctggagtgcagtggcgcaatcatggctcactgcagccttgacctcttgggctcaagctatcctcccgcctcggcctaccgagcagctgggactacaggcgtgcaccaccatgcctggctactttttataaaaaaattttttgtagagatggggtctcactgtgttgcccaggccgatctcgaactcctgggctcaagacatcttcctaccttggcctcccaaagtgttaggattactgctgtgagccaccacactgggcccaaataccaaattctaaatagaattggaaattgtgttattgaggatttagtgattactctcccctatgtcttgttaaagtaattcttctcaagttggttgcctttttccctctggttctctcaccanttatacaatgggggttttcagaagctntattacncgacagcattatnactctggngggtaaaggaaaggggggttggggatttntgantcnctaaaantttgtaagttggnaggnnttggtanaaatggnaaaattttnaacntttaaantttaaaaaaatncnttttttttnanatnccnngggnnggnaaaaaaaaaaattttntntnangaantntgntttncaatttngggggaangntnanntttaaggaaaananntttnanncntttnnngnaaaaggnnnnannnnnttnnnnnnnaanttttttnaaaannnaanngnnnannnncnnnnnnangggn

SEQ ID NO: 7053 - DNA, 659 bp, Homo sapiens
  misc_feature 548, 549, 590, 594, 598, 612, 614, 629, 631, 638, 652, 655,656: n = A,T,C or G
gaattgtaatacgactcactatagggcgaattgggccctctagatgcatgctcgagcggccgccagtgtgatggatatctgcagaattcgccctttcgagcggccgcccgggcaggtacgcgggggcccttgttctctagaagcaaggagccctctgaccccttcttttaaacaaattcttttgtctttgtcttcatttctgcatttgtcctccttcgtttagtcctacagtaacagccacaatggcacccaaacagagacttgaatgaagaaggtctgctggagcagagaaagtgaaactgatcagatgaacgaggaaccccaggacgagtcagccagaggaggatataaagtcagtgccctgaggaggtacctcggccgcgaccacgctaagggcgaattccagcacactggcggccgttactagtggatccgagctcggtaccaagcttggcgtaatcatggtcatagctgtttcctgtgtgaaattgttatccgcttcacaattccccacaaacatacgaagccggaaagcataaagtgtaaanncctggggtgcctaatgagtgagctaactcaattaattgggnttgngctnactggcccgctttncnagtcgggaaacctgncnggccagntggattaatgaatnggnnaac

SEQ ID NO: 7054 - DNA, 640 bp, Homo sapiens
  misc_feature 638: n = A,T,C or G
gattgtatacgactcactatagggcgaattgggccctctagatgcatgctcgagcggccgccagtgtgatggatatctgcagaattcgccctttcgagcggccgcccgggaggctaagggaggctatgggaggctaagggaggctcaggtaaggaggatctcttgagcctgggaggcagaagctgcagtgagccaaaatggcaccactgcactccagcctgagtaacagagtaagactctgtctcaaaaaaagaaaagaaaagaaaaaaagaattcaaaggagaactgacatatcacccagtgggtatattacagaatgcttgcatgtatgtgtgtgtgtgtatggttttatatatatttatataaagtataaatgcttttgcttatatatatgaatctcattttcccactggctttccttaaaaactaaacaaaacacaaacaccttactgatctttagtagctcgtaagctgatttttagcctttcagctgagaggaaatggtccaaaaaaaaaaaaaaaaaaaaagtaccttcggccgcgaccacgctaagggcgaattccagcacactggcggccgttactagtggatccgagctcggtaccaagcttggcgtaatcattggtcatagctgttnct

SEQ ID NO: 7055 - DNA, 642 bp, Homo sapiens
  misc_feature 558, 613, 636: n = A,T,C or G
gattgtaataccgactcactatagggcgaattgggccctctagatgcatgctcgagcggccgccagtgtgatggatatctgcagaattcgcccttagcgtggtcgcggccgaggtacgcggggacctgctgtgctcttgcttgcacagtgtcctggagctggacctggctctgggtttccaggaagcagtttgactaaaggcagcaagctgcttcctctgctgcctgagataccagattcccaatggcgaagattgagaaaaacgctcctacgatggaaaaaaggccagaactgtttaacatcatggaagtagatggagtccctacgttgatattatcaaaagaatggtgggaaaaagtatgtaatttccaagccaagcctgatgatcttattctggcaacttacccaaagtcaggtacctgcccgggcggccgctcgaaagggcgaattccagcacactggcggccgttactagtgggatccgagctcggtaccaagctttggcgtaatcatggtcatagctgtttcctgtgtgaaattgttatccgctcacaattncacacaacatacgagccggaagcataaagtgtaaagcctggggtgcctaatgagngagctaactcacattaattgcgntgcgct

SEQ ID NO: 7056 - DNA, 909 bp, Homo sapiens
  misc_feature 748, 767, 778, 793, 795, 809, 814, 842, 849, 852, 853, 865,869, 872, 883, 898, 907, 909: n = A,T,C or G
tatgggattgtaatacgactactatagggcgaattgggccctctagatgcatgctcgagcggcccgccagtgtgatgggatatctgcagaattcgcccttagcgtggtcgcggccgaggtactttttttttttttttttttttataacagagacagagaaacagggtcttgctgtgctgcccacactggtctcattctcctggccttatgcaatcctctcgcctcagcccccacagagtgctgcattacagcagagtgctggcattacaggggcgagccaccatgcctggccagagctcctttaaagagcaagtttttccagtgtgaagttataaaatagcttacttaatgtgttgtgcatgcatgtgtagctatttaaacctgtggacacaacatcagtgctcactggcactcctggtttgggatcttaccctcttgaactgagacgcggtctcacaatctgaatggaagtgacgtgtcacttcggtaggcagaagtggttaagagcaggtacctgcccgggcggccgctcgaaagggcgaattccagcacactggcggccgttactagtggatccgagctcggtaccaagcttggcgtaatcatggtcatagctgtttcctgtgtgaaattgttatccgctcacaattccacacaacataccagccggaagcataaagtgtaaagcctggggtgcctaatgagtgagctaactcacattaatgcgttgcgcttactggccgctttncagtcgggaaacctgtcgnccactggattnatgaatcggccaacncnccgggagaagcggnttgcntattgggcctttttcgtttcttggttantgactcnttnnctcggcgttcgnttgnggnagcgggttaanttaattaaaggcggnatacggttncn

SEQ ID NO: 7057 - DNA, 948 bp, Homo sapiens
  misc_feature 135, 144, 156, 182, 187, 246, 265, 266, 280, 295, 296, 317,322, 324, 329, 334, 335, 342, 346, 355, 357, 365, 368, 370,371, 372, 380, 382, 387, 389, 390, 391, 393, 395, 396, 399,406, 418, 420, 421, 424, 425, 432, 438, 439, 442, 446: n = A,T,C or G
  misc_feature 453, 457, 461, 462, 464, 471, 475, 478, 484, 495, 500, 501,506, 514, 515, 522, 531, 543, 545, 558, 560, 563, 568, 571,575, 582, 583, 591, 597, 598, 600, 604, 606, 609, 639, 641,646, 647, 651, 653, 654, 658, 660, 664, 668, 672, 674: n = A,T,C or G
  misc_feature 677, 683, 684, 695, 701, 703, 709, 713, 719, 722, 725, 727,730, 733, 738, 739, 746, 749, 753, 755, 757, 758, 759, 768,771, 772, 784, 787, 800, 803, 808, 812, 815, 816, 817, 821,826, 829, 830, 833, 835, 847, 850, 851, 854, 857, 862: n = A,T,C or G
  misc_feature 866, 872, 880, 884, 886, 888, 890, 892, 894, 904, 906, 907,910, 913, 916, 918, 937, 941, 944, 946, 947: n = A,T,C or G
aattggccctctagatgcatgctcgagcggccgccagtgtgatggatatctgcagaattcgccctttcgagcggccgcccgggcaggtacgcgggattgtagttattttcaaatctttgcttgataagtattaanaaatattgnacttgctgccgnatttaaagctctgttgatcattgatnccgtntggatttatgggggaggggagcactgtgtttatgctggaatatgaagtctgagaccttncggtgctgggaacacacanngagttgttgaaagntgacacgcagactgnncatgactcttgatgctttgtntcatntnttgancaatnntcggtcngtgnacaaataanantcttttcnaangnnnttactctntntttanannnanannatngtgcctnggcctgtgacananntcnntatggtnaattgnnatncccnacttggngggntcgnnanatgttgnatcngtnggcttnagtaccaaaanttggnnaatanatcaatgnntcaatgnctttttctntggggtgaaaantntatatcccgctcnanatnattcnacnccancctttcnnaacccgcnagcaannanaatntntanagtccttgtggtgttgcctaaagaagtggncnccgtnnactntnnattnanatgnggtnttgngntantatgtnncatcatttcanaatgangngaaacntttnacggcnctntcntnatnatnatgtnnttcgtgnaangacncngnnngtgatgagntgnnatgtcattattntgnccgctacattatnacngccangttnttnnnagantgatnttnncgntncatcataccagntcnnctntangctgntatnatgtcnccatgatntggncncnantngntttaatgatnanntanatnatngntgataatactatgtgaatnaatntcnannt

SEQ ID NO: 7058 - DNA, 924 bp, Homo sapiens
  misc_feature 5, 106, 129, 236, 242, 257, 260, 262, 268, 290, 294, 305,329, 334, 344, 345, 356, 358, 399, 400, 403, 409, 410, 418,419, 424, 425, 430, 451, 458, 465, 466, 468, 472, 477, 478,482, 494, 499, 503, 507, 508, 515, 524, 532, 541, 544: n = A,T,C or G
  misc_feature 549, 551, 558, 573, 578, 579, 593, 597, 598, 604, 616, 619,629, 631, 637, 658, 661, 669, 670, 679, 685, 688, 690, 696,697, 701, 714, 716, 718, 723, 738, 744, 759, 765, 771, 789,801, 802, 807, 808, 817, 828, 836, 838, 844, 849, 853: n = A,T,C or G
  misc_feature 871, 873, 876, 877, 878, 892, 897, 900, 907, 909, 915, 917: n = A,T,C or G
gaatnggccctctagatgcatgctcgagcggccgccagtgtgatggatatctgcagaattcgcccttagcgtggtcgcggccgaggtacttttttttttttttttntttgaaagggcagcaaaatcttnttgagaaattacattttataagaaacccaaattaactcggataaaatagataacattattagtaagcctcaatttgaaaattccaaattcacaacatttgcttattntagagnccaatctttttaatnagncnatttgngcaaacaaaaaatccataaaancggnttggtacattntcttcatttcccgggttcatttanttggncactatcaannaaaagttggcntnataagagacatatactttgcaaaatgggttaaacgattaanncanttgagnngtctttannataannctgtncgatgggttatgtggttcttntgaaagnaaagatnngncccntcctnnctgntccgataaacanggacnttcntgtnnttacaanccattctcnttgggatntttatgttngantggcntnctgcccncctcatgtgtggatnctcannggaaaatagggccnagtnnaatgtngggcgattttcntgnaacaaatggncnaccttncacccgatttttttcactttngcncgagaaannagaccctcnaagtgnccnangccccnnaatngggctattattgngntntttgnaacctttgggccggngaaccnacgctaaggggcganattccnatcccnacttggccggccggttcntgatgggatccnnagctnngggaccaanaccttgggggngaatcatngnacaatnctggnttcncttgtggaaaaatgttantncgnnncaagttccccccancatcntgncctggtnancattanantgttaat

SEQ ID NO: 7059 - DNA, 917 bp, Homo sapiens
  misc_feature 2, 28, 406, 512, 545, 567, 571, 603, 631, 634, 647, 653,658, 660, 669, 674, 692, 712, 744, 752, 765, 773, 775, 786,791, 802, 813, 814, 820, 821, 830, 833, 837, 843, 845, 857,858, 859, 877, 882, 885, 890, 891, 893, 898, 904, 912: n = A,T,C or G
  misc_feature 914: n = A,T,C or G
antgtatacgactactatagggcgaatngggccctctagatgcatgctcgagcggccgccagtgtgatggatatctgcagaattcgcccttagcgtggtcgcggccgaggtacgcgggtgagtccttttgcttttaggcttttgacttctggttttagactttctttagcttctgttgttagacaacattgtcaagcttggtttttataagtttgcatggattaaactgaacttaatgaaattgtccctccccccaaattctcagcacaatttttaggcccacaaggagtcaagcacctcaaggagatcttcagtttgaacttggtgtagacgcagggatactgatgaatcaatattcaaattagctgttacctacttaagaaagagaggagaccttggggatttngaggaagggttcataagggagattttagctgagaaataccatttgcacaagtcaatcacttctgaccaagttatcagaaaaaggagaaaagaatgtctccccactnaatgttctagggtggtgagaaatctagggtggntatctaaatcaacaatatttangatnttcccaatttctaaattttgttggaaattctntcctgaaggtgttcattgaactctaaanaanagacagcttgggntttcanttggncngggtttaanggttnatttttttatttccaatnttaatcccttaaatttttanacaaattttccttttgagtttaaggattaaantgggatgnggttcttgccttngcctgggncnttatgggggcnttcanaagggcaattnttcctaaaatnnaatatnnattattatntgnttanggttcntntcctgggcggtnnnttttaaagggtttatttnaattntanttggnngncgttnttatgnggaatctnanccg

SEQ ID NO: 7060 - DNA, 880 bp, Homo sapiens
  misc_feature 4, 164, 199, 200, 201, 212, 216, 221, 222, 228, 229, 245,247, 252, 257, 258, 264, 267, 279, 281, 283, 285, 286, 288,289, 305, 310, 319, 320, 325, 334, 338, 341, 346, 352, 358,369, 372, 383, 385, 391, 397, 399, 407, 410, 417, 418: n = A,T,C or G
  misc_feature 420, 432, 436, 437, 453, 455, 462, 484, 495, 503, 505, 507,513, 528, 529, 538, 544, 547, 557, 558, 561, 566, 568, 572,579, 585, 591, 592, 595, 596, 600, 608, 610, 611, 612, 619,620, 630, 637, 639, 640, 646, 650, 653, 654, 655, 659: n = A,T,C or G
  misc_feature 660, 666, 672, 674, 685, 686, 688, 690, 722, 724, 729, 736,739, 747, 751, 761, 783, 793, 794, 795, 801, 811, 818, 819,820, 823, 831, 842, 843, 846, 847, 849, 850, 853, 854, 857,867, 868, 880: n = A,T,C or G
taantgtatacgactactatagggcgaattgggccctctagatgcatgctcgagcggccgccagtgtgatggatatctgcagaattcgccctttcgagcggcccgcccgggcaggtactttttttttttttttttttttttttctttttttttttttttttttntttttttttttttttttttttttttttttttttannnatttttttttngggntaaannaagttnnttaaaaatttaaaaantnaaaanttggnntttttnccnaaaaaaaaatantncntnncnntttccaaaaaaaaaanttttncaaaaaccnnatttnttttttttnaccnagntttanaaaaantttttnaaaaaaacccnggnaaaaaaccccnantttttntgtaananaaaaggcntcnaaatttnnanaaaaaaatttanttannttttttttaaaaaccngnttttaantaaaaaatttaaaggaaaaaanttactttattnaaaagtgnananttcctnaaacctttttttttnntttaaaagntaaaantcnaaattttttnntgnaaaantnaaantttaaantcccantttttnnttnnaaanggttaaanannnaaacccnntatttttggncgaaaananntttaangggnaannnttannaaaatngggggngntttttaaaggnnancnaaattttggaacaaattttggggaaaaaaagngnaaaantttttcngtngaaaaaantttncctttaaaanattaaaaaaaaaaataaactgnaaaattaaannntaaaancctggggggnttaaagnnnggnctaacccncataaatttgnntgnntnnaannccntttttaaatnnaaaaaatttttn

SEQ ID NO: 7061 - DNA, 887 bp, Homo sapiens
  misc_feature 748, 775, 790, 820, 822, 826, 835, 851, 874, 881, 886: n = A,T,C or G
gtgtatacgactcactatagggcgaattgggccctctagatgcatgctcgagcggccgccagtgtgatggatatctgcagaattcgccctttcgagcggccgcccgggcaggtactgcatcttctgcatctctaggatcttcgaattccacaaaggcaaatcctggaggatttctcgcaatccatacagttcttaaaggaccataataactgaaagccctttctaactctcctttgccggcgccagttcccaggttaccaacatacaccttggtttctcctccgtacgaagatctctatagtaactgtaaaagtttgaagctcacattaacctgtaaacatcagttggtcagggacagttgcaaggcctcctgcaattgttcaaacagcatttattaaatacgcattacacaccgagtagggctatgtagagaggagtcagattatctacttagatttggcatctacttagatttaacatatactagctgagaaattgtaggcatgtttgatacacatttgatttcaaatgtttttcttctggatctgctttttattttacaaaaatatttttcatacaaatggttaaaaagaaacaaaatctataacaacaactttgggatttttatatataaactttgtgatttaaatttactgaatttaattagggtgaaaaattttgaaagttgtatttcttcatatgactaagttcactaaaaccctggattggaaaggtgaaaattatgttnctagaacaaaaatgtaccttgggccgngacaccttaagggcnaattcagcacactggcggccgttactagtngntccnagcttgggnccaactttgcgtaatnatgggcaatagcttgttcctggnggaaatngtatnc

SEQ ID NO: 7062 - DNA, 884 bp, Homo sapiens
  misc_feature 748, 805, 813, 856, 865, 879, 883: n = A,T,C or G
gtgtatcgactcctatagggcgaattgggccctctagatgcatgctcgagcggccgccagtgtgatgggatatctgcagaattcgccctttcgagcggccgcccgggcaggtactaaaatctataaccactttcctattaacatggataattgaaaggtgactctgttatgcatgtgtgtataaactgcagctcaaaactgcccattgaattaaacaactaatgtctatcaaatttcaaattgacaaatatattgggtaatttatctaacttgctttaatattcttagtatattcaaattgaatcttaaggaaaataaatttactctttgcttagcaaatatatgaatgatcctaataaaaagaatagttgtcaaataaactattttattaggaaagaaaactttcctaaaggcaaaatcttagctttgatatgcattaattagatgcttattagatattaagatatctacaaaataccttaaataaattgcaagcagattaatgtttcaaataacaggcattaataaacatcttctgtaatgctaaacttatccgaggaaacctagtatttctgatatttaagtaaatcatgttttatttatgagcaagttttagactgccaattagctggaaaacttgctaatgaaatttcatcagaagagaatccaggcaatgccttctttcatctcttcaaggcatgatgggcctctgaattggaaaatgagaacctacctcttggttaaaggncattggtttcttcagaggacatagcattcttgaagaaaggaatgggcacgtgttagnggcccatnacccatgcctagcttttttatttaaaagttaacctttttaatnccaagcagnttttatttttcaancctnt

SEQ ID NO: 7063 - DNA, 896 bp, Homo sapiens
  misc_feature 522, 618, 657, 669, 684, 755, 767, 782, 786, 821, 844, 847,853, 864, 865, 868, 878, 895: n = A,T,C or G
gtgtatacgactactatagggcgaattgggccctctagatgcatgctcgagcggccgccagtgtgatggatatctgcagaattcgccctttcgagcggcccgcccgggcaggtacttaatatgattcttttctctttccacatagagaatcagataatctataaataatgactcttactgttccactttaggagttaggtatacatacatatgtgtatatatatgtatatatatacacatacacacacacacacacacacacacagtgaccccccaaatttcatatgaagttccaaacctcaatgtgactgtatgtgaaaagagaagggggcggggaggggggagaccgaccgacctatttgttggtctccatcgtgtgaaaacatgaggaagtgggcacttacatgccaggaagggagctctcactagaggttgaccatgctggcactctgatctcagacttccagcctccagatatgtgggaatataaatttgtgttttgggccagatacggtggctcangcctgtaatcccagcactttgggaggctgaggcaaaaagatcccttgagccaaggagttcaaaccagcctgggcaacatagcgaaaccacatcttntatttaaaaatactacaagatattttcattttttttggnttgtttctttgntttttgaagttgggnggtttggttctttggttttgagtttggggctgcacttccagcctgggtgacaagagccaaaactccttttnataaaaaaaaangaaggaaaggaaatncttnttgggcccccattatgtggcttggacccatttgantttgccccccaaatgaggtttgnttnacaagnggcattttgcnnccncatggggctnaagggaaaaagaataant

SEQ ID NO: 7064 - DNA, 893 bp, Homo sapiens
  misc_feature 2, 3, 4, 5, 11, 12, 14, 32, 39, 44, 45, 46, 47, 52, 53, 58,60, 63, 636, 675, 711, 757, 768, 776, 784, 790, 798, 804,830, 850, 852, 861, 869, 885, 890: n = A,T,C or G
gnnnnagaggnnantgtatcgactcactatanggcgacntgtgnnnnatgcnncagcngncgncagtgtgatggatatctgcagaattcgccctttcgagcggccgcccgggcaggtacacaggggtgttagtttcatagtatgaaagttatgtgtgtcctgcagaaagttacgtcaaaagacttatttgaagcactatatttgagggagactgcaagtttgattgctctttagtggtcccaatcaggtattaggcttttttttttctgtatctttattctatttttctttctagatccccaaaaatgcggagggaaaagtgatcaagttgtatctgatgtgagtggctttatgtattaggatacaatgtatatagggaaaagattataaatttagcatgataatacctaaacagtgcctgcctttttctggttatatgagctggacaagtcatttaaaatcactcagcctcagtttctttacctgtaaggtagacttaatgactatttcttttctcacagagttactatgggaatatacttggaataatgaatgcatataaatgttgctataaagaataaatataagggacttaaaattattttggcattctgaatagaaatgtattctcaatangaaggactggattattcttggttaattttggaaatagcnaaaactaataaaaattaactcaaccattttgcttcntacagcacttaaaattggagaaaaaatttgctattttggtttctgngaataccgganaccttganaaaagttnaaaatnttcccttnggcccngaacaccccttagggcgaatttcaanacactggcgggcggtacttngngggattccnacctcggnacccaaccttggcgtnaatantgg

SEQ ID NO: 7065 - DNA, 889 bp, Homo sapiens
  misc_feature 2, 4, 5, 6, 7, 13, 783, 804, 832, 874, 887: n = A,T,C or G
angnnnngaatgnaatacgactcactatagggcgaattgggccctctagatgcatgctcgagcggcccgccagtgtgatggatatctgcagaattcgccctttcgagcggccgcccgggcaggtaccttgggtctgaaggggtcactcgagcgctctgctatctctgcagctaaaacgggtgtcaggttttcagctgctactaaagataatgagcataagcgttcactgaccaagactccagccagaaagtctgcacatgtgaccgtgtctgggggcaccccaaaaggcgaggctgtgcttgggacacacaaattaaagaccatcacggggaattctgctgctggaaagctaaaaccatgggggcaatctaaagaaaataattatctaaatcaacatgtcaacagaattaacttctacaagaaaacttacaaacaaccccatctccagacaaaggaagagcaacggaagaaacgcgagcaagaacgaaaggagaagaaagcaaaggttttgggaatgcgaaggggcctcattttggctgaagattaataattttttaacatcttgtaaatattcctgtattctcaacttttttccttttgtaaatttttttttttgctgtcatccccactttagtcacgagatctttttctgctaactgttcataagtctgtgtagtgcccatgggttctttcatgtgctatgatctctgaaaagacgttattcaccttaaagctcaaaatcttttggggatggtttttacttaagtccattaacaatttcanggtttttaaccaagacccatnctaaaatttgtttctagaattttaatgncaagttcccaagttccccctggttggttctaatattaacaanaactgcagtcttntg

SEQ ID NO: 7066 - DNA, 902 bp, Homo sapiens
  misc_feature 3, 4, 5, 6, 578, 647, 660, 665, 671, 684, 690, 692, 714,720, 721, 733, 736, 739, 741, 745, 752, 754, 757, 759, 760,772, 775, 776, 785, 793, 797, 798, 800, 806, 808, 811, 817,818, 822, 824, 825, 827, 832, 844, 846, 847, 852, 855: n = A,T,C or G
  misc_feature 856, 857, 863, 866, 867, 868, 870, 873, 876, 887, 889, 891,893, 896: n = A,T,C or G
tgnnnngaattgtaatacgactcactatagggcgaattgggccctctagatgcatgctcgagcggcccgccagtgtgatggatatctgcagaattcgccctttcgagcggcccgcccgggcaggtacctccgtctccccacttgcctaaaacaagcaggcacatcccatcagtgagactggaacttgcgggagaaaataagaagtgaaatctctctcacacacacagttctactcaaactataagcttttattattgtattttacagatcattcattcaggacatgctgcatctggggttggcatcatttcccttttgaatgacagaatgtgcataaaagtctcttgcccacgctgaactcacacgtgcccggcaggaaggagctctcacgaagtgccagctggatgtgagcttgctctggcagcagcagtgctgtccttgtttctgagctgccacctattcactggagttaggtgggtcaaagctgaaatttagcttggaatttaaagtttctaattttatacttttcattgtggtctggtcagattttagtctgctttaaaatcaaaaggtcactnagtcactctaatatgatcattttgaaatatggaaatttggtcatttacatgcttgtccttcgggcccgngacccacgcttangggcngaattncagccaactggcnggccgntncttagtggatcccgagctcggnacccanncttggcgaaatnatnggncnatanctgtttncntgngnngaaattgttatnccnntcacaattnccaacaanatannancccggnangcnttaaanngtananncntgggnggcctaaagagngnnctacntcnnnattaantgnnntntcnaantggcccctttncnantnggnaaaccc

SEQ ID NO: 7067 - DNA, 873 bp, Homo sapiens
  misc_feature 599, 644, 656, 660, 702, 705, 757, 759, 784, 789, 792, 800,801, 827, 845, 868, 869, 872, 873: n = A,T,C or G
gaattgtaatacgactcactatagggcgaattgggccctctagatgcatgctcgagcggcccgccagtgtgatggatatctgcagaattcgccctttcgagcggccgcccgggcaggtacattttcactcctgctctaaaacttgcctcagtctctcactgtgccttatgcccctcagctgaattctttcttctgagcaggcaggaattgaggttgctgcagacgtgtatgcatttgccaccagtaacatactttggtgccacatgactaggatatgttctctagtgctaacatgttcgtttacagttcttaggactccctgatagaaaaaaacacacaaaaaaacgcaaaaaaacccaaccaaccaaacaaacaaacaaaaaaaacacaggagtttctcccaaaaagaagtctgcagtgtcttttctgttttctctgaaggtatcccagggtgttagatttctgttgtttttcccttatgtggcacccgaagttggcaagaagaaggaagtgctgatataaataaatagggaaatgaacagagagagtacctcggccgcgaccacgctaagggcgaattccagcacactggcggccgntactagtggatccgagctcggtaccaagcttggcgtaatcatggncatagctgtttnctgngtgaaattggtattccgctcacaatttcacacaacatacganccngaagcataaagtgtaaaccctggggtgcctaatgagggagctacctacattnantgcgttgcgctcactggccgctttncaacnggnaacctgcnngccacttcattaatgaatcggccacncccggggagaggcggttncgtatgggcgctttcccttcctnntann

SEQ ID NO: 7068 - DNA, 899 bp, Homo sapiens
  misc_feature 1, 2, 4, 341, 353, 357, 368, 379, 386, 388, 443, 464, 471,518, 533, 597, 613, 629, 646, 652, 689, 692, 693, 695, 710,731, 734, 784, 789, 809, 823, 824, 829, 863, 876, 881, 886,894: n = A,T,C or G
nngngtagaatggtatacgactcactatagggcgaattgggccctctagatgcatgctcgagcggcccgccagtgtgatggatatctgcagaattcgcccttagcgtggtcgcggccgaggtactacaagcccaccaagctaaagaggctgcccagaaagcagttaacagtgccaccggtgttccaactgtttaaaattgatcagggaccatgaaaagaaacttgtgcttcaccgaagaaaaatatctaaacatcgaaaaacttaaatattatggaaaaaaaacattgcaaaaaaaaaaaaaaaaaaaaaaggtacttttttttttttttttttttttaanataaaagatttnttcncaccacaaaangataatcacancaaaatntncactaacttaaaaaacaaaagattatagtgacataaaatgttatattctcttttnaagggggtaaaagtattttgnttgcgtntacataaatttctattcatgagagaataacaaattttaaaatccagngataggttgcatttnttctatagaatgaacatagacataaccctgaagctttagtttacagggagtttccatgaagccncaaactaaacttattntcaaacccatcagttntttccagacctcaaatngattcncattcaaccaattaaactggagaaagaagcatttcanggnncnctttcattttgcttnaaaagcattttttttttttgnctnaatgccaaaggggggaaattgggattttttctcctttaattggcccccanaaaangcccttttttattttttggnaaataccaaatttnnggggntaaactctccttactttggggggctacaaccccnatttttttttggntgggnaaaantatgggtngggaa

SEQ ID NO: 7069 - DNA, 879 bp, Homo sapiens
  misc_feature 1, 4, 252, 265, 572, 623, 633, 709, 791, 797, 831, 835, 840,845, 856, 860, 872, 878: n = A,T,C or G
nagngatacgactcactatagggcgaattgggccctctagatgcatgctcgagcggccgccagtgtgatggatatctgcagaattcgccctttcgagcggccgcccgggcaggtactcaggaggccttattacttttaaattatacaacattttttgcataaatttttttataacattttttctttcacgacttttgccgacaattcttcaatgtgtctcaactttctgacttattacaaacattttttttntttaaacaccagntagtttatttcaggacaagaatttaccatataacactctttttacataaattctgtctccccccacttttttttttttgaagataaccattccttttttttttttaaagcaaactttctttatgtctttggactagactgtctaaggccacaagattagaagttccataatacatgttacactgttaactttaagcaaacttcacttttgttgaaaaccttgtaagtttgggatttcaattatcctttgctattaagaccttgtttagtctaaattaacttagaattggtatagatggccttttttnctctctactggtctttccttgcctctgccagccgcttatgctgctgttctnttaactacgntggcggggcaaggggtataaaagcagctgaactttctatgtatggaaactggtctgggtgccttggcttacgggtnaccttgggtcatacctttgaaacaagggaccggtccaggctttcttttgatgggccacccaccttttaatgggtgggcagtntatttnacaccaaagtctaagttttcctgggggtcacagnaacnctggnaatcncccttaaatcntttnttggaatttttntttaant

SEQ ID NO: 7070 - DNA, 911 bp, Homo sapiens
  misc_feature 4, 9, 148, 149, 164, 169, 171, 191, 193, 195, 202, 203, 205,216, 223, 227, 232, 235, 239, 245, 246, 251, 254, 256, 260,262, 274, 277, 278, 284, 294, 299, 303, 311, 313, 324, 328,331, 333, 334, 335, 336, 342, 343, 346, 378, 388: n = A,T,C or G
  misc_feature 389, 394, 410, 411, 416, 436, 439, 456, 457, 466, 475, 476,479, 495, 502, 512, 524, 525, 530, 533, 557, 566, 578, 581,589, 591, 595, 598, 599, 601, 602, 603, 609, 617, 619, 628,630, 633, 639, 655, 658, 668, 673, 674, 690, 692, 694: n = A,T,C or G
  misc_feature 698, 699, 702, 703, 705, 708, 711, 716, 719, 722, 734, 740,751, 758, 765, 770, 773, 777, 778, 781, 793, 797, 798, 801,803, 804, 816, 821, 830, 837, 839, 842, 854, 857, 859, 861,863, 864, 869, 880, 882, 895, 896, 906, 911: n = A,T,C or G
atgngtttnatgtaatacgattcactatagggcgaattgggccctctagatgcatgctcgagcggcccgccagtgtgatggatatctgcagaattcgccctttcgagcggccgcccgggcaggtactttttttttttttttttttttnnctttttttttttttntttantntttttttttttttttttttncntnttttaanngnttccccacccnttaaaanaaanttttnttnaaanaaaaannttttnaancnaaananttttaaaaattnttnntttaantttaaaccantttanaaanagttgctncnaaaaatttaanctanatnannnntttttnnccnatttttttttttttttttttccccaaaaaacntttttaaaanncggtnaaaggaaaaaattttnnttttnaaatttgggcccattttttnttnggggcaaaaattttttnnttaaatttnaggtccagnnccntttaaaagaaaaaaantcttttnaattaaaaangttttaagaaannctttnaangggttttttaaaattttaaccccnggttttttnttttaaaccccncantaaccccnantttnttnnannncgcaanaatttaananccattttananaanaccatncaccccatttcctttnttnttaaaaatgnttttnnaaaaaaatattttganancnccgnnaanntnggnccncaccnccnttnaggggaaaattncaaacnccttggggggntgtaaanttgggantcccnacncggnnacnaaattttggggnaaannaangnnaaaaaatttttnttggnaaaaaattnttttccntnaanaaattcccaaanaanananannccggnaataaaaaatntnaaaccctggggtnntaaaaaaaanaaaan

SEQ ID NO: 7071 - DNA, 887 bp, Homo sapiens
  misc_feature 2, 3, 4, 5, 709, 748, 753, 755, 758, 818, 824, 855, 872,883, 885, 887: n = A,T,C or G
gnnnngaattgtaatacgactcactatagggcgaattgggccctctagatgcatgctcgagcggcccgccagtgtgatggatatctgcagaattcgccctttcgagcggccgcccgggcaggtactcggattttgaatttcgtgattttggtttggcttaaacggtaaaagtgtgtgtttgccctctttacccattctttgtcttgtggtgagtatgtgtggtgtgagcatggtattttgtctcggaagaaaaaaatatgggtcaggcgcaaagtaagcccaccccactgggaactatgttaaaaaaaaatttcaagatttaagggagattacggtgttactatgacaccagaaaaacttagaactttgtgtgaaatagactggctagcattagaggtgggttggctatcagaagaaagcctggagaggtcccttgtttcaaaggtatggcacaaggtaacctgtaagccaaagcacccggaccagtttctatacatagacagttcagctggttttagacccccttccccctctccccacagtagttaagagaacagcagcataagcagctggcagaggcaaggaaagaccagtagagagaaaaaaaggccatctataccaattttaaagtaatttaaactgaacaaaggtcttattaatagcaaaggataattgaaatcacaaacttataaggttttcaacaaaagtnaagtttgctaaaagttaacagtgtaacatgtattatggnacttntnatnttgtgggcctagacagtcttatcaaacacattaaagaaaggttgctttaaaaaaaaaatngttatnttcaaaaataaaggggagaggccgaattttntaaaaagagttttttgntaaattcttgncngn

SEQ ID NO: 7072 - DNA, 876 bp, Homo sapiens
  misc_feature 509, 545, 555, 623, 635, 658, 662, 675, 691, 732, 733, 747,755, 763, 786, 788, 797, 825, 830, 835, 842, 843, 848, 860,869, 871, 872, 873: n = A,T,C or G
ctcactatagggcgaattgggccctctagatgcatgctcgagcggccgccagtgtgatggatatctgcagaattcgcccttagcgtggtcgcggccgaggtacttgtttctttttcaggttgtgatgtggccattccgaattttgttgagagtttggtttataattgtctcttttgtcttgttagtaaacattcatttgcaacagttttgaaggtgctgagtggaaaaccgaaacacatggttattgcgtattggacctagaatgaaataattgcctcaatatttaacaacaagccattcttatctcaaagatttaaattcccgaatgtcccattcgcaaatcatatgcaattgaagtgagcagcatgagcatctgggtcatgagggccttcatttacgtaaatttgtcactaaaacccagtagtagctctacaaaatcttaaactgctgcaagtgctcaaggagatggaatatcttttgtcattggtgctgaggagagcatttcggtnagaagacagttgcgcctgaagattgagtggtaaatnatcaaaccantggttctcagtgttggctggtatacactttgtagtcactttgggaatgttggaagacacatcgatgcntgggttcccgtntgcccaagattcttatgtttggntttngaaatatgagctnggcataaggatttttnaaaaccttctggggcatttcaaatatgcctggccaaggttnngaaccacttgtgtnaaattcanccttgggnttttttcatttcccaataaaaananaaaaaaaanagttcctggccgggccggccatttaaangggcnaattncaacacnntggcngccgtttttatngggaaccancnnngct

SEQ ID NO: 7073 - DNA, 897 bp, Homo sapiens
  misc_feature 601, 609, 658, 669, 688, 690, 698, 715, 732, 743, 752, 772,799, 811, 823, 827, 828, 835, 838, 842, 854, 862, 865, 873,874, 876, 892, 894, 895: n = A,T,C or G
gactcactatagggcgaattgggccctctagatgcatgctcgagcggcccgccagtgtgatggatatctgcagaattcgcccttagcgtggtcgcggccgaggtacccatatactaaccagtttggggcacataaatgttacaagggagaaaaaaagatttagactagcatgtgaatttcatcaagcagagacaccttggttaaaaagcaaaacttgtggggtggagaggaaggaaaaaaaggaaaacgtaagaaaaaggaccggagtgctcactgtttatcattatcagcccctttttttgagacggagtctcgctctgtcacccaggctggagtgcagaggcactatctcggctcactgcaagctcccgcctcctgggttcacaccattctcctgcctcagcctcccgagtaagctgggactacaggcgcccaccaccacgcccagctaatttttttgtatttttaagtagagacagggtttcacccgtgtcaggatggtctcgaatctcctgacctcgtgatctgcccgcctcggcctcccaaagtgctggggattacaggcgtgagccaccgcgcccagcccattattaagcttttnattagaanaacttcagtgagggtgtttccggggggggaaaaaggtggagatatttcnttacaggcagnctttaaggaaaaaaaagananttggtggncttttgggtccagctanctaaattaaaaactggnttgggaactgnccaaataantaccttcccgggccggccgnttcgaaaggggcaaattccaaccacanttgcggccgttntaagtggatccnagcnntggtccnaancttnggcgtaaacaanggcataanctngtttcttnngngaaaattggttatccncnnct

SEQ ID NO: 7074 - DNA, 921 bp, Homo sapiens
  misc_feature 512, 539, 563, 568, 585, 598, 632, 633, 647, 679, 699, 700,705, 714, 718, 732, 740, 749, 775, 784, 806, 815, 828, 830,848, 856, 857, 862, 877, 879, 894, 904, 909, 918, 920: n = A,T,C or G
gactcctatagggcgaattgggccctctagatgcatgctcgagcggcccgccagtgtgatggatatctgcagaattcgcccttagcgtggtcgcggccgaggtaccacatggtcgtgctatacaatccaaaacaaatgtattatttttaaaaggtttagtgaaatgtttattttaaagtttgattacatcagctataggagtaaagtgctaacttacaaagcttacagtttgtgacaccagtgataatgcatgcatactgctattttcaccaccaactggtgaaacaatgaaaagacagtttacttttactgagataccgaaatgagtcaaagactatattagccaatataattcctttgtttttagtgtgaaatactatggtaggggcctaattaaaaaataaaaaacaatattggagaaacagtaaaaacagtcatcaagtgactctaagcttgtattttactctaaagctttgtattaagcttgtattgactctactgccttctttggnatttttttttttttaattactattcangggatcccaaagaaattttagttnattanttaactggagccagcangaattgcccactngactgtttttaaggatttaactatcacccaggtnnttaccttaggatancattaaattttttaaaaatctcaccccatttnttctttataaggactatttnnaagantttaacttngccncagaatgggccatnccttatgnttatttttnggaccccctgggttttttccaaaccnctacctttnaccttttttgttttacccaaantgggagggngggaaattcttangntggtccattttaccctanggggaccnntgtancttgccctgggcggncntttagaaggggcganattctcaacncttgngggccgatnant

SEQ ID NO: 7075 - DNA, 865 bp, Homo sapiens
  misc_feature 601, 631, 652, 680, 725, 730, 746, 752, 770, 774, 782, 795,804, 805, 809, 820, 822, 829, 858, 859: n = A,T,C or G
gtatacgactcactatagggcgaattgggccctctagatgcatgctcgagcggcccgccagtgtgatggatatctgcagaattcgccctttcgagcggccgcccgggcaggtacactaggtaataaaactgattcatacagtctaatgatatcaccgctgttagggttttataaaactgcatttaaaaaaagatctatgaccagatattctcctgggtgctcctcaaaggaacactattaaggttcattgaaatgttttcaatcattgccttcccattgatccttctaacatgctgttgacatcacacctaatattcagagggaatgggcaaggtatgagggaaggaaataaaaaataaaataaataaaatagaatgacacaaatttgagttttgtgaacccctgaacagatggtcttaaggacgttatctggaactggagaaaagcagagttgagagacaattctatagattaaatcctggtaaggacaaacattgccattagaagaaaagcttcaaaatagacctgtggcagatgtcacatgagtagaatttctgcccaccttaactgcattcagaggataatatcaatgaactaaacntgaactaaaaattttttaaaccaaaagttntaaatgaagacccatggttgngaatccatgatgtatttctttaatttcnataccctctagctaaaagagccagagtcccttggccgggaccccncttangggcgaattccaccanctggcngccgttcttagtgggatnccancctcggtnccaagcttggcgnaaaatgggnnatgntgtttcctggngngaaattntattcccttacaatttcccacaaaatacnngcccgg

SEQ ID NO: 7076 - DNA, 883 bp, Homo sapiens
  misc_feature 574, 601, 604, 639, 650, 664, 696, 705, 716, 729, 746, 753,767, 768, 769, 774, 783, 787, 792, 799, 800, 802, 828, 846,865, 881: n = A,T,C or G
gcatacgactcactatagggcgaattgggccctctagatgcatgctcgagcggcccgccagtgtgatggatatctgcagaattcgcccttagcgtggtcgcggccgaggtacagataatacgcaaagccctaaaacaagcctcaaaaaacttaaaatgattaaaatcttacaaagtattttctacaagtataatgaactgaaattaaaaatagcagaagaatattttggaaattcacaaatatatggaaattgaacgatgcattcctatataaccattgggtcaaaaaatcaaaatgggaattagaaaataagataaatgaaaataaaaattcaacatacccaaatttaggggatttaggacaaacagtgctcaaatggggaatttatgtctttaaatgcataaaatgaacaaatttctagaaagacgtaacttatccaacacagtccctgggctatgggcaactcatgtcagcattctgccatcgatagggatcttgagaaagcccgcaacacatctcaagtcagtcttctttcaagtttcaagatgtctggactccaagtgccaagttcttnccagtgttcagcccactggggttgatnctnccagaagcctgccatgcaccactctgacaaggcantctaccaggtnaaatgcctacccangaggtggctctcagggatccatgttgctcaancaagccccnggtcctgcccnggccggccgttcnaaagggcgaatttccancccactngcgggccgttactnnngggtnccagccttnggancaagnttggcgnnantcatgggcaaagctgggttccttggnggaaattggtttccgctnacaaattcccccaaattcnaacccggaagcctaangg

SEQ ID NO: 7077 - DNA, 914 bp, Homo sapiens
  misc_feature 20, 38, 47, 523, 551, 676, 696, 699, 705, 713, 727, 735,756, 761, 775, 794, 815, 833, 844, 849, 868, 875, 880, 885,904, 912: n = A,T,C or G
gtgtttattcggttcgaccncgcgtccgctccgggctnagtttgacncagtatctagctatggcggcagtgacctggagtcgggctcgatgctggtgtccgagtgtcctgcaggtcttcagattacaagtggctaaactgcacttgggcagaccaacaatgagagccagtcagcaggactttgaaaatgcattgaaccaggtgaaactcttgaagaaggacccgggaaacgaagtgaagctaagactctatgcactgtacaagcaggccacagaaggaccctgtaatatgcctaagcctggtatgcttgactttgtcaacaaagccaagtgggatgcatggaatgccctgggcagcctacccaaggaaactgccaggcagaactatgtggatctcgtatccagtttgagttcctcatctgaagccccgagccagggaaagcgtggagctgatgagaaagcccaggagtccaaagacattctggtaacttctgaagatggcatcacgaagatcacgttcaatcngcccaccaaaaagaatgccatatccttncagaagtatcgggatattatactcgcacttaaaaatgccagcactgattacactgtcattggctgttttcacaaggaactggtgacttactactgcaagtggggaatgacctgcttactttactngtggcccttgggggatagangangcactngcaaccgngcttgggtacttgnggactttntaaacagtttatagaactttnccaancctttggttggggnagtaaatgggccaacttgngggaattttttcaaccttttnggacttttgatgcttggntttgcttaaanagggnaacgtttatacttctttanccaattnggcanagccngaacatgctcttttaaccntttccaanaa

SEQ ID NO: 7078 - DNA, 866 bp, Homo sapiens
  misc_feature 280, 427, 459, 470, 505, 543, 576, 614, 616, 618, 640, 648,659, 670, 684, 704, 709, 710, 723, 728, 741, 752, 753, 775,789, 800, 802, 824, 833, 838, 842, 843, 844, 846, 847, 849,850, 851, 853, 862: n = A,T,C or G
agggcgaattggccctctagatgcatgctcgagcggccgccagtgtgatggatatctgcagaattcgccctttcgagcggccgcccgggcaggtacgcggggagctcagattttaagacagtagcttgctgatgctcccagctgaataaagcccttccttctacaactcggtgtctgaggggttttgtctgcagctcgtcctgctacaatggtggttcctttacaggatattcatgattccctaccttgaatcaatgccgccatcttccttttaactcangggactatgagatacacaggtcttcaatgccagtcacctcatggactcaccacctagtttatcaaggagaagttgatgctgggagcaactacaaaaatgaagctactctgatttagcccaaaaagatctccattctaaggactcctngtgatttgattgggagcctctacatcattcanggagaatcctntgacctcaagttctgtaaccttgaatcacattcantaagactttcagcttggcagaaccacacaagccgctgnaatatcaaagagggggaagaaccaactgggcantttgagactatgggatagatgccacttaacttcagacngnanaacctttggagaggagcccagntggagacnaccaggctttnaaggaaagaanaccttttttttgcnccccctttaaacttcccttntgctnnagagctcttccanttgcntaataaaatcctntggcattattnnccttcaaaaaaaaaaaaaaaanaaaaaaaaagtccntgggccgggancnccctaagggcgaaattcaacanactggtggncggtnttannngnncnnncntggaccaancttg

SEQ ID NO: 7079 - DNA, 922 bp, Homo sapiens
  misc_feature 1, 3, 13, 14, 18, 33, 130, 189, 190, 192, 193, 274, 278,449, 450, 455, 472, 510, 545, 573, 581, 595, 606, 608, 635,647, 649, 672, 688, 703, 709, 726, 753, 760, 787, 807, 826,830, 843, 849, 850, 852, 860, 897, 903, 906, 911: n = A,T,C or G
ntnggagtcgcanncgcnccgcggcccatgatngcggcgccaaaggggaagctttgggtccaggcccaactggggctcccgccgctgctgctgttgactatggcgctggccggaggctcggggactgcancggcccgaagcctttgactcggtcctgggagacacagcgttctgtcaccgggcctgtcnntnncctaccccttgcacacctacccgaaggaagaggagttatacgcatgccagagaggctgcaggctgttttcaatttgccagnttgnggatgatgggcttgatttaaatcggaccaagctggaatgtgaatctgcgtgcacagaagcatattcccaacctgatgagcagtatgcttgcatcttggctgccaggatcaagttgccatttgctgaactgagacaagaacaactcatgtccctgatgccaaaaatgcatannctctncctctgactctggtganggtcgatcttggagtgacatgatggactcttgcacaanagcttcataacctcttcatgggctttttatcttcnagccgatgaccgaaaaaaaggtatattncagctaanccagaaattcaatntgccccccaantngggccaggaccctccaacttgagaaanataatctttaancnaaaagtcctattttgcgattagnaaactcacaagccccnggacctaccttgaanaggaanaaagccatggctttttnaaaaatgttatttcttaaccttggganggatttnaacccaaccctttgtcctctcgggaanggggtgcttttggaactggngggcaacttttggttaaantttnaaaaaaaattttncccccnnanaaccgaanttttatgggggcctgggaatttttaattgaccaaagntgggcnaanccccnctctttttttt

SEQ ID NO: 7080 - DNA, 924 bp, Homo sapiens
  misc_feature 1, 11, 21, 26, 30, 33, 45, 49, 57, 59, 84, 87, 92, 94, 286,315, 331, 365, 381, 400, 478, 540, 571, 593, 595, 611, 683,692, 699, 706, 708, 711, 738, 756, 760, 763, 776, 779, 783,785, 790, 796, 804, 816, 833, 834, 835, 838, 843, 857: n = A,T,C or G
  misc_feature 858, 866, 872, 875, 880, 886, 891, 893, 895, 908, 910, 911,914, 916, 921, 922, 923: n = A,T,C or G
ntttcactcantatgggcgantgggncccnctngatgcatgctcnagcngcgcgccngngtgatggatatctgcaagaattccnccntttcnancggccgcccggccaggtacaggagtgtcgtggttgccaacattacttggaactgcacacagataagttataacatactttgtggagcaatgccttcttaaacttttgtgtcttgggttattttgtgctgctataacagaatatctgagactggataatttatgaagaacagaaatttattctctctcatgantcttggaggctggaaagtccaagatcaanggcttcatctggtgangggcctttttactgtatcctcacgtggcaaaaanacagaagggcgagagnagggaccaaactctttgtncttaccatgggcaaaagggcaaaaagacaaaaccccattcctccaagccctttcataaaaggcactaatccattcctngagggttgggagccttttattgacctaaacactttcccaaaaacaccctggtcttccaacanttttgttatttggggataaaagctttccaanaaaatgaaattttggggggganancattcagacccaatancatttattgatttcttagaattttcaatattgacaggttaaaattttttttttttttttttttgggtaaggnagggcaaantagaaanaagcttngnganaaacatttttttttttaaaaaagcaantacttttgggtttaatanaaanatngggcacaagggtnttnttangnccatntttgcnttggaaanaaaaaagggccngggcaaaggggttaaannnttntgagnccctttttttattnnccttttgngagggnccnggggngcaaanatggngntngggaattaaaaanannttngncaaannng

SEQ ID NO: 7081 - DNA, 893 bp, Homo sapiens
  misc_feature 202, 405, 512, 518, 533, 586, 603, 635, 643, 657, 678, 680,681, 684, 693, 700, 709, 737, 739, 749, 759, 762, 763, 771,775, 777, 783, 788, 789, 813, 827, 830, 832, 836, 840, 856,864, 865, 873, 879, 880, 892: n = A,T,C or G
tagggcgaattgggccctctagatgcatgctcgagcggccgccagtgtgatggatatctgcagaattcgccctttcgagcggccgcccgggcaggtactttttttttttttttttttttgcattcaagataaaagatttattcacaccacaaaaagataatcacaacaaaattcactaacttaaaaaacaaaagattatagngacataaaatgttatattctctttttaagtgggtaaaagtattttgtttgcttctacataaatttctattcatgagagaataacaaatattaaaatacagtgatagtttgcatttcttctatagaatgaacatagacataaccctgaagcttttagtttacagggaggtttccaatgaagcccccaaactaaactaaattatnaaacacattagttattttccagactcaaaataggatacacatttcaaccaataaactgagaaagaagcatttcatgttctctttcatttgctataaagcattttttnttttgnactaaaatgcaaagngagaaattggattttttttcttccttttaaatgggcccttaagaagaatgccnctttctaaattcatggngaaataccaaaatttcagggggtttatcttcnttccttantttttggggggctncaacccagcaatatcttcatngnntgnggaaattcntgggtgnggggaattnacggcttgcctttgggaaaggttcctgngncttcaatccncaatgggaanggnnattgctcntaanantgggtnttccnnttatataaatcttggactggttgngggcttgggggttnaancncttnggcnatcccactgactcgtntaaaaacnncctttccncgggtnnccattaaggggnc

SEQ ID NO: 7082 - DNA, 894 bp, Homo sapiens
  misc_feature 169, 179, 182, 192, 206, 209, 222, 226, 230, 233, 243, 246,257, 265, 268, 278, 282, 291, 292, 299, 301, 315, 326, 334,339, 345, 350, 352, 355, 360, 364, 366, 371, 372, 406, 407,410, 413, 417, 423, 424, 428, 431, 448, 449, 450, 451: n = A,T,C or G
  misc_feature 462, 469, 472, 476, 483, 492, 493, 494, 498, 503, 504, 515,519, 522, 524, 537, 545, 552, 562, 586, 601, 607, 627, 628,640, 645, 648, 651, 652, 653, 664, 672, 678, 680, 691, 696,722, 728, 735, 737, 741, 742, 746, 749, 758, 767, 777: n = A,T,C or G
  misc_feature 782, 787, 788, 791, 795, 796, 804, 830, 835, 841, 842, 850,853, 855, 861, 869, 874, 876, 877, 884, 886, 888: n = A,T,C or G
gactactatagggcgaaattgggccctctagatgcatgctcgagcggcccgccagtgtgatgggatatctgcagaattcgccctttcgagcggccgcccgggcaggtactttttttttttttttttttttttttttttttttttttttttttttttttttttttttttnaaaccatttnttngattttaatngatttttctttttnaanttctgcccagttncaanaacnaantgggaaaccncanttaaaattcanaaaccttngcntgaaaaacancccnccccccatnnggaattncnccaaaccctttttnttttttatttnttcaaaanagagnccaatncacangnganaaatntgancnctgtnntttttttttttttaaagggggggaaaaacatttnnttnggnatgngttttnnacanttncagagaaggggttttgnnnntacaagtggcnggaatanaancccnaacaaanttggggggnnntttnttttnnaaggcaagggncccnttntntaaaaaacatttnttttgtgncttaggnaaaaaacccntaccctgggggggggctttttgtntcttttcaaggtgcntgaaanaaaaaaccgatatttttttnntttaaacaggtnaaaanccnttnnnagacaaatgtntttttttnttatcnancccttccccanattgnaaaaaattttaacccgggggtccctnggggcntgatacncntttnngggntanaattccacncacctggcncgcctgatantaagnggaanncanttgnnaacacaantttgggagaaaaatggtaaataattntttantggtgnnaaaaggtnttntntgtaanaatttcanaaatnannagactgnantnattaat

SEQ ID NO: 7083 - DNA, 928 bp, Homo sapiens
  misc_feature 230, 243, 301, 333, 346, 360, 373, 395, 406, 414, 417, 421,447, 448, 484, 492, 518, 535, 538, 539, 548, 563, 585, 596,597, 602, 603, 606, 614, 619, 625, 627, 636, 640, 654, 658,668, 677, 679, 686, 688, 690, 698, 714, 715, 734, 738: n = A,T,C or G
  misc_feature 741, 744, 746, 750, 764, 768, 771, 773, 774, 778, 784, 786,792, 794, 800, 803, 814, 817, 831, 846, 848, 849, 857, 862,865, 870, 873, 875, 876, 880, 888, 889, 895, 896, 901, 904,907, 921: n = A,T,C or G
gaattggccctctagatgcatgctcgagcggccgccagtgtgatggatatctgcagaattcgccctttcgagcggcccgcccgggcaggtacttttctccttcagcttcctgtccttcatcctgaagcttcagggcaaggagaaccttaatatatccattgtctggattaagcggacagcctgccttaggggaagcaaagaaaatggcttgtgattttttgtggctaatntaaagccatccangcgataggcaagagatcgcatacccagcgctggattcagggttttcagggtccacttnaagcaccttttcaaaagcaggccttgcccgtncataatttctttnctccacactttcangcaagggcccatnccttccttcacaggtctatttntgggacacctncatttctntancggnaaggggaattttgaaaagctttatgnnaaattgcttttccacctttgtcccaggtaaagtctngggccttnttggcagttctggcccatggtgggtnaatacattcaaggccanaannttgccccanggtcaccaaaacctncttcacatttggctttgggttngccattggtcnntcctnngantaaagttntcagntttttntntaaagcttntttnagggctttcctaantctngccctttcangtgggtttnanatagggnangnaggttggntgattcccccacctgnnatatggggggcataggaanttanatntgnanccanactttagttttatnaatnaangnntttnatcggncntcaatngnaaactnccnatggtaaaggncanttttaatatgtccnaggattatacctggncnnggatgatnttaancantgggnacntnntatntgattatnnttcatnnggggntgnggngtcatgaaatatcncagtcct

SEQ ID NO: 7084 - DNA, 890 bp, Homo sapiens
  misc_feature 2, 5, 398, 416, 422, 457, 506, 511, 535, 541, 573, 580, 615,626, 638, 643, 665, 669, 686, 717, 720, 725, 731, 732, 738,743, 744, 757, 764, 780, 783, 784, 796, 802, 810, 814, 816,826, 827, 828, 848, 857, 858, 877, 878, 882, 884: n = A,T,C or G
  misc_feature 885, 889: n = A,T,C or G
angantttaaacgactactatagggcgaattggccctctagatgcatgctcgagcggcccgccagtgtgatggatatctgcagaattcgccctttcgagcggccgcccgggcaggtacatggatgggagcagcttcaccaacccctgcaaagtgactctgaagaagacgacaagccctgctccagtcacacccggaagctgactggtccacgcacagctgaagcatgaggaaactcatcgcgggactaattttccttaaaatttagacttgcacaataaggacttcaactgaccttcctcagactgagaactgtttccagtatatacatgaagtcactgaggtaggacaaaagattgctatggtcctattattttatggttattgtaagtgtactttntttttttttttttttgtntggganttttcaaaatgcacagtaagaaggtttttatcttngatatacaagaagaaaagatgatccaattcatagcttatggcctcaatncacangttttgtcaaaagaggtgaagcanttcacnttatgcttttttctaccacccaacccttaaanatcttanttgcaagattttaagctttggtttttaaaatgtantcataatttancacaattaatantgttncattttttttggttataacccnttcnaaaattgacttactggncctttagtaatatacagggattatttttttnttnttagnttttannaaattnattgnnatgtttttggcgnaattaanctttataaaaaaaagnaannggctaaaaattnttttanattgggcntaantntatatttaannncgtgccaggttaaaaaattnggtcccccnnggaattagttttaatttgnntganannaaant

SEQ ID NO: 7085 - DNA, 904 bp, Homo sapiens
  misc_feature 3, 651, 685, 736, 742, 762, 767, 781, 819, 841, 845, 867,871, 876, 897, 899: n = A,T,C or G
atnactactatagggagtcgacccacgcgtccgcggacgcgtgggcggacgcgtgggttgcgagcaagcacgcagtaaaactgcaccttagtaagacgcacggcaagtcgccagaggaccacctgatctacgtgacagagctggagaagcaatagtgtgccggtgtgcaggtggctgcagagtactgtactccctctcttgctgcactaggcctggcctggcctggacctcggaaatcagtctctcctttgttgctgacctgcctatctggacttggtttttctcacacatattttgtagttatatttatatgctctttgtctgatctgtgcatgttatttttcttttcttttttctttttctttccgtgagtcaaagtctgacctttattttcagcatccgttcttgttgttaagctatcttttgtaggaaatagtgggggcacgcttcggagacattgtttagcagtaaagaaaaagatacaaatagcagcgataaagagacatcctaaaattacaaagttgccatgacaataaaggtcacaggacctggtagtgtcaaagtttaaccctttgaggactttatctctgtgcctttcactcaaaaattaaaaaaaaaaaagaaattaaaaaaaaaaaaaaaaaaaaaaanggcgggcgcttgactagtctaaaaaaaaaacctncacaccttcccctgaacctgaaacataaaatgaatgcaattggtggtggtnacttgnttattgcacttataagggtncaaanaagcaatagcctcncaaatttcaaaataaagcattttttcactgcatttaantggggttggccaacccatcaangatnttatatggttggaaccccgggncccngcccnaataatcctttccgttcctgntnaatga

SEQ ID NO: 7086 - DNA, 892 bp, Homo sapiens
  misc_feature 1, 458, 486, 594, 602, 615, 634, 687, 691, 717, 740, 759,779, 800, 801, 806, 814, 823, 835, 840, 843, 864, 870, 875,878, 892: n = A,T,C or G
ncttagggagtcgccccgcgtccgatttggttagtaaatgtgtaactattgtacttccagtattcatatgtaggctggtgtattttgctaattaagaaatacaaagtgtctaggaaagcaatatttgcttttgcagagcactttctagtgggtaaccaaagatggctatacccacatgcttttgacttctgtgatagtctaatacatgtgatccttcaagtgtcttaaaaatacccatggatttacgtgatcatctggaaagcctttgccttaatgatgaacaatttttaataatctcaaagtcatataaaatttactttattcctagaacttttcagaatatctatttatctttataacttgtatctaaaaatatttcagtcatgtaagttaaaaataaaaatttggtagtatattatttattaaattattttctagctttatatgaaatgtgaaangtcttccctctggtttaatttactttangctgctaataaccaatggtacaagttaacattgggcctcttattggggatgggcactgctgctttgatcacttaaagatgctagaatgtcagagcttttactattgangctttcanggtaaatttctgnctttatataaaggttattnctaatgaaatggcctttattaattttttcacttaaacagggattttggattcnccancctcatggagtagaagttatttattnaaaattttcaataatttgaaagnaacctgaatggcctattanttttgatttatttggaacangccggaaaactacctagtggnnaatanttcaaaangctcctccnaaaatgaagctncaaanaanggcttatcatcctttaaaggngggacnccatnttntttaaaatggactn

SEQ ID NO: 7087 - DNA, 895 bp, Homo sapiens
  misc_feature 2, 6, 456, 523, 596, 632, 656, 659, 660, 666, 672, 677, 684,696, 711, 725, 761, 769, 781, 790, 802, 809, 814, 838, 839,842, 861, 862, 863, 864, 867, 868, 869, 875, 894, 895: n = A,T,C or G
tntatnctatagggagtcgccccgcgtccgtaattctctcctcggtggaaggaaagatggacaaatgatggttggaggtgtcccagaggaaatgaccggtaccggaggaatgattcagagaaacaaaatgaaaatacaagaaatgaaaagaatgacatcactgcagatagtaatgatccaagttccacagataagcatagaagtgactgtcccagttgggtaacagagaaaataaactctgggccagatccaaggaccagaaatccagaaaagttaaaagattcccactgggaagaaaacagaaatgaaaattcagggaattcttggactaaaaactttggcccaggctggatgtccagcccgtggtcgaggcggccgtgggaaaggtgcttacagaggtaattttgcctgtaatgacccagagcgagaacaggtggcaaagcccgtacacccctntcagggagcgactctttcaagtctgcggagcacagccctctaacccaaaagtgagccaggagctgtnctttggcacacggcagacagatcaaggtggaccttctgcatctagcttggcagtaagaaagactctgccccanattttcaaaactattactcccgggccgcaggacctnttaaggccccatcttggtggatgnacnnggaggngagacncctgnccggatntaccttaaaaancaaccaacccagtcnatggttttaacttnctttgaccttgatccaccccccctgagtgtgatcanccctccangaacccccccanccccctttngggcgttttccntacccanggggnttgccccccccttaataaatttcnnggnaccctttaccttcccctcnnnnccnnntttccncaaggattctttttccggnn

SEQ ID NO: 7088 - DNA, 920 bp, Homo sapiens
  misc_feature 584, 590, 599, 636, 672, 674, 693, 700, 719, 726, 731, 737,745, 755, 785, 806, 816, 820, 822, 823, 844, 848, 880, 885,896, 912: n = A,T,C or G
atctatactatagggagtcgaccccgcgtccggttggtaaagaaagggaagagcaaagttggagacatgctggaaaaagctgccgagctgctgatgagctgcttccgagtctgtgccagtgacacccgtgccggcatagaagactctaagaagtgggggatgctgttcctggtgaaccagctatttaaaatctactttaagatcaacaaactccatttgtgtaaacctcttatcagagccatcgacagctcgaatctgaaagatgactatagcacagcgcagaggatcacgtacaagtactacgtggggcgcaaggccatgtttgacagtgacttcaagcaagcggaggagtacctgtcgtttgcctttgaacactgccatcgctccagccagaagaacaagaggatgattctgatctacctgctgccagtgaagatgctgctgggtcacatgccgaccatcgagctcctgaggaaataccacctgatgcagttttcagaagtgaccaaagcccgtcagtgagggcaacctgctgctgctcaatgaggcgctggcaaagcaccgagacgttcttcatccgctgnggcatntttctcatnctggagaaacttgaagatcatcacgtacaggaacctntttaagaaaagtgtattttgtacttcaagacacatnanctgtccttagacgcctttntggtcgntttgaagttatcccgtggnaaacctngacanttgacnaggtcaangcattttggncaacttgaaataacatgggtcacattaaanggttcattttccttaacattnaaaaactggntggnannaagcaaaaacctttccttccnttgnccaaaggggctgatgcccaagccttgcaaaanggggntcttgttaccnttgcccgtggagttanattttttg

SEQ ID NO: 7089 - DNA, 903 bp, Homo sapiens
  misc_feature 3, 7, 575, 624, 695, 697, 700, 732, 738, 766, 776, 789, 806,820, 821, 825, 839, 850, 863, 868, 872, 898, 902, 903: n = A,T,C or G
atntttntatagggagtcgaccccgcgtccgcggacgcgtggggaaacgccttcgcttgctttgatgaggaagccacaggcaccatccaggaggattacctgagggagctgctgaccaccatgggcgacccgcttcacagacgaggaagtggatgagctgtacagagaggcccccattgacaaaaaggggaacttcaactacattgagttcacacgcatcctgaagcacggcgcgaaagacaaagatgactgaagagctgcggcggctgacacgcctcttgcgtttgcttgctcacttctgtctcagacacacacaccccataggacctactgcgtgccacttagtttctcaagtcacttccctccccatagggcctactgtgtgccacttagttgagagctttttttttaaatgtatttattccaggccctttctgtcacttaacatgtgcataatcagactggaacgggggacaatgttgtaaattgtactgaaaacgagatgcaaataaaaaatgaaccactgtgaaagcccaggacaattaaaaaaaaaaaaaaaaaaaaaaaagggcggncgctagactagtctagaaaaaaaacctccacaccttcccctgaacctgnaacataaaatgaatgcaattggtggtgttaacttggttattgcagcttatatgggtaccaataaagcaatncnttncaaatttccaaataaagcattttttactggantttaantggggttgggccaactcattaatggttnttattatgtntggatcccgggtnccgacctcgaataaatnctttttcggttctnnttanttaattcttggctngggcgttcggntggggggaggggnttaanttanttcaaaggggggatacggtttcccanaaann

SEQ ID NO: 7090 - DNA, 927 bp, Homo sapiens
  misc_feature 2, 580, 653, 664, 666, 688, 705, 708, 717, 730, 746, 754,765, 788, 791, 804, 870, 875, 898, 922: n = A,T,C or G
tnttagggagtcgacccacgcgtcccgcggacgcgtgggcggacgcgtgggcggacgcgtgggctaagtctgtccatctgtcttgtttatccactggctctccatttgtccctttggagaggaaggtgggaaggcaatgtcctgtcccatttcatgccttgcattctgcccatcccttccctcctctcagcttaggacacacagccctttcttcttcccatgctctgtccaggaccacagtctggtgcctgattctttgtccatcaccaggacctaagctctccctgggtctgtagctggctgctatcactgcccactctgacctgccaggacagatgcaggtaggagactttgggggctggccaagctggtgccaggctttcggtgctaaggcctgcaaggggcctaggtacgaccctcctccctgacctgtgcttggagctggctcttcagcagtgagggccagcccaagttgagtcttctgatcggggactgaattcagaggccacctcatccaccagccactagaatgatgccagcactagggttggtgggaaagtggcaactcactgtccccttncacaccctcagtcctgccaagccccagatgggggcctctcaatgccattgacactgcccaagaatgtctagangccacggaacngngccagcacacaagcccttttgnctctttcacgggagcangangtccaatgnctgtcgtgggaangggaggaacatgccangtccctgngggtccttggncctgtttcaccaaaaggactcanggnttggtttttgagntttccgtccagtatttaaaccaagttctgggtaatcacgtaggcctaaaaaccttggggtttacanagtancccactttgggccctggccaatntgggccttgggggttacagagcanccact

SEQ ID NO: 7091 - DNA, 912 bp, Homo sapiens
  misc_feature 227, 235, 236, 240, 241, 431, 453, 499, 502, 563, 571, 635,686, 690, 693, 724, 735, 747, 749, 754, 765, 773, 797, 823,833, 841, 844, 851, 859, 863, 868, 877, 882, 886, 889, 901,903: n = A,T,C or G
atgtatactatagggagtcgcccccgcgtccggaaaatgatttgatgtgaaaagtggtgaaatctggcacttgaaataaccaagagaaaagttcctacttgatgccttaagccgctcctgcccgaagctctgaagaactgagatgccagagatgcttactatggtactactgcattttttgtagagttgtacattaataataaaacttgcctgcttaatctcaaaanaaaaaaannaaannaaaaaaaaaaagggcggccgctagactagtctagagaaaaaacctcccacacctccccctgaacctgaaacataaaatgaatgcaattgttgttgttaacttgtttattgcagcttataatggttacaaataaagcaatagcatcacaaatttcacaaataaagcatttttttcactgcattctagttgnggtttgccaaactcatcaatgnatcttatcatgtctggatccccgggtccgagctcgaattaattctnttncgcttcctcgctcactgactcgctgcgctcggtcgtcggctgcggcgagcggtattaactnacttaaangcgggaatccggtattcccaaaatcaggggatacccaggaaaaaacatgtgaccaaaaggcccncaaaaggccaggaaccctaaaaaaggccccgttgctggcgttttttcatangctncgncccctggccagcattacaaaaaatgaccctnaagtcaaaggnggggaaaccccncnggctnttaaaaaaccnggcgtttncccctggaagctccttgggccctntcttgttcaaccttccgttaccgganacctgccgcntttttccnttngggaaanggggggcntttntaaanctaccctgnggggntttnaantcgggggagggngnccctccaat

SEQ ID NO: 7092 - DNA, 910 bp, Homo sapiens
  misc_feature 2, 563, 608, 653, 667, 670, 691, 723, 732, 734, 739, 780,781, 782, 783, 784, 785, 786, 787, 788, 789, 790, 791, 792,793, 794, 795, 796, 797, 798, 799, 800, 801, 802, 803, 804,805, 806, 807, 808, 811, 815, 823, 878, 887, 901: n = A,T,C or G
tntattcctatagggagtcgaccccgcgtccggagaactgcaaatgagttcaatgtgacttctcggtgctagttggccatcttggctcaatgttgggacacactatcagagagaggagtctttttttttttccccaatgatattctgttcaaaatgaattctgaaggaaaagttgctcatgtctgtttcagagcatacccttttaaatctttttagactactcttctagaattcatcataaccccaaaatagataaaagctatctagaagttgccctgacaagctattgcacatctctggtaaatcctgctgaatgtaaggaatattcagagctctcatacctcatcatgatgttatttaagcagccaatttacacgacctgatttactttgaaaaatttgtttcattcaaactagaaagttccagagacaaaggacatttctcagccaagagtgtgatgcattcttgccctagtctttacttgtgtctgctctgggatggatgctgtctgatgtctggtacccaatggagcagatacccaaaactagtcaactcccgtctgncctggtggtttctaagtgctgctttgtgctgagagaacatgttantttactgaacttgacctggacaagactgattctttgtaattttangggtaaaataaggnggntaatttaaagatgaactttcnatggtggctttcattacattacaggatccttntttgaaaangnaatanaagccctggttcatagtaaaaatcttggttttagcttttgnnnnnnnnnnnnnnnnnnnnnnnnnnnnnaangggnggcccttnactattttaaaaaaaaaaccctccacacctcccctggacctgaacaaaaaagaanccaattggngtggtaactggttntggacttaa

SEQ ID NO: 7093 - DNA, 903 bp, Homo sapiens
  misc_feature 2, 9, 28, 254, 356, 454, 663, 688, 704, 716, 744, 746, 756,764, 766, 774, 783, 784, 785, 786, 787, 788, 789, 790, 791,792, 794, 797, 798, 799, 800, 801, 802, 803, 804, 805, 808,809, 816, 817, 818, 820, 821, 833, 834, 837, 838, 840: n = A,T,C or G
  misc_feature 849, 854, 861, 866, 869, 870, 871, 875, 884, 889, 890, 896,897: n = A,T,C or G
ancttacgngtcgcccacgcgtcccgcnctgaggagtatacatctagtttgtagctcagggctcaggggttaggccctgggtttgatcttcagcattggagggagacagagaagagagggtaacagggagacagagaaagaaagacaaaggaaaaggagaggagtgtaaggaggagagaagtgggaaggaacagggaaagagagagatggagaagaagggaagtgcccatagtcagtaatgttttgtgtttatnggcggggaagtaagttgaattggtttcctctttcttttagctgttcagctagtaaatcctctccaagtgccttaaaatgtaaagtatttaataagtggtaancaattaaaaattttacattatcctctggcatataataaagtgctgtgtcgacaagatgctagagaataaggtatctacacatactcagctggtctcangaaacatggcacagataaaatatcctcccttttgctggtctctgtctgcttcctatcatgggggctgggatccattctaaggagaatggataaggaagtagctggtctttgcatttcatcttgcattcttggtccttttagcttggtacttacatgctgatccatccttaagggctttctgtgaaaattgaatgcctgcccctcaaggnctttcttccacaggtaataggaacnttggggaccaaagggncttatttgatancaggtttttgctgtagtaacccaagaantnaccttaaaanggtaatcnantcccccangtgtgtgtnnnnnnnnnngnggnnnnnnnnntgnncccaagnnntnncccccttttttnngcnntnccctccggnaaatnctttctncaatnaannncccnttttttttnaaccnncttttnncttaaa

SEQ ID NO: 7094 - DNA, 895 bp, Homo sapiens
  misc_feature 408, 457, 673, 696, 700, 756, 757, 758, 759, 760, 761, 762,763, 764, 765, 766, 767, 768, 769, 770, 771, 772, 773, 774,775, 776, 777, 778, 779, 780, 781, 782, 783, 784, 785, 786,787, 788, 789, 790, 791, 792, 793, 794, 795, 796, 797: n = A,T,C or G
  misc_feature 798, 799, 800, 801, 802, 803, 804, 805, 806, 815, 824, 828,833, 848, 880: n = A,T,C or G
cctataggagtcgccccgcgtccgtaaatctgtggttttatttttctgtaaaacacttaaaggggaagtaatatcttggcatatttagaaatacttgtgactggcttcaaaatataatttcttaaatatcttatagccgattttaagtttacattttctgtacatgttatgcttaaaaccaaatactgttcaagatgagcaatcagacttatgttttatttttatctgggtaacatattattttgaaattttcatcttaagtaaaggagcttttgataatcagtctcctgtcaaatattaaaataataatttgattttaaatcatcagcatgttcaaaatactggtgaaaattatttaatataaggactggttagaacattatatatatatcccatatttataactgntaccacacagttgaatatgttgcaaaaattatggttatttctgaacggntgcttttcttgctggtttccaccaaccaagaagcacctttataaacaggtgctaattgatatgaagatcattttggtatgtcctagatagaatgaagccaaatgtctggatttaaaacaatttcaaacaatcatttactattttgctttactttaaagaacataaatttacttcagttattctatctgtaaagattatttggtataagaaataatncattgactggggtgctggaatgngggnaaatgtatgttttcaaagttctatcatggggaaataaaattaattttgctttaaannnnnnnnnnnnnnnnnnnnnnnnnnnnnnnnnnnnnnnnnnnnnnnnnnnaaaaagggnggcccttancttntttanaaaaaaacccccccnccccccctggacctgaaaataaaagaaggccnttggtggggaactgt

SEQ ID NO: 7095 - DNA, 917 bp, Homo sapiens
  misc_feature 3, 450, 502, 518, 562, 563, 564, 565, 566, 567, 568, 569,570, 571, 572, 573, 574, 575, 576, 577, 578, 579, 580, 581,582, 583, 584, 585, 586, 587, 588, 589, 590, 591, 592, 593,594, 595, 596, 597, 598, 599, 600, 601, 602, 603, 604: n = A,T,C or G
  misc_feature 605, 606, 607, 608, 609, 610, 611, 612, 613, 614, 615, 616,617, 618, 619, 620, 621, 622, 623, 624, 625, 626, 627, 628,629, 630, 631, 632, 633, 634, 635, 636, 637, 638, 647, 699,700, 706, 714, 719, 721, 723, 724, 729, 741, 743, 744: n = A,T,C or G
  misc_feature 745, 757, 766, 767, 769, 771, 772, 773, 775, 776, 784, 793,806, 808, 811, 814, 821, 834, 839, 840, 847, 848, 852, 855,856, 868, 870, 872, 880, 881, 887, 888, 892, 893, 894, 895,899, 900, 903, 905, 906, 910, 911, 912: n = A,T,C or G
ttntactatagggagtcgaccacgcgtccgcgctgtgaaggcatcaacatttctggaaacttctacagaaacaagttaaagtatctggcctttctccggaagcggatgaataccaacccctcccgaggcccctaccacttccgagcccccagccgcattttctggcgcactgtgcgaggcatgctgcccacaagaccaagagaggccaggctgccctggagcgcctcaaggtgttggatgggatccctccaccctatgacaagaaaaagcggatggtggtccctgctgctctcaaggttgttcggctgaagcctaccagaaagtttgcttacctggggcgtctggcgcatgaggtcgggtggaagtaccaagcagtgacagccactctggaggagaaacggaaggaaaaggccaagatgcactatcggaagaagaagcagatcttgaggntccgaaacaggcagaaaagaatgtggagaagaaaatctgcaagttcacagangtcctcaagaccaacngacttctggtgtgaacccaataaaaactggtttgcctcaaaaannnnnnnnnnnnnnnnnnnnnnnnnnnnnnnnnnnnnnnnnnnnnnnnnnnnnnnnnnnnnnnnnnnnnnnnnnnnnaaaaagggngggcgtttaatttttttaaaaaaaaaaccttccaaaccttcccctgaacccnnaaaaanaaaagaangcaantngnngtggnaacttgtttttngnnnttttaaggggtncaaaaaaannantnnntnncaaatttncaaaaaaancattttttcccgnanttnaanggggggngggccaaccccanaaagnnttttttnntttnggnnccccgggccccncncnaaaaaaannttttcnntttnnnntaannaantnntggnnnggggg

SEQ ID NO: 7096 - DNA, 916 bp, Homo sapiens
  misc_feature 471, 483, 511, 549, 565, 569, 578, 594, 616, 632, 663, 668,678, 707, 709, 719, 740, 744, 750, 769, 783, 785, 810, 816,844, 847, 850, 851, 858, 863, 866, 869, 872, 873, 874, 875,884, 885, 888, 889, 897, 912, 915: n = A,T,C or G
tattagggagtcgccccgcgtccggctggccgcggcctcccggcgctctcgtcctccgcttttgcacagctccccgttccagccttcgccatgggattcggagacctgaaaacccctgccggcctccaggtgctcaacgattacctggcggacaagagctacattgaggggtacgtgccatcacaagcagacgtggcagtatttgaagcagtttctggtccaccacctgctgacctgtgtcatgccctacgttggtataatcacatcaagtcgtatgaaaaagaaaaggccagcctgccgggagtgaagaaatctttgggcaagtatggccctagcagtgtagaagacaccacaggaagtggagctgcagatgctaaggatgatgacgacattgatctctttggatctgatgatgaggaggaaagtgaggaagccaagaagctaccagaagaacccttgccagtatgagtncaagaaaagctnaaaagcctgcagttggtgcgaagtcttncattctactaaacgtgaagccttgggatgatgaagacnggcattgacaaaactntgangagtgtgtncgaagcattcaagcanatggcctggtgtggggcttccnttaaattggttccagngggatttggaattaaaaagctttaaatccgngtgtngttgaagatnataaaggtggaccggttttcttggaaaancnaaataactgnttttgagggctacctacaggncaanggatgnggtggttttacaagaattnaaatatttttaagnanggcccttaaataaaacttggaaganaacctngggttttattttggtgggaaaagggatnggnttnnttttganggganggnttnagnnnnacttttttnnggnnaaaacttnactggaagaaaaatnttnt

SEQ ID NO: 7097 - DNA, 921 bp, Homo sapiens
  misc_feature 497, 571, 581, 585, 674, 694, 700, 716, 720, 736, 738, 739,740, 772, 781, 793, 798, 799, 815, 824, 838, 845, 846, 852,859, 860, 861, 866, 882, 890, 892, 907, 910, 911, 915: n = A,T,C or G
tatttcggagtcgccccgcgtccgcggttgcctgcagcgcgagtccgtcgaccctcggccattcgccgccgccaccgccgccaaaatgtctacaggtgtgccttcggggtcaagtgctgccactggcagtaatcgaagactccagcagacacaaaatcaagtagatgaggtggttgacatcatgagagtcaatgtggataaggtgttagaaagagaccagaagctctcggagctagatgaccgcgcagatgcactgcaggcaggtgcctcgcagtttgaaacaagtgctgccaagttgaagagaaagtattggtggaagaactgcaagatgtgggcgatagggatcagtgtcctggtgatcattgtcatcatcatcatcgtgtggtgtgtctcttaatgaagaacccgatgaaactgaagcccgatattcaggatcttcttcaagactttctacttagaacctgccgtgttatcgagcttacctattggtttttttncaaatgattattttggtaagtttacatacaagtttagtgcctagaaaatgtgcctttgtttttcatatcccctncaaactggangtgngacctacccttccccattttgcacagggcctttccagatttctggactgggaaagaagacttggtgtagttcttgaatgcttaatggangggggtgtttgcacttcaanatgacnttgttggggattccangaanggggttttggttcaangnnnctggccccccattttgacattatttttaaaancccattttnaactttttgggnaattnnaattcctaacttgggnccttccagnaaaaaacttattgnttaaaannatgggngaaaaannnggggnggcctttttgaaactnggaaacgntntttaaaatttttccnttnnaacnctctgg

SEQ ID NO: 7098 - DNA, 929 bp, Homo sapiens
  misc_feature 10, 15, 21, 442, 443, 444, 445, 446, 447, 448, 449, 450,451, 452, 453, 454, 455, 456, 457, 458, 459, 460, 461, 462,463, 464, 465, 466, 467, 468, 469, 550, 553, 577, 602, 608,629, 648, 659, 700, 701, 729, 736, 750, 754, 760, 776: n = A,T,C or G
  misc_feature 780, 784, 789, 813, 817, 830, 854, 860, 868, 891: n = A,T,C or G
attatcgtanacgcngtcgcnccgcgtccgattagattgggatgaacacagttctgctggcagatatgtttctcggcgctgtaaacctctgaaggagtttatgctatctcaggatgccgaacatgagcttctctttgacctcattgggaaaatgttggagtatgatcccgccaaaagaattactctcaaagaagccctaaagcatcctttcttttacccacttaaaaagcatacgtgatttataaacacagtgctctgaaaggaatcttacagactgtatcagtctagcttttaattaagttattttgtatagcttaatttgtaaaacattttatgttttttagatgctttattaaatacatggccaaaccaaataacatctttcagtaattatagaatgatttatttggaataaaatttgtgcttatgaatgtaaaaaaannnnnnnnnnnnnnnnnnnnnnnnnnnnaaaagggcggccgctagactagtctagaaaaaaaacctccacacctccccctggacctgaaacataaaatgaatgccaatnggnggtggtaacctggttattggagcntataatgggtacaaataaagccatngcctcncaaatttcacaaattaagganttttttcctggattctaantgggggttggnccaactcatcaatgtttttaattatggttggaacccccggnncccggcctcgaattaattcctttttcgntttcctnggttaatggactcnttgnctcggncgttcgggtggggggnagcnggtntaagnttactttaaaagggggggaatacnggtnttcccaaaaatcnggggttacccccggaaaaaccttntggccnaaaggccnccaaaggcccgaacccctaaaanggccgggttgttggggtttttcatagggtcccccccct

SEQ ID NO: 7099 - DNA, 914 bp, Homo sapiens
  misc_feature 5, 23, 28, 37, 85, 158, 166, 219, 249, 262, 275, 282, 365,434, 436, 446, 554, 566, 598, 633, 692, 710, 723, 724, 735,745, 769, 789, 798, 811, 834, 839, 844, 853, 861, 865, 868,872, 883, 898, 904: n = A,T,C or G
agttnggatcgccaccgtccggncggtnagtcctctntcggccgccgtcgcctccgagatattgctcgcaggagctgcggcggtnagcggagagcgccgggggaaggagatgggaggacgaagaggtcccaacaggacatcttactatcgaaacccgntctgtganccaggatcatcaggggcctctggtggaggccactcttctagtgcatccgtgancagcgtccgttctcaaagcaggaccacttntgggacgggcctntccagccctccgntggccgngcaaaccgttgtgcctctacagcactgcaagatccccgagctgcccgtccaggccaagcattctgttcgagctccagctcttnttctgtcagctcatagccctgttcgtgcactacatcaacatctataagacagtctggtggtatccaccntngcacccaccntcccacacctccctgaacttccacctgatcgacttcaacttgctgatggtgacccgccattgttctgggccgccgattcatcgggtccatcgtgaaggaggcttttangagggggaaggnctcccttttcccgctccaatctgctgttcctnacccgcttcaccgttctcacggcgacaggctggantctggccggtcccttatcccctttttaggacctactcctttctgaaccttcttgtcctntgctttccgttgggaagnacattccgttctnnagcttgaactntaatttttgnaagaagaacctttttacccacatnggtttcatgggaaccccaanaggcagtanttggccttgcaanggagtcggggacttcttttttancttgnggganacttggaanccccttanccanagntttntgggccggaanccatgcccccccttnctggtngttggaacct

SEQ ID NO: 7100 - DNA, 901 bp, Homo sapiens
  misc_feature 9, 22, 471, 528, 612, 621, 639, 666, 682, 693, 697, 713,716, 722, 731, 733, 738, 739, 743, 774, 778, 788, 796, 801,802, 805, 808, 811, 817, 822, 823, 824, 835, 852, 857, 864,869, 870, 873, 878, 885, 889, 893, 897, 901: n = A,T,C or G
ttgtatatntgggagtcgaccncgcgtccggaagtctacaaggaccctcaatttcctgcctgcctgcagcaaggacagacggcatgagcactgcgggaaaagtgatcaaatgcaaagctgcggtgctatgggagcttcacaaacccttcaccatcgaggacatagaagtcgcaccccccaaggcccatgaagttcgaattaagatggtggccactggtgtctgccgctcagacgatcacgtggttagtggaaccctggtcacacctcttcctgcagttttaggccatgagggagcaggcattgttgaagagcgttggagaaggggtgacttgtgtgaaaccaggtgataaagtcattccactcttttcccctcagtgtggagaatgcaggatttgcaagcacccggaaagcaacttttgtagcccgaagcgatctgctaatgcctcgggggactttgcgcgaaggcaccancaggttctcctgcaagggaaagcagatccacaactttatcagcaccagcaccttctnccagtacacccgtggtagatgatatacaagtggcccaaatcgatggagcttcaccactggacaaaagtctgccttatcggctgnggggttctnaactggctatggctctgncgtcaaaagtcccaaaggggaccccangcttcacatgtgccgngtttggccctnggangggtcgggctgctggnatnattggntggaaagcncnggacnncccngatcattggtggggacattaacaaggccaantttncaaggccaanagttggtncactnntgnatnaancttaanatacnnnaacctttcagnagttttcagaaataccnccggnggggggnttttnnttnaaatnttggccncttnaccntgantttn

SEQ ID NO: 7101 - DNA, 905 bp, Homo sapiens
  misc_feature 3, 7, 595, 602, 647, 656, 688, 720, 725, 730, 731, 734, 752,766, 768, 789, 816, 826, 838, 879, 880, 892, 901, 905: n = A,T,C or G
atntatnggagtcgacccacgcgtccggcccgggtgtatgctgaaaatgccatccgcaagaagaatgaaggtgtaaattggctccgaatggcctcccgtgtggacgcagtggcctccaaggtgcagacagctgtgaccatgaagggggtgaccaagaatatggcccaggtgaccaaggctctggacaaggccctgagcgccatggaccttcagaaggtgtctgcagtgatggacaggtttgagcagcaggtgctgtctcccttgccctgtgatgttctggaggcttctgcccaactgcgcttcactttctccaacccttcgtagctgcctgggctcttttccaacctgtcaggctggcgccttagaactgagccttaggttgggcagcgggtctctgtcctggtattgaatttgcacaagtgtgtggtgacatatgtgcgtgtgggccacaactggaggatggcaaagctttctgttgtcctctgcctatgtggagttgacagggtttggcctgcagatgtgtgtggacttgagcccaagtgctttggggccttgagacttcagcgactggacaccccgctcttgtgcttgcggncaggganggtgagaaccaatccttcctttgcaagtaaactcttgggaacctnttccccctnttcaagcgaaggaaattccaatgtgtgaaaancctttaaggttcctggggacttttgtaccaangggtncaatnnccnccacacttgacctggggncttacaaagggtgntnttcttcatcttccaaggctgnggcctggggttactgccggccgctgantttctgggcnttttgttttaanttcctttccagcccagggccgaaaaccttccctttaggccnntcttctaaaaanttttccccncttn

SEQ ID NO: 7102 - DNA, 765 bp, Homo sapiens
  misc_feature 4, 7, 16, 586, 670, 673, 699, 711, 724, 739, 760, 764: n = A,T,C or G
gtgngancgactactntactcactatagggcgaattgggccctctagatgcatgctcgagcggccgccagtgtgatggatatctgcagaattcgcccttagcgtggtcgcggccgaggtactttcttttttctcttttttttttcttttttttttgaggtgaaatctcactccactgcactccagcctgggcgacagagtgagactctgtctcaaaaaataaagtgaaccagggtgctcagggagcctcggtgagcgagaaaggagtttggagcttcaagtctgaaactgcgtttcacagttttcccatctgtagaatggactgcatgatacctctcttgctaggggatgtgaggattaaaagagatagcctgaaaggcgagctggagcaagtgggctgatggccaagcttcagagctggcttcctgattcagcctggcctcccctttcgggatcagattaacctccccaccttcagcctccttgggtataaaaccaggagtatgatatccctctgttggggattattgtgcggattgaataaaataattcatgttagggcatagcacccgtgctgggcacaaaantgttccttaaatattaacttgctattattaaaagccatgctttaaacgggtaggcccctttgacccatgtccccaaaagacccnttntgaggaggaaaccaaaatgggaattnttgttcaaagtnggggggcccaaanattttacccatttgnccagtaccttaaaaaaaaaanaaant

SEQ ID NO: 7103 - DNA, 739 bp, Homo sapiens
  misc_feature 581, 645, 646, 648, 669, 672, 676, 679, 699, 700, 702, 704,712, 713, 716, 724, 731, 732, 739: n = A,T,C or G
tcgactactatagggcgaattgggccctctagatgcatgctcgagcggccgccagtgtgatggatatctgcagaattcgcccttagcgtggtcgcggccgaggtacagatccacagcctgtcagttgcaccctccctgacaccaccaccgggacctgcacagactgggagttcatttcttgctcactggggcctgccttccccaggctggtgtcttctgatagccaaactgaggggtgggaggtattttgaaatgcagatttaattattcatgtgtggtgaggccaacagatcaggagataactgccactgaaatgatagtttgttacacacagttcccaatgggaggggacatgccacacacggtgggggtcacacagggaagcaccaaggtcaagctgggaggtagagggagccagggagaaaagtgggcaagagcctttattgttttccatgggagggaacggacaaggatttgagtaagtaggtttaggattggctatttggaataacttcagcgagatctggagcacagaggctgtcctgagttatctggtatgtgtcctggattgattagggcangagacaggggcccagagtgtgagagcccaaaaaaggaggtgggggtattgggcttttggagcanntnttttgtgggttgaaaggcctnttnccancancaaggccaggcttttgctgnntncnggaattannctngccctttnaggttanngaggccn

SEQ ID NO: 7104 - DNA, 767 bp, Homo sapiens
  misc_feature 4, 19, 433, 445, 483, 554, 575, 578, 587, 594, 602, 604,610, 619, 626, 628, 638, 640, 642, 647, 649, 650, 657, 664,665, 667, 673, 688, 694, 698, 699, 700, 701, 704, 705, 714,716, 720, 722, 723, 724, 728, 735, 738, 740, 751, 756: n = A,T,C or G
  misc_feature 757, 761, 765: n = A,T,C or G
gtgngatcgactactatanggcgaattgggccctctagatgcatgctcgagcggccgccagtgtgatggatatctgcagaattcgcccttagcgtggtcgcggccgaggacgcgggggctgggagcggttgcggcgtgccgggagctgagttatagctgtgacttctgccctgccaggccgcacacaagctggctgacccggtttgtaaaaatggaatttcaagcagtagtgatggcagtaggtggaggatctcggatgacagacctaacttccagcattcccaaacctctgcttccagttgggaacaaacctttaatttggtacccattgaacctgcttgagcgtgttggatttgaagaagtcattgtggttacaaccaggggatgttcaaaaggcttctatgtgcaagaatttcaagaatgaaaaatgaanccagatattggngtgtatttcctggatgacgcctgacatgggaactgcanattctttgcgctacatatattccaaaacttaagacagatgttctggtgtttgagctgtgatctgataacanacgttgccttacaatgaaggntgngggaccttnttaaaantttatgantncattanttgcttttnttgattnanaaaaaggccnanantgcantnnaaacctngtttccnngncaaaanggggaaaaaaaaaanccgggnaccnnnntgnntttatttgnantggncnnncaangaaaaangcntnctttttatggntaaannaaanaaanct

SEQ ID NO: 7105 - DNA, 760 bp, Homo sapiens
  misc_feature 2, 3, 4, 5, 6, 12, 40, 45, 47, 49, 50, 57, 155, 189, 198,205, 221, 244, 247, 300, 311, 313, 316, 337, 348, 350, 364,385, 424, 441, 444, 492, 562, 566, 575, 594, 600, 604, 611,615, 622, 627, 633, 634, 649, 669, 675, 677, 678, 681: n = A,T,C or G
  misc_feature 690, 698, 704, 705, 707, 709, 713, 718, 721, 723, 726, 729,737, 740, 746, 747, 752, 753, 757, 758: n = A,T,C or G
gnnnnnggtgancactactatagggcgaattgggccctcnagatncntnntatgcangctcgagacggccgtcagatgtgatggatatctgcagaattcgcccttagcgtggtcgcggccgaggtacagatccacagcctgtcagttgcaccctncctgacaccaccaccgggacctgcacagactggnagttatttncttgctnactggggcctgccttncccaggctggtgtcttctgatanccnaactgaggggtgggaggtattttgaaatgcagatttaattattcatgtgtggngaggccaacanancangagataactgccactgaaatnatagtttgttncncacagattccaatnggaggggacatgccacacacngtgggggtcacacaaggaagcaccaaggtcacctgggangtaacagggaagccagnganaaaagtgggcaagagcctttattgttttatatgggagggaacggacantgatttgagtaatgtcgtttaaggatttggctatttggaataacttcagctgagatctggagcacaaaanctgncctgagatntctgggtattgtgtcctgnattgantaangcatganacangggcccngaatntgaaanntcaaaaaaaagacgntggggtatgggcaattgagnaattgnannttntgatgaaangccaattnccaacnncntncagnttttnctntntanggntattttcnctnctttcnngggtnngggnngg

SEQ ID NO: 7106 - DNA, 919 bp, Homo sapiens
  misc_feature 5, 12, 14, 349, 411, 461, 470, 471, 492, 507, 509, 522, 545,558, 577, 584, 591, 594, 597, 603, 605, 611, 612, 619, 632,633, 638, 639, 642, 652, 664, 672, 679, 680, 688, 690, 692,693, 703, 720, 722, 727, 729, 730, 731, 737, 745: n = A,T,C or G
  misc_feature 752, 757, 758, 765, 770, 775, 777, 781, 785, 791, 795, 798,803, 804, 805, 809, 813, 814, 815, 816, 818, 819, 824, 834,835, 836, 837, 838, 840, 841, 844, 847, 848, 849, 850, 851,852, 856, 858, 859, 862, 863, 864, 865, 867, 868, 869: n = A,T,C or G
  misc_feature 870, 872, 874, 875, 879, 880, 881, 882, 883, 884, 885, 886,887, 888, 889, 890, 892, 893, 894, 895, 896, 898, 899, 902,903, 904, 910, 911, 912, 913, 914, 915, 919: n = A,T,C or G
agggncacgggngntatacgactactatagggcgaattgggccctctagatgcatgctcgagcggcccgccagtgtgatggatatctgcagaattcgccctttcgagcggcccgcccgggcaggtacttttttttttttttttttttgaaagaccccatcaaagatagttgaagaatgaggagagaaggatcatgtttaagatccatgtaatcatacattaagagggaacacatgggcagggtgtggtggctcatgcctgtaatcccagcaatttgggaggctgaggcgggcaaatcacaaggtcaggagtttgagtccaacctggccaacatggtaaaaccccgtctntattaaaaatccaaaaaattaaccgggcatagtggtgggtgcctgtaatcccagctactcanggaggcttgaggcaggaaaatccttaaacccaaggaagtggaggttgcantgagcccannatcatgccacttgcacttcancctggggggacagtncnagacccccttttnacaaaaagggaaaaaaaaaaaanagggaaccacgtnaaaatatttgttttcaagngagggtnctttaanttntangggttnancttggnnaaccccnttttaaaattttnngggcnnatncttaaaatantaagggcttggnttgggaanggggccnnaattaaanancnnttttaaaaantcccctggggcctttgncntaatntnnnaaaagntttttttnaaaaacnaaacnnttttttncaatnggaantnggtntttnaaatgntatnttnttccnnncctnggcnnnncnncttanggggaatttnnnnnanntgnggnnnnnntttngnnccnnnntnnnncnanntttnnnnnnnnnnnnannnnntnnttnnnaaaatnnnnnncccn

SEQ ID NO: 7107 - DNA, 946 bp, Homo sapiens
  misc_feature 4, 413, 483, 506, 528, 529, 533, 538, 563, 605, 628, 642,654, 669, 689, 718, 721, 735, 751, 791, 805, 807, 855, 864,871, 880, 881, 892, 893, 904, 905, 913, 915, 918, 920, 922,925, 928, 930, 934, 943: n = A,T,C or G
tgancactactatagggcgaattgggccctctagatgcatgctcgagcggccgccagtgtgatgggatatctgcagaattcgcccttagcgtggtcgcggcccgaggtacgcggggagcagggaaccgctcagatacccttccacaccgtggaaactttgttcttaccctcttgacgaaaaatcttgctgtgctcactctttgggtccacaccacctttaagagctacaacgatcaccacgacagtctgcggcttcattcttgaagtcaagcgacaccacaaacccaccagaagggagaaactccagacacatctgaaggaacaaactccagacacaacatctttaacagcttgtaacacacactgtgaaggtcacggcttcattcttgaagccagcgagaccacgaaccctntggaagggaccaacttttggacacaagcagggacgtgagactttgtacctgctcacttaaaattaatttncgcaccaaccatggccacgtttnggggagcttaattaccttgccnnggcnggccnttcgaaagggcgaaatttcaagcancacttggcgggcggtacttagttggaatcccgagctcgggancaagccttgggcgtaattattgncaatagcttgtttncttgggtgaaanttgttattcccgttnacaatttcccacaaaatacnaagcccggaaagcataaaagtgtaaaagnctnggggtgccctaatnaagtgaagcttaactnacattaaattgcggttggcgcttacttgccccttttcaancgggaaaacctgtncngccaactggattaatgaatcggccaaccccccgggagaggcggtttgntatttgggnctttttnccttttttnnttaattaaatnntttaggttggnntttgggtngnggnangnggntanantttnttaaaaggnggg

SEQ ID NO: 7108 - DNA, 935 bp, Homo sapiens
  misc_feature 2, 477, 482, 595, 618, 621, 624, 697, 713, 719, 749, 781,789, 796, 799, 806, 834, 846, 848, 852, 855, 857, 864, 871,879, 889, 899, 900, 913, 931: n = A,T,C or G
gntccactcactatagggcgaattgggccctctagatgcatgctcgagcggccgccagtgtgatggatatctgcagaattcgccctttcgagcggccgcccgggcaggtactttttttttttttttttttaaaggaagtaactcaatccactttaatatttagctagcatttatgttacaggtctatgaggaagaaatatactggaaaaaagaagaaatacatttttttctcattctgaaagatttcgtttctccacaagacagcaaaatacacaaatatatgcaaatgtgtgcatgcacacgtgcacacaacccacaaaagtactatctatgaaggaaagagataccaagttcaattgaaacaggtatttagaaatgatagggaggttggaagaaaaggtgagaacacgtgaaaagtaattttacttttggttaaccttaagcttgccaactttttttccttggaacagcatttgncttgntttcataccccctatgctcatatcaaaaacttaaaactacttcgggattctacttttgaatttatagccacatgactaagatgttttgaatataagcctatccatatgcccanataactttgagaactcttaatgnctnttntttttatgaaaaattctattcttgattgtaattggggttgatgaaaaaaaaataaaagggccaaggggccaanaaaaggccactttccnttaaanggccaccccaagggaaaaattttccaactncttattgtgccaaaaaatatttttttcaaggncctaaatnaattttnttnaaccggnccaatgaattctaaattgggaggggttnccaaagttattngnggtnccncnaaaatgnggtaaanttaagacntttttgaaanccgaattaanngggacattattcnaataaacctaaattaaanggct

SEQ ID NO: 7109 - DNA, 897 bp, Homo sapiens
  misc_feature 3, 4, 5, 6, 24, 30, 32, 36, 38, 476, 502, 523, 530, 545,552, 581, 647, 656, 664, 685, 700, 701, 732, 734, 737, 761,797, 811, 821, 827, 831, 840, 854, 885, 892, 893: n = A,T,C or G
agnnnntactatagggcgaattgnccctgnanaggncnctctagatgcatgctcgagcggccgccagtgtgatggatatctgcagaattcgccctttcgagcggccgcccgggcaggtacacgcacgacacgggggcactgtcagtgtgggagcaatggtttacaacctccagccctaatctgagcactctcacctgtgcaatctgaaaggaacaggagacttgcaggaaagacagtgcctggatttaacttaaaggaactaaaaatgttggaatttttactcttgatatccttccaaatcaactctctcaatgttcccatcctcaaaactatcatatggggtaactgaggcagtcagagatttactgactcaatgtcactcaattgattctgagttcactgctgattacatccgaccaaactgctttttctgaagtctactccgtttaatcatgctggtgatgattttgtgcggnttctgggacaaacttcacctggctgnaaaaaaaacaaatcttgcggngacttangtcttctgtcatttnccattangttcccaattttcttctttggcccttcanaagtcttccatgcaggctgacaccatatgacgggcttaatggagtcacccagttttttaaggtctnttcttgggncactttgnaaagtggatgtacccatgggntttgcttttacccannaaatttaattggaaattaacctgtcaacttnangcnaaaaaaatgggaaccattgaaacngggcacttttttctttattttttaaaaaaacttggnaacttccatttggngggttgttcntttttntttnggcaggaanagggcttttgggcncaaggcccaggaaaccctggggggatttccnattggcnnggaa

SEQ ID NO: 7110 - DNA, 929 bp, Homo sapiens
  misc_feature 2, 4, 585, 599, 603, 611, 612, 613, 618, 635, 646, 647, 663,671, 689, 697, 713, 714, 718, 720, 725, 733, 734, 737, 748,755, 767, 770, 773, 788, 797, 799, 805, 809, 812, 822, 823,826, 827, 831, 832, 835, 836, 837, 842, 847, 850: n = A,T,C or G
  misc_feature 860, 861, 864, 866, 872, 873, 877, 884, 888, 896, 898, 912,918, 924: n = A,T,C or G
gnancactactatagggcgaattgggccctctagatgcatgctcgagcggccgccagtgtgatggatatctgcagaattcgcccttagcgtggtcgcggcccgaggtacagaaggcctacgggagtcatgactccaggaataaagtctgggcatataattcaccctgagccaaagcaaactttaaaagtgccatttaaaaaccccataatgggtaagtaatgagtgaattagaagtttggtgaattttatgtgaagtgaaaataagaaatttcactacacacatagctataatttacaccataggggaatggatagttatcttgtttttttcttttgggggcgagggggctgtttttttattacccagccacctaccaatagggtttttgttttaagtctattacttgctgctgttatgggtgattatggaactgctgtacctgcccgggcggccgctcgaaagggcgaattccagcacactggcggcccgtactagtggatccgagctcggtaccaagcttggccgtaatcatggtcatagctgtttcctgtggtgaaaattggtattcccgcttaccaaattncacaccaacaatancaanccggaagnnntaaantgttaaagcctggggtncctaatgagtnnacctaactcacaattnattggcgntgcgcttcacttgccccnttttccanccgggaaaccctgtcnngccnancttgnatttaatnnatnggcccaccccncgggggngaaggcgggttngcntanttggggcgcttcttncgcttcttngntaaatnactnctnggctcgggtnnttnnggtnnggnnngcggnttaanttncttaaagggnnggnantccggnnttcncaaaatntagnggttaccngnaaaaaacatttttnccaaangccccnaaagt

SEQ ID NO: 7111 - DNA, 758 bp, Homo sapiens
  misc_feature 404, 469, 536, 579, 616, 620, 625, 626, 627, 631, 643, 644,650, 661, 669, 675, 680, 682, 685, 686, 690, 693, 695, 697,698, 700, 703, 706, 707, 708, 709, 711, 713, 714, 715, 716,718, 720, 721, 722, 723, 724, 725, 726, 727, 732, 733: n = A,T,C or G
  misc_feature 738, 740, 741, 742, 743, 745, 747, 748, 755, 757: n = A,T,C or G
tcgactactatagggcgaattgggccctctagatgcatgctcgagcggccgccagtgtgatggatatctgcagaattcgcccttagcgtggtcgcggccgaggtacttctttagagcactgaccttatatccactgccagcagattcatcccagggtccctgttcatctggtcaatttacttcctctgctccagcagaccttctttgttcatgtcctcaagaccctgttttcgggcagcactttgctgtggaccttgctggactgaacaaaggaggaccaaggcgggaataaagacaaagactgaagagtatgttttgaagaagggggtcaggggactccttgcttctagtgaacaagggcccccgcgtacctgcccgggcggccgctcgaaagggcgaaattncagcacacttggcggccgttactagtgggatccgagctcggtaccaagcttggcgtaatcatggncataagctgtttcctgtgtgaaattgttatccgcttcacaattccacacaaacatacgagccggaancataaagtgtaaagcctggggttgcctaatgagttgagctaantcacattaattggcgtttggcgcttcacttgccccgntttnccagnnngggnaaaccttgttcnngcccanctgcattaaangaatcggnccaacnccccnangannaggnatntntnntnttnggnnnntntnnnngngnnnnnnnnaaatnngctcnannnncnanntaatagngnc

SEQ ID NO: 7112 - DNA, 684 bp, Homo sapiens
  misc_feature 1, 2, 9, 15, 16, 22, 24, 25, 31, 32, 36, 37, 38, 40, 41,47, 55, 56, 61, 63, 64, 65, 73, 74, 79, 82, 87, 89, 92,99, 105, 109, 118, 120, 122, 124, 129, 133, 272, 278, 300,430, 431, 439, 441, 452, 457, 479, 484, 485, 488, 489, 490: n = A,T,C or G
  misc_feature 493, 515, 518, 527, 532, 537, 550, 560, 561, 568, 586, 601,607, 613, 619, 620, 624, 629, 642, 651, 666, 677, 682: n = A,T,C or G
nnggttganctttanntttatntnnatggtnntatnnnannttttcnatttattnntttcntnnnttattatnntgttnttnaattntnatnattattntatatnatangattagatnantngnattgnaatnactcctatagggcgaattgggccctctagatgcatgctcgagcggccgccagtgtgatggatatctgcagaattcgccctttcgagcggccgcccgggcaggtacgcggggagcagggaaccgctcagatacccttccncaccgnggaaactttgttctttaccctntttgacgaaaaatcttgctgctgctacactctttgggtccacaccacctttaagagctacaacgatcaccacgacagttctgcggctacatttcttgaaagttcagctgacacctcattactccactcannaagggtangnaaactctcatnacaantatttttgaaagggataccaanacttnncannnacnccaaacaatctttttaaaccantcntgttaaacnatcancaacnttgttgtaatggntcccaaccgnnccttttnaattttcttttggtaaangcctcaagtctgaanggaacntcaacngtaaanncccnccttnttggggaaaaggngtaaaaccncaaaaccttcttggngatcaaccaantctantg

SEQ ID NO: 7113 - DNA, 893 bp, Homo sapiens
  misc_feature 487, 587, 598, 611, 639, 660, 672, 694, 713, 724, 735, 759,764, 769, 779, 795, 800, 806, 812, 825, 828, 832, 837, 839,840, 846, 849: n = A,T,C or G
gactcactataggggccgaattgggccctctagatgcatgctcgagcggcccgccagtgtgatgggatatctgcagaattcgccctttcgagcggccgcccgggcaggtactttttttttttttttttttttttgtagagatgagggcttgctatgttgaaaagcctgatttcaaactcctggcctcaagcaatcctcctaccttggcctccaaaaagttggaattacaggcatgagcccccacccacccatttaaaaatttttctataaccttttgccaacttagaatatgcaaaaaaattatatttaattatgatatgaatttcacttgttttctggggtaaatacatattggaaggtttcatatcttgtttcaaatttcatttaaatgaaaatatttcaaaatgtacatagtttgagccttataaataatatgggcacaccatcaatcaatttgccagaaaaagatcttgattttgctctgcanatgtcaagcttgaaagcctgagcagataaatgaacttaaatttaatggaaatgctttaaaactcaactatagaaattaaggtcctctttggtaaaattgnaaaaataaccntttggaaatcctnttttaagaattatttaaaaacttggggncccaaggttgaactataaatncctactacaaanggcaataaattaggtggttccncttcttggctatgaaaaanaattttttttnttttttggccnggaaacacaaaacagaaacccggntcaanactgnggtacctttntaaatgaaaggccccnctttntgaaantatttngccaaacatacanggncttnaaacnanngttttnttntttggaaaatcttcctcaaaaagaaatgttaaatgggccaattt

SEQ ID NO: 7114 - DNA, 513 bp, Homo sapiens
  misc_feature 130, 150, 151, 194, 209, 210, 228, 235, 251, 264, 270, 286,298, 308, 325, 330, 334, 337, 339, 342, 355, 364, 381, 383,387, 393, 399, 400, 403, 409, 413, 416, 427, 429, 430, 432,435, 437, 440, 445, 449, 451, 452, 457, 467, 471, 474: n = A,T,C or G
  misc_feature 477, 478, 479, 480, 484, 486, 494, 498, 499, 500, 502, 507,508, 511, 513: n = A,T,C or G
ggcgaattgggccctctagatgcatgctcgagcggccgccagtgtgatggatatctgcagaattcgcccttagcgtggtcgcggccgaggtactgagctccacaaacgtggccatggttggtgcggaaangattctgagtgagcaggtannaagttctcacgtccatgctgtgtccagagttggttccttccanagggttcgtggtctnnctggcttcaagaatgaanccgtggnccttcacagctgtgtngttacagctgttnaagatngaatgtgtccggagtntggttccttaanatattgtctntgagtattctccctttnttgtntgtnttnangtngatgttcatctgncctttcatnaaatttgttatacccananatcnttggtnatatgnntgncaatcncctntantatactcctcntnnanagngnttntgatntctnannatccnctatattatnttantanctnnnntatntnatagaacnttgnnncnatttnnatnan

SEQ ID NO: 7115 - DNA, 914 bp, Homo sapiens
  misc_feature 356, 365, 412, 434, 451, 457, 472, 473, 477, 488, 490, 526,527, 533, 536, 572, 587, 601, 617, 640, 643, 654, 659, 667,673, 709, 735, 744, 747, 756, 778, 791, 793, 805, 806, 823,824, 825, 827, 833, 842, 848, 865, 885, 889, 890, 901: n = A,T,C or G
  misc_feature 908, 913: n = A,T,C or G
gaatgggccctctagatgcatgctcgagcggccgccagtgtgatggatatctgcagaattcgccctttcgagcggccgcccgggcaggtacctggggacctctttatccacagaggtccacatatcaaccactcattacattattgcttaatgaaagcttgtggatttttttcttctagaaactgcatgttttcctcttccaagaagtgcttgtgatcactcgagccgtcacccacaatgagcagctttgctaccggctgtacctcggccgcgaccacgctaagggcgaattccagcacactggcggcccgttactagtggatccgagctcggtaccaacttggcgtaattattgncatagctgnttcctgtgtgaaattggtatccgctcacaaattcacacaaacatacnaacccggaagcataaaagtgtnaaagccttgggggtgcntaaatngagtgaagctaactnnacanttaatttgcgntncgcttactgcccgcttttcaagtcggggaaacctgnncgtgcnagnttggcattaatgaaatcgggccaacgccccgggganagggccgggttgggnaattggggcgcttnttccgctttccttggnttacttgacttcgcttgggctcngancatttgggttncggcnaagcggtntcaagncaattaaagggcgggaaataccgggttttccccaanaatttagggggataaccccttgaaanaatttttgngcnaaaagggcnaataaaaaggccagaaaccggnaaaaagggccggntngttgcgtttttnnaaaggcttccccccctnnngngcattnaaaaaatcnactctnaattataaggggggaanacccgttcggacatttaaanaacnngcgtttccccntggaagntcccnt

SEQ ID NO: 7116 - DNA, 926 bp, Homo sapiens
  misc_feature 61, 338, 509, 512, 624, 632, 635, 691, 692, 709, 713, 732,739, 786, 802, 803, 814, 816, 819, 828, 836, 841, 845, 852,858, 864, 866, 876, 891, 909, 910, 911: n = A,T,C or G
tgtatacactactatagggcgaattgggccctctagatgcatgctcgagcggccgccagtngtgatggatatctgcagaattcgcccttagcgtggtcgcggccgaggtacagaaggcctacgggagtcatgactccaggaataaagtctgggcatataattcaccctgagccaaagcaaactttaaaagtgccatttaaaaaccccataatgggtaagtaatgagtgaattagaagtttggtgaattttatgtgaagtgaaaataagaaatttcactacacacatagctataatttacaccataggggaatggatagttatcttgtttttttctttngggggcgagggggctgtttttttattacccagccacctaccaatagggtttttggtttaagtctattacttgctgctgttatgggtgattatggaactgctgtacctgcccgggcggccgctcgaaagggcgaattccagcacactggccggccgttactaagtggatccnaanctcggtaccaagcttggcgtaatcatgggcatagcttggttcctgggggaaaatgttattccgctcacaattccacacaacataccaacccgaaacataaaagggtaaaccntgggggtnccntaatgagtgagctaactcacattaattgcggtgggcttaacttggccccttttcanntcgggaaaccttgtcgngccnacttggattaaatgaatcngcccacnccccggggagaaggcggtttgtgtattggggggcctttttcgctttnttggttaattgaattnnttggcttcggncnttnggttgcggnaaaccggnttaanttantttaaangggggnaattcngntttttcaaanaaataaggggataancccagaaaaaaattgtgnnncaaaggcccccaaag

SEQ ID NO: 7117 - DNA, 734 bp, Homo sapiens
  misc_feature 3, 4, 8, 10, 13, 19, 23, 35, 40, 49, 52, 56, 63, 68, 70,79, 80, 91, 97, 100, 108, 110, 125, 133, 135, 233, 245,346, 354, 358, 365, 366, 386, 387, 388, 403, 410, 415, 449,451, 497, 499, 502, 510, 515, 564, 569, 574, 581, 584, 586: n = A,T,C or G
  misc_feature 587, 605, 626, 633, 636, 638, 642, 656, 669, 674, 679, 681,702, 709, 714, 716, 727, 733: n = A,T,C or G
ttnntatntnatntttttntttntatatattattntattnttttgtatngtnttantattttntattntntatgatttnnttattataatntttatnttntatagtanangtttgatctatttantatactantnactatagggcgaattgggccctctagatgcatgctcgagcggccgccagtgtgatggatatctgcagaattcgcccttagcggccgcccgggcaggtncgcggggagcanggaaccgctcagatacccttccacaccgttggaaactttgttcttaccctcttgacagaaaaatctttgctgtctgctcactctttgggtccacactcacncttttaanaagnctacaanngtatacactcacgtacagtnnntgctggcatttcatntctttgnaagtntcatgtcgacatctcactaatactccactcaagnangtgggagtaataccttccagtaccatcaattcttgtaaaaggtatncnaanaccttctncatgnaacaaccaatccaatttcttttttaatcaaggccttggttaatccaacnaccanccttntttgtantangnngtccccaaccggggcttnttcaatttttcttttggaaanggccccnagncnggangtaaccccaacctntaaaccccctttntttgnggganangtggtaaacccccaaaccttncttgggntaccnanccaagtctagngggtant

SEQ ID NO: 7118 - DNA, 742 bp, Homo sapiens
  misc_feature 1, 6, 7, 11, 14, 18, 21, 23, 27, 31, 34, 38, 49, 52, 53,56, 60, 64, 67, 71, 74, 75, 85, 93, 105, 110, 115, 117,118, 124, 127, 259, 290, 292, 310, 317, 353, 367, 375, 386,398, 427, 434, 459, 466, 469, 476, 480, 485, 489, 493, 497: n = A,T,C or G
  misc_feature 502, 510, 534, 540, 544, 547, 548, 549, 566, 579, 585, 593,602, 611, 612, 617, 620, 627, 630, 631, 632, 643, 647, 650,665, 669, 683, 688, 693, 698, 705, 708, 720, 721, 723, 725,730, 732: n = A,T,C or G
ntctanntatnatntttnttntnttantatnatnatancttgtaataanttnnttntatntttntcntccnctnnttaatcattntatttttntataaattcagntatgnatctntnnaataanacnactcactatagggcgaattgggccctctagatgcatgctcgagcggccgccagtgtgatggatatctgcagaattcgccctttcgagcggccgcccgggcaggtactgagctccacaaacgtggccatggtntggtgcggaaatgattctgagtgagcaggtntnaagtctcacgtcctgctntgtccanagtttggttccttccagagggtttcgtggtctcganttggccttcaaagnaatgaaanaccgtggtacncttcaccagttnttgtagttttacaagccttgtttaaaagnattgttngttgatctttgtggagttttttgtntcccttntcnagaaatngttnatccntggnaagntttnttctncacccctnttcttgtggttggggattatttgntagggnttgnttnnngctttgtaccttttttnaaaggtaaattgnaaattnccccgttnaatataccnttgtttcannatagnggnttgaaantcnnntttttgtatangccnttnctattaaaaaagggntttngtttggtttggttnacccncccanaaaangtaaggnttngaagtgccaaanncnanagtcnanatgttatttt

SEQ ID NO: 7119 - DNA, 916 bp, Homo sapiens
  misc_feature 454, 506, 510, 537, 554, 556, 562, 564, 580, 590, 594, 601,610, 613, 622, 623, 626, 635, 643, 647, 649, 664, 669, 672,684, 686, 695, 698, 705, 714, 715, 717, 721, 723, 724, 725,728, 729, 730, 731, 732, 734, 735, 737, 747, 755, 756: n = A,T,C or G
  misc_feature 762, 769, 770, 771, 775, 776, 779, 783, 785, 788, 789, 790,793, 794, 795, 797, 798, 799, 800, 801, 802, 803, 807, 808,809, 813, 814, 815, 816, 818, 819, 820, 821, 824, 825, 826,827, 830, 831, 832, 833, 834, 835, 839, 840, 841, 842: n = A,T,C or G
  misc_feature 843, 844, 845, 846, 847, 850, 853, 854, 856, 857, 858, 860,861, 863, 864, 865, 866, 867, 868, 872, 873, 874, 875, 876,879, 881, 883, 884, 885, 886, 887, 888, 889, 890, 893, 894,895, 896, 897, 898, 899, 900, 901, 902, 903, 904, 905: n = A,T,C or G
  misc_feature 907, 910, 911, 913, 914, 915, 916: n = A,T,C or G
atgtatcgactactatagggcgaattgggccctctagatgcatgctcgagcggccgccagtgtgatgggatatctgcagaattcgccctttcgagcggcccgcccgggcaggtacattttgtcacggagtccacagagctgagcttttgagcagactctgagaagtatcattgcttgtgttgaaagaatcaacaggatttaagtttctctttttaaaaattgcactgaagaaaggccgggcgcggtggctccccctgtaatcccagcgctttgggaggccgaggcggggggatcacgaggtcaagagatcgagaccatcctggccaacatggtgaaaccccgtctctaataaaaatacaaaaattagccgggcatggtgacgtgcacctgtagtcccagctactagataggctgaggcaggagaattgcttgaatccggaggcggaggttgcantgagcccagatcgtgccactgaacttcaacctgccaatagagcgagactccntctnaaaaaaaaaaaaaaaaagaaagaaatngctttgaagaaaatccncncatcanangaaagcttattttctngatgggggcntttnaaaaaanagaattttnaancatgttttnntanccatttggntgaatganggtnancctggcttgaggcantcgtnaanctttggggggtngngtttaaaantcncctttgngccccaaanngncccntnnnttnnnnnanntnaagggtttcntttttttnnccccanttttttnnntaannggngatntnttnnnaannntnnnnnnntttnnntatnnnntnnnntannnnaannnnnntttnnnnnnnnntanttnnannntnntnnnnnnaaannnnnacntntnnnnnnnnatnnnnnnnnnnnnntnttnnannnn

SEQ ID NO: 7120 - DNA, 726 bp, Homo sapiens
  misc_feature 3, 5, 6, 13, 15, 19, 20, 23, 24, 26, 28, 29, 30, 31, 33,36, 37, 38, 40, 42, 44, 48, 67, 76, 81, 82, 98, 102, 103,112, 123, 258, 276, 294, 354, 372, 393, 394, 412, 421, 428,445, 451, 469, 485, 499, 500, 506, 508, 511, 515, 526, 552: n = A,T,C or G
  misc_feature 558, 560, 566, 570, 576, 579, 583, 594, 597, 628, 632, 633,647, 649, 662, 671, 674, 684, 694, 696, 699, 706, 715, 720,724: n = A,T,C or G
tantnnataattntnatannatnntntnnnntnttnnntntntnttanattatataaattctaattngtttatttntattnntcgaactatattatcntatnngaattggtnatttatttatntcctatagggcgaattgggccctctagatgcatgctcgagcggccgccagtgtgatggatatctgcagaattcgcccttagcgtggtcgcggccgaggtacgcgggattgtgaccccgttgcatgaagtcaggtntggagtttttccacttgntggttatcattgttgctnctgctcaagaagttactgatttttggtaacattttggattttggattttttcacatttangggatacctaatgttganagagtactaatgccgtacagnntccctgtaacttgctgcnctgggttgngttctgnaactgggggggctactngaattngaatttatctaggagggnggccctttttttggtngttgtcactttttnntgttananaantgtnagtctcttggncaattttgtaagatttggaagtttanttaacnanctttgnatantggggnccntttnaaatattgttngtngaatgtcctaatttacccccttgtggttttngtanngactccaactcccnantaagatttttttngaccaaggnccnttttaaatgnggtcctaaancntcnttgtttncaatttttnttaanttcntt

SEQ ID NO: 7121 - DNA, 761 bp, Homo sapiens
  misc_feature 4, 8, 11, 15, 18, 23, 38, 49, 51, 53, 59, 64, 79, 80, 82,83, 88, 94, 96, 97, 98, 107, 114, 125, 127, 133, 134, 140,141, 299, 312, 423, 425, 451, 461, 470, 478, 495, 534, 546,548, 557, 562, 572, 575, 592, 598, 604, 615, 622, 630: n = A,T,C or G
  misc_feature 632, 639, 643, 644, 646, 648, 659, 664, 665, 670, 679, 695,698, 704, 710, 716, 719, 722, 725, 734, 747, 753: n = A,T,C or G
ttcnttantantaantgnattantaatttttttattantttaattttantntnattttnttcanatcattttttttctnntnntaatngtgatntnnntggaacttnactttangatatcggttntntatttnntaaacnntcatatagggcgaattgggccctctagtatgcatgctcgagcggccgccagtgtgatggatatctgcagaattcgccctttcgagcggccgcccgggcaggtactggatcagtttctcctgcgtgaggtatgggtgacactcaacctggttagtcacntggtttaatattnttcagtccaggtttgtatcaatgagccttctcgatctgggaagtggttgaaaatattgaagactccctaaggtgctttatcaccagctccctcgttccaccagcttccttncnatggacccctttctcagtgccattcncaaaagtaanacgttttcncttttttncccaccttggattccantaatttaaccacttttttattcaattcctttttgggggnggaaaaaaaaangnttctattcnccccnaagttttctnttngtaaatttcccccttgnttgggnccccanggtttgtaaanattaaangtaaatangntaaccgntttnncnangggaataatgnccttnntaggnccttttacnaagtggtttccccctnttngaaagngggggnttactnttnacnttnaaaaaaggnggccttttttttntccttnaaacaaat

SEQ ID NO: 7122 - DNA, 802 bp, Homo sapiens
  misc_feature 5, 6, 9, 10, 16, 19, 30, 32, 36, 38, 43, 45, 50, 51, 57,63, 65, 69, 76, 77, 79, 82, 83, 93, 98, 99, 103, 112, 121,124, 134, 150, 324, 325, 335, 350, 360, 375, 379, 390, 391,406, 407, 431, 436, 446, 459, 470, 475, 478, 479, 487: n = A,T,C or G
  misc_feature 489, 492, 506, 507, 518, 522, 526, 532, 541, 549, 551, 554,563, 574, 581, 588, 622, 646, 653, 656, 660, 663, 670, 675,680, 681, 684, 686, 687, 697, 705, 736, 740, 749, 752, 753,759, 763, 767, 771, 778, 789, 794, 795, 796, 797: n = A,T,C or G
tctgnnctnntattcntantttgtaattcntnattntnattantnttctnnttgtantctatncnttcntataatnntnatnncattaattgnttgtnntatngcttacttnatattaatngtntagtaatatnattattttaacactantcactataggtgcgaattgggccctctagatgcatgctcgagccggccgccagtgtgatggatatcttgcagaattcgcccttagcgtggtcgcggccgaggtacaaaagccaagatgcccattgtgggcctgggcacttggaggttctcttctcggcaaaagttgaaaagaanncggtgaaggntggccaatttgatgncagtaatatntgtccacatttgacntgtngctctattttnntatttagtaattcannccatgtagcgtttgggtagtaagncccanttcccaatgnagtaatggattcncacagtagganagggnctnnatgtaatngnccngggaaagggaacanntgttttctatntggnttcnagtcanaagggttgnttgtgtcncncanattttttcnttttttgggantaagganccccccnttttgtttggaaggggtaaaaatggccccttttnttgtaaggaaatggtaaccccccnttttaanagngggnacnccctggnaaaanccttnngangnnccttaattcntagggggnaaccggttatttaattcctttttaatttttncaanccttgggtnccnncaaacnaagngggnaatntttctanataggtaaccnttggnnnnggaat

SEQ ID NO: 7123 - DNA, 820 bp, Homo sapiens
  misc_feature 3, 6, 8, 9, 16, 17, 21, 23, 28, 31, 35, 44, 46, 50, 63, 82,85, 88, 102, 103, 105, 106, 110, 113, 120, 121, 122, 123,125, 132, 135, 183, 300, 304, 305, 309, 313, 319, 320, 323,335, 338, 348, 358, 384, 396, 398, 404, 410, 413, 433: n = A,T,C or G
  misc_feature 438, 441, 445, 450, 453, 456, 458, 471, 473, 493, 502, 514,530, 536, 554, 555, 577, 581, 592, 593, 604, 606, 613, 614,625, 631, 632, 637, 642, 644, 654, 660, 669, 672, 677, 689,693, 700, 706, 726, 739, 740, 748, 758, 770, 771, 775: n = A,T,C or G
  misc_feature 776, 785, 787, 789, 790, 798, 800, 808, 810, 811, 814, 815,818, 820: n = A,T,C or G
ctnatntnnttataannctcntnttatnatnatanaatattatntngttntcataatatcatnttttattattattataatntantantattatcacttatnntnnactngtntggtttnnnntnataaatnatnttgggcgaattgggccctctagtatgcatgctcgagcggcacgccagntgtgatggatatctgcagaattcgccctttcgagcggctcgcccgggcaggtactggatcagtttctcctgcgtgaggtatgggatgacactcaacctggttagtcactggattatnattnnagcntcangttttnnttnaaataagacctntcnaatacttggnaaagttggtnttgaaaatttctgagtaccctccatnggtgccttttananacaagnctcttntangttatctacgctagtctttnacttnacnatgnggcgntantcncnaagtggccatttncnaaagtaaaactgttattccnctttatttntcaatcattggnattccaattaattttnaactcnttttttaatatcaattanntttattgtggggtgtaaaaaanaaangttacaataanncccctaaagantncttttgnnaaattcccccntttggnntgggnacccnangtttgggaanatttanaagtgaatnatngatancgtttctcacangatnattaagntctttnaaatccttattcaaaggtgnttctccttatggnnagtggggnaatatttttncttctaaaaaanngggnnctttatttntncnntttcaacnanaggggggntnnttnntantn

SEQ ID NO: 7124 - DNA, 434 bp, Homo sapiens
  misc_feature 306, 352, 402, 428: n = A,T,C or G
ggcgaattgggccctctagatgcatgctcgagcggccgccagtgtgatggatatctgcagaattcgcccttagcgtggtcgcggccgaggtacagaaatagacggccgtgtcgtcagatctcaggctgctcagctccaagtaggcggtgtttgtggacatgtccctggtcatggaaattctgcccttgaatctctgtgcataccctgagctaccactgttagggtccatccaccccatccactcaaggccttgtccagtggcctgtcgcacccaattgagatgaacagtggtgaaggtgtatccanaagccttacaggagaccttcactgaggccccaggctttttcacctnagccccagactgcaccaggtgcacctgggagtgggcacctgtagatgccnccaccaagaagaggatccttcaggtncaggtc

SEQ ID NO: 7125 - DNA, 759 bp, Homo sapiens
  misc_feature 1, 9, 12, 20, 24, 25, 26, 53, 59, 60, 64, 65, 66, 73, 75,76, 78, 79, 89, 93, 98, 106, 107, 108, 110, 111, 114, 116,117, 119, 125, 129, 132, 137, 138, 286, 287, 337, 338, 383,400, 407, 441, 443, 444, 449, 454, 458, 463, 476, 481: n = A,T,C or G
  misc_feature 485, 505, 541, 546, 547, 549, 553, 555, 558, 567, 571, 582,583, 584, 586, 595, 607, 616, 634, 638, 640, 647, 653, 661,679, 687, 706, 707, 737, 743, 751, 752, 756, 757, 758, 759: n = A,T,C or G
nttctaatnatnattatttncatnnntttatattttataaatccatttttatnatttgnnttcnnnatatatnanntnnttatattttnattntattnatatagtnnngnnatntnntntttaanctantcnctatnnggcgaattgggccctctagatgcatgctcgagcggccgccagtgtgatggatatctgcagaattcgccctttcgagcggccgcccgggcaggtaccctaagacgctgctaattgactgccacttcgcaactcaggggcggctgcattnnagttaatggggatcaaaatgatttcaccttttttattgatgcttccaaanngttgcacttggccttctctttcccaactgtacaaaatgtcccaanaggtttggagtaataanatggaancattaaattttttaggcattaaaaccagtaagcnannttctngtcgnaccnctctnattttttttaatnaaaanttanataccttgtagtccaccctnttcttcttttgtaaaaaccaaaaaccaaaaagtggncgggnngntgtntnatnttttccttncaantaattggaatnnntnttttctaantcccccgatggnaaaaatggnggtttcccaagatgggtnatangnggtaccncctttntttcaacntccttttggaaccttaanttaattgnggccatttttaattgtttnnaatttcaaaccaaaaaggtccttctttggnaggggncatttttnnttcnnnn

SEQ ID NO: 7126 - DNA, 469 bp, Homo sapiens
  misc_feature 148, 172, 175, 185, 245, 248, 266, 287, 293, 325, 347, 375,391, 415, 420, 437, 443, 447, 451, 461, 467: n = A,T,C or G
ggcgaattgggccctctagatgcatgctcgagcggccgccagtgtgatggatatctgcagaattcgcccttagcgtggtcgcggccgaggtacttttttttttttttttttttggcgtggagagcaagtgatttattaaagcaagacntttgaaacctttacattctgcaantgnggatcagggntgtcatttgaaagacagtggaaaccaggatgaaagtttttacatgtcacacactacaatnttnttcaatattttcaccagnacttccgcaattgaggcttcntttctnaagggacaatcttgatccgtgcatttcttcantcctaacttggctgcaaaaagnttttcagaggggcaatcaaatttttggnaagacctataactttntaaccagaaggtttcacttaaatntaaanaaaaaaaaatttttttnccatgncttnaaanaaaaccaatngaagcntg

SEQ ID NO: 7127 - DNA, 440 bp, Homo sapiens
  misc_feature 316, 340, 366, 419, 436, 439: n = A,T,C or G
tacttagggcgaattgggccctctagatgcatgctcgagcggccgccagtgtgatggatatctgcagaattcgccctttcgagcggccgcccgggcaggtacagacaatgtgaagttaggacttaagtaaaggtagtatttatttactaagaataaactttcttttaagaagtatatagaaagtaaaataaatatttgttgctttatattcagccatacttttctactcaccctgggctgcaaggcaaacaactattttattattattattactttatagagacggggtctccttatgttgtccaggctgttctcnaactcctgggctcaggggatcttnctgtctcagcctcccaaagtaccttnggccgcgaccacgctaagggcgaattccagcacactggcggccgttactagtnggaatcccgagctcggnacna

SEQ ID NO: 7128 - DNA, 898 bp, Homo sapiens
  misc_feature 2, 5, 6, 593, 609, 640, 673, 679, 682, 687, 698, 711, 808,813, 847, 871, 873, 876, 881: n = A,T,C or G
tnagnnatcgactactatagggcgaattgggccctctagatgcatgctcgagcggccgccagtgtgatggatatctgcagaattcgccctttcgagcggccgcccgggcaggtacccagagtcacacagctcacgagtcagtggcgggactggagattacactgaaggttggtgcactgtgctccctgcttctgtgcaggtgtcaccctcctccaccaggcagactttgagtcgtgcaaacagaaaagatgctgcccacacttcagggccatgcttccagtccccgtgagctacccccagcaggctcctgtacctcggccgcgaccacgctaagggcgaattccagcacactggcggccgttactagtggatccgagctcggtaccaagcttggcgtaatcatggtcatagctgtttcctgtgtgaaattgttatccgctcacaattccacacaacatacgagccggaagcataaagtgtaaagcctggggtgcctaatgagtgagctaactcacattaattgcgttgcgctcactgcccgctttccagtcgggaaacctgtccgtgccagctgcattaatgaatcgccaacncccggggagaggcggnttgcgtattgggcgctctttccgctttcttngttcaattgactcgcttgggcttcggccgttcngctggnggngagcngtattaacttnactcaaaggcggnaataccggtttttcacaaaaaataaggggataacccaaggaaagaacatttgagccaaaaggccagcaaaaaggccaggaaccgtaaaaagggccgngttgnttggggttttttcataggttccgcccccttgacnagcttaaaaaaattgaccttaaantnaanggggngaaacccacaggatttt

SEQ ID NO: 7129 - DNA, 872 bp, Homo sapiens
  misc_feature 555, 558, 583, 618, 675, 681, 706, 712, 733, 734, 736, 774,785, 789, 796, 803, 814, 842, 859: n = A,T,C or G
cgactactatagggcgaattgggccctctagatgcatgctcgagcggcccgccagtgtgatggatatctgcagaattcgccctttcgagcggccgcccgggcaggtacgcggggtgtcccatatttttcagggataaagacatagagctacaggtaatctcagatctcagtgtccagtaatatttattttataagagaaaaaaaccgaaaccataaaagttaaatgactggcccaggtatacatgcagctgcttcatgcaaaagtcctaccaggagcccttaccagcaccactgtctcagcagtttatccctgactttctgcttgctgccagtgaattgtttttgaaatcttttggaaaacttaaatgtgtttggaagtacagtagagtacttaataaatcactagcttctgtgtatgtatggataagattacttataatttatagtcagaagctttgtcatctagattggcttttttagattaccatacatggatgcaattttatgaagtggtgtttcttaatgaaataactatgccctcaaagacctcatgtnatnaaaaattccattatagaaacagtanttgggggacaggaaaaaaaaaaaaaaaaaaaagtncttgggcgggaccacccttagggcgaaattcaagacactggcgggccgttactaggngggatnccagctcggtcccaaccttgggggnaacaangggcatagctggttcccgggnngnaaattggttttccgttacaaattcccacaaaattccanccggaagcctnaagngtaaagnccggggngcctaatgggnggcctacctccattaattgggtgggctnactgcccgtttccagtngggaaacctgtgg

SEQ ID NO: 7130 - DNA, 886 bp, Homo sapiens
  misc_feature 4, 5, 6, 29, 171, 174, 176, 215, 356, 362, 373, 380, 387,388, 390, 417, 459, 471, 552, 597, 599, 600, 601, 602, 603,604, 605, 607, 609, 610, 611, 612, 614, 615, 616, 617, 618,619, 641, 658, 684, 691, 695, 724, 728, 748, 751, 771: n = A,T,C or G
  misc_feature 792, 795, 799, 826, 854, 863, 865, 866, 870: n = A,T,C or G
cggnnnacgactactatagggcgaattgngccctctagatgcatgctcgagcggccgccagtgtgatggatatctgcagaattcgccctttcgagcggccgcccgggcaggtacgcggggagtgcaccaagatggccgcccccgtggatctagagctgaagaaggccttcncanancttcaagccaaagttattgacactcaacagaaggtgaanctcgcagacatacagattgaacagctaaacagaacgaaaaagcatgcacatcttacagatacagagatcatgactttggtagatgagactaacatgtatgaaggtgtaggaagaatgtttattcttcattcaaggaagcanttccangcagctgtttnagaagcngaaaatnncngaagaaaaaattaaagaactagaagtnagtttttattggcaataggagttaacttttgggagaaagtantaatcttattgngtcatattaaatgaaaatgtatgcctgcctgccaaaagtaatggcatattaatttttaattttctataattaccgttggancccgtgaagctttcatattcatattcatagcgcattattagaccnannnnnnnanannnntnnnnnnaagtccttgggccgggaccacncttagggcgaattccanccactgcgggccgttactagtggatncgagctnggtnccaagcttggggtaatcatggcataactngttnctgggtgaaattgttttccntcnaattcccacaacattccaanccggaagcttaagtggtaaanctngggngcctaatgaggggcctactcaattaanttggttgggctcctgccccttttcatcnggaaacccntnntgcnacttgatttatgaatc

SEQ ID NO: 7131 - DNA, 889 bp, Homo sapiens
  misc_feature 1, 3, 175, 179, 182, 555, 570, 632, 641, 646, 650, 659, 669,679, 698, 708, 709, 718, 738, 743, 750, 767, 768, 773, 775,776, 782, 786, 787, 801, 823, 824, 830, 833, 838, 852, 855,863, 864, 874, 884, 887: n = A,T,C or G
ngntatcgactactatagggcgaattgggccctctagatgcatgctcgagcggccgccagtgtgatgggatatctgcagaattcgcccttagcgtggtcgcggccgaggtacgcgggggacctgctgtgctcttgcttgcacagtgtcctggagctggacctgactctggttttncagnaancagttggctaaaggcagcaagctgcttcctctgctgcctgaaataccagattcccaatggcgaagattgagaaaaacgctcccacgatggaaaaaaagccagaactgtttaacatcatggaagtagatggagtccctacgttgatattatcaaaagaatgggtgggaaaaagtctgtaatttccaagccaagcctgatgatcttattctggcaacttacccaaagtcaggtacctgcccgggcggccgctcgaaagggcgaattccatcacactggccggccgttactaagtggatccgagctcggtccaagcttggcgtaatcatggtcatagctgtttcctgtgtgaaaattgttatcccgctcacaattncacacaaaatacgancccggaagcattaagtgttaaagcctggggttcctaatgagttgactaacttacattaattncttgcgctnactgnccgnttttcaatncggaaacctntcttgccaancttcatttaatgaatcggnccaccccccnnggagaagcngtttgcctttttgggcgctnttccncttcctncttaatttactcctttnnttggncnnttcggnttgnngcaaacgggtttanctcacttaaaggcggtattccnntttccnaanaattnaggggttccccagnaanaacatttnnccaaaagccncaaaaggccnganct

SEQ ID NO: 7132 - DNA, 902 bp, Homo sapiens
  misc_feature 4, 19, 155, 171, 462, 544, 593, 598, 618, 629, 663, 700,704, 730, 764, 790, 797, 799, 802, 820, 822, 830, 833, 836,856, 860, 863, 865, 867: n = A,T,C or G
ggancgctactatacggcnaattgtgccctctagatgcatgctcgagcggccgccagtgtgatggatatctgcagaattcgccctttcgagcggccgcccgggcaggtacactccacagtgtgggagtgggcccaagcataggggctcaagggtnctgtaacagaattttnggggatttaaatcccttagaggtttccattggttactttgtgtatgccctatgtaaatggagataatatttcccggcatagctgaagtgtgaataggccttatgttctatgcctccagatcctattttcctgcctcatttcctccctgagagatgtcatccccataaatctttatgggaggtggagtgactaatggtctttcttctgtaactgcctcatgctggcttgaagcaaagtccctacctattggggatcacggaactgtcaccctgctctgtctagtggaggcanagtagcttcttgatgcccaggggtggtgtcttcaactggaactggctggaacatttgtcacatgatcttctgaagcttgatngtctctggatgccatccaacagtggaaccgactccttgtctggagaatncagtngacagccttgccccatcttnagaacccagcngcttgtgcaaaaggcaacccaccacttttagccngcaaaatgggccaagcaacttgaggcttccccacaanacanccctccaagaagctgcttggaccttncattcaagccctgtgagaagggaaaccattgcanttctttatgggagcctccttcaaggntgaaaancnttnaatttcaaaaaaaacttngnggcccccnttnaanaaaaaaaagggagacttttngttncanananaaaaagcattttgccaaatattgccaggttttcct

SEQ ID NO: 7133 - DNA, 879 bp, Homo sapiens
  misc_feature 2, 3, 4, 688, 733, 735, 750, 755, 779, 830, 878, 879: n = A,T,C or G
gnnntacgactcactatagggcgaattgggccctctagatgcatgctcgagcggccgccagtgtgatggatatctgcagaattcgccctttcgagcggcccgcccgggcaggtactgtggttatgccgggaaaaagacacaagtccttttccttgaaagataaacaatgaaatatttatgggtgaaatagtgtctgggatttgttttaaaatatattaacacaaaaagtgtgaggaataaataaaatatgaagctgatggtttgctgacagatacattgggttccccgtactattcattcctttgccttaaaaataaaaacactcaaacaaaattagaaaaaaaaaaaagaaaaagaaaaaagtacctcggccgcgaccacgctaagggcgaattccagcacactggcggccgttactagtggatccgagctcggtccaagcttggcgtaatcatggtcatagctgtttcctgtgtgaaattgttatccgctcacaattccacacaacatacgagccggaagcataaagtgtaaagcctggggtgcctaatgagtgagctaactcacattaattgcgttgcgctcactgcccgctttccagtcgggaaacctgtcgtgccagctgcattaatgaatcggccacgccgcggggagaggcggttgcgtattgggcgctcttcgctttctnggtcacttgactcgcttgccttcggtcgttcggctgcggcgagcngnatcacttactcaaangcggnaataccggtattccccagaatcanggggataccccaggaaaaacatgtgaaccaaaaggccaccaaaaggccagnacccgaaaaaaggccgggtgctgcgtttttccatagcttccccccccnn

SEQ ID NO: 7134 - DNA, 883 bp, Homo sapiens
  misc_feature 2, 3, 4, 6, 7, 119, 175, 615, 626, 653, 658, 686, 704, 706,735, 741, 761, 766, 810, 815, 816, 835, 863: n = A,T,C or G
gnnntnnacgactcactatagggcgaattgggccctctagatgcatgctcgagcggcccgccagtgtgatggatatctgcagaattcgcccttagcgtggtcgcggccgaggtactttntttttttttttttttttttggatgggtagtatcatggcatgcttgtatgctatcanaaatactctggtagaaagggaaaatataatgctggagagaaggatgataactgtaggaacaaagttcttcatttgacaaaaaggaatgggatatagtacacacttggagcttaggctttaaataaaacagagacaggtcatccacaggaaaaggcagagtagatatatgggtgcttacagtgaataatgaattagagtaagcccctgagaattgtatcacctacatataaaaagctaaactcaaaatccaatagcccttccaagattagaatatttaagatggaaacacaaagctaatacaaccttttcattactaaatctagttacatgcatatcaggaagagaggtttttttgtttttgtttttccaaattcttctcaggaataagacctacctggactctccactctcttatagtggtatgggttgatacaaacttntttttgcttanatcccaaaaaggaaattcacaaatatnccacngctttagctcatgatgactttgcaaatnccggcagggcccaacacnanaattttttaacatggggtaagcccttttntgtganaaaacctgcaggcgttcatnttaanatctgggaatagggcccctttacctcgggtggcctggactggtnaaagnntttttccagttccttcatngcacccttttttttttttatttttttanccaaagcttaactggctttt

SEQ ID NO: 7135 - DNA, 881 bp, Homo sapiens
  misc_feature 4, 6, 13, 294, 492, 559, 688, 712, 739, 789, 793, 796, 833,846, 871: n = A,T,C or G
atgntngtatacnactactatagggcgaattgggccctctagatgcatgctcgagcggccgccagtgtgatgggatatctgcagaattcgccctttcgagcggccgcccgggcaggtactttttttttttttttttgctgttgttttcttctctgtctttttaactttgcagaaagcccttccagttatacactcagaccctgttcaggacgttggtggccaaacagtccccttttgttaagcgagcgtcccatttttgtttctcttgaaaggtgccctccgggacaagcagancctttctttgggctgtttataattgagccctgaagaaaaacagaaatcattctaaacccaggccaagtgcctccttggcctagctaggcaaagctaaactcacacaagatgaaatctaaccagctggttacctgagaaccaccttcgggagttctccggcttgactgctttcgccttggccaccatctcgagctccancgacagctgaggggtcagggcctctctgtgcagaagagtaggaagagaatcatagctgttggtgaangttaaggttgcattgtttgaaagggtcctatgtcagcttgcaaaatgctatggatctgtaagaatcctgaaagaaatgggttggagaaaaaatttatgacccgtaaagtctaagttgtctttgagtggngcaatttaaccaggaatttttctnttttcggcttaagggttcaaaaaagtnccttttaaaaaatgcggggggatctatttttttcttaatttacataaaanggtnttnataagtttagcccccttgaatacttttggcctttttntttttgccttttntttcccaaaattagagtattttganaaaaagaagg

SEQ ID NO: 7136 - DNA, 882 bp, Homo sapiens
  misc_feature 6, 379, 448, 472, 492, 505, 525, 528, 544, 545, 547, 572,598, 602, 609, 627, 651, 663, 665, 671, 715, 735, 737, 761,767, 770, 774, 790, 801, 802, 819, 821, 841, 848, 856, 864,871, 876, 877, 882: n = A,T,C or G
aggtgnttatcgactactatagggcgaattgggccctctagatgcatgctcgagcggccgccagtgtgatggatatctgcagaattcgccctttcgagcggccgcccgggcaggtactgagctccacaaacgtggccatggttggtgcggaaatgattctgagtgagcaggtagaagtctcacgtcctgtgtgtccagagttggttccttccagagggttcgtggtctcgctggcttcaagaatgaagccgtggaccttcacagtgtgtgttacagctgttaaagatgttgtgtctggagtttgttccttcagatgtgtctggagtttctcccttctggtgggtttgtggtgtcgctgacttcaagaatgaaaccgcanactgtcgtgggtgatcgttgtaactcttaaaaggtggtgtggacccaaagaagtgaagcagcagcaagnatttttcgtcaaagaagggtaaanaaccaaagtttccaccggtngtggaagggcatnttagccggttcccttgcttnccngccgtaccttggccgnnancacccctaagggcgaattccaacancacttggcggcccgttctaattggantccnactccgntcccaaacttggcgtaancatgggccaaagcttgtttccctntgtgaaaaatgntntttccnttcacaattcccaccaaaatacaagccggaaacattaaaatttnaagccctggggggccctaangngtgagcctaactaaaattaattgnggttgnccntaantgcccggttttcattngggaaaccttnntgcccacttgtttaaananttggccaacccccggggganagggggnttgggttnttgggacntttcccnttttnnttaan

SEQ ID NO: 7137 - DNA, 887 bp, Homo sapiens
  misc_feature 7, 22, 135, 185, 192, 193, 197, 200, 203, 204, 213, 215,217, 221, 222, 223, 228, 229, 230, 235, 236, 252, 263, 266,267, 270, 271, 278, 282, 285, 287, 292, 293, 298, 302, 303,304, 306, 309, 311, 321, 322, 323, 327, 329, 343, 348: n = A,T,C or G
  misc_feature 352, 356, 358, 359, 360, 368, 370, 372, 375, 377, 378, 382,385, 389, 391, 409, 411, 412, 415, 416, 438, 462, 470, 472,475, 478, 479, 486, 492, 498, 501, 513, 532, 533, 534, 556,558, 568, 576, 578, 579, 580, 581, 583, 584, 591, 603: n = A,T,C or G
  misc_feature 619, 630, 633, 670, 683, 694, 700, 706, 707, 708, 713, 721,724, 742, 753, 758, 764, 766, 780, 794, 803, 815, 831, 840,841, 848, 858, 877, 879, 883, 885, 886: n = A,T,C or G
tgggtgnctcgactactatacngcgaattgggccctctagatgcatgctcgagcggccgccagtgtgatggatatctgcagaattcgcccttagcgtggtcgcggccgaggtacttttttttttttttttttttnggtttgggttttttttttttttttttttttttttttttttttttttccgnaaaaaanngggnttnttnntttttaaancngnaaannnccttnnnaaaannttttttttttttaaantaattcccccnaannaannaaaattnaaanccncnggtgnnccccnccannngnaanantattcccttnnntttnangggggggggcccanttttnttancttnannntggaaaancncnaancnngaantcnaaancntaaattttggaaggggantnnttnnaaagggccccgggaaaaaaaanggtttcctttttttttttttcccntttaaaancnttnccnnaaaaggnggtttncctttngancggccaaaaaanttttaaaaaaaatttttannncctagttggaaaaggcccaaananaaaaaaaaanttattttngnnnncnncccaaanggggggattttntaaaaaaaaaaacccnacaagtttttnggntttttttaaaaaaaaatttttattttttttaaaaaanaaaaacccccaanaggttgaaggnttcccnaaaaannngcggngggaaaanttnttttttaaaaccttgggnaaaaaaaaagnaaaanaccccncncaaaattttttagntttttttgaaatcncttttttcnccaaaaaaaaantttttttttgggtttngcccccccnnaatttancccaaattancaaaaaaaaccctttttgngnaaanannt

SEQ ID NO: 7138 - DNA, 874 bp, Homo sapiens
  misc_feature 142, 149, 590, 599, 609, 616, 662, 690, 702, 716, 740, 743,756, 758, 766, 780, 790, 799, 812, 846, 853, 860: n = A,T,C or G
gaattgggccctctagatgcatgctcgagcggccgccagtgtgatggatatctgcagaattcgccctttcgagcggccgcccgggcaggtacgcgggagcagggaaccgctcagatacccttccacaccgtggaaactttgntcttacnctcttgacgaaaaatcttgctgtgctcactctttgggtccacaccacctttaagagctacaacgatcaccacgacagtctgcggcttcattcttgaagtcagcgacaccacaaacccaccagaagggagaaactccagacacatctgaaggaacaaactccagacacaacatctttaacaagctgtaacacacactgtgaaggtccacggcttcattcttgaagccagcgagaccacgaaccctctggaaggaaccaactctggacacagcaggacgtgagacttctacctgctcactcagaatcatttccgcaccaaccatggccacgtttgtggagctcagtacctcggcccgcgaccacgctaagggcgaattccagcacactggcggccgttactagtggatccgagctcggtaccaagcttggcgtaatcatggtnataagctgnttcctgtggngaaaatngttatccgctcacaattccacacaacatacgagcccggaagcatanagtgtaaagcctgggggtgcctaatgangtgagctaactnaacattaattggcnttgcgcttactgcccgcttttcangtngggaaaccttgtngngccagctngatttaattgaatnggccaacccncggggggangcggtttggcgtnttggggcgctttttccgcttcctggttcactgantcgctgngcttggncgttcggatggggg

SEQ ID NO: 7139 - DNA, 893 bp, Homo sapiens
  misc_feature 60, 140, 240, 263, 267, 272, 277, 279, 295, 308, 310, 313,326, 345, 348, 352, 354, 365, 367, 402, 407, 418, 420, 431,433, 438, 441, 451, 452, 465, 469, 473, 478, 479, 484, 497,505, 509, 510, 511, 514, 516, 519, 531, 532, 548, 560: n = A,T,C or G
  misc_feature 563, 565, 566, 575, 579, 584, 585, 591, 594, 595, 597, 600,608, 615, 635, 640, 647, 648, 649, 666, 672, 673, 674, 679,686, 692, 707, 710, 720, 728, 729, 730, 736, 746, 751, 768,769, 776, 780, 783, 784, 786, 790, 810, 813, 815, 816: n = A,T,C or G
  misc_feature 820, 824, 837, 840, 845, 851, 858, 860, 864, 868, 869, 874,878, 879, 880, 881, 882, 886, 890, 891, 892: n = A,T,C or G
gggcgaattggccctctagatgcatgctcgagcggccgccagtgtgatggatatctgcanaattcgcccttagcgtggtcgcggcccgaggtaccgacctctctttgtaaatgaaaattactctgattattaagatgttnaagtatatccaaccgtcccagaccacattggcctatttcctcctcttggcaacactgctcgggttttcccctcgcatcatccttatgctatgacactggnctaaataggaataatacatttcnttgngaatntcctnantatactatgagctccntgaggacaaagtncncgnggggcggccatgnccggacaggaggatccggngcncccngnagattcaccangnactgggctaaccgggagtacctgcccgggcggccnctcgnaagggcgaatncngcacactggcngnccttnctngtggatcctnnctcgggaccaagnttgngcgnaattnntggtnatagctgctcctntgtgaaangtgnnnttncngcntccagagacccnngcccttttcctatgcncggaatcttaanagngnnaaaccccgngggngcccnnatgggnggnncntcnttaaattnattccgnggggcgctcacttgtcccgnttttncagttannnaaaaccttacgttgccnaggttnnnttaantgaattnggccanctcaccgggggagangcncgcttttggntttttggnnngcttcntttccttgcntggcntcatctataatgggcgnnagttcangccntcnngnttgncgtcgtagccggttcattcncancnnaagnggcngtgaatagggggnttntcacnaggaanttgaggngntttncgcnnggaanaaannnnnttgncctnnng

SEQ ID NO: 7140 - DNA, 880 bp, Homo sapiens
  misc_feature 465, 500, 542, 552, 582, 592, 594, 601, 608, 609, 615, 648,661, 667, 671, 687, 700, 716, 717, 719, 721, 722, 725, 726,731, 733, 736, 737, 748, 749, 756, 758, 766, 811, 821, 822,827, 833, 836, 843, 858, 863, 871, 872: n = A,T,C or G
cgactactatagggcgaattgggccctctagatgcatgctcgagcggccgccagtgtgatggatatctgcagaattcgccctttcgagcggccgcccgggcaggtacgcgggggggtttccaggaagcagtttgactaaaggcagcaagctgcttcctctgctgcctgaaatccagattcccaatggcgaagattgagaaaaacgctcccacgatggaaaaaaagccagaactgtttaacatcatggaagtagatggagtccctacgtttgatattatcaaaagaatggtgggaaaaagtctgtaatttccaagccaagcctgatgatcttattctggcaacttacccaaagtcaggtacctcggcccgcgaccacgctaagggcgaattccagcacactggcggccggttactagtggatcccgagctcggtaccaagcttggcgtaatcatggtcatagctgnttcctgtgtgaaaattgttattccgctcacaattnccacaacaatacgagcccgaaagcataaagtgtaaaagcctnggggtgcctnatgagtgagcctaactcacatttaattggngttgcggctncntgcccgnttttcanntcgggnaaaccttgtcgtggcccgcttgcatttaattgnaatcgggccaacncccggngganaagccgggttttgcgnatttgggccgccntttttccgctttgctnngntnnttnnacttngnttnnccctctggtcnntttcggntnccgctagncggtttcaactcccttcaaaggggggggattccggttttccccanaattaggggnnacccnggaaanaanttttaancaaaagcccaccaangggcnggaacccnnaaagggcc

SEQ ID NO: 7141 - DNA, 886 bp, Homo sapiens
  misc_feature 1, 8, 19, 30, 40, 46, 206, 208, 212, 328, 362, 375, 395,419, 424, 436, 445, 446, 449, 451, 480, 488, 507, 520, 526,527, 541, 542, 549, 550, 551, 554, 558, 568, 569, 595, 598,603, 612, 629, 640, 641, 650, 656, 659, 671, 677, 681: n = A,T,C or G
  misc_feature 691, 697, 701, 702, 706, 708, 709, 712, 732, 734, 735, 741,742, 747, 748, 751, 755, 757, 767, 771, 778, 782, 784, 785,786, 788, 795, 799, 800, 801, 802, 804, 805, 808, 812, 816,822, 823, 826, 827, 830, 831, 838, 839, 845, 846, 847: n = A,T,C or G
  misc_feature 848, 852, 853, 858, 863, 864, 865, 866, 867, 870, 872, 873,874, 876, 877, 879, 880, 882, 883, 884, 886: n = A,T,C or G
ngggttgnttcgactcctntttgactatanggcgaattgngccctntagatgcatgctcgagcggccgccagtgtgatggatatctgcagaattcgcccttagcgtggtcacggcccgaggtactgagctccacaaacgtggccatggttggtgcggaaatgattctgagtgagcaggtagaagtctcacgtcctgctgtgtccananttgnttccttccagagggttcgtggtctcgctggcttcaagaatgaagccgtggaccttcacagtgtgtgttacagctgttaaagatgttgtgtctggagtttgttccttcagatgtgtntggagtttctcccttctggtgggtttgtggtggngctgacttcaaanaatgaagccgcagactgtcntggtgatcgttgtaactcttaaangtggngtggacccaaanagtgagcannagnangattttttgtcaagagggtaagaacaaantttccacngtgtggaagggtatttgangcggttccctgcntccctnntacctgcccgggcnnccggttnnnaanggcnaattccagcnncactggcggtccgatacttttggatnccnagctngtgtccaancttgggtggaatgaatnggtattacctnngttcctgcnggaaantgnttttcccttacnatttcncaanaaaaacgaanccggancctnnaagngnnaancctggggatgcctaatttantnngcccanntcccnnttnattngngttggggacnaaanggccggncttnannntngggaaancctnnnnanncanttgntttntggatnnagnnatnnccggggnnaaggcnnnntggnntaatngggcnnnnnttncnnntnntnnannncn

SEQ ID NO: 7142 - DNA, 415 bp, Homo sapiens
  misc_feature 82, 84, 88, 91, 104, 360, 369: n = A,T,C or G
ttggagctccaccgcggtggccggccgcccgggcaggtacgcgggcagtggccgcgggtctgggacagatttcactctcacngngagnggnctgcaggctgaanatgtggcagtttattactgtcagcaatattataatactccgctcactttcggcggtgggaccaaggtggagatcaaacgaactgtggctgcaccatctgtcttcatcttcccgccatctgatgagcagttgaaatctggaactgcctctgttgtgtgcctgctgaataacttctatcccagagaggccaaagtacctcggccgctctagaactagtggatcccccgggctgcaggaattcgatatcaagcttatcnataccgtcnacctcgagggggggcccggtacccagcttttgttccctttagtgag

SEQ ID NO: 7143 - DNA, 1201 bp, Homo sapiens
  misc_feature 1, 2, 4, 7, 8, 9, 10, 12, 13, 15, 17, 18, 19, 21, 24, 25,29, 34, 35, 37, 39, 40, 41, 42, 43, 51, 52, 53, 57, 59,67, 71, 74, 76, 80, 83, 84, 85, 86, 87, 88, 92, 97, 102,106, 113, 121, 143, 151, 152, 155, 192, 207, 212, 289, 293: n = A,T,C or G
  misc_feature 301, 322, 336, 342, 345, 403, 453, 468, 506, 517, 530, 535,551, 559, 560, 602, 618, 623, 651, 654, 667, 668, 685, 686,698, 711, 723, 742, 743, 756, 757, 758, 762, 767, 770, 773,797, 798, 810, 823, 829, 841, 847, 850, 853, 858, 861: n = A,T,C or G
  misc_feature 872, 890, 898, 899, 902, 926, 930, 933, 935, 943, 958, 962,969, 991, 999, 1001, 1014, 1016, 1019, 1034, 1039, 1040,1048, 1050, 1058, 1069, 1076, 1078, 1088, 1089, 1096, 1098,1101, 1102, 1103, 1105, 1116, 1146, 1148, 1150, 1164: n = A,T,C or G
  misc_feature 1174, 1185, 1187, 1189, 1197, 1199, 1201: n = A,T,C or G
nnantannnntnntntnnntnttnntttnttatnntnannnnnggtttttnnntaantntttttttntttngtntntttnttnnnnnnagtngtatncgatntgancatatanggcgaatngggccctctagatgcatgctcnagcggccnncantgtgatggatatctgcagaattcgcccttagcgtggncgcggccgaggtacncgggnagggaaccgctcatatacccttccacaccgtggaaactttgttcttaccctcttgacgaaaaatcttgctgctgctnactnttttgggnccacaccacctttaagagctncaacgatcaccacnacagtntgnggcttcattcttgaagtcagcgacaccacaatacccaccagaagggagaaactccagnacacattttgaagggaacaaacttccaggacaacaacatctttaacagcntgtaacacacactgnggaaagggtccacgggctttaattctttgaaggccagncgagaaccacngaaacccttttgntaagngaaccaaacttctggnaccaacanncaagggaccgtggagaacttttctacccttggcctccacttnaaaaaaatcaattttngcggnaaccccaaaccccatttgggccccaccnttntttgggtgggaannctttcaagagaaccctnncccccgggggcngggacccgctttnggaaaaaagggngccggaaaattttcccaanncaaccaacttggnnncggncccgntanacnttaagttggggaattcccccaaannctttggggtttnccaaaaaactttngggggntaaaatcaattnggttcnatnaancgtgngtntttccttggtngttggaaaaattggtttntttcccgnnttnaaccaaatttcccaccaccaaacnattnacngnagcccggnaaagccatttaaaangttntcaaaanacccctgggggggggcccctanttgtaagntngaagccttaaccntnaancattttaattttgcnggttnntggccttnanttgtcccnggtttttacanattctgngnaaaaaacctnntacaatngnccnnncntgccttttaanagaaatccgggcccaaacccccccgggggngnanggccgtttttgggnttttttgggncgccttttttncntnttctcttngntn

SEQ ID NO: 7144 - DNA, 1213 bp, Homo sapiens
  misc_feature 4, 11, 12, 14, 28, 32, 35, 39, 40, 42, 47, 48, 51, 54, 56,57, 59, 61, 63, 64, 69, 70, 75, 76, 77, 84, 86, 87, 88,89, 95, 97, 99, 102, 105, 106, 107, 108, 109, 116, 118,206, 209, 218, 222, 223, 459, 502, 516, 546, 558, 576, 585: n = A,T,C or G
  misc_feature 600, 615, 625, 639, 649, 661, 664, 678, 693, 703, 705, 715,720, 739, 740, 770, 774, 776, 811, 812, 832, 834, 842, 845,860, 864, 865, 882, 888, 890, 894, 896, 907, 913, 915, 939,949, 956, 957, 963, 968, 982, 985, 995, 996, 999, 1002: n = A,T,C or G
  misc_feature 1003, 1007, 1008, 1018, 1023, 1024, 1025, 1033, 1034, 1038,1043, 1044, 1053, 1054, 1058, 1063, 1066, 1067, 1068, 1073,1076, 1078, 1080, 1085, 1095, 1098, 1106, 1109, 1112, 1114,1118, 1119, 1130, 1143, 1146, 1149, 1155, 1170, 1172: n = A,T,C or G
  misc_feature 1183, 1184, 1185, 1186, 1187, 1188, 1190, 1191, 1193, 1206,1207, 1209, 1213: n = A,T,C or G
tttnttctttnnanctttttatattatnttanttnttanntnatgtnnatnttntnncngntnntcttnncttannnttttttnannnntttagntngnganacnnnnntactcantntagggcgaattgggccctctagatgcatgctcgagcggcccgccagtgtggatggatatctgcagaattcgcccttagcgtgggtcgnggncgaggtacncggnngaatgaactactttcatgagcagctgtagcaggcctgaccacagattcccagagggccaggtgtggatccacaggacttgaaggtcaaagttcacaaagatgaagaatcagggtagctgaccatgtttggcagatactataatggagacacaggaagtgtgcatggcccaaggacaaggacctccagccagacttcattttatgcacttgtgctggcaaaaggaaaaagtctaggnttttaaaggctgtgccaagaacccattcccaaattaaaagaangacccgagtcctgnaagttcaccattttgtaaaaattcttaagntgttaggggaanaactttggtaagttccanggccagttngaaggacctgggttnggggggccaccgggngggggccatnttgggggttacccntgcccccggnggcgggcccggnttncggaaaagggggcntgaattttcccaatnaaccaacttngnccgggcccgnttaanctaagttggggaattcccnnggccttcggggtacccaaaaggctttgggnggtntnattccattggggtccattaaggcttggtttttccnnggggggtggaaaaatttggntnattcccgnttncaacaaatttttccncccnncaaacaattacctaagnccccgngnacgncntttataatctnttaaangnccttgggggggtttgccttaaatnggaggttganccctttnncttctnccaanaaaattttggcggngtnacgaacattnnctnaannaaanntttttccccnggccnnnaaaaaaanngccnttttnncggggcgtnngaancatantcnnntaaantgnanantcttnaacgtttaancanatattttnctngcncnacanngggggcctctnatttccctatttnccnggnatcccncctttatttggtgtnanattttctatcnnnnnnanngntgtatcataaacnnantttn

SEQ ID NO: 7145 - DNA, 1204 bp, Homo sapiens
  misc_feature 1, 3, 4, 10, 15, 16, 24, 28, 29, 32, 34, 42, 43, 44, 48,52, 54, 56, 59, 61, 67, 69, 70, 72, 73, 74, 79, 80, 81,82, 83, 85, 86, 88, 96, 98, 99, 101, 102, 216, 236, 242,267, 335, 387, 399, 432, 455, 458, 465, 495, 496, 501, 526,545: n = A,T,C or G
  misc_feature 551, 559, 565, 607, 610, 615, 617, 619, 643, 644, 648, 656,660, 676, 679, 686, 687, 688, 691, 698, 700, 704, 716, 736,745, 750, 758, 772, 782, 786, 788, 790, 791, 807, 811, 817,825, 826, 840, 846, 847, 858, 862, 865, 877, 879, 896: n = A,T,C or G
  misc_feature 906, 908, 913, 914, 915, 921, 923, 925, 926, 929, 931, 938,939, 940, 943, 949, 952, 955, 960, 970, 975, 979, 981, 985,986, 989, 990, 991, 997, 998, 999, 1002, 1005, 1006, 1007,1008, 1010, 1012, 1017, 1021, 1030, 1037, 1047, 1048: n = A,T,C or G
  misc_feature 1049, 1052, 1058, 1061, 1062, 1067, 1068, 1076, 1077, 1080,1085, 1089, 1090, 1101, 1104, 1110, 1111, 1121, 1129, 1131,1133, 1136, 1140, 1146, 1157, 1158, 1161, 1163, 1165, 1175,1178, 1181, 1188, 1189, 1191, 1197, 1199, 1200, 1203: n = A,T,C or G
nannaatttntgtgnngttctttnttannaananatttcgannngggngggncntntananttttantnngnnntttannnnnanntnagaggaananngnntataatcactataaggcgaattgggccctctagatgcatgctcgagcggccgccagtgtgatggatatctgcagaattcgccctttcgagcggccgcccgggcaggtactaaantttttttttttttttttttntataanaagtactttaatagctcaaactcanagtcatcgtgctcccaattccaaagagattcctaaaagaggcaacttcggccgtttgagaagccagcnctcacccacccggggtctctgtgcattgacctttgggttgctgactttgganaaaaagcaccanaacaccgaccaggtcccattcctgggctcccgnggggggctttctttctatctacngcnatttgtnatcctactgccatttagtttgggactaaannattgntgacttcaggtttaaaaggggaggnagacaaaaatgccttgganctggtnttaaaaancaaagnaaattggggcgcccaaaggcttgggcaaaggaaaaaaaaagncancaacntntnttttacaatttaggggattaccannaatnggggccangaanatcttttcttggtccntgngggggannnttngcaaacnantttnacatttttttgntttatttggccccgtggccnaaatcttanttcanaaaaaaangggatttttcttgntttgtggccnaatngnannatttttccccccttgnatanaaaatncaaaaaanntgggtgtagccccntttaanntatttttggangtgnggntgcctttttttncnaaacaaaaacccccaangaagctcccntnattcnnnataatnantnnacncncgtgtannnatntttttnagnggngaaanacacttaaanctttnaaananatannggnnnacctgnnnccnctnnnntncncatangtcnctctcggcngaaaacnttatgggggnnncanatgtanaanngtttnntttacccnnccnggggnaccnnatccatttttntangggggnngtttttcccnttcttttnantnatnaacntttggngttattttggnntgntnanaaacaaaaanatngtnctttgtnncnttttantnnaanc

SEQ ID NO: 7146 - DNA, 1241 bp, Homo sapiens
  misc_feature 1, 5, 6, 7, 11, 13, 15, 17, 22, 25, 31, 33, 34, 37, 42, 44,48, 58, 75, 79, 81, 82, 83, 85, 86, 88, 89, 91, 95, 99,102, 105, 242, 305, 331, 352, 403, 412, 439, 461, 468, 489,497, 512, 520, 521, 522, 529, 531, 552, 564, 571, 592: n = A,T,C or G
  misc_feature 601, 602, 635, 643, 645, 651, 656, 662, 683, 690, 698, 699,703, 704, 708, 713, 720, 730, 740, 742, 759, 762, 766, 794,803, 811, 812, 816, 826, 845, 855, 856, 866, 875, 886, 887,895, 917, 924, 926, 931, 932, 935, 937, 940, 942, 950: n = A,T,C or G
  misc_feature 954, 955, 958, 960, 966, 967, 986, 991, 998, 999, 1009, 1013,1021, 1037, 1045, 1049, 1050, 1052, 1053, 1083, 1093, 1098,1099, 1108, 1112, 1115, 1118, 1119, 1121, 1123, 1124, 1129,1147, 1155, 1160, 1164, 1169, 1170, 1172, 1177, 1178: n = A,T,C or G
  misc_feature 1189, 1190, 1201, 1207, 1216, 1218, 1223, 1224, 1230, 1232,1235, 1241: n = A,T,C or G
ntcgnnntttntncnantttanctnatttantnnttnttatntnattntaaattattntttttattttttaattntaantnnntnntnngntggngagnagnttncgactcactatagggcgaattgggccctctagtatgcatgctcgagcggccgccagtgtgatggatatctgcagaattcgcccttagcgtggtcgcggccgaggtactcttttttttttttttttttgagacacagnctcgctctgttgcgtaggctggagtgcggtggcatgatgtcagctcactgcaacctctacctnccgggttcaagcgattcttccacctnagcctcctgagtaacttgganattacaggccaccatgcctggctgatttttgtatttttaattatgagactngggttttcnccatgtttgggtcaaggcttggtcctnaaagcttcctggaccttcggtnatcccgncccaacctttgggcgctttcncaaaaganggcttggggaatttnccaaggcnnntaaaagncncaacccaattggcccttggancttaaaaaattntgctttntaattaataacctcctttttnaaaaagttnngccaaattggttttagtaaccccttttggggtntttaaaantnaccccnatttnttttanttttcaaacttaatttttggnaaatttngggtttannggcnntttnaaaanggggggnggttttgacnaaaaaaattntntgaggggattttttttnaanattnggtgaaattttttttttttggggaaganaaaaacccntttggttnntttncttaccaaanttttccaaaagggggaatntttaaggggnnttgtttaaanggaaaaggntaacttttgcnnaccccctntaataaaaggggggattttccncaaggancntttgnnaananaantngccccaangggnnttngnaaaaannagccaaccaagggaaaatnttttnccttttnnccaaagaaangggngctaaacnagggtaattccttttnttaaaatngccnntnntgaaaatttaattttttttttcttcttttnaagtatttgngtttnnttcccaaancccnccnttnnantnnaagcnttttttttaatttttttntttccccnaaaanaaanattanntnccccnntgtaaaaaatnnattcttttgtnttaaanattaaattngnttatnncccccntnttnttcgtn

SEQ ID NO: 7147 - DNA, 1162 bp, Homo sapiens
  misc_feature 13, 14, 15, 16, 18, 19, 21, 22, 23, 28, 36, 37, 41, 42, 43,44, 49, 53, 55, 58, 60, 61, 62, 63, 65, 67, 68, 71, 73,77, 78, 79, 82, 84, 86, 89, 90, 94, 95, 100, 102, 106, 107,110, 214, 218, 431, 463, 520, 532, 534, 535, 541, 570: n = A,T,C or G
  misc_feature 576, 598, 618, 620, 637, 666, 673, 711, 722, 738, 744, 753,759, 778, 793, 805, 811, 818, 825, 829, 831, 834, 841, 846,862, 863, 876, 882, 886, 887, 890, 891, 894, 903, 908, 913,927, 935, 941, 942, 945, 950, 951, 956, 973, 977, 985: n = A,T,C or G
  misc_feature 986, 989, 990, 993, 996, 999, 1001, 1015, 1016, 1022, 1025,1028, 1037, 1043, 1061, 1070, 1072, 1073, 1074, 1085, 1086,1087, 1089, 1090, 1101, 1105, 1107, 1111, 1113, 1122, 1127,1133, 1134, 1136, 1144, 1147, 1151: n = A,T,C or G
tttctatttaaannnntnntnnnttcantttttctnnttannnnatttnttananttntnnnntntnntantntttnnnttntntnttnntagnnggttngnacgnntanattactatagggcgaattgggccctctagatgcatgctcgagcggccgccagtgtgatggatatctgcagaattcgcccttagcgtggtcgcggccgaggtacncggngagcagggaaccgctcagatacccttccacaccgtggaaactttgttcttaccctcttgacgaaaaatcttgctgctgctcactctttgggtccacaccacctttaagagctacaacgatcaccacgacagtctgcggcttcattcttgaagttcagcgacaccacaaacccaccaagaaggggaagaaacttccaggacacatcttgaaggnaacaaactccagacacaaacatctttaacagnctgtaaacacacacttgtgaaaggtcccaacggctttcaatttctttgaaaggccanccgaggacccancnnaaaccnctttgggaagggaaaccaaacttcttggnacacangcagggacgttgaggacttttnttaccccttgctcaacttcnangaaatcatttttccggnaaccaacccattggggccaccgtttttgntggggangctttcaagttacccctggcccccgggccgggtccgcnttccgaaaaangggggccgaaatttcncaagcnaccacttgncggggnccgttaacctaaggttggnaatccccgagcttcngttacccaaaancctttngggccgntaaattnaatngngtncattaangcttngtttcccctggggggnnaaaaattgggttntccccngctnnaannaantttccccanacaancattncttattccctgganagcccttnaaaagnngtnaaaannccctngggggggggcccctaanattngggtggtnngcnntanccntcncnatttttattttgtnngtttgnggnctntactttgtnccccgnttttttttaattgcgggnaaaaacccntnnnggggccctacnnnanntttaaataaantacngnccananccccctcgnggganaggggnngnttttgganttntttngggggcccccc

SEQ ID NO: 7148 - DNA, 1167 bp, Homo sapiens
  misc_feature 1, 2, 3, 5, 6, 7, 14, 26, 29, 31, 33, 34, 35, 38, 40, 43,45, 47, 58, 64, 68, 76, 81, 85, 87, 88, 97, 98, 99, 109,113, 117, 123, 139, 195, 203, 211, 214, 216, 219, 220, 222,245, 278, 315, 356, 395, 400, 459, 487, 488, 528, 555, 557: n = A,T,C or G
  misc_feature 559, 583, 592, 594, 597, 599, 622, 625, 627, 629, 632, 635,658, 664, 665, 667, 673, 684, 699, 700, 703, 712, 722, 728,730, 741, 760, 767, 771, 777, 787, 788, 799, 802, 810, 818,826, 829, 834, 840, 843, 845, 852, 857, 863, 864, 872: n = A,T,C or G
  misc_feature 873, 882, 889, 892, 893, 895, 897, 898, 916, 929, 930, 933,936, 942, 944, 947, 949, 958, 960, 967, 974, 975, 980, 983,993, 1001, 1008, 1009, 1010, 1012, 1014, 1016, 1017, 1025,1030, 1031, 1050, 1058, 1062, 1065, 1066, 1068, 1069: n = A,T,C or G
  misc_feature 1071, 1081, 1085, 1089, 1095, 1098, 1103, 1106, 1114, 1117,1119, 1120, 1128, 1131, 1136, 1139, 1140, 1143, 1145, 1147,1149, 1153, 1159, 1160, 1163, 1165, 1166, 1167: n = A,T,C or G
nnngnnnttttttntaaataattctnctnantnnnatntnttnananttattgttttntatttnatanttatttanaatgntctncnnagttaggtnnncaaatatggntcanaatnttatanggcgaattgggccctntagatgcatgctcgagcggccgccagtgtgatggatatctgcagaattcgcccttncgagcggncgcccggncangnacnnanttttttttttttttttttaaganatgagaccttgccatgttgcccaagctggcctnacactcccaggttcaaacaatcctcccaactcctgantagctgggaattacaccacactcagcaaccaccatattctnttatccccaaaccaccttcacctgccccacacagtccanttttntccaaaccaagggcttcactggggtcttctttgccaggggaattatctggggaggatancacagttttaaaaaaatttttcaaaaannaaagggaagggaaaggtgaatttaaatttttaatggattnatggcccctttttgtccctatcccaancntnaaaaaattcaatttcccctttttnattcccaangnttnantcccctgaaaaatgttcctttcnaangntnttnttnggttggggtgccaaaaatggggnttccanntnacaaancttttttttgnaaaaaccccccaaanntgnaaaaagccnttggaacctntttaanantaacccccaanaagggggttttttttcaanaacaaantttncccccnaaaacgggtnnataaaaggganccntgggaatnaattgggnccattacnaancattnaaattnccngnatttccnaaacncctttnnctggggtnntgtgggggntctaaancanngngnnaatttaaaattctcttcnttaaaaacccttnntcnggntaaaantnggntnaaaaaaaantntcacccnactcccnncaaanaanggcccttttnttggttgnattaaannntntntnntgatatgnaaaanngttaaaattttaaaccacnatttcccntgtnacnncnnanggcttttatntttncctngtgccngcnagaancanccctttanggngnnggaatttntcntaccnaanntgngncngnaccntttctnnttngnnn

SEQ ID NO: 7149 - DNA, 1137 bp, Homo sapiens
  misc_feature 1, 2, 3, 4, 6, 8, 9, 10, 11, 12, 13, 14, 15, 16, 17, 18,19, 20, 23, 24, 25, 27, 28, 31, 32, 33, 34, 36, 38, 39,40, 41, 42, 43, 44, 45, 46, 47, 48, 54, 55, 59, 60, 63,65, 66, 67, 68, 69, 70, 71, 74, 75, 77, 78, 79, 82, 83,84, 86: n = A,T,C or G
  misc_feature 87, 90, 96, 97, 100, 102, 106, 107, 108, 110, 111, 113, 116,586, 593, 627, 635, 637, 648, 655, 691, 714, 723, 740, 741,747, 771, 776, 805, 817, 831, 835, 842, 853, 858, 861, 864,879, 882, 886, 890, 892, 906, 918, 927, 944, 950: n = A,T,C or G
  misc_feature 951, 958, 960, 961, 966, 971, 972, 973, 978, 989, 990, 993,995, 1005, 1006, 1008, 1011, 1012, 1014, 1017, 1021, 1022,1024, 1029, 1030, 1032, 1041, 1059, 1061, 1062, 1072, 1073,1079, 1080, 1083, 1084, 1086, 1094, 1096, 1100, 1107: n = A,T,C or G
  misc_feature 1111, 1119, 1128, 1131, 1137: n = A,T,C or G
nnnnantnnnnnnnnnnnnnttnnnannttnnnnantnnnnnnnnnnntatttnntaanntantnnnnnnnttnnannnttnnntnnagnaagaanngangngacnnntnntntanggcgaattggcccctctagatgcatgctcgagcggccgccagtgtgatggatatctgcagaattcgccctttcgagcggccgcccgggcaggtacaccacaggcaaattaagcaaaaaggacaatgaagaaagaatgcaggactcaggcgctgctctagaattcattcagggctccccgagtgcagcagctcttatggtggttttgtttttaggagaactgttgtaataatgcatattttaaaagcatagggaagctctagaacacagggaaggtgactactaagcaaggagaaaagtatcttttaagtggggaactaccagcctattaggtaaggtctatctggttaaaagtaagttatttattgaaaaatcttagccagttctggggtcctttggagaagggcatttaaaaaaaagcaaaaacctcttattgagccatgtgtggattttttgaaagacttcaattttnccacttnagaaaaatttattttgggaaaagtttccctattngggtcaangntaaattttttnggttggnattttttttaagggaccaagaacggggcgtttttcncctggtttgggcccaagaacctngggttcttnaaaaacttcccttggannccttcngtggaatccccggccccggccctnggggncctttccccaaaaaagtgccttgggggantttattaggggngggtggaagcccancccnaaaaccnttggcccccanaaacnaantantttttttgggaaagnctnccantttntnggggagaatgtttnacccttgttttngcccccttnttttttgggggaaaaancccttnnttttgangnnccccnattgnnnaaaanggaaaaaattnnccnancctttttttnntnaanngnagnaaanncntttcnngnaatttcccnttttttccctgcgggggnannaaaaggtatnntacccnnttnntnaccctccncnctgngggcccnctcnggaaaaantttggttanaantttttn

SEQ ID NO: 7150 - DNA, 929 bp, Homo sapiens
  misc_feature 354, 447, 451, 483, 524, 534, 542, 554, 560, 570, 576, 593,606, 614, 635, 638, 639, 651, 653, 664, 667, 671, 683, 694,701, 713, 731, 739, 750, 761, 770, 775, 776, 783, 784, 787,800, 805, 806, 817, 821, 832, 837, 843, 845, 846, 847: n = A,T,C or G
  misc_feature 852, 859, 860, 871, 881, 882, 895, 898, 899, 903, 912, 913,914, 918, 919, 921, 929: n = A,T,C or G
ggcgaattgggccctctagatgcatgctcgagcggccgccagtgtgatggatatctgcagaattcgcccttagcgtggtcgcggccgaggtacctgactttgggtaagttgccagaataagatcatcaggcttggcttggaaattacatactttttcccaccattcttttgataatatcaacgtagggactccatctacttccatgatgttaaacagttctggctttttttccatcgtgggagcgtttttctcaatcttcgccattgggaatctggtatctcaggcagcagaggaagcagcttgctgcctttagtcaaactgcttcctggaaacccagagccaggtccaagctncaggacactgtgcaagcaagagcacagcaggtccccgcgtacctgcccgggcggccgctcgaaagggccgaatttcccagcacactggccggncggnttactaatggattccgagctccggtacccaanctttggcggtaaatcatggtcaataagctggttttccttgnggtgaaaatngttaatcncggttcacaaantttccnacaacaaacnattacnaagcccgggaaagccantaaaaagtgggtnaaagcctnggggggtggccctaattggangtnnagcctaacctcncnatttaaattgncgnttgngcctcacctggnccccgtttttnccagtcngggaaaaacctngacgtgggccagctttgnaatttaanggaaattcggnccaaccccccngggggaagnaggcnnttttgcnntanttggggccgcttnttccnnctttaccatgnttancttggccttanttggncccttngnnnatttnggtttgnnggagaggcggnattatagctnnttcaaaagggggnganntgcnggttattcnnnaaannangggggaan

SEQ ID NO: 7151 - DNA, 944 bp, Homo sapiens
  misc_feature 103, 133, 135, 136, 138, 143, 148, 154, 172, 204, 264, 267,273, 282, 295, 310, 326, 334, 338, 341, 350, 355, 356, 358,363, 379, 381, 383, 384, 388, 392, 393, 396, 405, 412, 418,424, 427, 430, 437, 440, 442, 447, 449, 457, 462, 481: n = A,T,C or G
  misc_feature 483, 488, 491, 493, 511, 519, 541, 553, 572, 576, 578, 581,582, 587, 594, 600, 603, 605, 610, 612, 614, 618, 622, 631,632, 636, 641, 644, 647, 653, 660, 671, 673, 682, 683, 685,693, 696, 701, 705, 709, 713, 716, 728, 731, 739, 740: n = A,T,C or G
  misc_feature 741, 744, 746, 749, 765, 767, 777, 779, 785, 792, 808, 811,814, 820, 824, 825, 836, 837, 839, 840, 841, 844, 850, 852,862, 864, 866, 867, 874, 875, 879, 883, 884, 910, 912, 916,917, 919, 927, 928, 930, 940, 942, 943, 944: n = A,T,C or G
tactatagggcgaattgggccctctagatgcatgctcgagcggccgccagtgtgatggatatctgcagaattcgcccttagcgtggtcgcggccgaggaactntttttttttttttttttttttattttttancnncnccccngttanttactnttgatttcttttcttttntttttttttaagtatggaggctcaagtataanatgtagatttttttcttaagctttacaaaaaaacaaaataaaacaaaaacctccttttgnatnccatanaaattgacngaaaagcacctgnccgggcggccgcttnaaagggcgaattccancacactgncggncgntactagagnatccnncntcggnaccaagcttggcgtananannggcnatanntgnttcctgtgngaaaaantgatanccgttnacnaantcaaggnggnanttttnanagaaaagnaaggnttacaatttttaaaagccntnggggntgnantttaactgtagtggagtnaaaaaccnctatttattttggaatctttcntctttgggatgnacccgctttttccagctcnagtnanaannctttntctttgnccaaantancnatttnantncaanttgngggccaaanntttnttganaangangccagntttgacntaaattggggngnttttttccnntnttcatagnatnaaaanaatntttnaatngtnccctaggctccncanatgggggnnnttntnggnttttttttaaccttcngnccgaaaaacncncttaangggggtnatttccaaaaaaattnaanggnttaaangctnnataaaaaatanntnnntgnaccgananccaacccttngngnnccaaatnncctnaaanntttggcccacctttttagaatattananttanntntatccccnntnataaaagaancnnn

SEQ ID NO: 7152 - DNA, 835 bp, Homo sapiens
  misc_feature 2, 10, 712, 716, 728, 729, 783, 790, 791, 793, 805, 806,808, 817, 824, 828, 831, 833, 835: n = A,T,C or G
anggcgaatngggccctctagatgcatgctcgagcggccgccagtgtgatggatatctgcagaattcgcccttagcgtggtcgcggccgaggtactgctgttgtgtctgttaggtccagctggtatgatgctgttcaagttctgtcttgcgactgatcttctgtctggttgtcctatccgttactgaaagtgggctactgcagtctcctactcttactgtagaactatccatttcttcctttgattctgtcaatgtttgtttcatatattttgggctctgatgtttggtgcatatatattacatcttggtgaattttcaaactttttaaatttcaacatgaagatgaaattataggatgtccgggatttcctttgaatccgtggggctgggagtaactataaatgaaacaagattggccgggaatttgaggctgcaaggataggtacctgcccgggcggccgctcgaaagggcgaattccagcacactggcggccgttactagtggatccgagctcggtaccaagcttggcgtaatcatggtcatagctgtttcctgtgtgaaattgttatccgctcacaattcccacacaacataccgagcccggaagcataaaagtgtaaaagcctgggggtgcctaatgagtgagctaacctcacattaaattgcggttgcgctcacttgccgcttttccagccgggaaaactggcctncccnacttgcattaanngaatccgcccacccccggggagaaggcgggttgcggaattggggcgcttttccnctttctnngntcaattaactcnntnggcctcggnccgttcngttnggngnan

SEQ ID NO: 7153 - DNA, 921 bp, Homo sapiens
  misc_feature 35, 63, 66, 67, 73, 77, 78, 95, 114, 142, 146, 149, 152,153, 156, 158, 160, 203, 221, 231, 276, 280, 284, 285, 289,291, 293, 294, 296, 298, 299, 300, 302, 309, 312, 326, 327,328, 332, 336, 339, 340, 365, 367, 372, 403, 419, 440: n = A,T,C or G
  misc_feature 503, 510, 539, 551, 558, 561, 582, 590, 591, 595, 601, 605,619, 642, 647, 662, 672, 676, 693, 694, 696, 697, 700, 702,708, 710, 713, 734, 745, 746, 752, 753, 764, 769, 772, 778,781, 792, 793, 794, 808, 810, 820, 822, 823, 827, 835: n = A,T,C or G
  misc_feature 845, 847, 852, 853, 859, 860, 862, 867, 869, 870, 874, 883,888, 890, 893, 894, 902, 903, 904, 905, 907, 911, 918: n = A,T,C or G
gaattgggccctctagatgcatgctcgagcggccngcagctgtcatggatatctgcagaattnaannttaccntggnngcggccgaggtactttnttttttttttttttttttnccatggttggagcggaaatgattttgantgancangtnnaantntnacgtcctgctgtgtccagagttggttccttccagagggttcgnggtcttgctggcttcaanaatgaagccntggcccttcacagtgtgtgttacaggctgttaaagatgttgtgtngggncgtnnctanangnnancnnncncgggacnaantcccttctggtaannngccnaaanccnnttcgacttcaagaatgaagcccgcnanacttntcttggtgatcgttgtagctcttaaaggtgntgtggacccaaagagngagcagcagcaagatttttcnccaagagggtaagaacaaagtttccacggtgtggaaggggtaatctgagcgggttccctggcnccccgcnatacccttcccggggcgggcccgctttgnaaagggcggaanttcccanccncactgggcgggccgtttactnggtggganncctnagctcnggtnccaaagctttggcngtaatcattgggccataagcttngtttncctgttgggaaaatnggttatcccncttnacaatttccccaaccannanncgnancccggnangcnataaaggggttaaaagccctnggggtggcctnnaaatgnngggagctaacntcaantanaaaatnggngttggcggctnnntttgcccgtttttnanggggggaaancnnggcngggccaanttgtattaananaaacnncccccnncncgggnanngggncgttttgcnttttngnccnncttttccnnnntnctcnataaaanttc

SEQ ID NO: 7154 - DNA, 892 bp, Homo sapiens
  misc_feature 122, 220, 234, 237, 238, 239, 240, 245, 248, 253, 254, 257,267, 268, 269, 270, 271, 273, 282, 289, 290, 291, 304, 305,307, 312, 320, 321, 322, 332, 333, 336, 337, 342, 343, 347,363, 369, 372, 373, 374, 380, 381, 383, 384, 386, 390: n = A,T,C or G
  misc_feature 391, 415, 422, 432, 433, 434, 440, 442, 443, 444, 445, 446,449, 454, 456, 460, 463, 472, 473, 476, 482, 484, 491, 498,500, 501, 502, 507, 522, 523, 531, 532, 545, 546, 547, 548,549, 551, 563, 566, 568, 570, 584, 590, 598, 609, 610: n = A,T,C or G
  misc_feature 611, 616, 622, 627, 635, 637, 638, 639, 640, 645, 653, 659,669, 676, 681, 685, 688, 689, 690, 698, 702, 703, 716, 728,744, 746, 748, 756, 762, 778, 780, 784, 790, 796, 803, 804,808, 809, 813, 835, 836, 837, 845, 846, 848, 869, 873: n = A,T,C or G
  misc_feature 881, 889: n = A,T,C or G
ctatagggcgaattgggccctctagatgcatgctcgagcggccgccagtgtgatggatatctgcagaattcgccctttcgagcggccgcccgggcaggtacttttttttttttttttttttntggttttatttttttttttttttttttttttttttttttttttttttttttttttttttttttttttttttttttttttttttttttttttttttttnaaaaaaaaaaaaanccnnnnttttnggnaaaannttnaaaaaaaaannnnnanttttttttnccccccnnnaaaaaaaaaaaanntnttttnaaaaaaannnggggtttttnnttnnggggnnaaangggaaaaaaaaaaagngccccnccnnngggggnnannantttnnttttaaaaaaaaaaaaaacccccnaattttngggggggggnnntttttncnnnnnttnaaaangntttnccnaaaaaaaanncgngtttanantttttgnggggggntnnnggccnaaggggaaaaaaaannaaaaaaanngtttttttttttnnnnnanccccaaaaaacnccntngnaataaaaaaaaaangggggntttttttncccccgggggnnnttttntagggnccccnttttttgngnnnnaaaanaaaccccnctatangggttttttnccccccnctttntccnaannntttttttngggnnaaaaaaaaaaaancccccccccccntttttttaaaaccccncntntccttggngtgganaaaaaaaaaaaaaaancnaaanaccccnaggtgnttttatnnaaanngggnttttccccccccccccccctcnnntaaaaaanntntaaaaaaaaaaaatttttttntttntttttttncccccccnccc

SEQ ID NO: 7155 - DNA, 861 bp, Homo sapiens
  misc_feature 28, 550, 584, 591, 629, 638, 653, 672, 697, 711, 719, 726,729, 736, 739, 740, 743, 751, 752, 764, 765, 775, 776, 780,786, 792, 794, 795, 799, 803, 808, 809, 811, 813, 818, 827,830, 831, 832, 833, 847, 848, 853, 854: n = A,T,C or G
ggcgaatcgggccctctagatgcatgcncgagcggccgccagtgtgatggatatctgcagaattcgcccttagcgtgggcgcggccgaggtactaatcatagcccataaaggggaagccgtgcagttggaaacagccatgcctggtgcaaatgctgccattgtttaattgttgatgatgctgcataagaatccttaaggtagaagcaatcttgaccttttttatttttgcaggcccctgccagtgcccttctccagactatattcttaaaaattaaagtgctttggtttgtagagttgactgtatgtatctccaaaatgaatatgcagtagtgattttttttttcctccctgatctctttcctgctttggtaattctgtgagggtataatcatattggggctgtccttggcaggttaggtgacatacaagaacatgcggttccacagcagtcctgtcattctcgggtaagaacatcaaagtgagttgcagcactttctgcattcatacacgtaaatctcaatctggaaggaagatagaatctaccatagnggaatttctcccagaagttttacccttgagtgcncccaaantctggaaggcgttgaccccaattccagttgccccctangggaaattntaaaccccagggaanatcctaaacccgggctggnaatttcccaaaatccctttttaccntggaaaacaaaaanggcccaanggactcnttnccttggnaannccnttttttgnngaaacccaaagnnaaaatttttnntttnaaaatngggttncnngggnttanaaaannangnaaaanaattttttnggnnnntttttccccttttnncccanncccccct

SEQ ID NO: 7156 - DNA, 871 bp, Homo sapiens
  misc_feature 539, 544, 562, 605, 609, 614, 617, 618, 624, 630, 639, 656,659, 667, 670, 672, 673, 681, 689, 695, 696, 697, 703, 709,712, 717, 718, 720, 721, 732, 734, 735, 736, 738, 745, 751,762, 765, 767, 768, 769, 770, 773, 778, 787, 788, 790: n = A,T,C or G
  misc_feature 792, 798, 799, 806, 809, 811, 815, 823, 825, 826, 831, 832,836, 837, 840, 843, 854, 862, 871: n = A,T,C or G
cgaattgggccctctagatgcatgctcgagcggccgccagtgtgatggatatctgcagaattcgccctttcgagcggccgcccgggcaggtaccagttgaacatcctgctacactagtttgaatctttactatctttgtatgtaacaaacttgtcttacttagtccaattgggctgctataacaaaacaccataaactgggtaacataataaaaagaaagtctattgctcccagttctggaggctgggcagtccaagatcaagatgccagcagattcagttcctggagagggctcacatccgggtttatataacagtgcttcctcacatggcagaagggatgaatgagctcctttgggcctattttataaaggcactaatcctattcatgagggctccaccctcatgacccaatcacctcccaaaggccccacctcctaatactatcaccttaggatttcaacatatgaagtggaggggtggggaacaagcctttagagcatagcataagccctactggaccctttctatgctacttgntttcntcactcaatatgatgggngagatttatccatggtgtaactatgcatcccaaattttctggncttntttcnaanntggggngggccntggggggtnttaaggaagggttggcntgntattcggnccncnnggctcccngggggggnttttannncctttntttggnccnaaccnngnngggtttttttnannntnccaattnccccancctttttttcnctntnnnnaanccccntggttttanncntnggctgnnggaaaanaantncccnttccgggngnnggccnnggcnntgnttncccccccaatngccccccnggagggccn

SEQ ID NO: 7157 - DNA, 837 bp, Homo sapiens
  misc_feature 670, 679, 682, 686, 700, 750, 768, 808, 812, 821, 830, 831: n = A,T,C or G
actactatagggcgaattgggccctctagatgcatgctcgagcggccgccagtgtgatggatatctgcagaattcgcccttagcgtggtcgcggccgaggtactcagtgtggttctaggaccaccggcatcacttgggggcttgttagagatgcagagtctcaggccccaccccagacctgaatcacacactgcatttcaacaaggcccacaggtgactgcagcgtgtgttaaagtatgagaaatgccaccagggaggagaggcccacaccagtccagagactagtgattcagagcatcactacccaagagaactttacgcagtgatgcaaatgtcccgtctgtctctgtgctggccagaattaaccgctagtcacatggggcctttgaacataaatgtggctagcacaactcagaaactgaatattaaatgtagtaagatttcgttcatttcaatttaaagagccacgtgtggctaatggtaacaatactggacagagttctagttctagagtgcggcttttctgttgccccaaacttttcagtgcacctgagctgcaatgggctgggaagtacctgcccgggcggccgctcgaaagggcgaattccagcacactggcggcgttactagtggatcccgagctcggtaccaagcttggcgtaatcatggncatagctgnttnctgngggaaaatggtatncgttacaaattcccacaacatacgaaccggaagcattaaagtgtaaaagnctggggtgcctaatgagngagctaactcacattaattgcgttgggctcacttgcccgntttncagtcgggnaaactggcnngccact

SEQ ID NO: 7158 - DNA, 849 bp, Homo sapiens
  misc_feature 76, 616, 617, 644, 647, 650, 680, 702, 719, 726, 734, 759,770, 777, 778, 787, 789, 793, 796, 797, 804, 808, 809, 821,823, 825, 827, 830, 839, 849: n = A,T,C or G
gaattgggccctctagatgcatgctcgagcggccgccagtgtgatggatatctgcagaattcgcccttagcgtggncgcggccgaggtacgcgggggactcgctttccgtgcggtgcggcgagtgaggccccggtcttcctcctcgtcctgccgcagggccagaacccctgacggtattcagctgcgcgtaagtctggccggtgccatctgtctccgcaatgccccccaagaaacaggctcaggccgggggcagcaaaaaggcggagcaaaaaaagaaggagaagattatcgaagacaaaactttcggtttgaagaataagaaaggagcaaagcaccataagtttatcaaggctgtcacacatcaagttaaatttggtcaacaaaatccacgtcaggtagcacagagtgaagctgaaaagaaattgaagaaggatgacaagaagaaagaattgcaggagctaaatgagctgttcaaacctgtagttgctgctcaaaaaataagtaaaggtgcagatcccaagtctgtagtatgtgcattcttcaagcaaggacagtgtactaaaggagataagtgtaagttctcccatgacttgactcttggagagaaaaattgtnnaaaagccgaaagtgtttaccatttgantgncangagatgaaaaaccttgaaaaaagatacttntgggattaatttggggatgagnaaaaaagctggaagaantttggtngaacaaanaaaccacgggggagggcgggaaaangaaaaaacccnaaaaacnnaaaattggngngccnggnntttcctnggannctattggaaacnancnanaantggctgggntttgggattn

SEQ ID NO: 7159 - DNA, 850 bp, Homo sapiens
  misc_feature 2, 58, 94, 113, 160, 515, 585, 588, 602, 623, 649, 650, 654,662, 668, 684, 686, 696, 741, 746, 749, 750, 751, 752, 758,764, 765, 766, 774, 780, 782, 787, 790, 793, 799, 800, 807,827, 829, 833, 835, 836, 841, 842, 847, 850: n = A,T,C or G
gngccctctagatgcatgctcgagcggccgccagtgtgatggatatctgcagaattcncccttagcgggggggagggcgaggtacgcagaaacnttttttttttttttttgcncagtgtcctggagctggacctggctctgggtttccaggaagcagttngactaaaggcagcaagctgcttcctctgctgcctgaaataccagattcccaatggcgaagattgagaaaaacgctcccacgatggaaaaaaagccagaactgtttaacatcatggaagtagatggagtccctacgttgatattatcaaaagaatggtgggaaaaagtctgtaatttccaagccaagcctgatgatcttattctggcaacttacccaaagtcaggtacctgcccgggcggccgctcgaaagggcgaattccagcacactggcggccgttactagtggatccgagctcggtaccaagcttggcgtaatcatggtcatagctgtttcctgtgtgaaattgttatccgntcacaattccacacaacatacgagcccggaagcataaagtgtaaagcctggggtgcctaatgagtgagcnaanctcacatttaattngcgttgcgctcactggcccgnttttccaggccgggaaaaacctgccnngccnagctgganttaaanggaatcgggcccaccncnccggggagangccggtttgcgtattgggcgcctctttccccttttctttgctcanatganttnnnntgggcntcggcnnntccggctnggggcnancgggnttnagnttcacnnaaagggngggaatacccggtttccccnanaatnannggggnnacccnggn

SEQ ID NO: 7160 - DNA, 830 bp, Homo sapiens
  misc_feature 471, 481, 582, 666, 689, 700, 701, 711, 722, 726, 727, 729,731, 746, 749, 750, 753, 759, 771, 782, 784, 792, 796, 809,811, 828: n = A,T,C or G
gcggccgccagtgtgatggatatctgcagaattcgccctttcgagcggccgcccgggcaggtactttttttttttttttttggggatagagaaagccttcctaaacaaggtaagaaaatatacaaaacttccacttgtcaagtagttataaaatgaagtcaacaggtaatggcaaagtagaaaatatatgcacagcatatctaccaaagtgtaataatccttccataatatataaataactcttagttattcactaaattaaaagatacaaacagcaaatagggcagtttaagactgggcaaagaataaataagccattcacccaagaagacgatcatataaaataatacttgactggaacagtaacagggaatgccaattttaaaaaggtatcattcttcacccaccagattgaatattattaatacatttttgcccaaatctgaagaggatgtaagaaaataaaaattntcaaacattnaaacaaaaagttgagcagtccatttaaagtgacaatagctaaaaaatttgacacctatactatggcatacaatgcagccatttaaaaaaacggttgtcttntccttttaacaccctagataagctttttttgcttgcttgggaggtttttggctctatttttagaaaaaagttgctgggaaattntattaggatttgtagaccatttnttggggggatnnttttccaggnggtacctaacnaatnnantnttactgggggaatcnttnnccnacaggnttggcccttttnatttttggggntntcttaaantttnggggaggggaaananttttgggaaaaaaaaantc

SEQ ID NO: 7161 - DNA, 814 bp, Homo sapiens
  misc_feature 657, 678, 703, 724, 765, 799, 807, 813: n = A,T,C or G
tagggcgaattgggccctctagatgcatgctcgagcggccgccagtgtgatggatatctgcagaattcgcccttagcgtggtcgcggccgaggtaccttacaggggttaggtagctttcttcaggtgaattagagagttgctggcagtgagttcaatgttaatgatatcaacagtgtatattaaataaggcatttttaaacagaaacataaaataagtttatgtattgatggttgaccaatatgtgaccagaggcttgcaggaacctaaccctccctgtatttcccgtaggagtagtggttcaatattcactaattcaggttctcagtggctttataaaacataactgctgtgaataacaagactctactgtgtgttattctatatttgatgtccactgtcataggacagggtatattgtaatcaaaattggaattcctagaattagccttccaagccttctttctttctttctttcttttttgagacggaattttgctcttgttgcccaggctggagcacaatggcccaatgttggctcactgcaacctccgtctcccgggttcaggcaattctactgcctcagcctcacgagtagctgggattacaggcatgtgccaccacgcccagctaattttgtatttttttagtggagacngagtttctccatgttggtcangctggtctcgaactcccgagctcangtgatccgcccccctcacctnccaaagtgctggaattacaggcgtgagccacctggcccggnccccttttttatttttaagccccctggaaaaaanatgaaccnggaagng

SEQ ID NO: 7162 - DNA, 831 bp, Homo sapiens
  misc_feature 77, 186, 194, 198, 199, 200, 207, 213, 215, 218, 219, 220,231, 235, 237, 239, 241, 246, 248, 253, 275, 276, 277, 284,287, 297, 304, 305, 306, 307, 309, 310, 316, 317, 318, 321,327, 328, 329, 335, 347, 352, 360, 361, 392, 394, 395: n = A,T,C or G
  misc_feature 398, 407, 411, 412, 415, 427, 432, 441, 445, 446, 452, 464,466, 483, 484, 488, 489, 491, 494, 498, 503, 504, 512, 515,522, 532, 539, 542, 546, 547, 554, 556, 558, 562, 563, 564,572, 573, 580, 582, 592, 607, 612, 621, 632, 633, 634: n = A,T,C or G
  misc_feature 646, 679, 683, 684, 692, 707, 718, 733, 737, 738, 748, 752,759, 764, 783, 787, 790, 801, 806, 814, 818: n = A,T,C or G
cgaattgggccctctagatgcatgctcgagcggccgccagtgtgatggatatctgcagaattcgcccttagcgtggncgcggccgaggtactttttttttttttttttttttttttttattttttttttttttttttttttttttttttttttttttttttttttttttttttttttttttttttnaaaaaccncccnnnttttttnttaaangnaannncccccttttancccngngntnaattnanccccnaaaaaaccccaaaaaaattttnnnaaaaaanccngggaaaaaanccccccnnnnanntttttnnnaanaaaatnnntttttngaaagggaaccnggggnaaaaaggnngggaaatgaacagggggctaaaacccctccncnntgnaaaaaattnaaannttngggataaaaacnaaccntaaaggggncccnncccggnggggggggcccnanggggttttgggggcccnnaggnnancangggncccannaaaaactncangttggangggaaccccnggggaantangggnnccccccntngngggnnnatccccannacggggngnaatccccaancccggaaaaaaaacnccccntggggaaantttaaaaaaannnctttttaaaaanggggggaaaaaaaaaaaaaaacccccccctttnaaannaaaaaaantttttgggggggggnttttgggcccnttaaaaaaacccccnaacnnccttttaaantaangggggcnaaaancccttttccccaaaaaaantttntcnccctttttttngggangggaaagnaaanttggaaaaaagga

SEQ ID NO: 7163 - DNA, 825 bp, Homo sapiens
  misc_feature 615, 705, 737, 750, 754, 755, 757, 761, 762, 763, 770, 795,799, 803, 809, 813: n = A,T,C or G
ctatagggcgaattgggccctctagatgcatgctcgagcggccgccagtgtgatggatatctgcagaattcgccctttcgagcggccgcccgggcaggtactggtgaactccctcacttgaatttctcgttcttatgaaggtgctttcttgcttggatagttgttcagtgtgacattcctgcagggtgaacaattgctagagggttctattcagccatctttctccacctcacatccatgtttttgcatgttatttctttccttttattgattagcatttgattccatgaatatagcacaatgtatataaccactattcttttctggaaaacttatgtccaggttggggttattatgaataaggctatgaaatttcaggtacctcggccgcgaccacgctaagggcgaattccagcacactggcggccgttactagtggatccgagctcggtaccaagcttggcgtaatcatggtcatagctgtttcctgtgtgaaattgttatccgctcacaattccacacaacatacgagccggaagcataaagtgtaaagcctggggtgcctaatgagtgagctaactcacattaattgcgttgcgctcactgcccgctttncagtcgggaaacctgtcgtgccagctgcattaatgaatcggcccaccccccggggaggaggcggtttgcgtatttgggcgcttttccgcnttcttggttacttgactcgcttgggcctcggnccgttccgggtgngggnnanccgnnntaagctnacttcaaaggggggaataccggttntccncaanaaacangggnaaacccccggaa

SEQ ID NO: 7164 - DNA, 1139 bp, Homo sapiens
  misc_feature 1, 2, 3, 7, 9, 11, 12, 29, 38, 39, 40, 41, 43, 45, 47, 54,56, 58, 64, 74, 82, 85, 95, 97, 99, 100, 105, 114, 115,117, 122, 126, 127, 128, 493, 497, 503, 527, 542, 561, 617,623, 640, 647, 662, 672, 673, 695, 707, 708, 713, 720, 734: n = A,T,C or G
  misc_feature 740, 743, 745, 753, 781, 788, 810, 824, 832, 836, 837, 844,849, 851, 853, 859, 862, 865, 875, 876, 877, 878, 887, 897,904, 915, 916, 923, 929, 931, 933, 934, 936, 944, 945, 947,952, 953, 956, 958, 967, 969, 970, 974, 976, 978, 986: n = A,T,C or G
  misc_feature 989, 994, 999, 1001, 1002, 1004, 1006, 1011, 1012, 1013,1017, 1021, 1028, 1030, 1032, 1038, 1040, 1043, 1044, 1045,1052, 1056, 1060, 1069, 1070, 1074, 1080, 1081, 1082, 1103,1105, 1106, 1111, 1113, 1121, 1122, 1123, 1124, 1130: n = A,T,C or G
  misc_feature 1135, 1136, 1139: n = A,T,C or G
nnnatanancnntttataatcttattttntttcttttnnnnantntntttcttngnantatttnaactactatntcaatccntcnagaagagagnangnntatantcattctannanaacgngatnnntcctctagcatgcatgctcgagcggcccgccagtgttgatggatatctgcagaattcgccctttcgagcggccgcccgggcaggtacactcggaaatggaaggcgatgtctgagtcttccttcatctcggtatggaaatccacctgcagctgtgggtccatgacgaaagggatgatcggtgtccctgtgattatcacacaagaaccagtagacaaggacacaggccgtgtgtgtggtacctcggccgcgaccacgctaagggccgaattccagcacactggcggcccgttactagtggatccgagctcggttaccaagcttggcgttaatcattggtcaatagcctgttttcctgtggtgaaaanatgnttatcncgctcacaattccacaccaacatnctgagaccggaaagncattaaaagtgttaaagcnctggggggtgcccttaattgagttgagccttaacttcacatttaatttgccgttgncgcctnacttgcccggctttttncaggttnggggaaaaccctgtncggtgcccannctggcatttaaatggaaaattngggcccaaaacnntcgcnggggggnagaaggccggggtntttgcnggnanttggggcngcctttttttcccgccttttccttttgnttcaacntgggaattcggcttggaggccntcgggtttctgttntccgggcnttgnngggccgnaagcngngntattcnatnccnttaaaacttnnnntagggccgnttaataaaanggggttnatttttctcgnnttttttngatggngncnntnatccgccnnanaaaannaancnattgggggnannaaanantnggcccaancantagangggcncnngnanacctnnnttanaaanggccccncntntggctngncannnttttttncatntagnattcccgtnncccncctggnnnaagccttttaaaaaaaaaatntnnatcgntnttatactnnnngaagtngggcnnaan

SEQ ID NO: 7165 - DNA, 848 bp, Homo sapiens
  misc_feature 713, 755, 762, 772, 787, 793, 808, 809, 815, 822, 823, 832,839, 845: n = A,T,C or G
atagggcgaattgggccctctagatgcatgctcgagcggccgccagtgtgatggatatctgcagaattcgccctttcgagcggccgcccgggcaggtacctgactttgggtaagttgccagaataagatcatcaggcttggcttggaaattacatactttttcccaccattcttttgataatatcaacgtagggactccatctacttccatgatgttaaacagttctggctttttttccatcgtgggagcgtttttctcaatcttcgccattgggaatctggtatctcaggcagcagaggaagcagcttgctgcctttagtcaaactgcttcctggaaacccagagccaggtccagctccaggacactgtgcaagcaagagcacagcaggtccccgcgtacctcggccgcgaccacgctaagggcgaattccagcacactggcggccgttactagtggatccgagctcggtaccaagcttggcgtaatcatggtcatagctgtttcctgtgtgaaaattgttatccgctcacaattccacacaacatacgaagccggaagcataaagtgtaaagcctggggtgcctaatgagtgagctactcacattaattgcgttggcgctcactggccgcttttcagtcgggaaacctgtcgtgcccagcctgcattaatgaatcggccaaccccccggggaggaggcggtttgcgtattngggccgctctttccgcttttcttggttcactgactcgcttgngctcggnccgttcgggntgcgggcgaagcggnattcangttaacttaaaaggnngggaanaccgggnnttccccaanaattcangggganaat

SEQ ID NO: 7166 - DNA, 1061 bp, Homo sapiens
  misc_feature 1, 2, 4, 7, 11, 15, 22, 23, 25, 26, 28, 31, 34, 39, 40, 45,47, 54, 60, 62, 63, 64, 66, 67, 69, 71, 77, 80, 83, 84,85, 86, 87, 88, 89, 90, 92, 97, 102, 104, 105, 115, 116,118, 121, 124, 127, 128, 133, 137, 202, 513, 726, 830, 833: n = A,T,C or G
  misc_feature 844, 848, 856, 890, 904, 925, 929, 937, 949, 958, 963, 969,971, 986, 992, 993, 1002, 1008, 1017, 1020, 1030, 1033,1036, 1039, 1045, 1047, 1048, 1051, 1052, 1053, 1054, 1056,1057: n = A,T,C or G
nncnttntttncgtnatgtggnncnntntcngcngcggnngtttntnggcgctnggatcncnnntnntncntccggntcncannnnnnnngnggtgnggggnannttatatacanngnttncgnctnnttgcncctntagtatgcatgctcgagcggccgccagtgtgatggatatctgcagaattcgccctttcgagcggncgcccgggcaggtacgcgggaggcaggcaagctgggcagccagcgcaggggcttctgctgagggggcaggcggagcttgaggaaaccgcagataagtttttttctctttgaaagatagagattaatacaactacttaaaaaaatatagtcaataggttactaagatattgcttagcgttaagtttttaacgtaattttaatagcttaagattttaagagaaaatatgaagacttagaagagtagcatggaggaaggaaaaggataaaaaggttttctaaaaccatgaacggagggttggagatgaagcttnttcatgggaggtaaaaaatgttatttaaaagaaaaatttggagaggaaagggacctaccagagccccgaattaataccaataggaaggggccaatgccttttagaattaaaaatgaagggtggacttaaacagcttaaagttttagttttaaaagttgttaggtggattaaaaataattttggaagggcgaatcttttaaaaaggagaattanaaccgaaagggtgatttaaaaagacctttggaaatcccattgaccccaggggaagaaatttgccggttcattttaaaaggccttagtttaaaccgccattttanctnaaaacgccagnaccnaaaaaatnggaaaaggaattaaatttgggggaagtgggttanggaatgaaaacccnattttgggaagaaagaatagnaagnttttgaangtggggaaaaancctgggaanaacanaaaagntncccttcgggccccgngaaccnnccccttaangggcgnaatttccanccnccccttggcnggnccngtnacttantnnggnnnncnnaccg

SEQ ID NO: 7167 - DNA, 1075 bp, Homo sapiens
  misc_feature 1, 2, 4, 5, 6, 8, 9, 11, 15, 18, 20, 21, 23, 24, 26, 27,28, 30, 32, 33, 35, 39, 40, 42, 43, 44, 45, 49, 54, 55,57, 60, 62, 64, 65, 66, 67, 68, 69, 70, 74, 77, 78, 81,82, 83, 84, 85, 86, 87, 90, 93, 94, 95, 99, 104, 106, 107,108: n = A,T,C or G
  misc_feature 109, 501, 502, 705, 717, 759, 791, 796, 816, 830, 832, 838,851, 857, 864, 866, 873, 882, 891, 892, 904, 911, 924, 929,940, 943, 946, 952, 972, 973, 976, 982, 988, 1008, 1011,1012, 1013, 1021, 1033, 1038, 1046, 1047, 1066, 1072: n = A,T,C or G
nntnnngnntnatanatntnntnntnnntntnnantgtnntnnnnattntgtanngntgnanannnnnnnattnttnnatnnnnnnnagnagnnntggnggggnannnnactactatgggcgaattgggccctctacatgcatgctcgagcggccgccagtgtgatggatatctgcagaattcgccctttcgagcggccgcccgggcaggtacgcggggctttttctttctttcttagctgttagctgagaggaagtctctgaacaggcggcagcggctcttatagtgcaaccatggcagactattcaacagtgcctccccctcttctggctcagctggtggcggtggtggcggcggtggtggtggaggagttaacgacgctttcaaagatgcactgcagagagcccggcagattgcagcaaaaattggaggtgattgcagggacatcactgaattcaaatggactatggtttatggggggacaaaaaaaggaccctttannaagatgggaggatcaacccaggatggcttaagaaagttgctccttcaaaatggacctcttttggaacaacagtttacccaccggatgcatcaagcaagcaaaaagaatcttggtaatgaccagaagaaataccaaaagtttcccagaatgggaatggttgggattccataaatttggccagaggagggtgaaacaagatctcnacgccattaccnaacaagggaaattctgggattgcaaaaaatacaaggattagnctccctggacagtggggtgggcccttcccaanaaaanggtccctgttattgtttaanctggggaacaaccntngaattnttgttccaaagtncagggnaaaaacngnttacctnggacccaanaattgtttnnaaaaaagggaanaaacccngcttcccttgggnttttncattaatgggncgnatngggccncggggaaaaaagccattttnnaanaaaaantaattntttttccccccttaggcaanggnnngggatttnatttcttttggnaaaanggggggannaaaaccttttaaaaccagncttttnagg

SEQ ID NO: 7168 - DNA, 1157 bp, Homo sapiens
  misc_feature 1, 2, 5, 7, 8, 12, 14, 18, 21, 22, 28, 30, 32, 35, 38, 44,46, 51, 55, 56, 58, 61, 63, 69, 74, 78, 83, 85, 86, 91,92, 93, 94, 95, 101, 106, 109, 110, 111, 112, 114, 115,116, 117, 120, 121, 122, 123, 124, 127, 129, 214, 220, 240: n = A,T,C or G
  misc_feature 422, 644, 653, 661, 665, 703, 704, 708, 740, 766, 777, 791,799, 806, 821, 838, 839, 846, 855, 918, 930, 931, 936, 942,957, 967, 968, 980, 995, 1002, 1005, 1008, 1012, 1013, 1014,1015, 1018, 1019, 1029, 1038, 1039, 1043, 1049, 1057: n = A,T,C or G
  misc_feature 1058, 1066, 1067, 1071, 1072, 1076, 1080, 1081, 1082, 1086,1092, 1096, 1098, 1102, 1104, 1109, 1120, 1130, 1131, 1132,1138, 1139, 1141, 1143, 1144, 1145, 1150, 1155, 1156, 1157: n = A,T,C or G
nnttngnngatntntatnttnncgtgtntntnatnttntttaantnttttntaanngngtntnttatcntaacntttnttggnannttttnnnnntttagnagagnggnnnntnnnntannnnnatnantatagggcgaattgggccctctagatgcatgctcgagcggccgccagttgtgatggatatctgcagaattcgcccttagcgtggncgcggncgaggtacgcgggggaactnaggtgccctgaccagcggcgtgcacaccttcccggctgtcctacagtcctcaggactctactccctcagcagcgtggtgaccgtgccctccagcagcttgggcacccagacctacatctgcaacgtgaatcacaagcccagcaacaccaaggtggacaagaaagttgagcccaaatcttgtngacaaaactcacacatgcccaccgttgcccagcaccttgaactcctggggggggacccgtcaggtcttcctcttccccccaaaaacccaaggaccaccctcatggatctcccggggacccctgaggttcacatgccgttggtgggtgggaccgtgaagccaccgaaagaaccccttgaggtcaagtttcaaactggtacctgccccggggcgggccgctttnaaaggggcngaaatttncaancaacaacttggcggggcgtttacttaagttgggattcnngagnttcgggttaacccaaaggctttgggccggtanattcaattgggtcattaaggcctggngttcccctggngggtggaaaaattngttaattncggcttncaccaaattttcccnacaacaaaccattaacnnaaggccngggaaaggncaattaaaaagttggtaaaaagccccttggggggtggccctaaaatgggaggttggaagcctnaacctccaccanntaaanttggcngtttggagggctttnacttggcccnntttttttcccangtccgggggaaaaantcttttnagnggncccnnnnttnncatttaaaanggaaaatgnngggnccatancacctccnnggggaaannggtnntggntatnnntctnttaggnggangntttntnttcantttttcttttnactttatgannnttattnntngnnngcttnattgnnn

SEQ ID NO: 7169 - DNA, 1236 bp, Homo sapiens
  misc_feature 1, 2, 4, 6, 8, 10, 13, 14, 18, 24, 26, 27, 30, 31, 32, 34,43, 45, 47, 59, 64, 68, 74, 82, 83, 90, 91, 103, 106, 109,110, 113, 115, 117, 119, 123, 132, 133, 135, 147, 157, 172,176, 184, 190, 193, 199, 203, 206, 207, 208, 211, 213: n = A,T,C or G
  misc_feature 218, 222, 224, 229, 230, 238, 240, 242, 247, 291, 296, 307,308, 423, 437, 471, 478, 501, 511, 529, 544, 551, 594, 602,615, 623, 625, 627, 643, 667, 728, 730, 736, 739, 745, 747,749, 751, 775, 779, 783, 790, 803, 809, 840, 843, 855: n = A,T,C or G
  misc_feature 862, 865, 867, 889, 895, 898, 924, 927, 936, 950, 955, 961,963, 970, 971, 975, 976, 979, 982, 983, 990, 992, 1003,1008, 1016, 1017, 1018, 1029, 1036, 1039, 1042, 1046, 1062,1064, 1075, 1077, 1081, 1082, 1086, 1090, 1092, 1097, 1101: n = A,T,C or G
  misc_feature 1104, 1107, 1110, 1111, 1114, 1126, 1127, 1133, 1136, 1141,1143, 1147, 1150, 1152, 1153, 1155, 1159, 1160, 1161, 1162,1168, 1173, 1176, 1181, 1182, 1183, 1193, 1209, 1211, 1216,1224, 1225, 1226, 1227, 1233, 1235: n = A,T,C or G
nngncntntnatnnggtntaaaananntannnanttttaatantntnttttcaaacttntaaantgtnttcttntttctaanntttcttnnctccagtagagntgngtnntgncnantnactntcggtccgnntngatcccctcttntgcatgcatnctgccgagccggccngccnagtgtgantgtttntcntgaatnaatncgnnnttngngtggnggcngncgtanntacaaaancnanttatncccattgtgggcctgggcacttggaggtctcttctcggcaaatngaaanaagcggatganngtggccattgatgcagaatatcgccacattgactgtgcctatttctatgaggaatcatacatgaggtgggaggaagccatccaagagaagatccaagtagaaggctgttgatgcnggagagggacctgnttcatacgtcagcaaggttgtggcccacttttcntttgaangaggaccccttgttgaagggaanagctcttttncagaatgacctcttcaangggaccctggaagcntgaggcntatcttgggacgtcttatcttttattcacttgggctcacaagngggatttncaaggaccttggngggattgnancnttttttattcccccanagaatgtaatttaaaaggggtaanatatttgaattcaaggtgggcaaaaaaagggaaaccggtttcttttgggaatggccccttngnggtagngcnccattngngnantggaaagccttggtttgggtaccngaantggngccttgngttataaaaaagncccccntaggggggttccttcaaaaaatttttcaaanccnaccttttcccangaatcangangnagggcctttcttttggaaacanaaaccntgngaaccttgataaattattaaaacccnagntggaacctnaaccccaatgattngaagntggagnanccccatnnaccnnttnccnnccaaggnanagaaaaacctngaatnccaaggtnnnccttgcccctnggggccnggnccntctntcgtaaagggggcgtnantttcccataancnactnnggcntggncnggtancttnggnggntanngcnaacctttgtgtnncccaanatntcttngngagntgntnnanatgnnnncattcnctttnatntcacnnntcatgtacanttatttaattcattgntnctganataatctnnnntctttntnc

SEQ ID NO: 7170 - DNA, 836 bp, Homo sapiens
  misc_feature 269, 359, 360, 374, 375, 399, 447, 462, 485, 506, 522, 540,547, 552, 564, 568, 571, 576, 578, 582, 584, 586, 587, 595,603, 606, 609, 622, 630, 635, 637, 657, 661, 672, 680, 689,691, 694, 703, 726, 727, 731, 735, 737, 747, 753, 755: n = A,T,C or G
  misc_feature 757, 761, 764, 767, 770, 772, 773, 775, 779, 781, 792, 793,803, 804, 805, 808, 810, 822, 824, 825, 826, 828, 835, 836: n = A,T,C or G
catgctcgagcggccgccagtgtgatggatatctgcagaattcgccctttcgagcggccgcccgggcaggtacagaattttgggagaggccatttggcaagccattggtctgaataatttggagggggaaatcctaaggtggtggagttgctgcgtggacacggctataggttggtgtgacatgatttcgcattaattgtttgtcagctgtcagtaggctgacctaacgttctagcatgcctcttgagggcctttccaactgagctctntggaggagggtaggaaagtcagggaaatcatgcaatcccatctggggaagggaaagcatctcaagatttgtgaggttccctgggaaaggnntttaccacaaatgnnacatcaattcaaggaaagtctgcngatagagagaaagccaagatcaggggttaaaagataaaggcaaggtancaccggggagcttgngcatgacacagaaacatctctgntttttaccagccagaacgaanaccaagccatccccanttaaaagggcttggcaanaggtgtnttggnaaatttctccancccnggnccccnanacantnannggtggaancttctccnttnttnacctttcaagatncttttacntttcnantttttttcctttaaatgatntccntgtggaccatncccatgantgtaccttntngcnccccaaacnacgccttaagggcaggattttcnnggcncacntngccggcccgntacctnantnggtntcnccnacntnngnttancnaaaactttggnnttaattcaannngcnanagactggtttcntnnngnaaaaatnn

SEQ ID NO: 7171 - DNA, 1093 bp, Homo sapiens
  misc_feature 1, 6, 7, 9, 21, 22, 23, 26, 28, 29, 36, 38, 41, 43, 45, 46,47, 48, 52, 55, 58, 59, 61, 75, 76, 78, 79, 80, 81, 82,86, 92, 93, 94, 95, 96, 98, 101, 110, 111, 118, 152, 407,409, 448, 498, 508, 533, 546, 553, 589, 593, 616, 624, 636: n = A,T,C or G
  misc_feature 676, 704, 725, 728, 786, 794, 801, 805, 818, 819, 838, 844,852, 853, 857, 859, 860, 867, 869, 898, 904, 914, 917, 919,936, 938, 939, 954, 955, 958, 960, 962, 966, 968, 973, 983,986, 997, 1005, 1008, 1015, 1020, 1036, 1039, 1041: n = A,T,C or G
  misc_feature 1044, 1059, 1060, 1061, 1067, 1070, 1075, 1080, 1083, 1085,1089, 1091, 1092, 1093: n = A,T,C or G
naattnngntgatatatttcnnnctntnnccctggntnatnangnnnnttanttncanntntttattaattttanntnnnnnagtnaggggnnnnnantgntttttcttnnagggctnattgcgccctctagatgcatgctcgagcggccgncagtgtgatggatatctgcagaattcgcccttagcgtggtcgcggccgaggtacgcggggagggaaccgctcagatacccttccacaccgtggaaactttgttcttaccctcttgacgaaaaatcttgctgctgctcactctttgggtccacaccacctttaagagctacaacgatcaccacgacagtctgcggcttcattcttgaagtcagtgacaccacaaacccaccagaagggagaaactccagacacatntngaagggaacaaactccagacacaacatctttaacagctngtaacacaccactgtggaaggtccaccggcttcattcttggaagccagcngagaccacgnaaccctcttggaagggaaccaactntgggacacaagcnagggacngtggagacttctaccttgctcactcaggaaatcatnttancggcacccaaccatgggcccacngtttttgnggggagcttcanttaccttgcccggggccgggtccgcttcgaaaggggccgnaaattcccaagccaccactgggcgggcncgttacttagtgggaatcccngangcttccggttacccaaagcctttggcggtaaatcaatggggcaataagcctgggtttncccttggnggtgganaatntggttattcccgnnttcaccaaatttttccacnacaaantattacgnnagcncnnggaaggnanttaaaagggggttaaaaggccctgggggntgcccntaaattggangtngnggcttaaacctcacaantnnaatttggggtgttgnngcntncncatngncccgntttttcccanatncggggaaaaanccttgggntgngcccccncctgntttttaaaggaaattncgncncanaccccccggggggannngggtcnggntttgnttatntgngngccncnnn

SEQ ID NO: 7172 - DNA, 810 bp, Homo sapiens
  misc_feature 164, 265, 318, 430, 581, 660, 665, 678, 680, 719, 728, 729,736, 740, 745, 756, 763, 767, 777, 788, 789, 798, 805, 806,807: n = A,T,C or G
catgctcgagcggccgccagtgtgatggatatctgcagaattcgcccttagcgtggtcgcggccgaggtacttttttttttttttttttttttttttgagacagagtctcgctctgttgcccaggctggattgcagtggtgtgacctcggctcactgcaacctntgcctcccgggttcaagcgattctcctgcctcagcctcccgagtagctggggttacaggcgcccactaccacgccaggctaatttttgtatttttaaatanagaccgggtttagccatgttggccaggctggtcttgagctcctgacctcaggngatccacccgccttggcctgccaagatacagttcttaaaaagtagtcttgacacatcattcaagacatttttcgttaattgaaaagcctgctattaagtgtttataagcctntatggtagttactgcattattcttgtggagccatcacaggtcctctccccttccttgtaatgatgtgtttaaagttctctgaaaacatggaaaagatgctgtaggcataaatcaaaaagtcacttaaaccactggatgcccatttctcagngccgggtcaaacaaatgccttgagggacctgtgggcttggacatgtgtggttttataggggatggtcctatcacccaanccagngggctagttttananattggggaaaaaggatttgaaaaaacaaactttggtttntttcttttnnaaaaggncctntccangggggggaaanaaagatnaaanaagaggtttncaaaactttcnnaaaaattcnttttttnnnggg

SEQ ID NO: 7173 - DNA, 1063 bp, Homo sapiens
  misc_feature 5, 8, 14, 15, 16, 17, 19, 20, 22, 23, 24, 25, 30, 32, 34,35, 36, 37, 38, 42, 43, 44, 48, 50, 51, 52, 53, 57, 58,60, 62, 63, 65, 73, 74, 76, 82, 83, 84, 85, 87, 88, 95,96, 97, 104, 108, 113, 121, 142, 510, 515, 518, 577, 596,599: n = A,T,C or G
  misc_feature 713, 757, 770, 795, 805, 810, 816, 831, 847, 857, 866, 867,875, 878, 883, 897, 898, 908, 927, 933, 948, 965, 967, 969,979, 984, 989, 990, 993, 1009, 1012, 1017, 1019, 1027, 1030,1039, 1040, 1057, 1058, 1059, 1061, 1062: n = A,T,C or G
atcgnttnaagttnnnntnntnnnntctantntnnnnntttnnnaatnannnnaagnntntnntntaattttnncnaaaagnnnntnnattaggnnnaattttnggtntttgngccctctngatgcatgctcgagcggccgncagtgtgatggatatctgcagaattcgccctttcgagcggccgcccgggcaggtacgcgggtggaatccagatggtattgacccaaaggaactggaagacttcaaattgcaacatgggtccattctgggcttccccaaggcaaagccctatgaaggaagcatcttggaggccgactgtgacatactgatcccagctgccagtgagaagcagttgaccaaatccaacgcacccagagtcaaagccaagatcattgctgaaggtgccaatgggccaacaactccagaaagccttgacaaggatcttcctgggagagaaacattatggttattccagatcctctactttgaaatgcctgggagggagtgancagtnatncttacttttgaggtggcctgaaaggaaatcttaaaatcatggtcagcctattggcccgntttgaccctttcaaatatnganaaaggggatttttaactacccacttgcttcaatggtctggttcaaagaggagtttttaagaaaaggaaaaatttttggaaaaggcatgggtggggaacttatttccccaattgntaccctcgggcccggcggacccacgcttaagggggcggaatttnccaggcacacctnggcgggcccgtttactaagtggatnccgagcttcnggtanccaagncttggcgttaatcantggggtcatagcctgntttcccttgnggggaaaanntgggttanttncggcntcaacaaatttccnncaaccaaacnattactgaagcccgggaangccatnaaaggtggttaaaangcccttgggggtggccntnantggagggggngcctnaaccnncanaatttaaatttggggntgngggcntnaacttgcnccnctttttcannatggggaaaaaacttgnnngnng

SEQ ID NO: 7174 - DNA, 833 bp, Homo sapiens
  misc_feature 63, 530, 549, 567, 625, 637, 638, 662, 667, 692, 693, 695,698, 709, 712, 726, 742, 758, 759, 761, 763, 770, 773, 776,790, 794, 795, 803, 806, 808, 816, 819, 821, 823, 824, 831: n = A,T,C or G
tagggcgaattgggccctctagatgcatgctcgagcggccgccagtgtgatggatatctgcanaattcgcccttagcgtggtcgcggccgaggtacacggggacctgctgtgctcttgcttgcacagtgtcctggagctggacctggctctgggtttccaggaagcagtttgactaaaggcagcaagctgcttcctctgctgcctgaaataccagattcccaatggcgaagattgagaaaaacgctcccacgatggaaaaaaagccagaactgtttaacatcatggaagtagatggagtccctacgttgatattatcaaaagaatggtgggaaaaagtctgtaatttccaagccaagcctgatgatcttattctggcaacttacccaaagtcaggtacctgcccgggcggccgctcgaaagggcgaattccagcacactggcggccgttactagtggatccgagctcggtaccaagcttggcgtaatcatggtcatagcctgtttcctgtgtgaaattgttattccgctncaatttcacacaacatacntagcccgaaagcataaangtgtaaaagcctggggtgcctaatggagtggagctaactcacattaatttgcgttgcnctcacttgcccnntttttccaagttcggggaaaaccntgtcngtgcccagctggatttaattgaatnngnccnaccccccgggngangagggcgggttttncgtttttgggcgcctnctttcggctttcttgnntnanttgactnggnttngcctcgggccgttncggnnttccggcngancnggttattnagntntnncttaaangg

SEQ ID NO: 7175 - DNA, 1075 bp, Homo sapiens
  misc_feature 3, 8, 10, 11, 12, 13, 14, 15, 16, 17, 18, 19, 20, 23, 25,27, 28, 29, 30, 34, 35, 36, 38, 39, 40, 43, 44, 46, 49,50, 51, 52, 56, 57, 58, 59, 60, 62, 64, 69, 70, 71, 73,74, 75, 78, 80, 81, 82, 83, 84, 85, 86, 87, 89, 90, 91,92, 95: n = A,T,C or G
  misc_feature 99, 105, 106, 109, 112, 121, 122, 123, 126, 129, 135, 141,143, 149, 151, 159, 176, 178, 188, 224, 226, 240, 382, 462,503, 526, 531, 658, 747, 788, 791, 820, 827, 834, 856, 868,870, 885, 897, 900, 903, 947, 953, 957, 986, 992, 994: n = A,T,C or G
  misc_feature 997, 999, 1027, 1029, 1040, 1045, 1056, 1058, 1060, 1063,1064, 1065: n = A,T,C or G
ttnatgtntnnnnnnnnnnntcnantnnnnattnnnannntanntngtnnnntgcnnnnnangnttatnnnannnctntnnnnnnnncnnnnagnaagngaagannaancgncttattatnnngcnaantgggantctggntncatctngntgcatgcngcgagcggctcgccagngngatggatatntgcagaattcgccctttcgagcggccgcccgggcangnacgcggggaccganattcaggaacctgccactcctgccccactaacacaattctgaaagcccaccagccttatggtgtccaggcctgtgtgccctgcggtccagggaccaagaacaacaagatccactctctgtgctacaacgattgcaccttctnacgcaacactcccgaccagggactttcaactacaacttctccgctttggcaaaacactgtcactcttgcttggaagggcncaagacttcacttccaaaggggcttgaaaatacttttccancacttttaccccttcaagtctcntgtgngaaaacccaagggtaagggaaaaaatgtctgtgttggcaccggacaaatgtcacttgaccctcacgggattccttgaggggtggagttcaaggggtttcctccaaaatctatcacagccctacgtcntgcccagggccagttcaatcattcccccccaggaggttgacaggcttacaagggcccgggggtttttccttcaacaggcccttggtcangcccttgctggaatcgactttaattggggggtggaccaaancangaatattgaacttctggggatgggaaatnaaccctncccccangcttggaaaactttttttcccnacctggggaagntncctttggggaaatancccgggaccgtngantcntttttttttataagggttcccaaatggaatggtggaaccccaantccccncaantttcttgggggagaatcaaacccccccanttccgngnttnanggtggcaaagtccaacaaaaaaaacttntncccttggaaanttttngttggttgccnangnaannngtggctcaaa

SEQ ID NO: 7176 - DNA, 808 bp, Homo sapiens
  misc_feature 590, 617, 692, 697, 700, 707, 717, 730, 749, 761, 768, 772,781, 783, 788, 796, 805, 806, 807: n = A,T,C or G
gggccctctagatgcatgctcgagcggccgccagtgtgatggatatctgcagaattcgccctttcgagcggccgcccgggcaggtacgcgggggcagaggctgagcgtgtttgtgtaggagcactcaatactgcatatgtttcaataattaactagtgtatttaagaaacttcattctacgtgggcatggtggctcacgtctgtgaacccagaactttgggagaccgaggcaggtggatcacctcaggtcaggagttcgagaccagcctgaccaacatggccaaaccccgtctctactaaaaatacaaaaactagcctggtgtggtggtgggcgcctggaatcccaactactccagaggctgaggcaggacaatcgcttgaacctgggaggcggaagtggcagtgagccgagattgtacctcggccgcgaccacgctaagggcgaattccagcacactggcggccgttactagtggatccgagctcggtaccaagcttggcgtaatcatggtcatagctgtttcctgtgtgaaattgttattccctcacaattcacacaacattacgaacccggaaagcattaaagtgtnaaagcctggggtgccttaatgagtganctaaactcacattaaattgcgtttgcgcttcactggcccgcttttcaattcgggaaaacctgttcgtgcccaacntgccnttnattgaantcggccaacncccccgggggagnaggcgggttttggcggtanttggggcgcctntttcccntttncttggtttnantgaanttcttggncttcggggnnnt

SEQ ID NO: 7177 - DNA, 897 bp, Homo sapiens
  misc_feature 8, 186, 191, 195, 199, 200, 203, 205, 217, 224, 226, 228,233, 235, 236, 241, 242, 243, 246, 249, 250, 252, 276, 281,285, 287, 290, 291, 302, 303, 306, 307, 310, 319, 323, 335,339, 341, 349, 367, 372, 377, 383, 389, 390, 391, 392: n = A,T,C or G
  misc_feature 397, 407, 420, 425, 433, 439, 443, 448, 455, 456, 457, 462,464, 470, 479, 481, 485, 486, 500, 504, 505, 514, 518, 520,527, 528, 532, 533, 539, 540, 545, 551, 552, 555, 560, 567,577, 581, 584, 587, 589, 592, 593, 595, 601, 603, 608: n = A,T,C or G
  misc_feature 612, 615, 622, 632, 642, 654, 656, 660, 661, 682, 690, 692,694, 695, 701, 725, 729, 736, 738, 751, 752, 753, 754, 762,763, 769, 772, 773, 780, 782, 784, 802, 804, 809, 814, 825,827, 829, 839, 848, 850, 852, 853, 859, 866, 869, 872: n = A,T,C or G
  misc_feature 873, 874: n = A,T,C or G
gaagttanacgtaacgactcactatagggcgaattgggccctctagatgcatgctcgagcggccgccagtgtgatggatatctgcagaattcgccctttcgagcggccgcccgggcaggtacttttttttttttttttttttttttttcttttttttttttttttttttttttttttttttttttngatgnatcncttnntanantaaaaaaaaacnttttttnantngaggntnnggaannnttnaannanatttttttttttaaaaaacccccnccccngcantnccnngggcccaaccnnacnnagngttaaatcnaacncactgggccggncctnantaatggancccagctccgaaccaagnttggngtaangatggncatagnnnnttccngaaaaaaatntttattcccttanaaatncaaaaaanaaaccngccngaaanataaatnnnaaggngnggggtncctaatgangnaacnnaccttaattaattngggnncacttcacngccntnttttcanngaannaaaacnntcctncccccnnttnattanaataaancccccccccncccnggnggnanggnngncctttntntaatngggnctntcttttnctttttcttnaattaaaatnaaaatacccttngngttnnggtccggtttgggggtggggngccgagangntnnttttanccttaaattaaaagggggggttantttnttttttntnccaaaaaaaaatnnnnggggggcnnaccccnaannaaaaaananantttttaaaaaaaaaaagncnaatanaaaanggccacccaancnanaaaaaaaggncccccttgncntnntttttntaaaaanaanggnnncccccccccaaaaaaaaaaaaat

SEQ ID NO: 7178 - DNA, 831 bp, Homo sapiens
  misc_feature 486, 504, 635, 638, 653, 660, 666, 672, 678, 681, 682, 731,736, 740, 765, 767, 775, 791, 803, 819, 821, 830: n = A,T,C or G
atagggcgaattgggccctctagatgcatgctcgagcggccgccagtgtgatggatatctgcagaattcgcccttagcgtggtcgcggccgaggtacgcggggggtgcctgggttattacatttagcagaaacccttctagctgactccctgaatggatgaccttgtttaagaaagaaatgtgttcatggctctatctaatgttcctcctctccggaactactttctggaagaagacaattataagaacatcaaacgtcctccaggggatatcatgttcttgttggtccggcgttttggagagctgatgagaaagctctggaaccctcgaaatttcaaggcacatgtgtctccccatgagatgcttcaggcagttgtacctgcccgggcggccgctcgaaagggcgaattccagcacactggcggccgttactagtgggatccgagctcggtaccaagcttggcgtaatcatggtcatagctgttnctgtgtgaaattgttatncgctcacaattccacacaacatacgagccggaagcataaagtgttaaagcctggggtgcctaatgagtgaagctaactcacattaattgcgttgcgctcactggccgctttccaagtcggggaaaaccctngtngtgcccagcttgcanttaaatnaaatcnggcccnaccccnccnnggaagaagggcgggtttgccgttatttggggcgcctctttcccgctttncttcnggtnacttgactccgcttgggcttcggtncngttcggcntgcgggcgagccgggntttaagcttcanctcaaaagggcggggnantaccggttnt

SEQ ID NO: 7179 - DNA, 826 bp, Homo sapiens
  misc_feature 265, 443, 461, 488, 526, 548, 591, 592, 642, 649, 665, 666,688, 694, 698, 699, 700, 716, 717, 726, 750, 753, 757, 774,777, 783, 788, 803, 810, 822: n = A,T,C or G
actatagggcgaattgggccctctagatgcatgctcgagcggccgccagtgtgatggatatctgcagaattcgccctttcgagcggccgcccgggcaggtacttttttcttttttttttttttttttgaaatgcagtccagcctgggcgacagagtgagactctgtctcaaaatttaaaaaaaaaaaaaaaaaaaattatatgggactggaagaggaggtccagtccattgtaacctgtggataataccagctccatgtcagggnggttctttcaattcattcaccaagcaagcatgcttttgaggcacgctctgtcctacacataaggaaatcagacatagggggtcccactcccctgaactcataatccaagaggtggggagacagacagaaatgagtaggtgataaggatgggaggaaatgaaggaggatgatgggatanaggggcctgagtgataanaaggggcgaggaggatagtaccttggncccgaccaccctaagggcgaattccagccactggcggncgttactagtggatccgactcngtaccaagcttggccgtaatcatggtcatagcttgtttcctgnngtggaaaattgttttccgctcacaatttccccacaacataccgaacccgnaaagccntaaaagtggtaaagcnntggggtgcccttaatgagtggngctaancttnnnatttaattgcgtttgnncttcactgncccctttttccaatccgggaaaanctnttcnggcccaccttgcatttnttnaaatcngcccnaccccccgggggggnaggcggntttcgctttttnggcc

SEQ ID NO: 7180 - DNA, 813 bp, Homo sapiens
  misc_feature 604, 633, 652, 671, 702, 710, 722, 725, 728, 735, 745, 767,783, 796, 799: n = A,T,C or G
gactcctatagggcgaattgggccctctagatgcatgctcgagcggccgccagtgtgatggatatctgcagaattcgccctttcgagcggccgcccgggcaggtactttctcttggtctctgccatcacaatggcagcccgggttcggggttgaattcccagcttaagggatcatcctttgtcttctgtttgtctatgtatttatatgtagtatgtgtgtgtaatataaaagaattttaattaattgctttaataataataagcttaaatcaaatattttgtcacataagtaaaaagtgtaatgccttttagttcatgtgacttaagtaatctttgggaaataaaaacagttttaaagattactggtaaaataaagacatttggtctaaattatgcaggtcagatattaagtttgctaaatgccttaaggtcataaactgctgctttgactttttttttttttttttgagacagaacctccagcctgggtgacagagtgagatttcatctcaataaataaataaataaacccattttaaaaagtccaaaacccacaaaagtccaaaacttaaaactctgagcactgacacgatgcccaagtagnaacattttacatctaacctcctgggatanggcacagtcaaaatgcaangaaaactttgtcttatgcncaaaattatttaaaaaattatggtaaaaatnccctttanggtatgttttgnaanggngtttttnaaacaaaatngaaatttcaaggttgcaccttngggtctcggcccccangatattttcaatnatnatgttttgccaaat

SEQ ID NO: 7181 - DNA, 800 bp, Homo sapiens
  misc_feature 553, 570, 585, 600, 608, 613, 622, 626, 632, 663, 697, 707,712, 734, 757, 760, 769, 774, 778: n = A,T,C or G
gaattgggccctctagatgcatgctcgagcggccgccagtgtgatggatatctgcagaattcgccctttcgagcggccgcccgggcaggtactactgctccggtaatgagcaggaagtggagctcttcgaccatctggtatgtccaacggcttggatactccttccttcccattattttctttaatgaataccttttctaattcaggacttattccttctacattgcagggcacacgcgaaacagatgattttggcactgatatatttgacagtggcataggaactgaccttgatccagtagcctgagtgtgactgattgttatatggttgccatgaagaggtgactggcgatctttctccttactgtgacgactactctgtttactgcgttgtaagttgctgcctcagtttggcgatctgctcttttagttgatcagcactcccccatgacgcagaacgctgatgtgacctcttttctgcaccctcttctgcccaacagctaggtgtctgagtagctttgtctttcatgcatgaggggtagtggaacatgangatcccgtggccactgncctgtgaggtaaggnccctgttattggatncaaaagangaggntcgcccttnttgnaccttngggccgcgaccacccctaaggggcgaaattncaacacactgggcgggccggtacctaagtggatnccgaagctcnggganccaaagcttggcggtaatcatnggccatagcttgttttcctgggnggnaaatggttntccgntcanaattccccacaaacaataccaa

SEQ ID NO: 7182 - DNA, 393 bp, Homo sapiens
  misc_feature 209, 210, 213, 219, 220, 225, 227, 234, 242, 246, 248, 250,252, 255, 257, 258, 268, 270, 278, 280, 293, 294, 299, 300,301, 303, 306, 310, 314, 323, 331, 333, 341, 347, 348, 365,373, 382, 384: n = A,T,C or G
acgactactatagggcgaattgggccctctagatgcatgctcgagcggccgccagtgtgatggatatctgcagaattcgccctttcgagcggccgcccgggcaggtacttttttttttttttttttttcttttttttttttttttttttttttttttttttttttttttttttttttttttttttttttttttttttaaaaaaaacggnnggntttttnnttaantnaaaaggnaaaaaaanaaanangnanggntnnccaattaaantngccaaaantnaaaattcaatttnnttaannnanccnaaantgcnaaaaatttnaaaaaaananccaaaatngccaannggttttttttttttaantttttttnaaaaaaaananaaaaaaaac

SEQ ID NO: 7183 - DNA, 1176 bp, Homo sapiens
  misc_feature 1, 7, 8, 9, 10, 11, 12, 15, 17, 22, 27, 30, 31, 33, 39, 41,43, 47, 48, 51, 52, 54, 58, 59, 63, 65, 67, 68, 69, 72,74, 75, 81, 83, 85, 87, 88, 90, 92, 93, 94, 95, 96, 97,98, 102, 103, 111, 112, 114, 116, 121, 125, 129, 134, 136: n = A,T,C or G
  misc_feature 137, 138, 143, 150, 161, 164, 166, 167, 168, 174, 179, 185,188, 194, 213, 221, 229, 237, 290, 424, 435, 510, 536, 539,542, 565, 574, 592, 595, 602, 609, 616, 675, 700, 702, 727,746, 748, 750, 776, 790, 792, 806, 838, 842, 873, 882: n = A,T,C or G
  misc_feature 888, 933, 938, 950, 960, 961, 968, 978, 980, 983, 999, 1010,1011, 1013, 1015, 1021, 1024, 1043, 1057, 1059, 1064, 1067,1068, 1069, 1070, 1072, 1079, 1089, 1091, 1102, 1106, 1114,1117, 1118, 1124, 1130, 1135, 1148, 1149, 1164, 1176: n = A,T,C or G
ngcctcnnnnnngtncngtttnccttnaanntnattcanantntcannagnnanatcnncgtnantnnnttngnngtgcangntntnntncnnnnnnncagnnaatgtganntngnacccntttntaanccccncnnnatttngttaaanttccccccccnccncnnngtttgncgttngatttnccnccgctnacccacccggggtctctgngcatgganctttgggngctgactnggacaaaagcacaaacacgaccagtcccatcctggctcccgtggggcttcttntatctacgcattgtatcgactgcattagttggactaagatgatgactcagttaaaggaggagacaaatgcttgactgtctaagcaaggaattggcccaagcttggcaagaaaaagcacactgcatacattaggnatacagtaagnggccaagaagctttctgcctgccgggattctgcaaacatttacacttttgtttttgcctgccaaaccttatcaangaaggggattgctggttgggcccagnggnagntctccacctggaacaaaaccaanaatgggcangcccaaaaaaggtctttngangtggtcnctaattnccagacnagccccaagaagtcccttcattcccgttcattcccaccgggggaagaagtcctttttgnagggggaaaaacattgaaagttccnancttcaatggccttttggccctaatnggggtccaaaattttcctntncnggggaaatcaacttgggggaatcatnggaataatcctttncnatttaacccccctngccgggacccacccaatggtttccaggggggngccnttttcccccttttttaaataggaccgtttcnggcttggancaattnaatttggggcgggggaggaaaccaaccgggacctggtcccaattnggatngcctggatttantgaaccggcnngtttttnccttgggagnanacnccccaaccctttctgnttgggggggtnncnanggaaanatnacctttcccaatttaattntccccccccctggnanacccncannnntnggggaanggcccccggngngcccgggtctntttnccccgggnaannccttgnggggcngtttnttaaaaaaaatannggatcccccccgggnaggagggaggan

SEQ ID NO: 7184 - DNA, 1120 bp, Homo sapiens
  misc_feature 1, 2, 4, 5, 7, 9, 14, 19, 30, 31, 34, 35, 39, 50, 51, 54,60, 63, 64, 81, 82, 84, 85, 87, 113, 131, 136, 178, 180,184, 192, 196, 197, 198, 205, 206, 238, 240, 242, 244, 375,391, 393, 398, 433, 451, 459, 556, 575, 629, 633, 636, 640: n = A,T,C or G
  misc_feature 648, 649, 664, 666, 673, 674, 698, 724, 726, 727, 737, 763,772, 780, 786, 787, 790, 799, 814, 817, 841, 847, 853, 854,862, 866, 875, 876, 880, 893, 909, 917, 928, 933, 935, 936,941, 942, 959, 960, 961, 971, 972, 975, 976, 978, 980: n = A,T,C or G
  misc_feature 990, 992, 994, 996, 998, 999, 1001, 1003, 1010, 1012, 1018,1019, 1022, 1024, 1026, 1031, 1036, 1039, 1048, 1051, 1052,1058, 1061, 1067, 1069, 1070, 1077, 1083, 1084, 1085, 1087,1088, 1100, 1120: n = A,T,C or G
nntnntntnatatntgtcncctcttttttnnctnnatanggattttttcnnatntactanatnnttttttttttcagattnngnntnttttatttcatattcttacattattncattgtatctccaccgcngtggnggccgtagtacacgggggcggcgacgacccattcgggggggngngcgnggaacttnaaannnaaaaaannttttcctaccatggtcgaccacgggtgacgangnantnagggtgttctgattccggagagggagcctgagaaacggctaccacatccaaggaaggcagcaggcgcgcaaattacccactcccgacccggggaggtagtgacgaaaaaaaaaaaaaaaaaaaaaaaaaangtacctgcccgggcgngncgctntagaactaatggatcccccgggctgcagggaattngattatcaaagcttatcngataccgnccgacccttcgagggggggggccccggtacccagacttttgtttcccttttagttgaggggtttaaatttgccgcgctttggccgtaatcatgggtnaatagcttgctttccctgnggtgaaaaatttgttatcccgcttcacaattttccaccacaaactttaccgaancccnggnagcnattaaaannttgttaaaaagcccntnggggggnngcccctaattgaagttgaagcctnaaacttccaccattttaatttgccgntnnggcgccttcnaccttggcccccgccttttttcaagntccgggggnaaaaaccntggttnnggnggcccaagncttggcatattaaantgnaaattccgggccccacaccccccnccgggnggaaannaagggccnggtnttttggccnntaanttgggggggcgcnttcttttccccctttnctttcggntcaacttgagncttcngnntgggnngccttcgggttcccgtnnncgggtcttgnnggnntnangcgggttttncnancntnnancncaaaaangncggggnntanancncgggnttttnccnccaaaaaanctnngggggnatntaaccncnnggaaaanaaaacnnntnnaaccaaaaaggnccccctaaaagggccccggn

SEQ ID NO: 7185 - DNA, 1609 bp, Homo sapiens
  misc_feature 1, 3, 5, 7, 10, 11, 13, 15, 18, 19, 20, 21, 22, 23, 29, 32,33, 36, 37, 38, 40, 41, 42, 44, 45, 46, 48, 49, 50, 52,53, 54, 57, 58, 60, 63, 65, 66, 68, 69, 70, 71, 72, 73,74, 76, 78, 81, 83, 86, 92, 95, 97, 99, 100, 101, 102, 104: n = A,T,C or G
  misc_feature 106, 108, 110, 111, 112, 114, 115, 116, 117, 118, 119, 120,121, 122, 123, 124, 127, 128, 129, 135, 140, 142, 150, 152,161, 165, 185, 196, 203, 204, 214, 229, 233, 234, 237, 239,269, 278, 284, 311, 322, 331, 334, 344, 359, 363, 375: n = A,T,C or G
  misc_feature 399, 433, 435, 449, 455, 457, 459, 461, 469, 480, 488, 508,510, 514, 530, 532, 543, 551, 556, 561, 614, 638, 646, 650,658, 675, 688, 696, 699, 715, 726, 737, 752, 755, 781, 806,834, 846, 856, 867, 890, 893, 895, 904, 906, 916, 932: n = A,T,C or G
  misc_feature 937, 946, 960, 989, 1006, 1103, 1113, 1169, 1171, 1180, 1189,1191, 1221, 1229, 1230, 1238, 1261, 1288, 1317, 1318, 1325,1339, 1343, 1346, 1354, 1367, 1375, 1378, 1381, 1382, 1387,1407, 1410, 1422, 1435, 1447, 1467, 1474, 1493, 1499: n = A,T,C or G
  misc_feature 1502, 1522, 1524, 1554, 1563, 1572, 1584, 1601: n = A,T,C or G
ncntncnctnnantnttnnnnnntttttntannttnnnannntnnntnnntnnnaannanttntnntnnnnnnntntnttntnaantaattnctntntnnnntnantntnnntnnnnnnnnnnnagnnngggtanaaacncncttaatcnanctcactatngggncgaaattgggagtctccacncgcggtggccngcccganngtaccttttnatttttttttttttntttnnggntnttttttcccggggttgggaagcgtgggggncccttttanttacgnttaaagaaccattcaagggcttcccangattattgganactttttcnagncaagtaaagncgcctttggccccgngggnaggccaaaaagngggtaccatgaaaaaaaggcctgnaagaattgaaaaccacggtggcccctggggctangnccaaattcaaccanggctcngngngnccaaaagnggttgtcttcnctggaagncccttctgctattccccccncngggnctcggcttccttaagnanaccttaaggtnggggaatnccccncccgngggccttggcaaggggaaaatttccggaattattccaaaggccttttaattcnggaattaacccccggtccggaacnccttccgnaagngggggggnggggcccccccgggggnaaccccccaaagncctttttnttnggttttcccccctttnttaaggttggnaaggggggttnttaaaaatttttggnccngcccggcccttttgggggccgggttnaaaattccaattggggggtacccanttaaaggcccttgggttttttccccttnggttgggttggnaaaaaaattnttggtttttantttcccccgggcttttccaaccnaanantttttcccnancccaaccaanatcccaatttaaccgngaagncccccgggnggggaaggcccaanttaaaaaaaggttgggttaaaaaaaaggncccccttgggggggggnttggccccctttaaaattgggaaaggttggggaaggcctttaaaaccttccaacccattttttaaaatttttgggccggttttgggccggcctttcnaccttgggcncccccgcctttttccccaaggttcccgcgggggaaaaaaccccttggttccggttngnccccaaagnccttggccnanttttaaattgggaaatttcgggggccccanaaccgtcnncccggggnggaagaaagggcccgggtttttngcccgtttaattttggggggccggccntctttttccccggccttttcccttccggnnttcaacntggaaccttcgggntttngcngcctttcngggttcccgtttnccggggcnttnccnngcccnaagccgggtttaatttcaangcnttcaaccttccnaaaagggccgggngaaaattacccngggtttatttccccacaagnaaattcnaaggggggggattaaaccncccaanggnaaaagaaaaccattggttgnangccaaaaaaagggccccaagccaaaaaaangggcccaanggaaacccngttaaaaaaaanggccccccgttttttcnttggccct

SEQ ID NO: 7186 - DNA, 792 bp, Homo sapiens
  misc_feature 202, 205, 206, 207, 214, 238, 303, 306, 328, 334, 348, 354,368, 383, 390, 405, 478, 515, 524, 532, 615, 621, 623, 628,636, 654, 657, 676, 678, 730, 748, 756, 771, 791: n = A,T,C or G
ggagctcccccgcggtggcggccgggggatgcgaggctcggagcacccttgcccggctgtgattgctgccaggcactgttcatctcagcttttctgtccctttgctcccggcaagcgcttctgctgaaagttcatatctggagcctgatgtcttaacgaataaaggtcccatgctccacccggaaaaaaaaaaaaaaaaaanaannnaaaaaangtccctcggccgcgaccacgtacnagcggccgcccgggcaggtacaaaagccaagatgcccattgtgggcctgggcacttggaggtctnttntcggcaaagtgaaagaagcggngaaggnggccattgatgcanaatatngccacattgactgngcctatttctatganaatcaanatgaggtgggagaanccatccaagagaagatccaagagaaggctgtgatgcgggaggacctgttcatcgtcagcaaggtgtggcccantttctttgagagaccccttgggaggaaagcctttganaagaccctnaaggaccngaagctgagctatctggacgtctatcttattcactggccacaggggattcaagactggggatgacctttttccccaaagatgntaaaangnaatanggatcagncggaaaaagggaacgttnttnggattccttggggaggccnanggaaggaacctggtgggaccaaggggcttgggtgaaaaaccctttgggggtnttcaaaaatttcaacccnctttcccnaatcgaaaaaggctntttgaacaaaaccttggacng

SEQ ID NO: 7187 - DNA, 802 bp, Homo sapiens
  misc_feature 3, 4, 7, 12, 14, 21, 37, 90, 138, 231, 245, 251, 259, 296,345, 382, 387, 401, 484, 498, 529, 535, 574, 672, 694, 697,705, 720, 726, 731, 732, 736, 744, 745, 750, 759, 760, 761,767, 775, 776, 801: n = A,T,C or G
ggnnaantggancntccccgngggggcggccgaggtncgcgggggagatctggttgtttgaaagtgtgtagcacctccaccttctctctntctctccctctccctctcctgccagccaagtgaagacatgcttacttncccttcaccttccttcatgatggtaagtttcccgaggcctcccgtgccatgccttctgtacctgcccgggcggccgctctagaactagtggancccccgggctgcangaattngatatcangcttatcgataccgtcgacctcgagggggggcccggnacccagcttttgttccctttagtgagggttaattgcgcgcttggcgtantcatggacatagctgtttcctgtgtgaaattgatatncgatnacaatttcacacancatacgagccgggagcataaagagtaaagcctggggtgcctaatgagtgagctaactcacattaattgcgttgcgctcactgnccgcttttcagtcnggaaacctgtcgtgccgctgcattaatgaangggccnacgccccggggagaggcggctttgcgtattggggcgctntttccgctttctcgctcacttgactcgcttgccgctcgggtcgtttcgggctgcgggcatagccggttatcaagctcactccaaaggcggggaaatancggggtattcacagaaatcaanggngataaccncatgaaaagaacatnttaagncaaannggcntggcaaannggccnaggaaaccnnnaaaaanggccgcgnngaatggcggtttttccaaaaggctnc

SEQ ID NO: 7188 - DNA, 1048 bp, Homo sapiens
  misc_feature 7, 9, 11, 13, 14, 15, 16, 18, 19, 20, 21, 22, 23, 24, 25,26, 27, 30, 31, 33, 34, 35, 36, 37, 38, 40, 41, 42, 43,44, 45, 47, 49, 50, 51, 52, 53, 54, 55, 56, 57, 58, 60,62, 63, 64, 65, 67, 69, 72, 73, 74, 75, 76, 77, 78, 79,80, 81: n = A,T,C or G
  misc_feature 83, 85, 87, 88, 89, 90, 91, 92, 93, 94, 95, 97, 99, 102,103, 104, 105, 107, 108, 109, 112, 113, 117, 118, 119, 120,121, 123, 455, 480, 502, 503, 518, 528, 568, 570, 588, 624,667, 676, 717, 737, 752, 787, 792, 808, 809, 841, 854: n = A,T,C or G
  misc_feature 857, 861, 876, 877, 880, 901, 902, 907, 922, 924, 940, 955,956, 970, 972, 977, 982, 1006, 1020, 1021, 1027, 1034, 1035,1040, 1043: n = A,T,C or G
ccccctntntngnnnntnnnnnnnnnntanntnnnnnntnnnnnntntnnnnnnnnnntntnnnnantngannnnnnnnnntnantnnnnnnnnntnanagnnnnannnatnntatnnnnncntattgggcgaattggagctccaccgcggtggcggccgaggtacaacttatagaaaaggtaaaggaaaccccaacatgcatgcactgccttggtgaccagggaagtcaccccacgactatggggaaattagcccgaggcttagctttcattatcactgtctcccagggtgtgcttgtcaaagagatattccgccaagccagattcgggcgctcccatcttgcgcaagttggtcacgtggtcacccaattctttgatggctttcacctgctcattcaggtaatgtgtctcaaattgaagtcaccacaaatggggggggtcattttttgtcaggnggcccagttttgtgcaggttccagnagtggactggattcaacatttnnttttccaaaatgtantggccaccanttccatttgcattcagccccgctcttcccagtccatcacnanggcttggttttcttttgnatatcctggaaagggaaggatttcggcccaccctgngttggggttcttggcagccttcatcaagtttcttcagacatgnttcccctcntccttcatgaagaattgggtggaaagaaaggtatttttggnaaaaagttctttcaaaaagnccacatcattgcggntcaaaggtaagttaaagaccattgggacagggtanaaccnttagggaaggccgtannaggcttccagggttggatcctgggcgggttgnatgggcgggcccntcntgangttccctgggtgggnnagntttttgggcgccacccttgcnnaaggnggggaaccacccggntncgtccattgggccggntgaacttaaaagggnnaagggcggggcccncnccggnccgtnttttagaaacttaaggggggaatnccccccggggcttnncaaggnaattccnnattanttnaagcc

SEQ ID NO: 7189 - DNA, 1133 bp, Homo sapiens
  misc_feature 6, 7, 11, 15, 17, 18, 23, 24, 27, 28, 29, 37, 38, 44, 45,46, 48, 50, 56, 58, 61, 63, 65, 66, 71, 74, 81, 82, 84,87, 88, 89, 107, 109, 113, 114, 118, 121, 124, 125, 135,140, 164, 437, 457, 633, 651, 682, 698, 720, 771, 804, 812: n = A,T,C or G
  misc_feature 829, 856, 866, 868, 870, 877, 879, 890, 891, 895, 904, 908,912, 914, 917, 930, 939, 955, 959, 968, 970, 974, 978, 990,992, 998, 1005, 1012, 1021, 1024, 1026, 1027, 1032, 1047,1049, 1057, 1059, 1072, 1073, 1074, 1079, 1091, 1093: n = A,T,C or G
  misc_feature 1100, 1106, 1107, 1109, 1112, 1114, 1115, 1125: n = A,T,C or G
tggttnntttntttntnnttctnnctnnnttttgctnntttttnnnancnttcttntnttntntnnatttnttnatttaanngngannncccaggggcggttttgantncgtnnaaanctnctnntttcggcttnattgnagctccaccgcggtggcggccgangacttgagttcatgggcatctctcccgccgcctctcagcctatctgcaccatgtctcacacgttcagttgcagctcttaccgttttgaaggcgcacgtgggcaagaagtcctgggcagcagaagaaagtcaatcaccgttgagacagagagagcaggagaggaagtgggccccattagaagtgggcgagagagcgttggatgggaacgtggcaccgagagagagaaattatgaagattgagagagagagagagagagaagagagaaagagatngagagagagaaagagaaagnagacagaagaaaagaaactatgtttgtttaaaatgcccagccgggaaaagtccatgggggttgaaagaagtccggcaaatgggcccaggggagtttagccagcctttgggccgttaagtgtctttccccacttgtttttttgtcctgttcccccgccgttaccctgcccccggggncgggcccgcttcttaagnaaccttaagttgggatccccccccggggccntgctagggaattttcncattattccaaaggctttaatncgattacccgttcgaacccttcttagggggggggggccccgggtttccccnaggccttttttggtttcccttttttaggtgganggggtttnaaattctgcggccgccnttggggcgtttaattcaattggggtcnataagccctngntnttccctngnggttggaaaannttgnttttttccngtcnttcncnaantttcccccctccnaaccattancggaaggcccggggangccntttaatagngnttanaagnccctgggggggngncccttnaatggangtggganccttaaccntcncnnttttnaatttgccgtttgcncntcaccttngnccccctttttccnnnttccnggggaaaacccntntccgggngccccnncnttncnntttattgaantccgggcc

SEQ ID NO: 7190 - DNA, 1154 bp, Homo sapiens
  misc_feature 5, 11, 12, 15, 16, 18, 20, 21, 27, 28, 31, 33, 37, 38, 43,45, 47, 48, 50, 51, 52, 54, 57, 60, 66, 72, 75, 77, 78,84, 86, 90, 95, 100, 103, 104, 108, 109, 110, 115, 117,126, 137, 144, 157, 178, 219, 233, 241, 246, 310, 331, 359: n = A,T,C or G
  misc_feature 382, 389, 422, 479, 519, 520, 539, 579, 628, 630, 648, 656,669, 680, 701, 711, 728, 736, 742, 747, 748, 753, 755, 760,772, 778, 789, 801, 809, 810, 817, 819, 820, 841, 842, 843,866, 896, 903, 922, 935, 939, 941, 946, 949, 957, 958: n = A,T,C or G
  misc_feature 960, 967, 972, 987, 993, 1003, 1013, 1015, 1022, 1029, 1039,1044, 1050, 1052, 1055, 1059, 1062, 1066, 1067, 1069, 1070,1071, 1072, 1097, 1104, 1109, 1110, 1111, 1120, 1125, 1127,1128, 1141, 1144, 1150, 1152, 1153: n = A,T,C or G
aatantgcagnnatnntnannaatttnnatnantttnntaatntntnntnnntntgntanttgtgntaattntgntnnattagngntttnagggngggtntgnnattnnntaaantnttattagcnaattgaagctncaccgcngaggcggcccgangtacttgttgttgctctgttnggagggtttggtggtctccactcccgccttgacggggcggncatctgccttccangccactgncacangctcccgggtagaagtcactgatcagacacactagtgtggccttgttggcttggagctcctcanaggagggcgggaacagattgncagtggggttggccttgggctgacctancacggtgaccttggtcccacttncgaagcncataaccactcagggctgcttgtcataggactnggcaagtaaataatcaagccttcatcctcagcctgggagccccagtggatgggccanggggagggcttgaggtttccaaagaactttgggaagccannaggaatcgggtccaggggnaccccctggagggggccggatttacttgtttaaccattangatggagggagttttggggggcctggttccttgggaaaagcttggttgngntacccctggcccccgggngccgggcncggcttccttaanaaaacttaagntgggggaattcccccccgggnacttggcaanggaaattttccgaattnttcaaaangccttnaattnnggatnancccgntcggaacccttnggaaanggggggggggngcccccggggtncccccaannttttttngnntttccccctttttaagtgggnnnggggtttataaatttgggcgccnccttttgggcggtaaaattccatttggggncaataanccttggtttaaccctgggnggtaggaaaaaanttgntntattnccngtctttcnncnaaatttnccccncaacaaaccaattancttatnccccgggggnggcaataaangntggttanaaggccnttgggggggnggccntaaaangnagngganccntacnntnnnnatttaaatttggcctttggaccccntaatttngtccnnntttttccanttagngnnaaaaactttgttnatncccccncnng

SEQ ID NO: 7191 - DNA, 1151 bp, Homo sapiens
  misc_feature 6, 11, 12, 20, 23, 25, 27, 29, 31, 42, 43, 49, 53, 56, 60,61, 63, 64, 70, 77, 82, 83, 84, 85, 91, 93, 96, 97, 99,100, 103, 109, 111, 124, 204, 254, 355, 357, 470, 475, 500,502, 507, 529, 537, 574, 625, 645, 661, 665, 680, 685, 703: n = A,T,C or G
  misc_feature 710, 731, 746, 749, 750, 767, 769, 781, 796, 797, 803, 815,819, 825, 826, 828, 838, 841, 848, 851, 855, 860, 863, 865,871, 875, 881, 893, 895, 898, 915, 918, 926, 935, 936, 946,949, 956, 960, 975, 976, 978, 979, 991, 1002, 1017: n = A,T,C or G
  misc_feature 1025, 1036, 1037, 1041, 1045, 1048, 1051, 1055, 1058, 1065,1068, 1080, 1081, 1088, 1110, 1111, 1112, 1118, 1123, 1124,1128, 1137, 1140, 1141, 1142, 1148, 1150: n = A,T,C or G
accatnatagnnatggtatntantntntnantttttataaannactctntttnttntatnnannaaaatncaatttnagttnnnntaaggnanttnnannctntttaananaacttactttttngcgaattggagctccaccgcggtggcggccgaggtactttattttttttttttttttttttttgagacagagtctcgctntgtcacccaggctggagtgcagtggcgctatctcggctcactgcaagctntgcctcccgggttcacgccattctcctgcctcagcctcccgagtagctgggactacaaaagcctgtcaccatgcccggctaattttttgtatttttagtananacatgtttagccaggatggtcttgatcctcctgacctcggtgatccacccgccttggcctcccaaagtgctgggattacagggcgtgagtcaccacgccccggccgtttttanaaaantagtgggatcccccgggcttgcagngnaattnccatatcaaggctttattcggntaacccgncgaccctctaaggggggggggccccgggtaccccaancctttttttgtttccctttttagtggagggggtttaaaatttggccgccgncttttggggccggttaaatnccattggggtccattnagancttggttttcccctnggggntggaaaaatttggttaantcccggncttcaacaaaatttttccctncaccaaaaccaattnccnnaatccccggggggaagncnattaaaaagggngtaaaaaaggccctnngggggnggcccttaaatnggangttggnngncttaaacctncanaatttanatnttgncgttngcngncttccncttngccccngtttttttccangntcncgggaaaaacccctggnacngtgggccnaactttggnnatttaaaatnggnaaattcngggnccaaacccccccccnngnnaaaaaggccccnccttttccttnttttggggcggcttnttttccgnccttttccttnnaatncaanttnaantttngcntggagcntcnggggtctctttnngggtttnggggggaaaaaccggggaattnnnagcctnatctnnaaanggtgggggnaannnccgggntna

SEQ ID NO: 7192 - DNA, 1185 bp, Homo sapiens
  misc_feature 1, 7, 10, 14, 22, 25, 30, 32, 38, 40, 42, 44, 46, 49, 55,56, 58, 59, 60, 61, 63, 64, 70, 73, 77, 81, 82, 83, 87,88, 95, 97, 112, 118, 126, 140, 158, 165, 173, 242, 323,410, 441, 443, 466, 530, 556, 568, 570, 585, 587, 591, 606: n = A,T,C or G
  misc_feature 614, 669, 676, 682, 685, 690, 700, 704, 713, 729, 738, 741,754, 756, 786, 798, 802, 813, 819, 832, 840, 841, 855, 866,883, 888, 896, 903, 905, 912, 929, 939, 946, 948, 950, 952,958, 978, 985, 986, 990, 1002, 1004, 1007, 1017, 1018: n = A,T,C or G
  misc_feature 1025, 1037, 1039, 1045, 1046, 1051, 1066, 1072, 1076, 1078,1082, 1085, 1086, 1092, 1104, 1105, 1108, 1115, 1117, 1121,1124, 1125, 1126, 1132, 1134, 1156, 1157, 1167, 1168, 1170,1172, 1174, 1175, 1177, 1178, 1184: n = A,T,C or G
naaattnccngganatctgcgnaantctgngnaaaatngngnananttngggganntnnnnannaatacnaanatgngagnnncccnnagggacngnttgattccttgaaancaccanaatcttgngaatgggacttccncaatgtggcggccgaggnacgcggngaaggacnttcaccgggacttcccagacgtgatctcaggagcgtatataattgaagtaattcctgataccccagcanaagctggtggtctcaaggaaaacgacgtcataatcagcatcaatggacagtccgtggtctccgccaatgatgtcagcgacngtcattaaaagggaaagcacccttgaaacatggtggtccgcagggggtaaatgaaagataatcatgaatcacagtgattcccgaagnaaaattggacccccataggcaagaggcatgnanctgggacttcatgtttccctcanaagacctcttcccggtggaattgacgggattgaagggactcttgggactgcttgggaaataggnacacctcaaggactttttgaactgcncattttttgggntntgggttcaagttggnanaacntcccccttgggcccnaaacaagnaattccctttctttggaataaggttttggccagggcctaaaaaccaaaaatggtnaaattgntttggncanggaantccccgccangggncaagaaaancccttccttggccccntttccttgnaantccccttaatggntnattggccaagttggctgcctttttttttcnttttgccccaancttntggggggcccnttttcnttggccttttaanaacaaggnnccaaaccatttttngtccttccctncctttttaaaacttggnggtcnatttaatnctttaantnccccaanccttaaattgccaattncagataaccncatggcngntnanaatttngaaaagaaaggcccccccanctggganncccnaaagaaatgggnanctnggatcctctnnttttcgngccttttttccntnccaaanntaaangcccccccccaaaangggttntaantngccnccnngataancccccctggacnnggnggttaanantccnctnnncatttntnataaaacggggcaccatctttnnaaaaactctnngncngnnanncccccng

SEQ ID NO: 7193 - DNA, 1198 bp, Homo sapiens
  misc_feature 1, 4, 7, 9, 10, 13, 15, 22, 23, 25, 26, 29, 33, 39, 42, 44,49, 52, 58, 60, 61, 65, 68, 72, 76, 77, 79, 81, 84, 86,87, 90, 91, 92, 93, 94, 95, 109, 119, 123, 134, 136, 140,207, 241, 275, 317, 437, 438, 441, 463, 503, 506, 509, 544: n = A,T,C or G
  misc_feature 552, 560, 596, 636, 641, 646, 674, 704, 707, 723, 726, 731,748, 750, 802, 803, 816, 840, 841, 866, 875, 883, 928, 941,961, 963, 968, 970, 973, 984, 989, 992, 998, 1002, 1009,1011, 1017, 1029, 1032, 1047, 1054, 1076, 1088, 1092: n = A,T,C or G
  misc_feature 1094, 1096, 1098, 1103, 1108, 1123, 1146, 1149, 1155, 1157,1161, 1164, 1165, 1171, 1173, 1181, 1182, 1185: n = A,T,C or G
ntcnttngnnttntnttctttnntnnttnctanttgtgntantntaatntcntttaantnnaatnttntatntttnntntnatncnnggnnnnnnaagggggggttganaccttttacnactncctattttctnangaangggggctccaccgcggcggcggcacgaggtactggatcagtttctcctgcgtgaggtatgggtgacnctcaacctggttagtcactggtttatatttcagnccaggtttgttcaagagcctctcgatctggaagnggttgaaatttgagaccccaagggctttcaccagcccctcgnccaccaagctcctccatggcctcccaggcatccaagaacgttccttttccactgatcatattacctttatcatctttgggggaaaaaagtcatccccagtctttgaatcccttgtggccnngtngaataagtatagacgtcccagnaatagcttcagcttcaagggtcctttgagggggttctttntgnaanagggcctttttcccttcaccaagggggggttcttnttcaaagnggaaaagntgggggccccaccacccctttggcttggaccggatnggaaacaaggggttcccttccccggcaattcaaccaagcnccttncttcntttggggaatccttttcttcctttgggnaatggggccttttcttcccccaaccctccnatngtttggattttccttncantaagnaaaaaattaagggcccncnagggtccaaaattggttggggccggaatatttttcttgggcaatttcaaaannggggcgccaaccnttttcaacccggcttttttttttnnaacttttgtgccccgaagaaaaggnaggaacctntccaaagntggcccccaaggccccccgcaaattgggggcaattctttgggccnttttttgtaaccnttgcccccggggccggggcncngcttncnaantggcccccgcnttttncangttccngggnaaaaccntnttcggnggcccaggcttngcnttttaaattggaaantcggggnccaaacccccccccgggggaangaagggccggantttncngntnatttnggggnggcttttttcccgcntttccttcgggttaattggaacnttngtttgngncttnggnnccgcantnctgggttnngangagaaagcccggg

SEQ ID NO: 7194 - DNA, 1049 bp, Homo sapiens
  misc_feature 1, 3, 6, 7, 8, 9, 10, 11, 17, 19, 21, 28, 31, 32, 33, 37,42, 44, 45, 48, 49, 53, 54, 55, 60, 61, 65, 66, 68, 79,81, 82, 84, 90, 91, 92, 97, 101, 104, 107, 155, 445, 461,495, 503, 534, 675, 724, 735, 746, 753, 776, 782, 788, 805: n = A,T,C or G
  misc_feature 808, 813, 818, 828, 831, 839, 863, 899, 900, 909, 911, 915,918, 919, 921, 925, 926, 929, 936, 955, 964, 968, 969, 977,988, 995, 1001, 1003, 1010, 1017, 1024, 1039, 1047, 1048: n = A,T,C or G
ncnaannnnnnaatacncntnaacacangannnaatnattanannttnnaatnnntaacnnattnnanataattatttntnnantaaggnnnaccgngaantcnatnatatagggcgaatggactccaccgcggtggcggccgcccgggcaggtncccctaccgccgtgcaaaaggaggaggtgcggcaagacgtggaggccctcctgagccgcacggtcagaactcagatactgaccggcaaggagctccgagttgccacccaggaaaaagagggctcctctgggagatgtatgcttactctcttaggcctttcattcatcttggcaggacttattgttggtggagcctgcatttacaagtacttcatgcccaagagcaccatttactcgtggagagatgtgctttttttgattctgagggatcctgcaaattcccttcgtggnagggagagccttaacnttcctacctgtgactggagggaggctgacatttngtgaggantgacaacattgcaaatcatttgatgtgcctntccccagtttctcttgataagtgaccctgcagccaatttattcatgaccttttggaaaaaggggaatgactgcttacctggacttaattgcctggggggaactgctatcttgattgcccccttcaaatacttgttaattgntaatgccctccaaaaaaaattctgggttagaagcctctttttgggccanaacttgggccnaagtgggcaanaataatnttggcctcaaaacctttaatgtnggtttncgaagnaaagaaccttaaatttngcnttgtnggganggaaaaattnccntggaatgnttaagtaaaacccttgggccaatntttttattttacccaaccttttggcaaataaaacannaaaaagatncntttncgnncntttnnttnggtaaanaagaaccctttttggctgngggtttttnaaannaaaacctngcccatttggnttaaaantggctngnaaaaaanaaaaaancactttntcccccaaccaaaantttttttnng

SEQ ID NO: 7195 - DNA, 849 bp, Homo sapiens
  misc_feature 146, 153, 156, 160, 161, 165, 167, 168, 169, 170, 171, 178,179, 188, 195, 198, 210, 211, 214, 215, 216, 217, 233, 234,235, 241, 245, 251, 253, 254, 255, 256, 257, 260, 264, 278,287, 289, 298, 300, 303, 304, 306, 319, 322, 324, 330: n = A,T,C or G
  misc_feature 333, 342, 348, 353, 354, 355, 371, 374, 378, 379, 383, 384,389, 413, 416, 421, 427, 435, 446, 447, 455, 467, 471, 476,477, 478, 486, 487, 490, 493, 501, 508, 509, 511, 512, 538,561, 565, 566, 567, 574, 576, 582, 583, 584, 585, 603: n = A,T,C or G
  misc_feature 606, 607, 610, 621, 631, 635, 644, 649, 660, 663, 671, 673,674, 683, 686, 688, 689, 692, 693, 697, 698, 699, 700, 702,705, 708, 709, 710, 714, 725, 726, 732, 739, 741, 752, 755,759, 766, 770, 771, 772, 773, 779, 782, 786, 789, 794: n = A,T,C or G
  misc_feature 799, 803, 808, 809, 810, 820, 821, 823, 827, 832, 836, 842,845, 849: n = A,T,C or G
ggcgaattggagctccaccgcggtggcggccgcccgggcaggtacttttttttttttttttttttttttctttttttttttttttttttttttttttttttttttttttttttttttttttttttttttttttttttttttttaanggggcanggntttnngggncnnnnnccggggnnggggggggnccccccnaanggggggggggcnnccnnnnggtttttggggcccgnnntggggncccnaaaaancnnnnnggntttnaaaaaaaaaaaaancccctcccngnaaaaccccncnggnngncttttcccccggnaangnaaaccnttnggggggggncttttnggggnnnccggggggcctaaacnttnaaanncccnntttcnggggggggttttttttaaaaaaanggnacccnttgggnccttgggnaaaaaaaaaanntttaaaanagggaaaagggnaaanggccnnnccccgggnntanggntttccccnaggggcnnannccaaagggggggccccccccccccanttttaggggaaaagggggccccntttnnnggtcccntnggcctnnnntttcccaaaaaaaaaacnccnnggngggaagggggnggggcccttncttnggggggggnaaaantttttttttcnaancccccccnannggggggggnggnannacnncccnnnnanaanatnnngagnggggggccccnncccccntgggggncnaaaaaaaaacnccntttnttttccngggnnnntttttnggnacgnggnaattnccccnaaanggggnnnttttttttcnngnaaanaaaantggntttttnccnaaan

SEQ ID NO: 7196 - DNA, 1110 bp, Homo sapiens
  misc_feature 3, 4, 6, 7, 8, 9, 10, 12, 13, 14, 15, 17, 18, 19, 20, 21,23, 24, 26, 27, 28, 31, 32, 34, 36, 37, 39, 40, 42, 43,45, 46, 47, 48, 50, 52, 53, 54, 55, 56, 57, 59, 61, 62,65, 69, 72, 75, 76, 77, 78, 79, 80, 81, 82, 84, 85, 87,88, 89: n = A,T,C or G
  misc_feature 90, 91, 96, 98, 99, 103, 114, 115, 483, 484, 506, 705, 716,720, 731, 742, 760, 767, 776, 793, 871, 898, 930, 932, 935,953, 958, 969, 989, 995, 996, 1010, 1017, 1023, 1024, 1054,1055, 1056, 1063, 1064, 1065, 1069, 1070, 1071, 1072: n = A,T,C or G
  misc_feature 1077, 1089, 1095, 1099, 1109: n = A,T,C or G
tcnncnnnnntnnnntnnnnntnnannnaanntntnnanntnnannnntntnnnnnncntnnttnaatnctnttnnnnnnnnanncnnnnnttagntnngtgnaccgcgtaaannactcactatagggcgaattggagctccaccgcggtggcggccgaggtacatcccccggctgcacagactcttcagatctgttagcttgaacagggacccatagtatgtggccagtgcagggtcatctctctgaatgagaaggggcttctgctcccagaattccttgaaaaaaaagtctctgtcttgatgggcgagattaaactttcaaagagactactgggactgtcaaagtttaaagctgaaggccccccagctgcttctaacttcatctgcttacagggagccggcccctcttccttcccactccctgtaggcctttgctttctttggcatcgttctgtctttcaaggacaaagcagttaaggggnnaatgcaaaacccgggcacgggncttgttggcctcgccggcccgctctagaaactagtgggatccccccggggcctgcagggaaatttccgatatcaaagccttatcggattacccggtcggacctcgaggggggggggcccccggtacccagcttttgttccctttaggggaagggtttaattgcgccgccttgggcgtaaatccatgggtcaattagccntgtttccctgngggngaaaaattggnttattcccggntttcacaaatttggcaanaaccaancaattaccnaagccccggggaaggcnattaaaaagttggtaaaaagcccctggggggggggcccttaaaatggaggtggaagccttaaacttcacaatttaaanttggcggtttgcggcctcaacttggcncccggcttttttccaagtccggggggaaaaancnttntttcgctggcccagcctnggcantttaaaattgnaaatttggccccaaacaccnccgggnngaaaaaaggcccgnattttgnccgtannttggggggggcgcttttatcccccttttcnnnggatacnnnttgnnnntcccntatggggccttngggtcngggngccgcttggng

SEQ ID NO: 7197 - DNA, 783 bp, Homo sapiens
  misc_feature 504, 586, 665, 694, 719, 776, 783: n = A,T,C or G
ggcggccgggggcagctggaggtgcctcagaaggtgcattctgcttcctgcaggggcttgaaacaccaaggcactccagggatcctggagtcctgagctgcgtcccggagcccacggtggtcatggctgccagagcgctctgcatgctggggctggtcctggccttgctgtcctccagctctgctgaggagtacctcggccgctctagaactagtggatcccccgggctgcaggaattcgatatcaagcttatcgataccgtcgacctcgagggggggcccggtacccagcttttgttccctttagtgagggttaattgcgcgcttggcgtaatcatggtcatagctgtttcctgtgtgaaattgttatccgctcacaattccacacaacatacgagccgggagcataaagtgtaaagcctggggtgcctaatgagtgagctaactcacattaattgcgttgcgctcactgcccgctttccagtcgggaaacctgtcgtgccangctgcattaatgaatcgccaacgcccggggagaggcggtttgcgtattgggcggctctttcgcttcctcgctcactgactcntgcgctcggtccgttcggcttgcggcgagccggtatcaacttcaactcaaaaggcgggtaataccggtaatttccacangaaatcaaggggaataaccgcaaggaaanaaacaatgtgaagcaaaaaaggccnaccaaaaggccagggaacccgtaaaaaagggcccgggttgcttggcgtttttttcantaaggcn

SEQ ID NO: 7198 - DNA, 1007 bp, Homo sapiens
  misc_feature 2, 3, 4, 5, 6, 7, 8, 9, 10, 11, 12, 13, 14, 15, 16, 17, 18,19, 20, 21, 22, 23, 24, 25, 26, 27, 28, 29, 30, 31, 32,33, 34, 35, 36, 37, 38, 39, 40, 41, 42, 43, 44, 45, 46,47, 48, 50, 51, 55, 64, 67, 69, 71, 72, 95, 116, 128, 151: n = A,T,C or G
  misc_feature 441, 525, 631, 668, 673, 689, 701, 861, 880, 891, 930, 931,975, 979, 999, 1005: n = A,T,C or G
tnnnnnnnnnnnnnnnnnnnnnnnnnnnnnnnnnnnnnnnnnnnnnnngnnaggnttgaccctntancncnnatatagggcgaattggagctccncgggggcgggccgcccgggcnggtacttttgtntgacactagacttctgctgtagngcttcacccaaaacagaggtttaaggaaataaaaaaataaaaataatacagaaaaaaaaccaaaacactttactgaaaattttcatttcaaccagaagcaaacgtgttctaagaaggcaaagtagagttaggaacaactccgtgtttccctcaggaataaacgtgatctttcacacttgggggttgatagtcagcatggagtaacttagaccaacttaagaaggagggcatctggggctgttcaccttaagggagatgccttcccaagaggcccagccatcttggggagnaacacccccaagttctcttgggagaggtcagggagttttggggatgcagggatcaccacctgaaggtcaagcccaagcaaaagncagcctgatctagggataatggggcttcttgacttccagattctacccatcatcacaagaggcttcaaagctggggggcccacaccaaaaggggccgtgatgattnccagcctttcagccccaaacagggaattgaccctggnaaagnaaaggccctttatttnctcttgaccagnaaaaaaacctggatttcccaaagggaaaaaatggattcttttttaccctttatttcccctttttcttcaaggggggattcctggcattttttccaatggaaatggaaaggaaaaaaggaaagaaaagggttggaaatttcttcttggccttaggggaaanggttttcttttattaaagnaaagggttttnccaaataagaactttcaaactttttttttaaaagcttgnngcccgccaaaaaaaaaaaaaaaaaaaaaaaaaaaaggtaccctngggnccgtttttaaaaacttaggngggatncc

SEQ ID NO: 7199 - DNA, 787 bp, Homo sapiens
  misc_feature 536, 539, 634, 654, 678, 682, 699, 727, 746, 748, 759, 760,774, 778, 782: n = A,T,C or G
gaattggagctccccgcggtggcggccgaggtacaaatctgttgccagcctgaacacacctgtaggaggtggatggagaccctggttgagaggtctcacccagccagtagaaacaggatcagggacctgcttgaagaagcagtctagccccacttttgtagaacagctgagctgtgctgggataccatttctgcccctcatggtgttgggttctccaaaacctggaagctggaacggctaaattgcagaaacagcaaagatggcagcctgcccctctctctagtaactctgtcccaggatgctttcaaacccttgtcaaccagagaacatcagtgggagaggctgaagaccctggttgggaagttctcccaagtgaggaggaacagatcagggacctgcttaaagaagcggtcttgccacgcttttgtagagcagttgtgtcatgctggggtacctgcccgggcggccgctctagaactagtggatcccccgggctgcaggaattcgatatcaagcttatcgataccgtcgacctnganggggggcccggtacccaacttttgttcctttagtggagggttaattgcgcgcttggcgtaatcatgggcatagcttgtttcctgtgtgaaaatgntatcccgctcacaaattccnacaacatacgagccggggagcatnaaantgtaaaagcctggggtnccctaatgagtgactaacttcacattanttgcgttggggcctcactngncccttttccanntcgggaaaaccttntcgngccnacttg

SEQ ID NO: 7200 - DNA, 1108 bp, Homo sapiens
  misc_feature 3, 4, 5, 6, 9, 13, 14, 16, 17, 19, 23, 24, 26, 27, 28, 31,33, 39, 43, 48, 54, 59, 63, 67, 69, 73, 74, 80, 81, 82,83, 85, 89, 92, 96, 98, 99, 105, 216, 508, 591, 610, 655,662, 676, 694, 743, 790, 815, 831, 832, 836, 844, 845, 859: n = A,T,C or G
  misc_feature 861, 867, 874, 892, 929, 932, 953, 957, 979, 982, 984, 986,998, 1002, 1011, 1034, 1035, 1037, 1050, 1051, 1065, 1067,1078, 1083, 1085, 1100: n = A,T,C or G
aannnntantttnntnntnattnnannnaantnttatantgtnctaangttttntattnttantttntntaannttgaannnntntacnagnggtngnncgtttntattcgctcactattgggcgaattggagctccaccgcggtggcggccgcccgggcaggtacaaatggttgggagcaggacatcacaggaggaggaaagatagcgccatctntgcagaagaactcctgagccacacacagaaggaaagttgatccccagggcagcctttcccaccaaaaaaatcaggcccaatccaggagagtttgccagtagctccccagggttccagggtgtctgccagccttcctaggaatcgtgggcaggcttctaggtgccagtgactcaaactcctttttccacttcccagttcaacctggtcactctcatccccacaagttcccaatctggaatcccattctctggaccatttctctgcttccttgttttttaatctcattttgagnaggtgaatccctcacggggtttccccctgggcccccttgcacttcaattttttcccctaacctggggttaatggcttaaacgntttggtcctttcttaaatntcaagggaaaatccctttcccaacccccttgtttttttcaaggcntctggcnctttcccaaaaacnccctttcccaatttttcnccccaatttttccaaccctttcccaagtacttcccttcaaccttccctngggaagccaaaaaagaaagccttcttggcaacctttggggaatttgncttaaaggccattggccatggggcnttcattggttgggaanncaangggggaanntgggggaaaaaatngntccccntttcaangggccaaaaaaaggcccntggctttttgggtgggggggaaacccttaccgttatncantttcaaaaccagggcctttangctngttaaaaagaaaccctttcacnttngnancctttttccttnccantttatgggncttttcccccttccacttattgnntngaaaccttggcanntttcaattttttcnangtaaaaaaaangcaantntgcccaaggcttgtngggtttgg

SEQ ID NO: 7201 - DNA, 1074 bp, Homo sapiens
  misc_feature 1, 2, 4, 6, 7, 9, 10, 11, 12, 13, 14, 16, 18, 21, 22, 26,27, 28, 29, 35, 38, 39, 44, 45, 46, 50, 52, 53, 55, 62,63, 66, 67, 69, 70, 71, 74, 75, 76, 82, 83, 84, 85, 86,89, 92, 95, 97, 99, 104, 107, 109, 113, 268, 355, 374, 397,465: n = A,T,C or G
  misc_feature 485, 550, 551, 557, 558, 603, 609, 631, 637, 653, 673, 678,680, 682, 683, 684, 689, 696, 699, 702, 708, 742, 754, 766,811, 813, 834, 838, 871, 873, 878, 885, 897, 904, 916, 919,926, 929, 935, 936, 952, 954, 955, 958, 962, 973, 975: n = A,T,C or G
  misc_feature 991, 1007, 1009, 1013, 1033, 1051, 1055, 1057, 1064, 1066,1067: n = A,T,C or G
nntntnnannnnnntnanttnnttannnnattttnttnnttttnnntaanannantaatatnnatnntnnngtnnntatttnnnnnagnagnggngngngcgcnggntnacgnttactatagggcgaattggagctccaccgcggtggcggccgcccgggcaggtactttttttttttttttttttttttttttacgatcctacagagatggtccagctgccaggactactttggcaggcagcgtgctacaggacgaaaatgtaaganaagtctattaaggctggacagcccagggttatttatactctctcagccccaagtcccccggactaaagacctaaaggctgattgacncattcctgattgatttaanggaaagtctcccaccccatcatnattttgccaggagtaccaggcacccgatgaaaggggggaccgagtaaaagaactgccacttcctaatngtataagtaaggccttatcnacactgtaagtggtccaagcccataggggatgcctcttttttggttcctggggaatttccagttnngatgtnnacagaaaaatcctttcaagtattagggtcctaagtcaaagagttngccctntggggtttgagggtggggcctngggganaattaacaatctttancttgggggtccttcaaaaanaaacncngnnnggggnttttttnctnggntttaanaacaaggccccattcttttaaggtttttgaatgntttggaaaattnaaaaaaccttantttttttaccccccctttaagtttattaaaaaaaaaaggggcccncnaaaggggagcccattttttanttgntggggattattctttgggaaaagttggaagaananttttnttttccnattttcccccanggaaaanaggaaaaaattntangggcttnagntttacnnaaaaccttaaattttntnnttngccnataaaaaggtntnttttatattaccctgncttttggtttttaaancnaganttccctcttgggaaattttntttgtttccgggggccantttngnttttttnannctttttt

SEQ ID NO: 7202 - DNA, 876 bp, Homo sapiens
  misc_feature 3, 4, 5, 6, 7, 9, 10, 11, 12, 594, 607, 636, 643, 665, 666,681, 683, 687, 700, 744, 770, 780, 813, 828, 830, 861, 863: n = A,T,C or G
agnnnnncnnnntcgactcctatagggcgaattggagctccaccgcggtggcggccgcccgggcaggtaccaattgtcaactaaggtaagaacattgggtgtgttcccacccacaaactccttcatcacctttgctacattggtgccgctttggtccaagttgcgggcttgggctcgtgcccgcaatttgtttactagttctaccgcactgcaggtaatcccagccacagcagctgctgctcccagacccatgccagtgtccaagagcacaaaactgattccttctgtgaagggtgccagacccaggccgaggagggtcaggatgccagaggtagtgccaacagagttggacaccacattggcaatggtggtgcctctgtggacctgctcaacctcctctgcaagggcacggagcttccttatgtgatcctcaagctcccttttcaaccgaggaaactctttcaaaaaccactgcctgtgctgctggtctttatcgtggcgggttttgtccttcatgaccatgtgacttgcaagctttgttcaaaagctttacggagcttcatctggctcatccctgggcagtttagcagcagncacgaattcattncaggctttcatcatcaagtcaacaagttntagcaanattctcttttgctcactttggnnctggaaaaacttaangnaatnctcaataaaaganactggttttctgggttcatggggccaacggctgggtttcccgangggcttttctttggagcttttccagnccttgtccanactgggaaggtttttctttaaccttggttccanatttcctttttcctnanttttaaaaccaaggggaggggcccttttttncnaaggatttttcct

SEQ ID NO: 7203 - DNA, 873 bp, Homo sapiens
  misc_feature 4, 5, 6, 7, 9, 10, 637, 747, 759, 762, 776, 789, 791, 804,806, 819, 834, 846: n = A,T,C or G
gagnnnncnncgtaatacgactcactatagggcgaattggagctccaccgcggtggccgagcggccgcccgggcaggtactcaccttcctccagtgagtcacttcacatgtaacatgcattttggagtttaaaaaataaacatgattttaaacgttttctcctttgctcataatatactatcttaaaacatattaggttggtgcaaaagtaattgtggtttttgccactgcaattacttttgcaccagcctaaatagcactggcattataatcgaccatactataaaactgtcgtccaaaggccaacatgcaaagcatcatcaaagcaaactcagtgaaggtgatgcatccccacaccgtgcttacaatctcagtacctcggccgctctagaactagtggatcccccgggctgcaggaattcgatatcaagcttatcgataccgtcgacctcgagggggggcccggtacccagcttttgttccctttagtgagggttaattgcgcgcttggcgtaatcatggtcatagctgtttcctgtgtgaaattggtatccgctcacaattccacacaacatacgagcccggagcataaagtgtaaagcctggggtggctaatggagtgagctaactcacattnattgcgtgcgctcactggccgcttttcaaatccggaaacctgtcgtgccagctgcattaatgaatcggccaaccccccggggagaagcggtttggggtattggggcgctntttccctttctnggnttaattgacttcgnttggggcttcggncnttcgggtgcggcnanccggttttaactnactcaaaaggcgggnataccggttttncccagaaataaggggatacccaggaaa

SEQ ID NO: 7204 - DNA, 905 bp, Homo sapiens
  misc_feature 92, 116, 121, 124, 138, 142, 146, 156, 169, 178, 182, 186,220, 228, 234, 239, 273, 276, 279, 294, 296, 298, 306, 308,316, 318, 330, 338, 340, 342, 345, 346, 354, 356, 360, 377,382, 390, 392, 400, 422, 434, 440, 448, 469, 471, 475: n = A,T,C or G
  misc_feature 484, 507, 508, 520, 528, 532, 535, 538, 540, 547, 550, 555,558, 559, 560, 566, 572, 573, 577, 589, 590, 593, 595, 602,609, 612, 627, 641, 647, 660, 667, 669, 671, 676, 683, 684,691, 696, 698, 700, 702, 703, 704, 705, 712, 722, 726: n = A,T,C or G
  misc_feature 730, 731, 736, 737, 741, 745, 747, 748, 749, 752, 758, 760,762, 768, 771, 772, 776, 777, 780, 788, 791, 794, 795, 796,797, 802, 806, 808, 809, 817, 819, 822, 824, 828, 831, 838,839, 842, 847, 850, 863, 869, 873, 878, 882, 891, 895: n = A,T,C or G
  misc_feature 896, 900, 901, 904: n = A,T,C or G
gtaatacgactcctatagggcgaattggagctccaccgcggtggcggccgcccgggcaggtacttttttttttttttttttttttttttttncatttaaaattctttttatttganatgtntanaatcttgctcaaanggtntttnccaaactgtngaaaaatagggcnttttttaanaaanaacncttttacttttttttgaaaaaaaaaagttttctntgcaaatnggtctntaggngcgggtcttctggaaaattgttttttctgtaaanagngancatatgtttgtatgngngngtctgagngngtttgggngngtctctgggttnctggggtngngnggnnctgcctgngngttngggtttgggcctggatnattgngtcctggngngattgggnctgggtctgggcctgggtcttngcctgtctgtcnatgttngggtatgnccgaatgtgggcggggtttgngngatnggggacctnggcctggggcgtttgcatgcccnngggaatgggggnaatgtggngttnccnggncntgggganaantgggnccnnnggtttngggggnncccngaaatcaccaanngcncntgggggntttgggnaanaaacttttttacccnccccttcccttttncccccngttggcccctatncttttcntnancccantgggggnntcccccnggggnanangnnnncaacccnaggggccccngggngggnnttttnntggnaggncnnnggntttttnancnaacccnttnnaacnnaantttaaccnagnggnnnnaaaanggcntnntccccctnanggntngggnccnttggccnnggnaaaanagnaaaaacccccctncccctnggcnggggnattnaaaaacccntttnnggannaanc

SEQ ID NO: 7205 - DNA, 816 bp, Homo sapiens
  misc_feature 596, 604, 642, 643, 665, 676, 689, 718, 719, 744, 746, 755,763, 766, 775, 790, 791, 798, 801, 815, 816: n = A,T,C or G
gaattggagctccaccgcggtggcgggccagagtatgtaaagctcctgggactctgtgcacccctgggcagttgcttagcagagacttcatgcagctttgtgtgtcagaccaagtcttggtggagtggattcatgaggggatctcctgacccaagagttgcaaaggtccgtggaagaagtgcggttgctaggggtcacatattcattcactgtttgcctgggcagggagaggttcccttggctccatgtcctttcctagtgggctgtcgccctgctttgcttttctcctttctgcatgggttgagctctttccctgatcagtctcaatgtgagaacatgaatgtttcagttgaagttgctgtatttacttgcccctttcatttctctccatgagagccaagagtcctcactgcttctagtcagccatctttggtccagctttgtttccttgatgaatcccaatgcatgtacctcggccgctctagaactagtggatcccccgggctgcaggaattcgatatcaagcttatcgataccgtcgacctcgaggggggggccccggtacccagcttttgttcccttttaggtgaaggttnattgcgcngctttggcgtaatcatggggcataagctggtttcctgnntggaaaattgttatcccgcttnacaatttcccnaacaacattaccnagcccgggaagcaataaaggggtaaaaanncctggggggtgcccctaaatgaggngnagctaaacntcacattnaanttgcggttngggctcactggcccnntttttcnaantcggggaaaacctnn

SEQ ID NO: 7206 - DNA, 853 bp, Homo sapiens
  misc_feature 3, 4, 5, 6, 7, 14, 22, 216, 530, 605, 609, 620, 676, 687,718, 733, 743, 748, 782, 790, 828, 850: n = A,T,C or G
ggnnnnncgaatcngtaatacnactactatagggcgaattggagctccccgcggtggcggccgtgggacctgcaattactacgcaaacgcttacagcttttggctcgccaccatagagaggagcgagatgttcaagaagcctacgccgtccaccttgaaggcaggggagctgcgcacgcacgtcagccgctgccaagtctgtatgagaagaacatnatgaagcctgactcagctaatgtcacaacatggtgctacttcttcttctttttgttaacagcaacgaaccctagaaatatatcctgtgtacctcggccgctctagaactagtggatcccccgggctgcaggaattcgatatcaagcttatcgataccgtcgacctcgagggggggcccggtacccagcttttgttccctttagtgagggttaattgcgcgcttggcgtaatcatggtcatagctgtttcctgtgtgaaaatggtattccgctcacaatttcacacaacatacgagccgggagcataaaagtgtnaagcctggggtgcctaatgagtgagctaactcacattaattggggttgccgcttcactggccgcttttcaagtcngggnaaacctgtcgngccaacttgcattaatgaaatcggccaaccccccggggagaggccggtttgcgtanttgggcgcctntttccctttcttgcttaattgaattgcttgngcttcggtcttcggnttgggggganccggntttaacttacttcaaaaggggggaataccggttnttcccaanaattcagggggttacccccggaaaaaaaaattttgaanccaaaaggcccccaaaagggcncgg

SEQ ID NO: 7207 - DNA, 1102 bp, Homo sapiens
  misc_feature 2, 3, 4, 5, 6, 7, 8, 10, 11, 12, 13, 14, 15, 17, 18, 19,20, 21, 23, 24, 27, 28, 29, 30, 31, 32, 33, 34, 36, 37,38, 39, 40, 41, 42, 43, 44, 45, 46, 47, 48, 49, 50, 51,52, 54, 55, 57, 58, 61, 62, 63, 64, 65, 66, 67, 68, 69,70, 71: n = A,T,C or G
  misc_feature 72, 74, 75, 76, 77, 78, 79, 82, 83, 85, 86, 87, 88, 90, 93,94, 96, 127, 155, 157, 158, 185, 193, 265, 270, 281, 334,341, 375, 404, 421, 470, 475, 478, 509, 516, 552, 566, 576,581, 586, 615, 621, 652, 662, 664, 674, 691, 707, 712: n = A,T,C or G
  misc_feature 718, 727, 792, 797, 801, 834, 860, 885, 890, 913, 940, 945,954, 956, 960, 982, 988, 992, 1001, 1010, 1018, 1023, 1039,1042, 1050, 1052, 1055, 1056, 1060, 1069, 1070, 1100, 1102: n = A,T,C or G
cnnnnnnngnnnnnntnnnnntnngcnnnnnnnngnnnnnnnnnnnnnnnnntnncnncgnnnnnnnnnnnngnnnnnnacnngnnnngnttnngngatcgacgcgtaagacgtgttttgcgggacntccaccgcggtggcggcccgaggtactnanntttttttttttttttttttttttccgnttttgggnggggttcaaacaaaaaatgacttgagcccctctttataaacaactttttaaaatcaaggacaacctaaactntagtnagtaaaatacnctttaaagtagagaatactttaaaagatctcattccttcatattccccttccnccttatntaactcagtatgtctctcaatatggctacctccntgatcttttataactataaactcagatcncactttttcaaaaaggnttggcactttctcataattattattattatcttttttttttttttgganaacanaanccctcactctgtttgcttcaggctgggaagntgccagngggcaccaaacctcagcttcatggacaaaccgttanggcctcctgggttnaagccgattnttacncttcnagccaacttaaagtaagctggggattttnaggcantgcccccactccggggctggacttttttctnttttttagcnangaagacaggngtttttgcccatggtgnggcccaaagctaggtnttcgnaaactnttgggcctntaaaggcggaatcccgggcccacccttaaggccttcccaaaaaggggcctgggggaattaccaanaacangggngggggaagccccacaaggggccctgggcccttngcatttaatttttttaaaaaatgggngaaaataaattcccgggcctttggnttttnatttaaaaaactttttttccaangaaaacccctggggcccaaaccctggnggttnccccaattnantccncggggccgggaaatttttgggncactcncccntttttcatnggggaaagngccaaatnccttnatatttttaacccccntcngggccccncnccnntttnaaagggggnngggggtttttttttcaaaaaaaccaaattngn

SEQ ID NO: 7208 - DNA, 859 bp, Homo sapiens
  misc_feature 103, 501, 562, 651, 663, 690, 700, 702, 714, 718, 720, 721,723, 725, 727, 730, 732, 737, 744, 751, 752, 753, 754, 755,756, 757, 758, 759, 761, 762, 766, 767, 769, 770, 772, 773,774, 776, 778, 780, 782, 783, 788, 789, 790, 794, 798: n = A,T,C or G
  misc_feature 799, 802, 804, 805, 807, 808, 810, 811, 814, 815, 816, 821,822, 823, 825, 826, 831, 835, 836, 837, 839, 840, 841, 845,846, 849, 850, 851, 855, 856, 857: n = A,T,C or G
ctactatagggcgaattggagctccaccgcggtggcggccgaggtactttcttttttttttttttagaaggagtcttgctctggtgcccttcctggagtgcantgacgtgatcttggctcactgcaacctccacctcctgggcttgagcgatcctactgcctcagccccccaagtagctgggaggacaggcgcaagccacggcactcagctaatttttgtatttttcgtagagatagggtttcaccatgttgcccaatttggtctcgaactcctgagctcaagtgatccgcccgccttggcctcccaaagtgctgggattgcaggcatgagccaccgcgcccggccaatacacccacttttcaaacacgaatggaagatttatgaaaattggccacatgtcgagccatttggcaagcttcgatggatttccaaggattggtagcatataaaccctattctctgacattacacttaagttagaaatcaaaatcaaaaagatnattagaaaggtttccatacatttgaaaaatgaaaaatacttctaaataatttatggggttnaaagaaaaaaacataatttatattagaaaatacttaaaactggatgataattaaaaatacctcatatttcaaaataaggggagaatacnagcttaagctgntaggttagacaaacctttatgggctgngaattggcantntttccggaaatnaaantnncncntnttntnaaagntcccccnggcgggnnnnnnnnntnngggnntnntnnntntntntnnctttnnngggntacnncantnntnncnnccnnnttccnnngnngaccncggnnnannnttgnnttnnnaatnnncc

SEQ ID NO: 7209 - DNA, 877 bp, Homo sapiens
  misc_feature 17, 24, 85, 652, 706, 732, 747, 758, 759, 765, 785, 828, 844: n = A,T,C or G
aatgtttaaacctttgnaataccnctcactatttgggcgaattggagctccaccgcggtggcggccgcccgggcaggtaccatgntgggtgcctctggcgactacgctgatttccagtatttgaagcaagttctcggccagatggtgattgatgaggagcttctgggagatggacacagctatagtcctagagctattcattcatggctgaccagggccatgtaccgggaagccaatcaataatggtggtggtggcagctgggcaggtctcctctgggaggtcttggccgactcagggacctaagccacgttaagtccgaggagaagaagaggcctagcctgagccaaagagagagtacctcggccgctctagaactagtggatcccccgggctgcaggaattcgatatcaagcttatcgataccgtcgacctcgagggggggcccggtacccagcttttgttccctttagtgagggttaattgcgcgcttggcgtaatcatggtcatagctgtttcctgtgtgaaattgttatccgctcacaattccacacaacatacgagccgggagcataaagtgtaaagcctggggtgcctaatgagtgagctaactcacattaattgcgtttgcgctcactgcccgcttttcaatcngggaaacctgtcgtgccagctgcatttaatgaatcggccaacccccggggagangccggttttgcgtatttggggcgctnttttcgctttcttgnttcactgactnncttggnctcggtcgttcggttgcggnggagccggtttcagcttcacttcaaaggcgggaataccggttnttccacaagaaattanggggttaaccccaggaaaaaaacattttgaact

SEQ ID NO: 7210 - DNA, 823 bp, Homo sapiens
  misc_feature 364, 365, 366, 367, 368, 369, 370, 371, 372, 373, 374, 375,376, 377, 378, 379, 380, 381, 382, 383, 384, 385, 386, 388,389, 390, 391, 392, 393, 394, 395, 396, 397, 398, 399, 400,401, 402, 403, 404, 405, 406, 408, 409, 410, 411, 412: n = A,T,C or G
  misc_feature 413, 414, 418, 419, 420, 421, 423, 424, 425, 426, 427, 428,429, 430, 431, 432, 433, 434, 435, 436, 437, 439, 440, 441,442, 443, 444, 445, 446, 447, 448, 449, 450, 451, 453, 454,455, 456, 460, 461, 463, 464, 465, 467, 470, 473, 476: n = A,T,C or G
  misc_feature 477, 478, 479, 480, 481, 482, 483, 484, 488, 489, 491, 492,493, 496, 497, 498, 499, 500, 501, 503, 504, 505, 507, 508,509, 510, 511, 512, 513, 516, 517, 518, 519, 521, 522, 523,525, 526, 529, 531, 532, 534, 535, 536, 538, 539, 540: n = A,T,C or G
  misc_feature 541, 544, 545, 546, 547, 551, 552, 554, 555, 556, 557, 558,559, 560, 561, 562, 563, 565, 566, 567, 568, 571, 572, 573,575, 577, 578, 579, 580, 581, 583, 584, 585, 586, 587, 588,589, 590, 591, 592, 593, 595, 596, 598, 599, 600, 601: n = A,T,C or G
  misc_feature 602, 604, 606, 607, 608, 609, 610, 611, 612, 613, 614, 616,617, 618, 620, 621, 623, 626, 627, 629, 630, 631, 632, 633,634, 636, 637, 638, 639, 640, 641, 642, 643, 644, 645, 646,647, 648, 650, 651, 652, 653, 654, 657, 659, 661, 662: n = A,T,C or G
  misc_feature 664, 665, 666, 667, 668, 669, 671, 672, 677, 678, 679, 680,683, 693, 695, 696, 697, 699, 701, 703, 706, 709, 710, 711,713, 714, 722, 723, 724, 725-744, 747-755, 757-804, 806-823: n = A,T,C or G
gactcactatagggcgaattggagctccaccgcggtggcggccgaggtacagggagagtctggttccagtgccaacttgtgggacgctcccttgtgctgggccgcacgttttgtattcttgcaacactgtgtggcagacagttctgctactcgaacctgcccgtcacgggcacacatggccagagtagaatcaccactgttaggaagaaacttggcctggggtgttaaaaatgaaaaaaaggacacacaaaagaaatgagagaggtaaacttgagaataaaaaatacgatgatgacctcaacttacccccttttcttacatgacagctggaaacttagctttcctactcttgtacctgcccggnnnnnnnnnnnnnnnnnnnnnnnannnnnnnnnnnnnnnnnnnannnnnnngggnnnncnnnnnnnnnnnnnnntnnnnnnnnnnnnnannnncttnnannntntgntgnaannnnnnnnngggnngnnnatnnnnnntnnntnnnnnnnaannnnannncnngananngnnntnnnnatnnnntgcnngnnnnnnnnnntnnnnggnnnantnnnnnannnnnnnnnnntnngnnnnngntnnnnnnnnngnnngnngnttnntnnnnnntnnnnnnnnnnnnnannnnnggnancnntnnnnnngnnaggtnnnnagnttgggccctntnnntnangnaanggnnntnnttttttgnnnnnnnnnnnnnnnnnnnnnnnggnnnnnnnnngnnnnnnnnnnnnnnnnnnnnnnnnnnnnnnnnnnnnnnnnnnnnnnnntnnnnnnnnnnnnnnnnnn

SEQ ID NO: 7211 - DNA, 1147 bp, Homo sapiens
  misc_feature 1, 2, 3, 4, 5, 6, 7, 8, 9, 10, 12, 13, 14, 15, 16, 18, 20,21, 22, 23, 24, 25, 26, 27, 28, 29, 30, 31, 32, 33, 34,37, 38, 39, 40, 41, 42, 43, 45, 46, 48, 49, 50, 51, 52,53, 55, 56, 57, 58, 60, 61, 62, 63, 64, 65, 66, 67, 68,69: n = A,T,C or G
  misc_feature 70, 71, 72, 73, 74, 78, 80, 81, 82, 83, 85, 86, 87, 88, 89,90, 91, 97, 98, 100, 101, 105, 109, 112, 115, 443, 479,522, 563, 602, 633, 653, 654, 677, 689, 697, 709, 714, 717,718, 719, 720, 724, 728, 735, 737, 738, 752, 756, 770: n = A,T,C or G
  misc_feature 775, 790, 796, 826, 830, 835, 850, 857, 863, 875, 878, 898,905, 930, 938, 942, 953, 958, 961, 969, 972, 973, 974, 976,986, 990, 996, 1002, 1005, 1006, 1008, 1017, 1018, 1020,1027, 1033, 1043, 1049, 1051, 1053, 1067, 1068, 1072: n = A,T,C or G
  misc_feature 1074, 1078, 1080, 1081, 1089, 1093, 1111, 1112, 1113, 1118,1119, 1120, 1122, 1124, 1131, 1134, 1144: n = A,T,C or G
nnnnnnnnnntnnnnngnannnnnnnnnnnnnnnttnnnnnnntnnannnnnngnnnngnnnnnnnnnnnnnnngttntnnnntnnnnnnngaaggnngnntctngtcnctnatntagggcgaattggagctccaccgcggtggcggccgaggtacttatgaagcccatctaagtaagatcatttcttctaattcaattttctaaaatcatttgtgttttagaaatctcatgattcccaggaaaaaaattttaaattgtgatacaggtttgacagccttttagtcaaataagttaaaacacacacgcaaactcatttactcactttgccattataattcaatcacaaagaaattttggccaggcgtggtggcttacgcctgtaatcccaagcactttggggaggcccgaggcaggtggatcacgagggtcagggggatcaagnatcattcctgggctaaccatgtggaaaccccgtctnttattaaaaaataaaaaatttagccctggttgtggtggccggngtgccctgtagttccccagcctacttcgggggaagggcttnaaggcagcaagaaatggggccgtggaaccttcaaggaangcgggaagcctttgccaggtggaggccccgnagaatccgcgcccaccttgnnacttcccaagcccttgggattgnaccaggaaccgnaggacttnccgtccttcctnaaganggnnnnggtncccnaaccccnannggggtttcccttgncccnggggccgggggcgnggttnttaaaaacctaaggnggggantcccccccggggcctggcaaaggaaatttncganttttncaaagcctttaattnggattancccggnccgacccctccnaanggggggggggccccgggttnccccaanctttttggtttcccccttttaaaanagaagggntttnaatttgccccnccttnggnggggaaantcnnngngggccataancctnggtttncctggnggnngnaaattgggnntnttccccnttcacnaaatttcccnacaaanantnaccaagcccggggnnccantnaaantnnttaaaaancccngggggggggccccaaatnnnggggnnncntnaccttcnccnttttatttgnggg

SEQ ID NO: 7212 - DNA, 905 bp, Homo sapiens
  misc_feature 35, 39, 68, 69, 70, 72, 106, 233, 281, 323, 335, 340, 346,348, 354, 358, 361, 362, 363, 387, 426, 433, 450, 451, 477,480, 495, 500, 517, 523, 524, 535, 546, 548, 549, 550, 551,557, 560, 566, 567, 569, 574, 577, 578, 585, 594, 595: n = A,T,C or G
  misc_feature 596, 600, 602, 612, 613, 633, 635, 645, 646, 657, 660, 672,689, 703, 708, 711, 723, 727, 729, 739, 742, 745, 751, 752,763, 768, 770, 783, 788, 791, 812, 819, 822, 840, 844, 848,851, 854, 855, 870, 874, 892, 895, 897, 899: n = A,T,C or G
ggagctccaccgcggtggcggccgcccgggcaggnactnctttttttttttttttttttttatggggnnntntcacttaccatcatctgacatactacgtacttgnttaatgttcgtctatccctagctccatgaggaaagagatttgtttgttgtggtactgtatcctcagcacctagaagaggatttggcgaatattaaacgctcgataaatatttgatgactgaatgagngaatgcatgaatgaacaaagtcataaaactgggcttcaaaagctcatnttggctagcatcataactagaaagtcataaaaaaaaaaaagntttttccctttntgacngaatantncagggnggtngannnccaaaatatcagggattcatgttnttttgggccaaaatgccccaaggaaagagaatggccttntccctancccttaaggtccctcannagactttatgattggggggttttcanccncataatccctttccnttctngaaaaattcccaaaatntttaannaaaaaaattgngtgtgtggggncnnnnttgttntgntgttgnntngtagngcnnaaaaccnccccttttnnntctncnttgaaaaacnncccaaatttttttctttaanancccccttttnnctttttccttntanaaaaatgccctnaccccccccggggcccngggggggccccccnccctngtnttcccaaaaaantttnangggggccccnaanacngggggnnttttcccgggnggggncnggggattaaaaanccccnccntggcccaaaaggggggaaaanccccccnttntccaaaaaaaaccaaaantttncccnccnttnnggggggggggccccntgtnatccccctttttgggggnggngngnccccct

SEQ ID NO: 7213 - DNA, 1246 bp, Homo sapiens
  misc_feature 1, 2, 3, 4, 8, 13, 14, 15, 19, 20, 22, 23, 26, 29, 30, 31,33, 34, 37, 39, 40, 41, 42, 44, 45, 48, 51, 53, 54, 58,61, 62, 63, 68, 69, 70, 71, 72, 73, 75, 79, 80, 87, 91,93, 94, 98, 99, 100, 102, 112, 117, 125, 127, 129, 142,162: n = A,T,C or G
  misc_feature 202, 218, 220, 227, 243, 244, 245, 266, 268, 270, 281, 289,290, 314, 320, 321, 326, 328, 340, 346, 365, 382, 386, 401,413, 415, 453, 463, 479, 498, 551, 554, 558, 563, 564, 565,567, 578, 584, 588, 589, 592, 593, 607, 637, 642, 652: n = A,T,C or G
  misc_feature 663, 670, 678, 691, 692, 712, 716, 764, 772, 778, 788, 810,815, 816, 820, 822, 825, 830, 849, 854, 869, 878, 883, 887,896, 898, 916, 934, 936, 947, 958, 960, 968, 969, 970, 975,977, 978, 979, 982, 984, 999, 1003, 1004, 1006, 1011: n = A,T,C or G
  misc_feature 1018, 1022, 1025, 1029, 1033, 1036, 1040, 1048, 1056, 1057,1059, 1060, 1077, 1080, 1085, 1087, 1089, 1097, 1107, 1121,1122, 1127, 1128, 1129, 1133, 1149, 1150, 1154, 1162, 1165,1168, 1170, 1174, 1188, 1197, 1199, 1208, 1210, 1213: n = A,T,C or G
  misc_feature 1214, 1220, 1221, 1228, 1231, 1234, 1243: n = A,T,C or G
nnnnatantattnnntttnntnnganttnnntnnttntnnnntnntanatngnnaatngannnttctnnnnnnanattnnataattntttngnnagtnnntnttcgcgcgtnatacnactcactntngnattggactccacncgcggtggcggccgcccggncaggtacgcgggatcaactttcgatggtagtcgccgtgcntaccatggtgaccacngntgacagntaatcagggttcgatnnnagagagggagcctgagaaacngntnccacatccaangaaggcannaggcgcgcaaattacccactcccnacccgnngaggntnttgacgaaaaanaaaaanaaaaaaaaaaaatgttccnttggccgctctagaacntagnggtatcccctcggtntgaaggggaatngnaatttcaaagcctttatcgaatacccgtccgacctcanaggggggggngccccgggtacccaanctttttggtttcccttttnagtggaaggggttaaatttgccgccgccttgggccggttaatttcatttggcnaantaanctttnnntntcccttgtttntgaaanatanngtnntattccccccttcnacgaattttcccaacaacaaaacaattaanttaanccccggggtnaggccaattanaaagtgnttaaaaancccctgggggggnnggcccttaaattggaagttngaanccctaaaccttccaacaattttaaaatttggcggtttgggcggccttnaaacttgncccccngttttttttncaaagtttccgggggaaaaaanccttnntctntnggncccanccttggccattttaaattngaaanttccgggggcccaanccccccccnggggngaanaaagggccntnttttttggcgttattttnggggccgacctttttttncncgatttttctntggttttaaantnaaactttnnnctttncnnnctncnggttccgatttcggncttnncngggcnaaaccgngtanttnaaancctnaanttcnaaaaaggnggggtggnntnncccggggtttttccccnaanaaaantnanggggggantaatcccccncgggaaaaaaaaannatttnnnaacnaaaaagggcccatccnnaaanggccttgnaanccntntaanaaagggcccccctnttttttggncnttttttccnanaannggcttnnccccccnttnganaaaaaattnaat

SEQ ID NO: 7214 - DNA, 861 bp, Homo sapiens
  misc_feature 27, 151, 152, 153, 164, 177, 184, 190, 191, 200, 201, 203,204, 212, 228, 229, 230, 231, 232, 233, 238, 243, 244, 247,248, 253, 254, 256, 257, 262, 264, 267, 268, 274, 279, 285,291, 298, 309, 319, 330, 335, 349, 350, 351, 353, 364: n = A,T,C or G
  misc_feature 370, 374, 386, 395, 398, 399, 400, 402, 406, 413, 417, 419,421, 437, 466, 467, 471, 472, 482, 493, 495, 496, 497, 499,510, 511, 512, 513, 514, 530, 532, 533, 544, 547, 554, 557,558, 559, 560, 562, 564, 565, 570, 589, 590, 592, 617: n = A,T,C or G
  misc_feature 618, 620, 626, 632, 633, 651, 653, 655, 658, 659, 661, 663,665, 670, 673, 675, 694, 695, 696, 697, 707, 715, 716, 718,720, 721, 723, 726, 765, 766, 768, 769, 770, 771, 772, 788,789, 791, 792, 798, 799, 801, 802, 803, 804, 805, 806: n = A,T,C or G
  misc_feature 811, 814, 815, 817, 818, 824, 832, 856: n = A,T,C or G
ggagctccccgcggtggcggccgaggnacttttttttttttttttttttttttttatttttttttttttttttttttttttttttttttttttttttttttttttttttttttttttttttttttttttttttttttttttttttttttcnnnaaaaaaaaaanaattttttttttnaaaaaantttaannggggggggnncnnaaaaaaancccccggggggggggnnnnnnccccnggggnnaannggggnncnnccccnanggnngggggnttttnaaaaancccccnttttttnaaccccccccnaaaaaaaaanaatgggccccnaaaanccccgggggggggnnncnaaaaaaaaaancccccntttngggggggggggnccccccccnaannnanaaanccggggncccnangngccccccaaaaaaacncccccccgggggggggggggttccccccnntttnncccggggggntttaaaaaaanannnantcccccccctnnnnnggccccccccccctanannaggggcccccnttnggggggnggnnnncncnnaaaangggggggaaaaaaaaaaanngnttttttttttttttttttttttttnngngaacgncccccnngggaaaaatttccccccnananaanngngntnttttnctncncaaaaaaaaaaaaaccccnnnnaaaagggggnaagggggnncncnncncanaaaaaaaaaaaaaaaaaaaaaaaaaacaccccccccccnngnnnnncctttaaaaaaaaatnngnncccccnncnnnnnnaaaantannannaaaacnttttttcncccccccccccccggggggggggncccct

SEQ ID NO: 7215 - DNA, 865 bp, Homo sapiens
  misc_feature 78, 216, 238, 246, 250, 252, 283, 299, 439, 451, 481, 525,532, 614, 622, 625, 645, 646, 663, 675, 689, 713, 718, 723,729, 739, 740, 756, 766, 771, 794, 810, 816, 820, 829, 836,838, 849, 856, 859, 862: n = A,T,C or G
atagggcgaattggagctccccgcggtggcggccgcccgggcaggtacttttttttttttttttttttttttttattnctatctataataaacagagagagagagagagagagagagagactgaatgcctaatatctatcagacatggcaagctatgttcctatcctatatgtgtttctctccttaaggataggcatcatagcttattgacttctntaatcctaggacttatcacagngcgtgacncgtnanaagcaacacaaaatttgttgagtgaccatanccttcaggtaaactanaagataacctgtcactaatcatgaaatgttcttgggaaattccaacaaatgccaactccctaagtaaagaccctcttcccctggagttttccatttttccccccttgcagctaaaaagtagcatcatagttaatggtccncatgttattctncagaagggagaaaaaaggggggaaaagccnccagagagatgaccacctttttaatgagaagaaacccaaagaanggtaacngtcccccacctgtaagctacagtttaccttccaagtctttttttttaagatgccaatccaggttttttttcacccaattttngggctttnttnttgccttttaccgggaaacnncttgttttaagcaaccnttttttttttgngaactttaaccaangggccccttggcaagggggttttnttttnggggnggcccnttaaaaattnncagggtttttcccaanggggggcccntttgnttgcccctgggccaggggggggntttaatttattaaggnaaaaanaagngggcggganaaaaacncnccccccccatnaaaaccnttnggnaaa

SEQ ID NO: 7216 - DNA, 922 bp, Homo sapiens
  misc_feature 8, 9, 12, 15, 23, 26, 29, 35, 36, 38, 41, 55, 56, 58, 60,71, 72, 79, 84, 87, 88, 90, 91, 96, 97, 100, 101, 103, 104,105, 110, 114, 115, 123, 130, 135, 136, 144, 189, 338, 355,434, 442, 454, 458, 466, 478, 538, 578, 580, 602, 624: n = A,T,C or G
  misc_feature 684, 685, 702, 708, 713, 719, 730, 733, 734, 736, 755, 769,779, 782, 784, 794, 802, 812, 816, 820, 851, 859, 865, 891,895, 902, 904, 905, 908, 914, 918, 919, 922: n = A,T,C or G
ccactttnnttnttntttttatnctnaantcttannanttntttttttatgtatnntntnattttataatnnattacanttttnatnncnnggtgnnggnntnnnttatntatnnctttatancctaatnggcgnnccaccgcngtggcggccgggcgtggtaggctcacgcctgtaatcccagcactntgggaggccaaggcgggtggatcacgaggtcaggagatcaagaccatcctggctaacatgtctctactaaaaatacaaaaaattagccgggcatggtgacaggcttctgtagtcccagctactcgggaggctgaggcaggagaatggcngtgaacccgggaggcanagcttgcagtgagccgagatagccgccactgcactccagcctgggtgacagagccgagacttctgtctcaagaaaaaanaaaaaaanaaaaaaaaagtncctnggccgctnctagaacctagnggggatcccccccgggctgccagggaatttcgtatatccaagccttattcgattacccgntcgaaccttcgaggggggggggcccccgggtacccccaancntttttggttcccctttttaagnggaggggggtttaaatttgccncccccttttggggcggaaaaatccaatgggtacaaattaagctttggttttccccttggnngggggaaaaaatttggnttaatncccgnccttcnaccaaatttcnccnncnccataacatttacggaagncccggggggagccnttaaaaaggnggntnaaaagccctngggggggngcccttaaantggnggtnggaggccttaaaccttcacaatttaatttgncgtttgcngccttnactggccccgctttttcccaggtccngggnaaaaccntnntcncgtggnccannccn

SEQ ID NO: 7217 - DNA, 650 bp, Homo sapiens
  misc_feature 604, 605, 615, 640: n = A,T,C or G
ggagctccaccgcggtggcggccgaggtaccaggctggcgacaggtgctaccaggagtgggctgaggggagaaaaactatctcccactcttttggcccaggcaatgtcaacgacttccacattccctggcccacttcctgagcaaccccaggttcggctctgtataaggaccctcccctcccaaccccaaccccagagtgcagtgcaaatcaaccaacaatttactggtggaatggcaatcaaaggaaacagttaaacaccaaacaatttcttaaagccaaaaaatatttttcatggagttgaacatttttcgagtgtgtttttttcaagtgtaaaagcagtgacattttgttcaaacagaagcagcatctaggaattctggcacttgggttctagggggttacaggtatgcatcatggattcttctccctcgtatttaaaaaggcctcgtgtttctattcctgagttcataccaacacctgctagctctcccctctacggacagtgggtggccagccagccttcctggttagattgggcaatgccaagcagacatcccctcattcacctgctgggcttgctttctgattcagaggtaaagtcnnaaagtgccanaagaaagaaaactttacaaaaagcnccaaccccct

SEQ ID NO: 7218 - DNA, 796 bp, Homo sapiens
  misc_feature 296, 361, 425, 437, 591, 638, 669, 715, 721, 727, 731, 737,738, 741, 742, 747, 749, 750, 754, 760, 761, 762, 764, 766,776, 783, 795: n = A,T,C or G
attggagctccacccgcggtggcggccgaggtacttttttttttttttttttttgctgcacagctttaaaaagttgaagtctattggaaaccttcttataagaaaccttcctagtcagagaattcaactttcttcttttcttcattcatgaaaatgcagatccactgagaaagggaataaggtaaaagtatcattttcctttgggaatcaggtttttctgtcagaggaataaaggcctttctttccaggtcaattcctgttgtgctgaaggctgggaatcatcacgcccttttggngtgggccccagctttgagcctctgtgatgatggtagaatctggaagtcagaagcccatatcctanatcagctgctttgctgggctgaccttcagtgtgatcctgcatcccaaactcctgacctctccanagaacttggggngttctcccaagatgctgggcctctgggaagcatctccttaggtgaacagccccagatgcctccttcttaaagttgggtctaagttactccatgcttgactatcaacccccaagtgtgaaagatcacgtttattcctgagggaaacaccggagtngttcctaactctactttgcctttcttagaacacgtttgcttctggtngaaatgaaaatttttcaagtaaagtggtttngggtttttttctggattaatttttaatttttttaattcccttaaancctttngttttngggngaaacnnctnncagcnannaagnctaatnnncntnacaaaaagtnccccttnccgggggggggng

SEQ ID NO: 7219 - DNA, 856 bp, Homo sapiens
  misc_feature 442, 471, 489, 490, 499, 537, 539, 548, 549, 552, 558, 562,568, 570, 574, 579, 580, 586, 589, 592, 594, 595, 601, 604,605, 606, 612, 613, 618, 624, 627, 632, 634, 635, 649, 650,657, 658, 659, 671, 686, 704, 709, 711, 736, 745, 752: n = A,T,C or G
  misc_feature 753, 754, 755, 759, 761, 763, 764, 774, 786, 789, 797, 805,806, 807, 811, 812, 813, 827, 832, 840, 843: n = A,T,C or G
atagggcgaattggagctccaccgcggtggcggccgaggtactttttttttttttttttttttgaagaggtggggtctcactatgttgcccatgctggtctcaaactcctggcctcaagtgatcctcctactttagtctcccaaaatgctgggattacatttacgagtaccacgactggctggtttttatattttttaaatgtttggggaaaatgtcaaaagaagagtattttgtatgatacgaaaactacatgaaattcaaatttcagtgtccataaataagtttttctggcatacagccacactcacttgcttccatattatttatggctgtttttcacactataatggcagagttgaataattgcaacagactggatgatacatatagcctacaatatttactattaggcccttaacaggaaaatttacttactcctgngttaaacatatgtcaccaggaactttggnaaaacatgttcccctgtnnaagtcctgnaaaaaattactgatctacgaaagtaggtgggtgatgtncntctataaannaangcgttnggcncttggntntggnaaaannacaatnganaantnntggggngcnnnccaagnngggcntacttnaancaggntnnggaaaaatgggggnnggggccnnncttttttttctnctgctcaaggaggtnggaaacttaaaaaacttntaacnanttttttatttttggcccacaatgcnaaaccttcnaaaaggnnnnagcntngnnaaacgaaaantttttttttaanttnaaaaaganggcttttnnntagnnnacgttttacccccnacccngggaaaanacntgggtgtccctgc

SEQ ID NO: 7220 - DNA, 1015 bp, Homo sapiens
  misc_feature 3, 4, 5, 6, 7, 8, 9, 10, 11, 12, 13, 14, 15, 16, 17, 18,19, 20, 21, 22, 23, 24, 25, 26, 27, 28, 29, 31, 32, 33,34, 35, 36, 37, 38, 39, 40, 41, 42, 43, 45, 46, 47, 48,49, 50, 51, 52, 53, 54, 55, 56, 59, 60, 61, 63, 65, 66,67, 68: n = A,T,C or G
  misc_feature 69, 70, 71, 72, 73, 74, 77, 78, 79, 80, 82, 85, 88, 89, 90,91, 92, 93, 94, 96, 97, 98, 99, 100, 101, 102, 104, 105,107, 113, 123, 665, 840, 852, 923, 939, 944, 950, 964, 974,976, 984, 986, 998: n = A,T,C or G
ctnnnnnnnnnnnnnnnnnnnnnnnnnnntnnnnnnnnnnnnntnnnnnnnnnnnnatnnnangnnnnnnnnnnttnnnnanagngannnnnnntnnnnnnncnntncttagncgaattgganctccaccgcggtggcggccgaggtacgcggggaggaagtgtcggcgccgccactgtccggccacagcctaacgctcttcgctgtcgtttgcggtctcgcgcagggcggccccggttctggtgtttggcgtcggaattaaacaaccaccatgtcgagcaaaaaggcaaagaccaagaccaccaagaagcgccctcagcgtgcaacatccaatgtgtttgccatgtttgaccagtcacagattcaggagttcaaagaggccttcaacatgattgatcagaaacagagatggcttcatcgacaagggaagatttgcatggatatgccttgcttctctaggggaaggaatcccacctgatggcattacccttggatgcccatgaatgaaatgaaggcccccagggccccatccaatttcacccatgtttccctgaccatgttttggttggaagaaagttaaatggccacaagaatccctggaagatgtcatcagaaaaccgcctttgcttgctttggatgaaagaaagcaaccagggcacccattncagggaaagattaccctaagaagaagctgctggacaacccatgggggggatccgggtttacagaatgaagggaagtgggattgagcttgtacctgccccggggccggcccgcttctagaactaagtgggatccccccccggggctgcaaggaaattccgaatatcaaagctttantcgattacccgngcgacccttggaggggggggggccccgggtaccccaagcttttttgtttcccctttttaggtggagggggnttaaatttggccgccnctttnggccgnaattcaatggggtncattagcctngntttccctngnggtgaaaaattnggttattccccctccct

SEQ ID NO: 7221 - DNA, 1385 bp, Homo sapiens
  misc_feature 2, 4, 6, 8, 9, 15, 16, 20, 25, 26, 29, 31, 32, 34, 37, 38,40, 44, 47, 48, 50, 51, 52, 54, 56, 62, 65, 67, 71, 73,79, 81, 82, 87, 89, 92, 95, 97, 101, 105, 109, 112, 115,126, 139, 140, 143, 146, 149, 156, 157, 158, 175, 176, 189: n = A,T,C or G
  misc_feature 229, 379, 390, 407, 419, 425, 436, 443, 465, 469, 472, 479,482, 484, 497, 498, 503, 504, 511, 517, 527, 547, 548, 550,557, 563, 568, 572, 586, 589, 598, 607, 611, 616, 624, 625,640, 648, 652, 654, 655, 657, 663, 666, 677, 680, 686: n = A,T,C or G
  misc_feature 699, 708, 709, 710, 714, 715, 717, 719, 728, 735, 742, 743,750, 751, 755, 769, 778, 780, 782, 784, 789, 790, 791, 797,805, 806, 807, 808, 829, 837, 838, 852, 861, 868, 870, 871,875, 877, 881, 897, 898, 901, 902, 903, 906, 907, 913: n = A,T,C or G
  misc_feature 915, 921, 936, 950, 952, 955, 956, 963, 965, 966, 975, 978,979, 981, 984, 985, 990, 995, 998, 999, 1002, 1003, 1010,1012, 1018, 1026, 1029, 1033, 1042, 1045, 1047, 1052, 1058,1064, 1073, 1082, 1084, 1094, 1095, 1099, 1113, 1117: n = A,T,C or G
  misc_feature 1122, 1132, 1135, 1141, 1144, 1152, 1153, 1154, 1158, 1159,1163, 1165, 1168, 1169, 1173, 1175, 1176, 1180, 1183, 1185,1187, 1188, 1189, 1190, 1191, 1197, 1198, 1199, 1201, 1209,1214, 1215, 1218, 1222, 1224, 1226, 1232, 1235, 1242: n = A,T,C or G
  misc_feature 1245, 1250, 1254, 1255, 1263, 1264, 1271, 1272, 1273, 1278,1282, 1283, 1286, 1287, 1291, 1292, 1297, 1302, 1307, 1310,1315, 1319, 1320, 1322, 1325, 1330, 1336, 1340, 1350, 1352,1363, 1365, 1368, 1378, 1385: n = A,T,C or G
tnancnannctctannattnggttnntananntntanntnaatntcnnannnananaaattnaancntttntntatgangnnataantnttnaanantcanaaangggnaantcnaggaacacatntttcaacattctnntanttncanattttgnnnctccacccgcggtggcnngcctgatgtacanatccacagcctgttcagttgcaccctccctgacaccaccnccgggacctgcacagactgggagttcatttccttgctcactggggcctgccttccccaaagctggtgtcttctgatagccaaactgatgggtgggaggtatttttgaaatgcagatttaattattcattgtggtggtggaggccaaccantaatcaggganataacctgccaactganaaatgatacttntttgtntaactaccacnaaggttnccccaaattggggtaagggagnggantantggctcnacnancagccggtttggnntgggnntccaccnaccacntgggggaaangccaacccaaaaggggtacnncnccttggngggaanggttntatnaacggggaatcccnaanggggaaaanaaaaaaaangtgnggggnccataaannaaaccccctttttanttttgggncttntnncnattggnggnaatgggggaanacngcggancacaaagagggantttttggannncttnnantntcaaagggncttttanggcattnngggcctnnattntataggacatactnaaccttttncnantnccgannnaaatcntggggtannnnaacccaaataaaaggcctggnatcactcnnaaattcttaattcnttggggatnatggccnanncccntngggnattttggaatattacnnggnnnctnnttggangnaccacntgggggcccccccantaaacttagtttgnantannacccccnanntaatataanacnnanttnntccgnggggnacnnatnngggcccntnttgtgnaaccccantancgtngtatttttnatngnatganaaaaangggcgnccctttaanccctacacncntatttaccanncccnaggagaacttatantggnttttntctttagccnatncataanttnccttcttnnncccnnattncncgnnggtngnnaccnttntngnnnnncaaaannnanattggtgnattannttntttngnantacctnctncaaaaancanataanacannaccttctnnaacttgnnnacacnatannttnnttanntcaantggtngccanaanacccntggnntnatntactnttcccnatgnccccccaatngnttattctcaanantanaaagcccttntctaacn

SEQ ID NO: 7222 - DNA, 1146 bp, Homo sapiens
  misc_feature 1, 3, 5, 7, 8, 9, 10, 11, 12, 13, 17, 20, 22, 24, 25, 26,36, 37, 38, 39, 40, 41, 42, 43, 45, 47, 50, 51, 53, 55,56, 64, 66, 68, 69, 70, 71, 72, 75, 76, 77, 78, 79, 81,84, 85, 86, 87, 91, 92, 99, 102, 104, 106, 107, 108, 120,160: n = A,T,C or G
  misc_feature 183, 198, 248, 281, 297, 337, 340, 365, 397, 442, 452, 472,508, 515, 534, 549, 582, 587, 602, 607, 620, 629, 646, 651,662, 682, 686, 712, 717, 725, 735, 749, 751, 754, 768, 783,799, 806, 810, 814, 820, 833, 839, 869, 871, 874, 875: n = A,T,C or G
  misc_feature 882, 883, 893, 907, 923, 930, 955, 960, 975, 980, 981, 984,989, 992, 994, 998, 1000, 1009, 1025, 1031, 1038, 1044,1047, 1052, 1053, 1056, 1072, 1073, 1077, 1078, 1083, 1090,1099, 1104, 1105, 1108, 1127, 1128, 1139, 1140, 1141: n = A,T,C or G
ncncnannnnnnntganatngnannngatttctctnnnnnnnnangntanngnanntaaaaagntngnnnnntannnnnanctnnnncaannggagggnagngngnnnagactaaattanggcgaattggactccaccgcggtggcggccgaggtacttnaattttttttttttttttttggnacattttgcccttanctttttgtttcctagcctgtcttttttcttctgcttcctacttttcaggnttaaatttatcttttttcttctaaaagtatggnttttatcttctaattnccctatcttctctattcttttcttcgccttcccgtacttntgncttccagttttccacttcaaacttntatcttctccaaatggtttcatcctaccactnccaattaatctttccattttcgtcttgcggttgttaccactgggnttcccgcggnacctgccccggggcggcccncttcgacagcttcacttggcccggcttttccaaggnccggggnaaacctggtcggggcccangctggcatttaaatngaaaatcgggcccaaccgccccccggggggaanaaagnccggtttttgccaanaattngggggcccccttnttttccccncttttccctcggggttncaacntggaactttcngccttggccgccttccgggnccgntttccggggtttggcggggcagaagncgggntattcaancctcaccttnaaaaaggggcgggntnaantaaccggggtttanttcccaccaagaaanttcaggggggggaatnaaacccnccangggnaaaaanaaaaccatttggngggaancccaaaaaagggccccagcaaaaaaggggncnaannaaccccnntaaaaaaaanggccccctgtttgnctgggccttttttttnccataanggctccccccccccccttgggacgnaagcnattaaaaaaaaaaantccgnnccncctcnaangncaananagggggggnggaaaaaccccccggncggggnacttttnaaaagnaanacccnnggngggttttccccccccnngggnnaaacntcccttnggggccccnttttnnttngttacccaaccccttggcnntttttaaccgnnnatcct

SEQ ID NO: 7223 - DNA, 769 bp, Homo sapiens
  misc_feature 545, 550, 554, 557, 558, 559, 563, 568, 584, 585, 586, 588,589, 590, 593, 594, 595, 596, 597, 598, 599, 600, 601, 602,603, 604, 605, 606, 607, 608, 609, 611, 613, 614, 615, 616,617, 618, 620, 622, 623, 624, 625, 626, 628, 629, 630: n = A,T,C or G
  misc_feature 631, 632, 637, 638, 640, 641, 642, 644, 648, 649, 650, 651,652, 653, 654, 655, 656, 657, 660, 661, 662, 665, 667, 668,669, 670, 671, 672, 673, 674, 675, 676, 678, 682, 683, 684,686, 687, 688, 690, 691, 692, 693, 695, 696, 700, 702: n = A,T,C or G
  misc_feature 704, 705, 706, 707, 708, 709, 711, 712, 713, 716, 717, 718,720, 723, 724, 725, 726, 727, 730, 731, 732, 736, 737, 739,745, 746, 747, 749, 750, 751, 754, 755, 757, 759, 761, 764,766, 768: n = A,T,C or G
ggcggccgaggtacacagccttcaacccatttcctggcatacaactcctaacatcccgagaatatccaaagtgatgcccttttctaatgttgactgatggatggaagcccatagttagcttcagaattagggctgctcaccagaaagaccaaggcatgattacagaattagaactttcagtcccatcccctgacttccggggaggggagaggagctgaaggttaagtggatgcccaatgatttaatcaatcatggctatgtaataaagtctccagaaaaaccagccctgaagtggtggctcgcgcctgtaatcccagcactttgggaggctgagggagatcaagaccatcctggccaacatggtgaaaccccgtctctactaaaaatacaaaaattagctgggcatggcggtgcgtgcctgtagttccagctgcttgggaggctgaggcaggagaatcgcccgaacctgggaggtggaggttgcagtgagccgagatcatgccactgcaccccagtctgggcaacagagcgagactccatctcanaatanaaanatnnnaaanaaaangtaccttgcccgcggnnntnnnttnnnnnnnnnnnnnnnnnanannnnnnantnnnnnannnnnttatnnannnanattnnnnnnnnnntannnttnannnnnnnnnnanttannnannnannnngnnatgnanannnnnntnnnttnnntngtnnnnnttnnntgtnntncccccnnnannnttnngnantnctntntnc

SEQ ID NO: 7224 - DNA, 786 bp, Homo sapiens
  misc_feature 506, 576, 581, 586, 627, 641, 666, 669, 688, 705, 706, 715,740, 741, 748, 750, 766, 772, 778: n = A,T,C or G
ggagctccccgcggtggcggccgaggtacccctgcccagcgacatcatataaactgagtcctattcttgtttgatgaagccaaacttttctcatgacataattaaagaactgcatgatggaaattcttccatatgaatctgtatgaaggagtttagcaaagacttttgctgtgaaaaattgcttgcactttgctccagccttttcaccaaccttcaaaaagttttcgtaattgatcatcgcttcctctccaatcataggtggtgtctggtgtttgtccagcaaaaaccataagttctgtaattcttcattatctaacagttctctgctttttctttgtagaaagacagctcttgattcctctcttaatttctgtagtaagacttcatcttcagcaggcagcctataataaaaccggggaatggtcttatagaattcatttgtgttttttctacctcctttccattcggagtaatattttgtaaataaatccatttcttcatctttnaattcttggtcacttttttttttgtttggacaggtgttgggccgtcgctagggcgcccaccaagaacttnctttncaggncatgggcgactcccgcgcagcaagctttctgcatttgctgntttcctacctgctncccccgggtacctgccccggccggncgntcggcttctaaaactaagngggatcccccgggccgnnaggaattcnatatcaaagcttaatccgataccgnngccctcngnggggggggccccgggncccaanttttgntccctttg

SEQ ID NO: 7225 - DNA, 893 bp, Homo sapiens
  misc_feature 29, 170, 171, 172, 173, 174, 175, 176, 177, 178, 179, 180,181, 182, 183, 184, 185, 186, 187, 188, 189, 190, 191, 192,203, 204, 210, 211, 212, 213, 214, 215, 216, 217, 219, 222,223, 225, 226, 227, 228, 232, 233, 234, 235, 236, 237: n = A,T,C or G
  misc_feature 238, 240, 242, 243, 249, 250, 251, 259, 268, 269, 271, 272,273, 279, 280, 283, 284, 285, 288, 289, 290, 295, 296, 297,298, 299, 301, 302, 303, 305, 306, 317, 340, 341, 346, 352,370, 371, 372, 377, 379, 381, 387, 394, 405, 407, 408: n = A,T,C or G
  misc_feature 409, 419, 425, 428, 430, 434, 452, 454, 455, 493, 499, 503,504, 505, 512, 513, 514, 515, 520, 523, 532, 540, 542, 543,544, 545, 555, 569, 571, 580, 582, 584, 586, 594, 595, 597,599, 611, 614, 616, 617, 618, 621, 631, 634, 637, 639: n = A,T,C or G
  misc_feature 640, 652, 677, 681, 683, 684, 687, 689, 691, 697, 719, 723,732, 735, 737, 749, 750, 757, 760, 766, 767, 768, 769, 786,787, 798, 806, 807, 811, 819, 820, 821, 833, 834, 836, 837,841, 865, 870, 874, 876, 883, 887: n = A,T,C or G
tccaccgcggtggcggccgaggtactttnttttttttttttttttttttttattttttttttttttttttttttttttttttttttttttttttttttttttttttttttttttttttttttttttttttttttttttttttttttttttttttttttttttttttcccnnnnnnnnnnnnnnnnnnnnnnnaaaaaaaaaanngggggnnnnnnnncnccnnannnnaaannnnnnngntnnaaaaannnggggggcnccccccccnngnnnaaaaannccnnnggnnnttttnnnnncnnnannggggggggggnccccccccccggggggggggggnnccccntttttnaaaaaaaaaaaaaaaaannngcggntngngggcgnccccccnttttttttttntnnnaaaaaaaaangttttnttncncccnacaaaaaaaaaaaaaaangnngggggggggggggccccccccccccacaaaaaaaaggnggggcncccnnnggggggnnnnccccnctnttttttttngggggggngnnnncccccccccnctatctccccctcntntttttgcananangnaaaaaaannangngggggggggggnggngnnnacncccttttttnttnatntnnccccccccaaanaaaaaccgggggggggggggggggngggngnnaancncngaaaanaaaccccccccccccccttttntggngtgggggtnaananacccccgggtgnnggggganggnaaaaannnngggggcggccccccccnnttttttttttntggggggnncccnaaaagggnnngggggggggggnngnncccngggggggggccccccccccccccnggggngggnanaatttcncccnccccct

SEQ ID NO: 7226 - DNA, 811 bp, Homo sapiens
  misc_feature 124, 168, 609, 626, 637, 649, 651, 675, 685, 711, 729, 739,742, 762, 792, 805, 809: n = A,T,C or G
ggagctccaccgcggtggcggccgaggtacaggttatccccaatgtcttccacccaggaaggcctactggctatgcagctacttggactcccgttcaggtgcagagaaccgcacaactcagggntagctctcagggtcttctctggctcctcagtcccactaatgcanagagaaccctggctactcggaaacggctgtcctggggctaatccactgctaattccgttagttcctgtcaagcactggccattcctgctttccatcccactgagcggggtcgtggaggggaagtccaaatgtccattgatgacacatccatttgtcaatgtattcgatacggagctactgtttttcatatctgttacaacagcaaactccctatcaacgtgcattttgtcagcatcgtcttctgtgtcgccattcgtgagtggcacggcagaatccaagctttgagcttcagttctagctttctttactccaaagtcttctgagtcttccaagcatctctttcgatttgttcccacactaatatcccgcgtacctgcccgggcggccgctcgactgcgctcggtcgttcggctgcggcgagcggtatcagctcactcaaangcggtaataccggtatncacagaatcangggataacgcangnaaagaaacatgtgaaccaaaaggncaaccaaaanggccaggaacccgtaaaaaagggccngttggttggcgttttttncataaggctncgncccccctggaccaaggcatnacaaaaaaatcgacgcttcaagtcagaagngggcgaaaacccnacangg

SEQ ID NO: 7227 - DNA, 863 bp, Homo sapiens
  misc_feature 5, 6, 81, 83, 92, 107, 119, 136, 138, 142, 145, 149, 151,157, 185, 188, 194, 198, 202, 204, 205, 229, 233, 237, 257,269, 273, 277, 278, 282, 288, 298, 313, 323, 326, 331, 338,363, 365, 373, 389, 404, 405, 413, 421, 453, 485, 486: n = A,T,C or G
  misc_feature 512, 513, 514, 517, 521, 528, 539, 540, 543, 544, 559, 565,569, 578, 586, 588, 590, 611, 614, 616, 636, 641, 682, 684,693, 696, 697, 709, 722, 723, 726, 734, 741, 749, 752, 756,759, 764, 767, 769, 770, 775, 792, 795, 800, 802, 806: n = A,T,C or G
  misc_feature 816, 820, 821, 822, 848, 854, 856: n = A,T,C or G
tgtgnntcctactatagggcgaattggagctccaccgcggtggcggccgaggtactttctttttttttttttttttttttngncactacctnccccggggtttcggngtaagttggggngtttataatttttggcngnccgnccntggncntgggcncttttctctttgggggaatgggtggggnttnaagtcnccgntttntnnttacaaggggccttccccattctnctcngggnaaaattccgtaaaacccccntgggaatattcncccnccgnnttcnaccccnccgttggggnttccaaccccaaatngggtttaagnggnccaanccggggncgggaacctttaacccccaatttcngnaaaaaaanggtttttgggaattanaggggggggcccaannaaaccgtntttccagnaaaaatggggggttccgggtgccctcccccgncccaaccgggggggggggggggcccggttggnnccggaaatttcaggggggctcccccnnnaangggntttttantttccttaagnnaanntttcaaactcccaanaaaagntccnccggttccntgggtttngncnccccggtctcccccccccagnggncnccggtccttttctttaaganaaaanccttaaggttggggggaaattccccccccccgggggggccntnggccaaagnggnnaaaattttttcnggaattaattttnnaanaagggccntttttanttttcggnaanttanccnccggnttncnntaacntcttatttttaaggggnggnggggngngggncccccctggnggtnnntcccccccaaaaaacctttttttttnggattntncccccct

SEQ ID NO: 7228 - DNA, 818 bp, Homo sapiens
  misc_feature 457, 468, 579, 613, 623, 657, 663, 690, 712, 713, 727, 738,740, 743, 756, 785, 798, 802, 811: n = A,T,C or G
gaattggagctccccgcggtggcggccgaggtactttttttttttttttttgctgcacagctttaaaaagttgaagtctattggaaaccttcttataagaaaccttcctagtcagagaattcaactttcttcttttcttcattcatgaaaatgcagatccactgagaaagggaataaggtaaaagtatcattttcctttgggaatcaggtttttctgtcagaggaataaaggcctttctttccaggccaattcctgttgtgctgaaggctgggaatcatcacgcccttttggtgtgggccccagctttgagcctctgtgatgatggtagaatctggaagtcagaagcccatatcctagatcagctgctttgctgggctgaccttcagtgtgatcctgcatcccaaactcctgacctctccagagaacttggggtgttctcccaagatgctgggcctntgggaagcatntccttaggtgaacagccccagatgcctccttcttaagttggtctaagttactccatgctgactatcaacccccaagtgtgaaagatcacgtttattcctgagggaaacacngagttgttcctaactctacttttgccttcttaanaacacgtttnctttttggttgaaatgaaaattttcagtaaaagngggttnggggtttttttctgggattaaaattanattttttatttcccttaaaccnncttgttttgggggnggaagcccctncnccnagaaagtctatgntcataacaaaaagtaccctggcccggggngggccgtttttanaaantaagtgggntcccccg

SEQ ID NO: 7229 - DNA, 821 bp, Homo sapiens
  misc_feature 38, 62, 91, 99, 101, 102, 105, 111, 116, 255, 310, 562, 569,573, 615, 637, 660, 747, 754, 756, 759, 762, 763, 765, 766,767, 768, 769, 770, 771, 772, 773, 774, 775, 776, 777, 778,779, 788, 805, 809, 811, 819: n = A,T,C or G
ggagctccaccgcggtggcggccgaggtactttgtttncatctttcaggttataaaactttncagtttctaggggataaattaaaatagtnaatgaatntnngcngcattncttanctattttaactgcatttgctcattgtaattgctaaatagtaaaatttatccccactttctttaggcttcaacttttgtttatataatcagtttttcttttatactgttacaaaatgcctttcaagcttctcttatattngacacccagcgtatgaaacccatcaaaattataaggacttaaatttatgtaattnttttatttactggatacttaaatattctattaatttgctataagtcattgaaatgttataaataattttctcatatctactctttgttcattttatttcagcctttagaaataagagggccatatgacgtggcaaatctaggcttgctgtttgggctctctgaaagtgaccgccaaggctgcggtgtccaccaactgccgagcagcgcttctccatggagaaactagaaaaactggtttttggaattatctntacagtngaanaaacctccggcctcaaaaggagattgaagaatggtcttccanctttccaagaaaagcccaaggnggggaggggctggaaaagaatgncccccagtcttctggtcaagcactcccttcttcccttttataggtcaattcagcccccacccaaaaaataaaaaccttttgtggggnttggaananaanaannannnnnnnnnnnnnnngttccctgnccggggccgggccggtnaaantnctgggggnaa

SEQ ID NO: 7230 - DNA, 812 bp, Homo sapiens
  misc_feature 619, 662, 687, 712, 745, 748, 769, 785, 792, 794, 806, 809: n = A,T,C or G
gaattggagctccccgcggtggcggccgaggtaccttacaggggttaggtagctttcttcaggtgaattagagagttgctggcagtgagttcaatgttaatgatatcaacagtgtatattaaataaggcatttttaaacagaaacataaaataagtttatgtattgatggttgaccaatatgtgaccagaggcttgcaggaacctaaccctccctgtatttcccgtaggagtagtggttcaatattcactaattcaggttctcagtgactttataaaacataactgctgtgaataacaagactctactgtgtgttattctatatttgatgtccactgtcataggacagggtatattgtaatcaaaattggaattcctagaattagccttccaagccttctttctttctttctttcttttttgagacggaattttgctcttgttgcccaggctggagcacaatggcccaatgttggctcactgcaacctccgtctcccgggttcaggcaattctactgcctcagcctcacgagtagctgggattacaggcattgtgccaccacgcccagctaattttgtatttttttagtgggagacggagtttctccatgttgggtcangctggtctcgaactcccgagctcaggtgatccgcccaccttancctcccaaaagtgctggaattacangcgtggagcccacccttgccccggncaccttttttttatttttaaagtccacctgganaanaaaatgaacctggggaaagtngccataaggaaggggnacctttntnttcttttggaantanggg

SEQ ID NO: 7231 - DNA, 861 bp, Homo sapiens
  misc_feature 2, 6, 7, 8, 9, 10, 16, 22, 32, 406, 484, 485, 491, 611, 641,679, 685, 686, 688, 689, 695, 720, 722, 727, 751, 757, 759,761, 762, 774, 783, 785, 789, 797, 799, 810, 812, 813, 815,825, 826, 827, 833, 835, 845, 849, 850, 851, 852: n = A,T,C or G
gnaagnnnnntttaancctttnactcctatanggtttattggagctccaccgcggtggcggccgcccgggcaggtacactgtcaggtttggggtttaacctctcacatgcctttcttaattttttttttttttttcacttttaaagttagcttaggaacgtcaattctgattctattcaatcttgttctggctcttgtagtcactcttctgaggcactcttgttctttgctgtatcaaggtcatacttaaaaagagatgttatttcttgatcagggttttgagaggattacattttcaatgtgaaggttcagccactgttttagaggactgtactaatgagcataagacagaaggtcttggcccaatgtggacccgcattcagttctattctccaaggatgacatntttaacctcagccagctatttcgcaaaagtgagtaatgggtcggctgggcatggtggctcatgcctgtaatcccaacnntttggnaggctgaggtggggggattgcctgagctcaggagttcaagaccagcctgggcaacacggtgaaaccccatcactactaaaatacaaaaaattagccaggcgtggtagccgtgtgcctganatcccacctactcggaaggcttacgcaagnaaaattgcttgaacctgggaagcaaaagttgcagtgancccgannannatgccnctgcccttcaacaatgggtgaacanancccanacttcctttttccaaaaaaaaaanaaatananannagggtgcccctntggccgttntnaaanttaggggnanccccccgggcntnngngaaaattcgnnntttaancntttttgatancccnnnnaacccctgg

SEQ ID NO: 7232 - DNA, 890 bp, Homo sapiens
  misc_feature 4, 512, 514, 516, 517, 519, 520, 534, 618, 641, 674, 683,715, 746, 764, 771, 774, 784, 786, 787, 792, 802, 810, 816,821, 822, 830, 838, 854, 856, 862, 871, 876, 885, 889, 890: n = A,T,C or G
gacncgcgtaatacgactcactatagggcgaattggagctccaccgcggtggcggccgaggtacatacacctaatcatcacaaatctgctatttttatttaaatttttatagcttaatagatatgcaattatatatatttattattattattttttaaaaatggagtcttactcttattgcccaggctggagtgcaatggcatgatctcgactcaccgcaacctccacctcccaggttcaagtgattctcctgcctcagcctcctaagtagctgggaccacaggcatgcgccaccatgcccggctaatttttgtatcctcagcagagatgaggcttctccatgttggccaggctggtctcgaactcctgtagtcccagctactcgggaggctgaggcaggagaatggcgtgaacccgggaagcggagcttgcagtgagccgagattgcgccactgcagtccgcagtccggcctgggccgacagagcgaagactccgtctcaaaaaaaaaaananannannggatgatttaattngtgttcatttaatcaatatcatggcctagttcaaaacaaatacccattgcaagtgttggcatacacactgtgtagtgggttaanaagcacagggtttgacaagtcanattggaccctgggggttcaaaattctgactggnctccttatnatgaagcaaggggtttaactttctttgacccntcagttttaatcatcttgtagaaagaacagnaacaatggccttaaaatntggggcnttnaagcgaaaanannctcanaattaaaaangcttaatnttaaanggccnnggccccantagggatnggggctcaagaaaagngnctggcntttttttangccanctaaaaaanaccnn

SEQ ID NO: 7233 - DNA, 835 bp, Homo sapiens
  misc_feature 674, 691, 719, 726, 739, 747, 758, 781, 792, 821, 822, 829,832, 834: n = A,T,C or G
ggcgaattggagctccaccgcggtggcggccgcccgggcaggtacgcggggagagctctggggagtctgcaccatggcttggaccccactcctcttcctcaccctcctcctccactgcacagggtctctctcccagcttgtgctgactcaatcgccctctgcctctgcctccctgggagcctcggtcaacctcacctgcactctcagcagtggacacatcatctactccatcgcatggcatcagcagcagccacacaagggccctcgatacttgatgaatcttgaagatagtggaagctacaacagggggagcggagttcctgatcgcttctcaggctccagctctggggctgaccgctacctcaccatctccaacctccagtctgaggatgaggctgattattactgtgagacctgggaacttaacattcgggtattcggcggagggaccaagttgaccgtcctaggtcagcccaaggctgccccctcggtcactctgttcccgccctcctctgaggagcttcaagccaacaaggccacactggtgtgtctcataagtgacttctacccgggagccgtgacagtggcctgggaaggcagatagcagcccccgtcaaggcgggagtggagaccaccacaccctccaaacaaagcaacaacaaggtacctcgggncgcttctaaaactagtnggattccccccggcctgcaggaaattcngattatnaagccttatcgantaaccggncgaacctcgangggggggggccccgggtacccanctttttggttnccttttaatggagggggtaaaattggccnnctttggngtnanc

SEQ ID NO: 7234 - DNA, 836 bp, Homo sapiens
  misc_feature 526, 649, 722, 729, 747, 754, 777, 809, 812, 836: n = A,T,C or G
atagggcgaattggagctccaccgcggtggcggccgaggtactttttttttttttgagacagagtctcgctctgtcgcccaggctggagtgcggtggggcgatctcggctcactgccagctccgcctcctgggttcacgccattctcctgcctcagcctcccgagtagctgggactacaggcgcccgccaccacgcccggctaattttcttgtatttttagtagagatggggtttcgccgtgttagccaggatggtctcaatctcctgacctcgtgatgcgccctcctcggcctcccaaagtgctgggattgcaggcgtgagccatcacgcccactctgatgcttcttttactgcgacagtgaaatcagaaacagttgtcagggttgaaggacatattttgatttgctaaaccaatgattctcaaacttttgcatgtgttagaatcacctggaaggccagttaaagcccaggttgctaggccctaccctggagtttctgattcagttggtcagggtggggactaanatgtagtatttcatgcaagttgccaggtgatgctgatgctgctattccagggacccactttgagaaccactgaactgcctctttgggcttaaaagaaaggaagtatcagttccacgttctttnttccaaggtgaagcctggatggcacatacgttgaaaccgctgagtaacaaagctgactttacgggaccatggnggtttgncaaggtcccttcctttgnggggganaaagcttgcttcgggccttttgncttaaaggcgggcacccatttggccatccgantancagccgcttgggaagggcaccagn

SEQ ID NO: 7235 - DNA, 826 bp, Homo sapiens
  misc_feature 595, 698, 710, 712, 743, 763, 767, 771, 781, 784, 787, 794,807, 812, 813, 814, 820: n = A,T,C or G
gactcactatagggcgaattggagctccaccgcggtggcggccgaggtacttggtgaaccattcctggtgcggagagccctgtttctgctgggcttctttggcttgggccgtttcaccatctggggtcctaaaaacaaaaaaaaggtttttttatatggttttgaaaactatgcaagaagcagcttaatacccaccatcttttcagggaaagataactgcttgtttactcttcaaaaacacccaaatgggactggccaacattagtagtgggaaacaaattgtaaaggatggggctggggagggagtacctgcccgggcggccgctgctctagaactagtggatcccccgggctgcaggaattcgatatcaagcttatcgataccgtcgacctcgagggggggcccggtcccagcttttgttccctttagtgagggttaattgcgcgcttggcgtaatcatggtcatagctgtttcctgtgtgaaattgttatccgctcacaattccacacaacatacgagcccgggagcataaagtgtaaagcctggggtcctaatgagtgagctaactcacattaattgcgttgcgctcctgnccgcttttccagtcgggaaaccttgtccgtgcccagcttgcattaattgaatcggcccaaccccccggggaaaaggccggttttgccgtattggggccgcttnttccgctttctngnttaattgacttccttgggcctcggtccgttncggttgcggcgagccggttntcangctnacttcaaaangcnggnaataccngttatttccccanaaatnnngggganaacccg

SEQ ID NO: 7236 - DNA, 1207 bp, Homo sapiens
  misc_feature 2, 3, 4, 6, 7, 11, 12, 13, 15, 17, 19, 21, 26, 27, 28, 29,31, 32, 36, 38, 42, 43, 46, 47, 48, 50, 52, 56, 59, 64,66, 69, 70, 72, 74, 77, 78, 87, 88, 89, 90, 91, 93, 95,96, 97, 98, 99, 100, 104, 109, 110, 112, 114, 116, 124,454: n = A,T,C or G
  misc_feature 510, 534, 546, 573, 584, 637, 641, 671, 677, 690, 696, 701,707, 717, 761, 762, 778, 782, 786, 800, 805, 812, 815, 820,834, 854, 859, 862, 874, 898, 899, 907, 909, 910, 921, 924,943, 963, 964, 975, 979, 980, 989, 990, 993, 998, 999: n = A,T,C or G
  misc_feature 1003, 1004, 1006, 1008, 1011, 1021, 1029, 1049, 1058, 1064,1067, 1076, 1082, 1086, 1089, 1097, 1099, 1110, 1114, 1117,1118, 1119, 1128, 1132, 1145, 1153, 1156, 1172, 1173, 1177,1179, 1182, 1184, 1188, 1197, 1200, 1204, 1205, 1206: n = A,T,C or G
cnnnanntgtnnntnantntnatttnnnntnncatntnactnnttnnntntntgtnttntgttntnttnnantnacnntatttttcnnnnntntnnnnnnagcnagagnngngncncgcgtatnctactaacactcactatagggcgaattggagctccaccgcggtggcccagctgcattaatgaatcggccaacgcgcggggagaggcggtttgcgtattgggcgctcttccgcttcctcgctcactgactcgctgcgctcggtcgttcggctgcggcgagcggtatcagctcactcaaaggcggtaatacggttatccacagaatcaggggataacgcaggaaagaacatgtgagcaaaaggccagcaaaaggccaggaaccgtaaaaaggccgcgttgctggcgtttttccataggctcccgcccccctgacgagcatcacaaaaaaatncgacggctcaagtcagaagggtggcggaaaaccccgacaggactatttaaaagatncccaaggccggtttcccccctggnaagctccctcgntgcgcttcttccttgttttccggaacnccttgcccgcntttacccgggaattaccccctggttccccgtccttttttctccccctttccgngggnaaagccggttggggccggccttttttcttnaaatangccttccaaccgncctggntaaanggttanttctttcaanttttccggggtggttaggggttcggttttccggccttcccaaanngccttgggggctttgntggnggcnaccgaaaacccccncccgntttctangcncccgngacccgggtttggnggcccttttattcccggggnaaacntanttcgggtccttnggaagttcccaaacccccggggtnnaggaacancnnaactttttttnggnccaccttggggcaagccanagcccaacttgggtttaacnnggggatttttngccnncaaaccgannggntattnngtanntngnccnggggccttanaaaaaaantttcttttgaaaaatggggnggggccctnaactanccngggttatcnctttangaanaanaaacaagnantttttgggggnattnttnnncccttttgngttnaaaaaccccggtncccctttncgnaaaaaaaagaaagatnnggtngnccntntttngatccccgngcnaaannna

SEQ ID NO: 7237 - DNA, 796 bp, Homo sapiens
  misc_feature 58, 82, 91, 638, 655, 657, 677, 685, 698, 707, 719, 728,751, 771, 776, 782, 785: n = A,T,C or G
ggagctccaccgcggtggcggccgcccgggcaggtactagttgcctgacacgcatttnattatctcttttaagtttcacagnaatgctaanaggtgggtattatacctattttacagatacggatgctggaagttaagaaaatgtccccaggtcacataggaagtagtcaagacatgatgcacacttaggcctatcacagtccagagaccaattgaagttggtataaagcattttattagcaaattagaagaattattttaattataaatgaactttttaacatataccttaatataacagagaacactaaggaagtaagataaatttctccataaacccgcatttgcacacatttgatggaaagactcctagatatagttgtgaggatgactcatgctgactgtgtctggcaagacattgtaacgaagtagtctcagtgattaggaagctgggttagttagctgcccaccccaggtttcctgctaccctgtgtttcactggtgggcgcttctcatgcagtgaaaatgtaggatacaaggcctggaagagaaagagtctttccctgatgacactcctgctttaattgggttttctacagcagaaaaataatttttacagccaaattataaagggctgntaaatttccaagtgctngnggaaagatgtatggtaaccnagaacttnacactcatgggcngggggcagngggaaaaatggntcaagtttnctcgagaaaaaccattttggtangttggattaagatttttccntatantggggnggngggttttgggg

SEQ ID NO: 7238 - DNA, 810 bp, Homo sapiens
  misc_feature 622, 665, 695, 700, 712, 717, 731, 734, 755, 756, 758, 765,773, 780, 789, 792, 793, 803, 807: n = A,T,C or G
gaattggagctccacccgcggtggcggccgcccgggcaggtacgcggggaagacaaatacagaatgtgaagtcctgttccaaccaagggaaatcggacacagcaataaggaatacaacatgtttaagaccacagaacatctgcataggctgtaaatttcgttgaatgatggatgcaaagatggaagacagatggatagaggaaaagacagaatcagatactggatgagttagtactgctgcctgtgcttcagagctgtcttattaccacaaggccggcaagcatcaatgtccccacatccccctctgcctccccctgaaatgtacctcggccgctctagaactagtggatcccccgggctgcaggaattcgatatcaagcttatcgataccgtcgacctcgagggggggcccggtacccagcttttgttccctttagtgagggttaattgcgcgcttggcgtaatcatggtcatagctgtttcctgtgtgaaattgttatccgctcacaattccacacaacatacgagccgggagcataaaagtgtaaaagcctgggggtgcctaatgaagtgagcttaactcacattaattgcgtttgcgctcactggcccgcttttccantcgggaaaacctgttcgtgcccacttgcattaaatgaatcggnccaaccccccgggggagagggcgggttttnccttntttgggcgcttnttccnctttcctcggcttnaantgacttcgcttggccctcggnncnttcgggntggggggnaaccggntttttaacnttnnttaaaagggngggnaaa

SEQ ID NO: 7239 - DNA, 871 bp, Homo sapiens
  misc_feature 398, 402, 412, 421, 431, 438, 442, 461, 514, 523, 535, 536,562, 568, 571, 573, 586, 587, 589, 605, 610, 615, 617, 631,636, 706, 738, 756, 759, 762, 764, 766, 768, 773, 776, 784,786, 815, 817, 818, 824, 826, 835, 836, 842, 843, 844: n = A,T,C or G
  misc_feature 845, 854, 871: n = A,T,C or G
atagggcgaattggagctccaccgcggtggcggccgaggtacttttttttttttttttttttgctgcacagctttaaaaagttgaagtctattggaaaccttcttataagaaaccttcctagtcagagaattcaattttcttcttttcttcatccatgaaaatgcagatccactgagaaagggaataaggtaaaagtatcattttcctttgggaatcaggtttttctgtcagaggaataaaggcctttctttccaggtcaattcctgttgtgctgaaggctgggaatcatcacgcccttttggtgtgggccccagctttgagcctctgtgatgatggtagaatctggaagtcagaagcccatatcctagatcagctgctttgctgggctgaccttcangtgngatcctgcantccaaactncttgaccctnttcaaanaacntgggggtgttctccccaanaatgcttggggcctctgggaaagccatctcctttagggtggaacagcccccanatggccctnctttttttaaannttggggctaaaggttacctcccatgncttganctntntaaaccccccaanntntggaaaaaaaaaaccnttttntttcntngggggggaaaaccnggggngttgggttccctaactttttacttttggccttttttaaaaaacacctttttggcttttttggttggaaantgaaaaaatttttttacaaaaaaggggggttngggggtttttttttcccnggnaananantnggaanttncttaattntncctaaaaacccccctgtttttgggggggngnnaccctncnccccaaaanntttttnnnntatacaaanaggttccctccccccgn

SEQ ID NO: 7240 - DNA, 791 bp, Homo sapiens
  misc_feature 3, 5, 6, 19, 21, 523, 670, 757, 773, 780, 790: n = A,T,C or G
gantnntagctcctccgcngnggcggccgaggtacatgtgcacaatgtgcaggttacgttacatatgtatacatgtgcagccaggatggtcttgatctcctgacctcgtgatccacccgcgtcgccctcccaaagatctgggattacaggcatgagccaccgcgccaggccccattcttctttatacagtcattcacaagcagaagttaacattttgaaggtaaaagaaggaaaggggagtgttctgttatttcattcttcagttatgctgaaggctttttttgggatattgtcagtatatacatttatcctctttggattcttattagattctaattataacaaaggtcttggtaaatagcttgctttctttaatttagcatctttacgtctaacgttaattgaagtaggtattcaacttgtaggttgacttgaacccataaatagatgccgaaatccaaaagggtccatgttgtggactttcagattaataaggaaaacacttttctttaacgtgcagtangcttgtcctaggattaaagccactttttgtaaaatgggcaattttacagtagcctaaataaatcaaaactttaacaatagctcccaaggtcatttgagatatattaatattacagggggtcactggtaaaagctgatgtctattcangaaccctttttctccagttcctttagaggagctcttcactttccaatagataccaaaaagcctacaaggccttttacactggtgacnaaccaattgggttaancacccangggattgggng

SEQ ID NO: 7241 - DNA, 791 bp, Homo sapiens
  misc_feature 282, 300, 554, 592, 650, 707, 720, 728, 755, 767, 775, 791: n = A,T,C or G
tccaccgcggtggcggccgtcacgggctggccggccggtcatggaggctgatggggccggcgagcagatgagaccgctactcacccggggtcctgatgaagaagctgttgtggatcttggcaaaactagctcaactgtgaacaccaagtttgaaaaagaagaactagaaagtcatagagctgtatatattggtgttcacgtcccgtttagtaaagagagtcgtcggcgtcataggcatcgcggacacaaacatcaccaccaaaaaaaaaaaaaaaaaaaaangtacctcggccgctctanaactagtggatcccccgggctgcaggaattcgatatcaagcttatcgataccgtcgacctcgagggggggcccggtacccagcttttgttccctttagtgagggttaattgcgcgcttggccgtaatcatggtcatagctgtttcctgtgtgaaattgttatccgctcacaattccacacaacatacgagccgggagcataaagtgtaaagcctggggtgcctaatgagtgagctaactcacattaattgcgtngcgctcactgcccgctttccagtcgggaaacctgtcgngccaacttgcattaatgaatcgggccaaccccccggggagaggccggtttgcgttttnggcgctttttccgctttccttgcttaactgaacttcgcttgcgctcggtccgtttcnggcttgcgggcgnagcgggtntcaagcttcaacttcaaaaggcgggtnattaccggtttntcccacanaatcagggggataacn

SEQ ID NO: 7242 - DNA, 849 bp, Homo sapiens
  misc_feature 9, 10, 12, 16, 132, 184, 238, 240, 241, 258, 268, 272, 274,278, 292, 293, 294, 300, 313, 321, 325, 333, 347, 350, 358,367, 368, 382, 391, 396, 397, 428, 429, 432, 434, 459, 461,463, 471, 473, 479, 482, 484, 490, 492, 498, 507, 521: n = A,T,C or G
  misc_feature 536, 539, 540, 544, 549, 551, 557, 560, 586, 587, 598, 617,620, 621, 627, 631, 641, 643, 646, 651, 652, 653, 657, 662,665, 666, 667, 670, 679, 684, 690, 692, 694, 698, 704, 722,736, 739, 746, 756, 758, 761, 770, 771, 772, 798, 807: n = A,T,C or G
  misc_feature 819, 821, 831, 832, 840, 843, 845, 846, 848: n = A,T,C or G
agaagggannangaancactccttagggcgaattggagctccaccgcggtggcggccgcccgggcaggtacgcgggagcagggaaccgctcagatacccttccacaccgtggaaactttgttcttaccctcnttgacgaaaaatcttgctgctgctcactctttgggtccacaccacctttaanaagctacaacgatcaccacgacagtctgcggcttcattcttgaagtaagcgacncnncaaacccaccaaaaggnagaaactccntacncntttnaaggaacaaactcnnnacacancatttttaacagntgtaacanacantgtggaanggtccacggcttcnttnttgaagcnagcgagacnncaaaccttttgganggaaccaantttgnnacacagaaggacgggagacttttacctgctnnctnanaataatttctgtaccaaccatggcnangntttgtggngntaaagnacntnggccgntntaaaantaggggaancccccggggctggnagggaattcaatttnaannctanttcgntncccgtncanaccttcaagggggggggccccgggtnncccaaaccttnttgttttcccttttttagntgnnggggtnaaantttggccccncnttnggccnnnaacnaaatnggnnnaanaagccttgnttttncttggngngnaaantttgtnttttcccctttccaaaanttcccaacaaaaanaanaacaaanccccgggggnancantaaaaagtnnnaaaaacccctgggggggggccttaantggagttgnacctaacctcananttaaatttgnnttttggcnctncnntnc

SEQ ID NO: 7243 - DNA, 944 bp, Homo sapiens
  misc_feature 4, 9, 16, 41, 43, 91, 101, 105, 108, 110, 119, 124, 139,142, 143, 150, 170, 173, 177, 184, 187, 190, 191, 192, 199,207, 225, 228, 233, 234, 245, 258, 264, 266, 274, 275, 277,283, 289, 290, 293, 299, 300, 303, 305, 311, 317, 320: n = A,T,C or G
  misc_feature 321, 322, 328, 330, 331, 337, 340, 342, 344, 347, 352, 360,363, 367, 370, 373, 391, 392, 397, 401, 402, 407, 418, 421,422, 428, 431, 432, 440, 451, 457, 458, 461, 472, 483, 502,506, 507, 511, 520, 531, 535, 539, 550, 568, 572, 573: n = A,T,C or G
  misc_feature 574, 585, 588, 598, 599, 600, 601, 602, 609, 611, 613, 628,633, 645, 646, 648, 651, 654, 659, 660, 663, 668, 676, 677,680, 681, 685, 692, 697, 704, 730, 731, 735, 740, 741, 743,747, 750, 755, 756, 757, 758, 762, 765, 778, 782, 786: n = A,T,C or G
  misc_feature 798, 800, 806, 812, 819, 820, 821, 830, 837, 841, 842, 843,846, 851, 852, 855, 857, 858, 859, 863, 872, 874, 876, 878,880, 886, 889, 899, 901, 902, 903, 905, 906, 926, 928, 936: n = A,T,C or G
gaanatttntaccttngaaaacccctacttttggcaaattncngctccaccgcggtggctgccgaggcgcttttttttttttttttttttnttacgctttntttnttngngattttttnttttnttttttttttttttnttnnatatttnttttttaccctttaaacccnttnaaangggtttnatnagnnngcttttnttttttcntttttttttaaaaaaaanaanggccnntttaaaaaatnaactccaaaaaangggccntntttttaanncnattttnaaattnnccnacgctnncanancaaaangggccnaannntttgcncnngctggnacngngnccntttgnaagggaanctncccnggnggnctttttaaaaaaaggggnnccccngggnngaagnaattcaatttnaannttattnaanncccgaacntaaaggggggncccggnnccnaaatttttgtnccctttaaggnggggtaattgccccctttnggcnnaaanaaatggganaaaaggtggtncctngggnggaaaattttnttttccccatcaaaaatntccnnnaaaaaaataanaangccccggggnnnnnaaaaaangntnaaaaccctggggggnccccnaaaaggaggggnngnccnaanccccnnatnttaanttgggggnnggnncccnccaccgnccccnctttttnaaaatgggggaaaaaaacttttggtnngccnccttnnanttanaanaaaannnngccnaancccccccgggganaaanaggnggttttggcgtntntagggncccctnttttccnnntttcctggnaaaaaantaannntcncattnnccncnnngaantttacgggngngngngnggaagnggnttaaaaaccntnnntnnaaaaggggggggaaaaaccngnttatatcncaaaaaag

SEQ ID NO: 7244 - DNA, 1005 bp, Homo sapiens
  misc_feature 8, 13, 56, 444, 450, 454, 455, 462, 464, 470, 481, 520, 539,572, 580, 626, 654, 666, 668, 700, 701, 714, 715, 723, 728,730, 740, 741, 750, 752, 753, 754, 755, 761, 764, 776, 781,790, 797, 801, 802, 804, 829, 845, 849, 853, 856: n = A,T,C or G
  misc_feature 865, 868, 869, 870, 872, 874, 879, 889, 891, 919, 926, 932,935, 937, 948, 954, 962, 965, 966, 972, 975, 976, 979, 980,988, 993, 994, 1001: n = A,T,C or G
gttaggcntttgnatatcccttcgatttggaaaactaccgggcgaattggagcttnccgcggtggcttagcggccgttcgggcaggtacgcgggatttgagagaaaaaaagatttttaaaaagagcgagagttactcataaaaaatgagtaaattcggccaggcgcggtggctcacgcctgtaatcccagcactgtgggaggctgaggcgggtggatcacgaggtcaggagatcgataccatcctggctaacatggtgaaaccccatctctactaaaaacacaaaaaattagccggacgtggtggcgggcacctgtagtcccagctactcgggaggctgaggcaggagaatgatgtgaacccgggaggcggagcttgcaagtgagccgagatcgcaccactgcactccagttttgggttgacagagcgagattccgtctcaaanaaaaanaatnnaagaatnanaaagtnctcggccgctntagaactaagtggatccccccgggcttgcaggaaattcnatattcaagcttatccganacccgtctacccttcgagggggggggccccggntacccaancttttttgttccccttttaaatggagggggttaaatttgccccccnttggggcggaaaattcaatggggtcaanaagccttttttncnttgtggtgaaaaatttgtttaattccggcttnnaccaatttccccnncaaaacanttacngnagcccggggnnccataaaantnnnnaaaagnccnggggggtggccnttaanggaggtgangcttaanctcnncntttaatttggcgtttgccgcttaanttggccccgttttttncaanttcnggnaaaaccttnttnnngncnacctngcattttaantnaaattcgggccaaacccccccggggganaagggcnggtttngcntntttggggcgcntttttnccctttcnttnnttaaantgnnttnntttaggcnggggnnttcgggnttgg

SEQ ID NO: 7245 - DNA, 815 bp, Homo sapiens
  misc_feature 3, 4, 7, 8, 9, 10, 11, 12, 14, 15, 17, 117, 134, 181, 232,242, 340, 381, 478, 499, 510, 517, 574, 592, 600, 607, 616,683, 701, 723, 727, 766, 776, 788, 796, 797, 809, 813, 815: n = A,T,C or G
agnnttnnnnnntnntntacgactactatagggcgaattggagctccccgcggtggcagcggccgcccgggcaggtacttttttttttttttttttttttttttttatttttagtanagacgggtttcaccatnttagccaggatggtctcaatctcctgacctcgtgatccgcccgcctncgcctcccaaagtgctgggattacgggcgtgagccaccgtgcccagcccanaatattattntaaaacacaatcagagcactccatacctgctaacagtttaaagccaagcacctaggcatgccatttaggcttctgaatgactgggtcttgaccagganagctgctgtctaggttttctcctcctgactagttcctcaanagaaatgcaaaactagtgattaacagtaagagtcaggccgggcgtgggccggcctctctggtgttgctggaaatccttggtattccttgacttgtanacttgttttaaaatgtacctnggccgctctanaactagnggatcccccgggctgcaggaattcgatatcaagcttatcgataccgtcgaccttganggggggcccggtacccanctttgttncctttantgagggttnattgggcgcttggcgtaatcatgggcatagctgtttcctgtgtggaaaatgttattccgcttacaanttcacacaaaataccaanccgggggcataaaagggtaaancccngggggggcctaatgagggggctaactcacatttaattgnggtggggccnaaatgggcccgnttttcaannggggaaaacttntggngn

SEQ ID NO: 7246 - DNA, 816 bp, Homo sapiens
  misc_feature 1, 3, 4, 8, 9, 11, 17, 20, 22, 32, 40, 68, 76, 78, 103, 108,112, 113, 546, 575, 673, 795, 797, 801, 805, 808, 813: n = A,T,C or G
ngnnttanncnttgaantcncnccttttgggnaaattctngctccccgcggtggcggccgaggtactncagcatgntncaactgctctacaaaagcgtggcangaccntttnnttaagcaggtccctgatctgttcctcctcacttgggagaacttcccaaccagggtcttcagcctctcccactgatgttctctggttgacaagggtttgaaagcatcctgggacagagttactagagagaggggcaggctgccatctttgctgtttctgcaatttagccgttccagcttccaggttttggagaacccaacaccatgaggggcagaaatggtatcccagcacaagcttagcttgttctacaaaagtggggctagactgcttcttcaagcaggtccctgatcctgtttctactggctgggtgagacctctcaaccagggtctccatccacctcctacaggtgtgttcaggctggcaacagatttgtacctgcccgggcggccgctctagaactaagtggatccccccggctgcagggaattcgatntcaagcttatcgataccgtcgacctcganggggggcccggtacccagcttttgttccctttaatgagggttaatttgcgcccttggcgtaatcatggtcatagctgtttcctggtgtgaaaatgttnttcgctcacaattcccacaacatacgaacccgggagcataaaggtgtaaaagcctggggtgccttaatgaagtgagctaactcacaattaattgcgttgcgcctcactggccccttttcaancngggnaaanctnttgtncct

SEQ ID NO: 7247 - DNA, 884 bp, Homo sapiens
  misc_feature 463, 468, 475, 481, 488, 490, 493, 507, 514, 515, 516, 518,519, 522, 523, 524, 526, 534, 539, 549, 569, 570, 571, 580,587, 596, 598, 599, 600, 602, 603, 616, 623, 633, 638, 640,648, 649, 660, 661, 670, 671, 672, 673, 678, 679, 682: n = A,T,C or G
  misc_feature 701, 705, 707, 737, 740, 744, 762, 763, 768, 776, 780, 782,785, 794, 796, 806, 807, 810, 832, 833, 837, 841, 847, 848,853, 854, 862, 863, 864, 865, 877, 878, 879, 883, 884: n = A,T,C or G
ctattgggcgaattggagctccccgcggtggcggccgaggtaccagctactgccttgtgtgtcttcgatgcacatgatggggaagtcaacgctgtgcagttcagtccaggttcccggttactggccactggaggcatggaccgcagggttaagctttgggaagtatttggagaaaaatgtgagttcaagggttccctatctggcagtaatgcaggaattacaagcattgaatttgatagtgttggatcttacctcttagcagcttcaaatgattttgcaagccgaatctggactgtggatgattatcgattacggcacacactcacgggacacagtgggaaagtgctgtctgctaagttcctgctggacaatgcgcggattgtctcaggaagtcacgacccggactcttcaaaactctgggatctaccccagcaaagtctggcataaagacagtgttttgcanggatnccaattnccaatnatttttntnttnccccaaaccaattngttaatnnngnnggnnnanttttttancaaanaaaaatttcnttttttttggggaacatttnnnaatcaaaanaaggcantttttttcnannnannatggaaacccttnttggggnaaaaaaaatnccttngnccttgggnntttaaaacccnnaaaaagggnnnnttggnnctncttggacttgtttccccgngggntnaaccttgtttaaaaagttttttttgttttnccnaaanaaaaatttttttaaaggnnaaaantttttggncccntnggntttaaaagngngggttttttnntgngaccaaaaaaattttttttttnncccntttngggggnntttcnntggggggnnnngtcttttttttnnngggnn

SEQ ID NO: 7248 - DNA, 866 bp, Homo sapiens
  misc_feature 193, 233, 247, 302, 308, 583, 584, 629, 635, 653, 669, 691,698, 704, 706, 734, 768, 774, 780, 826, 831, 844, 846, 852,863: n = A,T,C or G
ggagctccaccgcggtggcggccgaggtacttttttttttttttttttttttttttagatgatcactctggtgattatgctgaggacagacttggaaggaaaagaggaagaaaagaaacagaacagtcagaagtttgtggcaagacaccaggtgagagataacagggacccgaaaaaacaaaaggcagtgganaaagagaggggaaaccagattcaaaagcaaaaaccatttntgtggtagactaanatttggtgaccaactaagtttggccccactaaaggaagggatccagtgatgagcnccatanagcagaggagctcccagggtggtactggcagggcaagggctccgttacccaggaataaactgcactgaggccacagctacaggaagtctagtttctttcaagtctcttttctttctaccattcttaacccacagtgtgccttccaaataatcaagagtcaaactacagtgtaaaatcaccacttttattctagttaccgctttggcttcctagtctagtaattttttttccttcccttaaaggtgactacctactttaagtctcattccaattgnnggtctttttgaacttggcagcattttgtaccttgcccgggccggnccgctnttagaaacttagtggatncccccgggcttggcanggaattcgattttaaagcttantcgaatnccgtcnancttcgagggggggggcccggtaccccancttttttgttcccctttagtgggggggttaattngccccncttggnggtaattcatgggccatagcttgtttccctggggggaaaattgttnttccnttaaaaatttccnanaacatnccgagccgggngcg

SEQ ID NO: 7249 - DNA, 629 bp, Homo sapiens
  misc_feature 15, 16, 17, 82, 392, 537, 570, 584, 591, 625, 628: n = A,T,C or G
cgggccccccctcgnnntacttctagaattaattaacgcgggggaggaactgctcagttaggacccagcacggaaccatggnaagccccagcgcagcttctcttcctcctgctactctggctcccagataccactggagaaatagtgatgacgcagtctccaggcaccctgtctgtgtctccaggggaaagagccaccctctcctgtagggccagtcagggtgttagcagccacttagcctggtaccagcagagacctggccaggctcccaggctcctcatctatgatgcatccaccagggccactgctatcccagccaggttcagtggcagtgggtctgggacagagttcactctcaccatcagcagcctgcagtctgaagattttgcagnttactattgtcagcaatatcataactggcctccgtggacgttcggccaagggaccaaggtggagatcaaacgaaactgtggctgcaccatctgtcttcatcttcccgccatctgatgagcagttgaaatctggaactgcctctgntgggtgcctgctgaataacttctattcccaaanaggccaagtacagnggaaggnggataacgcccttcaatcggttacttccaggaanagnc

SEQ ID NO: 7250 - DNA, 858 bp, Homo sapiens
  misc_feature 430, 468, 469, 473, 480, 482, 489, 490, 493, 495, 496, 498,501, 504, 513, 514, 517, 518, 519, 525, 529, 534, 537, 544,545, 557, 574, 575, 578, 581, 584, 586, 587, 588, 589, 591,593, 594, 596, 601, 605, 606, 611, 623, 624, 625, 628: n = A,T,C or G
  misc_feature 630, 633, 636, 637, 642, 643, 645, 662, 664, 670, 676, 678,680, 685, 687, 688, 695, 696, 699, 703, 705, 707, 709, 718,720, 723, 729, 730, 731, 734, 736, 740, 741, 742, 743, 744,747, 748, 749, 750, 764, 765, 769, 772, 775, 777, 778: n = A,T,C or G
  misc_feature 780, 783, 785, 788, 792, 795, 796, 803, 805, 806, 807, 808,809, 811, 812, 814, 815, 817, 818, 819, 823, 824, 825, 829,834, 836, 844, 845, 850, 858: n = A,T,C or G
tccaccgcggtggcggccgaggtactcatcaatgggctcaatcatatagatcacttctaagccatgtttccgaagacgttccacaaaggctgagttagctacctggtccttggtctcacctgaggtattacaaagttacttttagaccttttaacagttaagaatggtttcatctagctctgacttttcttgctagccagatacctaggcagaacctaagacagaaaatgacctagttcatgttaattatcttgcctagatcaataccagttgtaacagtgctacctgagtagaaaacacacccacagagcctacaaggttgtaagaacgacgtgtatgactgtaacatagtgttctcttacctgtgatataatagatatgtttctggttctccttcattctggtgcagtagtccttgagagaaaccatntcatcaccagaggcagatgtgtagtacctgcccggtannaatnttatttnanttacttnntgngnntnttngtngtaattccnngannnggtctnaganggccnaanattttannttcgaccttggngtttttaatcccttttnngcngtngancnnnntntnngngcttngagnntgtanaggataatgagnnnttncngtntgnnttganntngtgtgtgtgatatttgnantgtgtngagatntnancggananntgtatgnngtngtgnangntntgtcacatntnagntatttnnntgntntggnnnnnatnnnntgtgtgtgtgtatnntgtnatncgncnngnggncncgntatnttnngtgttantnnnnnanntnntnnnactnnnaatntgtcntntgtgtttnngtgtntgtggtgn

SEQ ID NO: 7251 - DNA, 1151 bp, Homo sapiens
  misc_feature 1, 2, 3, 4, 5, 8, 10, 15, 16, 27, 30, 31, 32, 34, 35, 38,42, 45, 48, 52, 59, 64, 66, 78, 81, 83, 84, 86, 89, 93,96, 110, 112, 117, 118, 119, 127, 129, 160, 419, 443, 518,581, 603, 619, 648, 682, 702, 705, 726, 736, 766, 798, 821: n = A,T,C or G
  misc_feature 830, 847, 851, 854, 860, 861, 872, 877, 881, 882, 931, 934,935, 940, 946, 961, 969, 978, 982, 983, 985, 989, 991, 997,1005, 1008, 1009, 1017, 1020, 1041, 1042, 1057, 1058, 1059,1066, 1069, 1077, 1082, 1083, 1097, 1098, 1103, 1113: n = A,T,C or G
  misc_feature 1118, 1122, 1125, 1130, 1133, 1139, 1140, 1141: n = A,T,C or G
nnnnncancnttgtnntttttaataanaannngnnttngatntcnttnaatncaaaatntgttntnttctattttaanaantnnanctntatnagngtgttttaaatatntncctcnnncattatangncgaatcggagctccaccgcggtggcggccgnggtacttctgaacttaaaagttaaaaagttaaaaaaaaaaagtctgttatggactgtgtgttcccccacaccaaaatccgtgttttgaagccctaatcccccatgtgatggtattaggaggttgaggctttggggaagtaattaggtttagcgagattatgaggatggagcccttggtgggattagtgcccttattaaaagagggaagggataccagcactctctctgcaatgttgtgagggcacagccaaggaaggtnggccatctgcaaaccaggaaagangagctctcacaagggaacctggaaccagcctggcaatctttgatctttggattttccccagcctccaaaactgtngaagaaaataaaatttctgtttgttttaaagccaccctagtcttaccaataattttgtttatngggcaagccccaaataaacctngaggaccaaaaagttnctcaagaaaaacttcattaagaacggtgntttgttattccaagaaaaacccattccctttaanaaaagaagaaaaaggttttnctncattttctttggccaagtaanaaaaaggccnaaatttaaattaaaaatggggggaggggantaaggaatttttggaaaaaattcaattcaatntgaaattgcctaaaaaaccttanttggggttngaagttggttttggatngaanggnaaaccnngcaattttttnaaccnttannttccccccaaaaaacccttcccttggacaaaattttttttttttttttngannacaanaaattntttcacccccttgtntacccccnatgccttgngaanntngccnantggggnggccaaantcnntttgcttnaanttggaaaaccttccaacctcnnccggggcctttaaannngaatttnttncccggccnttaannccttccaaacttanntttgnggaactaccnggtgncccncanccaanggncccaannntttttttttt

SEQ ID NO: 7252 - DNA, 818 bp, Homo sapiens
  misc_feature 664, 694, 718, 734, 766, 770, 793, 795, 801: n = A,T,C or G
gaattggagctccaccgcggtggcggccgaggtacatcagcctgtcttagcctgagctgctttgaagaccatggggtcttgtgtttccaacttcgaagtgctgatgtggacagtttgccaatgttctcttctattgcaagttcagccagactccatgactcatctgatcccttttatggccaaatcatccttcagagtagggaacactcagacattctgtgcatgttgttcccccaaagcatggtcatcacaaagtcctgagttctggtgtgtgctcccgcctcctgggtatacagagagaaggcaggaatcaggagttccagaagcatatacatgtggctaccccagcaacaagcgcatcctgtgctcagataagctgcatggttgggagtgttttttctcgcacgttgaggcttagtggagatgggcaccactgccatttgctcaaaagaaggctggtctggtcctaactgcatcccacactgcccagatcattctagaataggttatttctgaatgttttatagaatttcttaataccatcctggtttggtcagtcattcctttgattggaaaggtcagctggggccagtggtgcctcaagcaggcccacacaactggcccaccttttccccgttaatgacccagcaagacagaatttganccccagcacctaaaagtacctggcccggcnggccggtttaaaacttagtggatncccccgggcctggcanggaattccgatattcaagccttatcgataccngtcnaccctcgagggggggggccccgntncccaanctttttgttccctttaa

SEQ ID NO: 7253 - DNA, 845 bp, Homo sapiens
  misc_feature 528, 574, 685, 707, 711, 719, 735, 740, 749, 751, 776, 779,785, 789, 790, 793, 821, 830, 842: n = A,T,C or G
gaattggagctccaccgcggtggcggccgaggtaccttcactcattccactgcctgtgactgacagaagggaggcaaagtaactcctcggcagcatctgcctttctcagcagcagactggttgttttcttctgctggtcagagcaattcttcaacaactgcatgagcagaggcatgaacatctgtcgtaaaatggggatacctgtgtcttaggcttggctgtaatctgcttgataaaaggaatgagttcctgagggtctcttccttcatagtctttgagcacatgtctgagcagacaagaggaacagaaggacttcttcctccaggcaagtaatcatgcaatgaggaagaacatgggacctctgcttctgagcatatccttctgtaaggcacagctgagggctgatgagaatatctgtaaacagttcagagcctctgaacagccacgccattccccagtctgctcgctgctctggcaagtccagcaccatggttgaagcagtctgttatagatgcctgcctttctttnccctgcggtcagcatcagtgttcctaacagaaagtttaaacttttncatcaagtgggagtctaccagattcctcaattaatgcttgcttccttttttgatggggtgtttactggtcaataaattggtattccgggctgtcttgtaaaacaaaaatantttgaattatttgttcttcagnaaanggactggntaaccatttctcaagnggganaaaagcccngnataaagtctttctattctattgganaanattccntcannggnaaagggattcattggttttcttggaganaatcttgancaaatctaaaanaat

SEQ ID NO: 7254 - DNA, 1137 bp, Homo sapiens
  misc_feature 2, 3, 7, 9, 12, 13, 15, 16, 17, 24, 25, 39, 40, 43, 49, 53,56, 63, 69, 71, 90, 93, 96, 100, 102, 104, 106, 107, 112,119, 120, 122, 185, 203, 248, 251, 269, 282, 292, 302, 341,426, 454, 461, 475, 503, 510, 538, 555, 558, 559, 564: n = A,T,C or G
  misc_feature 568, 603, 620, 630, 633, 674, 695, 697, 711, 718, 729, 738,744, 759, 765, 785, 786, 802, 810, 814, 821, 825, 833, 836,837, 843, 873, 874, 880, 884, 890, 893, 907, 913, 916, 934,935, 945, 947, 953, 955, 962, 969, 974, 981, 984, 991: n = A,T,C or G
  misc_feature 994, 995, 997, 1012, 1016, 1018, 1030, 1034, 1055, 1071,1072, 1077, 1078, 1079, 1092, 1094, 1101, 1102, 1110, 1111,1133, 1134, 1136: n = A,T,C or G
cnnaaantnatnnannnatatatnnatattactttaacnnatntggtantatnttnagcttanttatantnaatataattatttcagttnagnttngggngngntnngggtngagtcanntngggcgaattggagctccaccgcggtggcggccgaggtactttttttttttttttttttttttngcaacagggtcctactanattgccctggctacacttcaactcctggactcaagcaattctctnatntcagtctcctgagtagtngggacaccactgngcccaatttntattttttanaagaaattatgttcattctccacagtatacactcttatntgtagcttgcattattcacttaattaaggatcttggaaattacacagtttatcagatctttcactcctttagaagtattacaccngctgtattactcgtaggtcaaacccagntccccanataaatttcctaanctttttgctaatttattataaaacaaangggactngcatgcccattaccacataacaccatanaggaaggtaaaaaaagnacnnggggntatngtagtttaggggaaccaaaaatggttggggttaangggataatttggtaatngtacaaaaanatntttaatgtgggggcctaatggcaataatttttttatgggtnaatttttaagggcgacccccncncccccccaacaacnaaaaaanaaaaaaccccncctttttcnaggcanggggaaaaattcttnaccccnttttttaccaggatttcaannaaaaaggaatttaaantttaaacncctnggcccgnaaangttcaaanaannggcctnggtgttcccccggcggttacccctggcccnnggggcngggnccgggnttnttagaaaacctaangggggnatncccccccgggggcttgcnngggaaatttncncaattntnaaggccntttattncgaantcccggnccngaacccntcnnanggggggggggccccngggnanccccaaactttnttgngttcccctttttaaaggggangggggttaaattttgnnccccnnntgggggtaaaatnantggggtnnaaaaagcnnggattaccttggggggaaaaanntng

SEQ ID NO: 7255 - DNA, 1119 bp, Homo sapiens
  misc_feature 1, 7, 8, 10, 13, 14, 17, 19, 26, 27, 28, 38, 39, 44, 49,53, 54, 55, 59, 60, 62, 63, 65, 67, 75, 78, 80, 82, 83,87, 88, 89, 91, 94, 97, 101, 102, 106, 112, 115, 195, 305,374, 416, 465, 495, 507, 513, 520, 531, 548, 599, 620, 638: n = A,T,C or G
  misc_feature 645, 649, 684, 708, 732, 771, 775, 798, 837, 840, 852, 860,863, 878, 879, 886, 891, 894, 898, 908, 910, 918, 919, 920,930, 945, 947, 960, 977, 987, 992, 997, 1006, 1013, 1019,1025, 1027, 1029, 1040, 1045, 1051, 1055, 1058, 1064: n = A,T,C or G
  misc_feature 1070, 1075, 1084, 1098, 1101, 1109, 1115, 1116, 1118: n = A,T,C or G
ncccgcnnanacnnctntntattagnnngatattattnntatanaaatnatannnaaanngnntnantttattanatntnanntgcnnngnacntgngggnngggnggtctngtnagggcgaattggagctccaccgcggtggcggccgaggtacgcggggctcataatagaattctcatgagatctggttgttntgaaagtgtgtatcacctccaccttctctctctctctccctctgcctctcctgccagccaagtgaagacatgcttacttccccttcaccttccttcatgatgttaccatnggaatgacatactgcatcctatagttataccatccactctgaaatcaatggtgactttaactttcaggntccatacagaaacttcttttccacaggtatagaaacggttgnaactgggattgccaatttttatcacagctttgtcgtgaagactgccttntgtccctcctctcaccatgcccattggggntaacccagccanacaggnggttgcntcagggggcgnttgcccagctacattgnttcttatagccctggtggaggggagggaagcaaaacattttggctaaccanggccaagtgacaggaaaatgngatttccaaaatacccantggtgtngaangccttgaaatggatgggtcaaactttcaatgcccntggtccctgggggaatttggggcnacccttattggccgcccctggcantaagggtttcccttaaaaaagttaaaaaggccttctttngaanggccccgtccaaaaattttgggncaaattaagaaaagccccgggggtttccccaacccaatnatntggaatttcctngcaaccantgnttttaacaaaattannatggaanggaanccngggntttgggaacntnggggcccnnntccccgaaangcaaaggaaaattgncnaaaatgtggccangtgttgtaaaggaaggnagaaatggancattnttttnctaaccacnttttaanaaggcnttttgngngncaaatttcccnattcngaaccnaatnagnttgggnccccgnacccngccctttgnggaaagggggtcanctnggaaaaanattttnnang

SEQ ID NO: 7256 - DNA, 811 bp, Homo sapiens
  misc_feature 507, 551, 586, 603, 676, 688, 715, 724, 728, 733, 734, 775,790, 799, 808: n = A,T,C or G
ggagctccaccgcggtggcggccgaggtacgcggggtcaccaacatggccgcgggctggaagtgcgcatgagcagctgtctatggagatacctaggccgggagagggagaacacagttggagaaaatcggcagctgagacggccttggccggacttagcactcaggcctgtgaatcaggaaatacaaagacctccaaaaaaggaccagttcctcggatgtgccccctcacagagagatgaaggggcagcagaaaacagctgaaacggaagaggggacagtgcagattcaggaaggtgcagtggctactggggaagacccaaccagtgtggctattgccagcatccagtcagctgccaccttccctgaccccaacgtcaagtgatgtacctgcccgggcggccgctctagaactagtggatcccccgggctgcaggaattcgatatcaagcttatcgataccgtcgacctcgagggggggcccggtacccagcttttgttccctttantgagggttaattgcgcgcttggccgtaatcatggtcatagctgntttcctgtgtgaaattgttatcccgctcacaattncacaccaacataacgancccggggagcataaaagtgtaaaagcctggggtgccctaaatgaagtggagcctaacctcacatttaatttgncgttgcgcttcncttgccccgcttttccaagttcggggnaaaccttgncctngcccnncttgcatttaattgaattcggccaaccgcccccggggaagnaggcggtttgccganttgggccgnctcttcccnctt

SEQ ID NO: 7257 - DNA, 515 bp, Homo sapiens
  misc_feature 2, 3, 4, 5, 11, 15, 16, 25, 27, 30, 37, 40, 41, 47, 492,496, 497, 498, 499, 500, 502, 503, 504, 505, 506, 507, 508,509, 510, 511, 512, 513, 514, 515: n = A,T,C or G
gnnnnaccgcntaanngacttactngnggnctggacntanntgctgnctgattggagctccaccgcggtggcggccgaggtacgcggggtgacttccgcagtgcacgctgcgcctgccgggcattttttcctggtttgggggcaaggtctcatgggaaaggtcatgtctctcgaagaaaggttataaaccctgagatatgagggttgggcgagacatccgagcctgtttcgttccgtgttgggaccaggaataaccctgacttctgagctttcataaccccaggatcctccagaaaatttgcggcgcgctgagggaaaaccttgctgaagctgtacctgcccgctctagaactagtggatcccccgggctgcaggaattcgatatcaagcttatcgataccgtcgacctcgagggggggcccggtacccagcttttgttccctttagtgagggttaattgcgcgcttggcgtaatcatggtcatagctgttncctnnnnnannnnnnnnnnnnnn

SEQ ID NO: 7258 - DNA, 670 bp, Homo sapiens
  misc_feature 598, 613, 622, 646, 660: n = A,T,C or G
tactatagggcgaattggagctccaccgcggtggcggccgcccgggcaggtacactccacagtgtgggagtgggcccaagcataggggctcaagggtcctgttacagaattttgggggatttaaataccctctagaggtttccattggttactttgtgtatgccctatgtaaatggagataatatttcccggcatagctgaagtgtgaataggccttatgttctatgcctccagatcctattttcctgcctcatttcctccctgagagatgtcatccccataaatctttatgggaggtggagtgactaatggtctttcttctgtaactgcctcatgctggcttgaagcaaagtccctacctattggggatcacggaactgtcaccctgctcttgtctaagtggaggcagagtagcttcttgatgcccaggggtggtgtcttcaactggaactggctggaacattttgtcacatgatcttctgaagcttgatggtctctggatgccatcaacagtgggagcgactccttgtctggagaaatgcaagtgacagcactggcccagctttgagaacccagccggcttgtgcaagaagggcanccctaccacttatangcccggcanattggccccagcaactgaggcttncccacaagacaccnctccaggaag

SEQ ID NO: 7259 - DNA, 945 bp, Homo sapiens
  misc_feature 5, 6, 14, 15, 16, 22, 23, 31, 33, 34, 35, 42, 44, 46, 52,53, 54, 56, 58, 59, 62, 65, 67, 73, 80, 85, 88, 91, 102,104, 107, 108, 109, 114, 124, 143, 146, 161, 211, 212, 226,227, 257, 270, 336, 366, 399, 492, 496, 504, 505, 513, 546: n = A,T,C or G
  misc_feature 563, 566, 569, 570, 591, 596, 669, 683, 699, 700, 713, 715,764, 766, 778, 790, 794, 796, 804, 811, 833, 843, 850, 853,862, 863, 865, 868, 874, 875, 880, 909, 913, 919, 927: n = A,T,C or G
ccccnnaaccatannntgtaanntatcttcnannnatcttantnancttctnnnantnnctntcngnaatttnaaaatantgctnttnttntttaagaggangnggnnntggtnaaactacagnactgtatggcgacttgacnctncaccgcggtggcagnggccgcccgggcaggtacattttttcctatgattttcaaatgggtataannggtagccaaaaagnnatagtttttatgtttaggtctgtgattcantttgagttaaatnttatggtttaaggtagaggttttgaggttcatgtttttttcctccattttagttgttctgtagcancatttattgcaaagatattctttctcaatnggaatttatactggcaatattggaaaatctgtnattctggacttctattctgttccattagattctataatgccatttttcttttgtaatcaattacccacccttgtctttggactacctttttangccntttggtanngtaaattncttcaaaaaaattcaagggttaagatgggaagntcccctttcaaggcttnttngtnnccttttgtttcaaaaaaattnggttntttgggcctttaataatcttttcctttaataataaaaaattttttaaggaaatccaagaattccatttcaagnttttccttgccaanacctggagaatttggnngtttggaaattcntngttagaaatccaaatattttggtggttctttaaaacaatccccccccancnaaaaagtttagnaaaaggcccagngcangnttaaaatnatttcangaaggggcaccaaagcccccanaattgggaangctgggnaangacaataanntngcntcccannaaaanggtccctttccaaaaaaaaaaagaaaaangaangcttgntcaaaaancaatacaaaaatcttttg

SEQ ID NO: 7260 - DNA, 669 bp, Homo sapiens
  misc_feature 531, 593, 608: n = A,T,C or G
aattggagctccccgcggtggcggccgaggtacttttttttttttttttttggtacatgtgtccaggtttctctctttgagggatagtgatgccctttggtgtaaagctgtgagaaacccccatggtttgggattgtaatagcatgatgctgatgatgctgttctcgcagcctggtcctgtgtgctgtggctggggatcagctcacctctggggagcgctcagctggaacctcccactggctgttcctgccagaacgatcttggtgctctgctctccagcctctgagacttcctgtccctttcttagagcagtatttatgattccccgcgtacctgcccgggcggccgctcgaccgcttcctcgctcactgactcgcttgcgctcggtcgttcggctgcggcgagcggtatcaagctcactcaaaggcggtaatacggttatccacagaatcaggggataacgcaggaaagaacatgtgagcaaaaggccagcaaaaggccaggaaccgtaaaaaggccgcgttgctggcngttttttcataggctccgcccccctgacgagcattacaaaaaatcgacgctcaaagtcagangtggcgaaaaccccnacagggactattaaagatacccaggccgttttcccctggaagctccccttgtgccctttct

SEQ ID NO: 7261 - DNA, 863 bp, Homo sapiens
  misc_feature 34, 67, 72, 73, 74, 75, 78, 81, 82, 83, 99, 108, 110, 111,116, 118, 123, 124, 130, 136, 137, 138, 139, 145, 146, 149,150, 151, 152, 153, 154, 155, 156, 158, 166, 169, 174, 175,176, 181, 182, 183, 184, 185, 193, 194, 195, 196, 201: n = A,T,C or G
  misc_feature 204, 210, 211, 212, 213, 222, 223, 230, 233, 234, 235, 236,242, 243, 245, 251, 252, 257, 258, 259, 261, 264, 265, 266,268, 269, 270, 277, 278, 279, 280, 282, 283, 284, 296, 301,302, 305, 316, 321, 322, 324, 328, 329, 330, 331, 333: n = A,T,C or G
  misc_feature 334, 340, 345, 346, 347, 350, 351, 360, 363, 364, 369, 370,374, 380, 381, 382, 383, 384, 386, 387, 388, 389, 390, 396,398, 399, 400, 402, 403, 413, 415, 419, 425, 439, 482, 484,497, 499, 501, 506, 509, 510, 519, 528, 531, 542, 548: n = A,T,C or G
  misc_feature 561, 566, 574, 596, 597, 612, 673, 683, 687, 702, 750, 751,753, 758, 762, 763, 764, 765, 767, 777, 779, 780, 789, 793,796, 797, 798, 800, 802, 804, 806, 814, 815, 822, 823, 824,825, 826, 827, 828, 829, 830, 831, 832, 833, 834, 836: n = A,T,C or G
  misc_feature 837, 839, 841, 847, 849, 850, 853, 858, 861: n = A,T,C or G
gaccccgcgtccgctcactatattgatctctgtncggcaaagaaaaaaaaaaaaaaaaaaaaaaaanggggnnnnccnttnnnttttttaaaaaaaaanccccccccncnnccccntngaccnnaaaaanaaaaannnncccttnnggnnnnnnnncntttttttnggnctttnnnggggnnnnnaaaaaaannnnccccnccnaaattnnnnaaaaaagcnnttttttnccnnnntttttnngngggggnngcccnnncnccnnnannnttttttnnnntnnngggcccccgggnccccnnccnaaaaaaaattnttttnncntttnnnncnnaaaaancccgnnnccnngggttttcnggnnggggnngggntttttnnnnntnnnnngggggntnnntnntttttccccncnctcngtgcancaatatattaccancaagaataaaaaagaaatccatatcttaaagaaacagcttttnangtgcctttctgcngntnttcanganncgggggatngcatttggnatncgaataagctntagttnttacaccgacctnctacnagatttanaaaaaagtttacacataatctnngtttacagaaaaatnttgtgctagaatactttttaaaaggtatttgaatctttaaaaactgcttttttttttccancaggtttccnaccncttgggttctgcttnaataaattttggaaaactcaaaaaaaaaaaaaaaaaaaaaaagggggnncnttttnactnnnnanaaaaaaaaancnnccccccccncccnttnnncngnananaaaaaaannaaacgcnnnnnnnnnnnnnanntntntttttngnnccnttttnatngg

SEQ ID NO: 7262 - DNA, 855 bp, Homo sapiens
  misc_feature 626, 635, 638, 702, 704, 713, 721, 748, 775, 779, 783, 785,793, 794, 822, 832, 835, 851: n = A,T,C or G
ggaggctaaaatttgatcctgccaaatgttcaacatttgaatacttttaatacttctctttagtagcttaaaaaaataatattcaactgatgaagaactgaatttccaaagcagacaacattcagtgagagctgccattctatgctttttttgagatggagttttgctcttgttgcccaggctggattgcaatggcacgatctcggctcaccgcaacctctggcctcctgggttcaagcgattctcctgcctcagcctcccgagtagctgggattacaggtgcgtgccaccacacccagctaaatttgtatttttagtagagatggggtttctccacgttggtcaggctggtcttgaattcctgacctcaggtgatctgcccgcctcggcctcccaaagtgctgggattacaggcgtgagccaccacacccggcccattctatgtttccatgtctgtttttaaaagaaagtttgcaagtagaaaggaaagtgataacaaagcgctcgacacaataactggaggacaagcgctctcatagcaagctccgcgcccaccgtccactttgaaagaaaagcaccggtgggaaaggtcacatactcggctctgttgggaaaatgctcatcangcgcgaaanaangctgtggacggctcgcaacaccttggtgtttcccatgtcatgcagcggcaattccccgctgcanangttttgaanctactgangatgcttggggactggaagacagttancaggaagcttcagcctttttaggccgngccnaaantnccatagtnnacttgggttgggtgctctggaatggacnacacaggccntcncagagggaaacaaacnctct

SEQ ID NO: 7263 - DNA, 921 bp, Homo sapiens
  misc_feature 4, 8, 13, 14, 24, 107, 121, 208, 219, 249, 251, 260, 262,280, 326, 329, 389, 390, 393, 407, 418, 419, 439, 449, 469,473, 480, 499, 500, 501, 503, 505, 506, 511, 526, 536, 537,552, 560, 562, 570, 593, 594, 595, 609, 612, 618, 620: n = A,T,C or G
  misc_feature 622, 623, 625, 626, 628, 640, 654, 655, 656, 661, 662, 663,664, 667, 669, 670, 672, 674, 689, 691, 711, 718, 726, 729,736, 737, 740, 741, 743, 744, 746, 748, 751, 752, 753, 754,759, 762, 764, 765, 782, 783, 786, 787, 788, 789, 795: n = A,T,C or G
  misc_feature 797, 828, 830, 831, 832, 833, 836, 837, 839, 842, 843, 845,846, 857, 869, 871, 872, 873, 886, 889, 891, 895, 896, 897,898, 910, 919, 921: n = A,T,C or G
ggtngttncgcgnnttttactacnacttactatagggcgaattggagctccaccgcggtggcggccgaggtactttttttttttttttttttttgagacagagtctngctctgtcacccanactggagtgcagtggcgctatctcggctcactgcaagctctgcctcccgggttcacgccattctcctgcctaagcctcccgagtagntgggactacanaagcctgtcaccatgcccggctaatttttngnatttttagnanagacatgttagccagganggtcttgatctcctgacctcgtgatccacccgccttggcctcccanagngctggggattacaggcgtgagccaccacgcccggccgaggtacgcgggagcagggaaccnnttnaaaaacctttccanacggggaaaanntttgtttttacccttttggnaaaaaaaaantgggggggggggggaaaacntttnggggggncccccccccccttttaaannngntnnacggnggcccccccccgggngggggggggnnttttttttttttggngggggggncncccccccncccccccccgggggggggggggnnncccccccccccccntgngggggngngnnanncncccccccccccntttttttttttttnnngtgcnnnncancnncntnggggggggggggggngntttttttttttttttttttntgggggncccccccnccnccccctnnttnngnnananaannnntcccnccncnngggggggggggggtttnnggnnnntttttntncaaaaaaaaaaaaaaaccccccccccccccncnnnnctnntntgnntnnccccccccccngcgccggggggntnnnaaaataaaaaatncgncncccnnnntaaaaaaaaaanaaaaaaaanan

SEQ ID NO: 7264 - DNA, 901 bp, Homo sapiens
  misc_feature 280, 324, 379, 383, 395, 397, 399, 407, 413, 427, 431, 432,433, 445, 458, 465, 476, 479, 499, 512, 519, 520, 526, 527,529, 533, 540, 541, 559, 576, 577, 603, 604, 605, 609, 610,617, 623, 624, 628, 649, 659, 660, 666, 667, 672, 679: n = A,T,C or G
  misc_feature 680, 682, 684, 685, 686, 687, 688, 689, 711, 712, 713, 714,715, 718, 721, 723, 740, 751, 752, 753, 755, 756, 757, 758,759, 760, 761, 772, 775, 779, 783, 784, 787, 788, 789, 790,792, 794, 795, 797, 802, 809, 814, 815, 816, 817, 818: n = A,T,C or G
  misc_feature 819, 820, 821, 822, 828, 830, 831, 832, 833, 834, 836, 839,840, 841, 842, 843, 845, 846, 847, 849, 851, 855, 857, 862,865, 868, 869, 886, 900, 901: n = A,T,C or G
actactatagggcgaattggagctccaccgcggtggcggccgaggtacgcggggagcagggaaccgctcagatacccttccacaccgtggaaactttgttcttaccctcttgacgaaaaatcttgctgctgctcactctttgggtccacaccacctttaagagctacaacgatcaccacgacagtctgcggcttcattcttgaagtcagcgacaccacaaacccaccagaagggagaaactccagacacatctgaaggaacaaactccagacacaacatntttaacagctgtaacacacactgtgaaggtccacggcttcattnttgaagccagcgagaccacgaaccctctggaagggaaccaactttggccacagangggncgggagattttncntntttcttcnaaaatnttttttgggcccancccnnnggcccccttttngggggggtttttnttttttncccgggggggnccnttttaaaaaaaaggggggcnccccccggggggnggggaannattttnnanaaanttttttnnaaccccccccccccccgnggggggggggggggcgnncccccctttttttttttttttttttnnngggnnaaaaaanatcccnngggngaaaaaaaaaaaaaaaaaaanattttttttnngggggnnaaaanaattttnntntnnnnnnaaaaaaaaaaaaaaaaaaaaannnnnggnggngnaaaaaaaaaaaaaaaanggggggggggnnntnnnnnnnaaaaaaaaaanaanaaanaaannatnnnngngnngntctcnccccccnccccnnnnnnnnnaaaaanannnnntnccnnnnntnnnantnatananaacanccncgnnggggggggggggtgggntttttttttttttnn

SEQ ID NO: 7265 - DNA, 913 bp, Homo sapiens
  misc_feature 3, 8, 28, 36, 52, 60, 82, 83, 84, 86, 90, 91, 101, 116, 231,237, 251, 254, 262, 266, 299, 311, 323, 334, 346, 354, 357,372, 374, 392, 398, 411, 412, 420, 433, 440, 443, 448, 449,461, 464, 467, 471, 474, 476, 477, 486, 489, 492: n = A,T,C or G
  misc_feature 498, 501, 510, 519, 524, 525, 537, 553, 556, 559, 564, 569,571, 575, 579, 589, 591, 607, 617, 623, 631, 632, 640, 642,645, 668, 673, 695, 696, 699, 700, 701, 702, 708, 714, 715,727, 740, 742, 750, 761, 770, 773, 778, 780, 782, 783: n = A,T,C or G
  misc_feature 788, 797, 798, 802, 803, 804, 805, 810, 820, 843, 847, 852,859, 860, 861, 865, 866, 868, 876, 877, 879, 880, 881, 889,892, 896, 897, 900: n = A,T,C or G
gtnaggcnttgaaacccctccttttggnaaattgcngctccccgcggcggtngccgaggnactttttttttttttttttttnnntnaacnnaggcggactntgttttctaattctnttattttatttgctggagtaacaggtttgttgatattttaaatcatgttttaatattatagcaaactagccacactataggagatggactgaagctcataagctccacattcagncacagntccttgctcaacanaanaaaaggcnaaanagttggcatagtctctgtcacctagtttgtcgntgttcctctcanatctccaggcanaagttcagggnggaccctgccancttctttncanaatgcttatcaaagntnttattcatagccccaggnaaaagngggtttttccagnntccaggcntccttttcctaanaaatttnggnagggnngggaaatggganttnggngggnccngnncccccaaanatnggntggggnccngggggaaanaaacccttnatttnnccccaaaaaagngggggtttgggggggncanaanttttnggttnanaaanaaanttacccccgncnaaaaaggttttttttnccaaaaaaantcccancccccctnnggggggancnccnaggtttgggggggtttttttttnaaaancccccccccaaaaaaaaaggcnnaannnnaacccngggggnnattttttttttnggggccccccccncnttttttanaaagggggggnaaaaaacanggnacccncngnnaaaanaattttttnngggnnnnaaganaattttctanaaaaaaaaccccccaaaattttntggnagaanccccccnnnaaanngnaccccccnncnnngaaaaagnggnggtnnccnccccccccccccc

SEQ ID NO: 7266 - DNA, 851 bp, Homo sapiens
  misc_feature 13, 30, 54, 77, 622, 648, 673, 689, 730, 734, 748, 769, 777,779, 783, 784, 785, 811, 827, 844, 847, 851: n = A,T,C or G
ttaccctttgaanccccataccatttgtanagggccaattggagctccaccgtngtggcggccgatgtacttctttngagcactgaccttatatccactgccagcagattcatcccagggtccctgttcatctggtcaatttcacttcctctgctccagcagaccttctttgttcatgtcctcaagaccctgttttcgggcagcactttgctgtggaccttgctggactgaacaaaggaggaccaaggcgggaataaagacaaagactgaagagtatgttttgaagaagggggtcaggggactccttgcttctagtgaacaagggcccccgcgtacctgcccgggcggccgctctagaactaagtggatcccccgggctgcaggaattcgatatcaagcttatcgataccgtcgacctcgagggggggcccggtacccagcttttgttccctttagtgagggttaattgcgcgcttggcgtaatcatggtcatagctgtttcctgtgtgaaattgttatcccgctcacaattcccacacaaacataccagccgggagcataaaagtgtaaaaagcctgggggtgcctaatgaagtgaagctaacttaacattaaatttgcgnttgcgctcactgccccgcttttccangtccgggaaaaccctgtcgtgcccngcttgcatttaaatgnaaatcggccaacccccccgggggaagaaggccgggtttgcngttntttgggggcgcctntttccgcttttcttcgcttanttgaattngnttgnnnctcgggtccggttccggcttggcggnggaaccgggattcaancttaacttcaaagggcnggnaaan

SEQ ID NO: 7267 - DNA, 833 bp, Homo sapiens
  misc_feature 3, 4, 14, 34, 65, 66, 71, 79, 88, 96, 98, 103, 106, 107,112, 118, 126, 136, 146, 253, 269, 283, 284, 292, 296, 318,380, 415, 416, 427, 442, 446, 448, 450, 478, 486, 497, 573,588, 612, 615, 661, 676, 686, 687, 691, 699, 709, 714: n = A,T,C or G
  misc_feature 723, 737, 744, 745, 768, 778, 798, 799, 803, 806, 811, 815,821, 830: n = A,T,C or G
ggnngttacgcgtnattcgactactatagggctnattggagctccaccgcggtggcgagcggtcnnccggncaggtacncggggaggnaaccgatnanatacnctnncacancgtggnaactttgntcttaccctnttgacggaanaatcttgctgctgcttactctttgggcccacaccacctttaagagctacaacgatcaccactacagtctgcggcttcattcttgaagttagcagacaccacaaaccnaccagaagggagaaantccagacacatctnnaggaacanactncagacacaacatctttaacagntgtaacacacactgtggaaggttcacggcttcattcttgaagccagccagaccacttaaccntctggaaggaaccaactctggacacagcatgacgnnagacttctacntgcttacttagaatnattncngnaccaaccatggccacgtttgtggagctnagtacctnggccgctctanaactagtggatcccccgggctgcaagaattcgatatcaagcttatcgataccgtcgacctagagggggggcccggnacccaaccttttganggctttagtgagggttaattgccnctnggccgtaatcattgacatagctgttttctgtgtgaaattggttttncggttaccaattccncaccaagatnnttancccggggngccataaagntgtcnaaaggctanggggtgccttaatngaggttnngcttaacctcacatttaaattgncgtttgcgcntaactggcccgctttttcannaccnggnaaaanttgntggggnccatttttnaat

SEQ ID NO: 7268 - DNA, 930 bp, Homo sapiens
  misc_feature 1, 517, 531, 534, 558, 575, 597, 645, 666, 672, 691, 694,700, 701, 725, 751, 765, 775, 787, 793, 802, 805, 806, 808,825, 833, 844, 846, 862, 867, 871, 872, 875, 877, 882, 884,888, 889, 896, 897, 899, 907, 913, 916, 917: n = A,T,C or G
nactcactatagggcgaattggagctccccgcggtggcggccgaggacaggaagcatggcaacatctgctttgcttctggggaggactcaggaaatttacaaccatggtgggaggcaaaggagaaccagcacttcacatggccagataaggaggaagagagagaatgggaggtgccacacacttttaaacaaccagatcttatgagagctcaccatcatgaaaacagcaccaaagggatggttttaaaccatttctgaaggatccactccagtgatccaatcacctcccaccaggccccacctccagcattgaggtttataattgaacttatgatttgagtggggacacagatccaaaccatatcagctggtaataatcattcctttccatattttagtgctcctttcaagctctcttgtaaggtgggtctggtgataacaaactctctcagcatttgcttatctgaaaaaggatcctgtttcttcttcactgaggaagcttagttgggcagaattntgaaaatactcagnttngtagatttttttttttctctaaanaatgtttggaaatatanggcccttcaattcttcatcttnggctttataagggtttctggctgaagtgggttcaactgttaagccctnggtgggagtttgctttttgtnagggtngacctaaccccttttcctnttntagctnncctttaaattttttttcttttcantttcgacccttaagaaaaatcttgantggggggatggtgncttggggggntaattttttttnggtaanaaatctttncannanggtttttcttgtgtttncttggaantctgaactggncngccctttttaaagganggttngggnnaangnttttnantggnntggtttnncntttaaaanataccnaannttttccaagttgg

SEQ ID NO: 7269 - DNA, 1232 bp, Homo sapiens
  misc_feature 2, 5, 9, 13, 14, 15, 23, 28, 35, 40, 41, 48, 49, 51, 55,64, 66, 68, 75, 81, 92, 94, 96, 98, 99, 100, 107, 200, 242,356, 365, 372, 404, 422, 427, 439, 442, 460, 462, 466, 470,472, 476, 481, 483, 487, 501, 511, 517, 523, 532, 542: n = A,T,C or G
  misc_feature 551, 559, 569, 571, 578, 581, 584, 591, 618, 624, 628, 638,640, 665, 669, 674, 697, 712, 713, 716, 717, 742, 743, 752,757, 759, 770, 774, 776, 779, 794, 798, 809, 813, 826, 837,839, 841, 845, 846, 853, 856, 864, 868, 869, 871, 878: n = A,T,C or G
  misc_feature 881, 894, 895, 896, 903, 932, 949, 960, 962, 970, 971, 973,980, 981, 985, 986, 991, 995, 1000, 1002, 1021, 1036, 1037,1039, 1041, 1044, 1056, 1061, 1063, 1065, 1073, 1076, 1077,1082, 1083, 1084, 1087, 1090, 1093, 1094, 1102, 1104: n = A,T,C or G
  misc_feature 1111, 1114, 1117, 1119, 1123, 1126, 1131, 1139, 1141, 1147,1148, 1150, 1152, 1155, 1160, 1161, 1164, 1167, 1191, 1194,1195, 1196, 1198, 1202, 1206, 1210, 1218, 1219, 1222, 1227,1228: n = A,T,C or G
angtnttanagannntgacggcntaaanattgtanaatannattattnntntaantattattantnantcatatntctttntttagttattngnangnnntaatacnactcactatagggcgaattggagctccaccgcggtggcggccgaggtacgcgggtgtgtttgtatatatattatatatacgtgtatacacggnatatacatgtatacatgtatacgtgtatacatgtatatatgngtataatatatatacacgtgtatatatattatatatatatacgtgtgccatgttggtttgctgcacccattaactcgacatttacattaggtatttctcctaatgctatccctnccccagccntcacccnatgacaggccctggtgtgtgatgttccccgtnctgtgtccaagtgatctnattgntcaagttcccanccnatgaagtgagtaacattncnttgnaccngncgtnttatnanaaangttttttaaaaaancagatagtancaaccnaaatgnccccatttnatttgggggnaaaaattgnaaagaaantttttttaangnttaaaanaangantattttngaaggttggaaaaattaaattattttngttttngttntttaaaaaanangtttttaatttatttaaaacacaanttcnttccnattcaattattgttttggaaaantataattctttaaannatnnttggaaaaggtttaaaaaaatttanngaaaaaccnctttntntaaagggaaanaaantnagngtaaaaatagttttncaangtaacttttancacnaatggaaaaatantattgttttanantnaatnntacctgnatnatccctcnaccnncnaattaanganaaattcaaagctnnnatttggnaacttttatttttttaaaagaaggccttnatcaccttaattaaggntgaggagggtnanaaacaaanntntaaaacnncttnnctttntaanaaccnangtgatttaaattattttgncttatttctaaaaannangngantaaaaattttgnttgtntnantaaaaatnggnnactannnttnaangannatttatcntngggaganttnctntnattnccnaacanaaactttnantaaatnncntnccncgttnnatnttncaatggattatattaataaaatanttnnntnaaanatantttntcttcctnnatnataanntaag

SEQ ID NO: 7270 - DNA, 1219 bp, Homo sapiens
  misc_feature 3, 4, 5, 6, 7, 8, 9, 10, 13, 14, 15, 17, 19, 20, 21, 23,24, 25, 27, 28, 33, 36, 42, 48, 49, 55, 58, 63, 69, 70,71, 72, 76, 81, 87, 90, 91, 92, 101, 109, 110, 183, 274,324, 392, 395, 433, 447, 494, 505, 518, 541, 544, 561, 584,598: n = A,T,C or G
  misc_feature 621, 627, 650, 651, 664, 675, 683, 691, 697, 698, 712, 719,731, 735, 736, 740, 745, 748, 750, 757, 769, 774, 787, 788,795, 810, 816, 818, 823, 825, 828, 842, 848, 849, 853, 860,861, 871, 878, 885, 886, 904, 905, 906, 909, 917, 931: n = A,T,C or G
  misc_feature 932, 934, 945, 946, 955, 957, 961, 965, 971, 972, 997, 1002,1003, 1004, 1007, 1016, 1017, 1028, 1034, 1047, 1065, 1066,1067, 1072, 1084, 1088, 1096, 1101, 1109, 1115, 1116, 1125,1130, 1132, 1134, 1136, 1138, 1142, 1143, 1144, 1154: n = A,T,C or G
  misc_feature 1156, 1161, 1179, 1181, 1182, 1184, 1189, 1190, 1191, 1192,1193, 1194, 1202, 1204, 1212, 1214, 1218: n = A,T,C or G
ctnnnnnnnncannntntnnntnnntnntttgnttnaacttnatcttnnacgtanttnaattntttttnnnntaantcttngaatanggnnncatttaacnctaataanncgactcactatagggcgaattggactccaccgcggtggcggccgaggtacttttttttttttttttttttttngcatgtcttccatgtttttacagggcaaagtattttactctctcggcttccacattttttcatgtcattattaaactcatggagaatacanccagaagctgagctctgaagagggatgaatacagagggctaccagcacantgatagcagttctggaagctgggctctgaggagggatgaattgagggctaccagcacactgacagcanttntgcccgtaaactgccacatagttggcaaaaaagggcanagcccggttaaatnataaagattttaatggaaaccttattttaaaaaaaattcttttaganacaaaaacaanttgggaaaccagntgaaattaaagttttaactattnttncccacgcccatttaaanttttttttttttttttttaaaanaataccagggggtnttaaccttctaattctgttgccnagggcnttgggaaaattaccaaggtgggnngccaaattcaatnaagtttcaacnttgctaancccttttnaaaaanntcccttgggggctntcaaaanccggatcccctncctnntccntcatntancnctttccnctaaatttgtcntgggnaaccccatccccnnggggtcntttgccccttttaanaatttntnaaaantntgngtttatatataatnaaattnnatanttggttnngaaaaaatcncccaatnttccccnncaacttttttctcattgnnnctntaaacggnggaccaaaatttanntnccttttttggnngggaccaangnaacntccnaatttnnctaaaatattttgccaaataaaatngggcnnnttngttttaaannctgaacttgcncttttntttggggtggaantaacctttttccccattnnnttganatggtttaaatnaaanaaaattgnttggngggggtgngtaaannccctcttgnaaatntntncncncccnnntttttctttntnttctnaaagggaaaaacctttgngnngnaaatnnnnnnacaccctngnaaaaatgntnaaant

SEQ ID NO: 7271 - DNA, 936 bp, Homo sapiens
  misc_feature 463, 471, 510, 527, 557, 566, 570, 573, 599, 630, 638, 662,663, 673, 681, 685, 691, 698, 700, 707, 715, 716, 726, 728,732, 739, 744, 753, 772, 781, 783, 788, 790, 792, 795, 797,804, 805, 808, 814, 816, 817, 819, 827, 839, 844, 845: n = A,T,C or G
  misc_feature 849, 850, 852, 853, 855, 857, 862, 864, 869, 875, 880, 886,887, 889, 905, 908, 918, 923, 925, 928, 930, 934, 935, 936: n = A,T,C or G
gactcactatagggcgaattggagctccccgcggtggcggccgaggtacaaaaaaagcctaaaatcaggccagggtggctcacacctgtaatctcagcactttgcgaggccgaggtgggaggacagcttgaggccaggagtttgagaccaacctgggcagcatagcaagaccctgtctctacaaaaagttaaaaaattagctgggcgtggtggcatgcagctactcaggaggccgaggtgggaggactgcttgagcctgggaggtcaagcctgcagtgagctatgatcgtggcactgcactccagtgtgggtcataaagccgagacactgtctttaaacaataaaagcctaaaatcagagaggtctaccatgtgttttgaaaatccaggagccaaaaaatttttgtttttctttttggtggtggtggtgatttttaactaaaaagcaaacataaaacaccccngaacattnctggttacaactaaagacttgcgtaaatggttgctgaanaaaaaatccaccaaganttaccttgccccggggcggcccgttctagnaacctagtngganccnccggggcttgcaaggaaatttccgantattcaagctttattcgattacccgttcgancctttaanggggggggcccgggtaaccccaannttttttgttncctttaantggngggttnaatttgngncgctttnggccgttnntaattggtcnanaagnttgtttncctgngttggaaantttgtttatttcgtttccncaatttccncnacaanantntcntngcccggnnccntaaaantnntnaaaatgcntggggtgggccnaaatnnggtnntnntnancccancnattanatttgngtttnttgccnnanatggtcctgttttccngantgggaaaacntgtantnccntntttnnn

SEQ ID NO: 7272 - DNA, 1074 bp, Homo sapiens
  misc_feature 5, 14, 17, 31, 35, 45, 55, 60, 64, 73, 75, 79, 80, 86, 88,103, 111, 114, 117, 119, 123, 130, 147, 150, 190, 232, 235,248, 269, 282, 296, 315, 325, 337, 342, 361, 377, 379, 387,401, 403, 407, 419, 430, 436, 444, 445, 457, 473, 475: n = A,T,C or G
  misc_feature 479, 482, 484, 488, 490, 498, 505, 507, 511, 518, 525, 532,535, 538, 550, 553, 558, 566, 570, 574, 575, 580, 584, 592,598, 604, 611, 616, 619, 627, 630, 631, 637, 639, 642, 645,655, 660, 670, 672, 674, 678, 682, 687, 692, 698, 704: n = A,T,C or G
  misc_feature 707, 715, 718, 724, 726, 728, 733, 734, 742, 743, 747, 748,760, 769, 778, 780, 781, 788, 789, 793, 794, 796, 797, 798,799, 801, 803, 804, 805, 806, 810, 814, 819, 827, 828, 831,836, 838, 841, 843, 845, 850, 852, 853, 856, 866, 867: n = A,T,C or G
  misc_feature 868, 874, 878, 879, 882, 884, 886, 887, 889, 891, 895, 896,900, 912, 916, 918, 920, 923, 928, 931, 934, 938, 944, 945,950, 953, 955, 960, 966, 969, 970, 972, 973, 982, 985, 989,993, 994, 996, 997, 1000, 1001, 1003, 1011, 1014, 1017: n = A,T,C or G
  misc_feature 1018, 1019, 1024, 1025, 1027, 1030, 1038, 1039, 1045, 1049,1050, 1056, 1064, 1073: n = A,T,C or G
ggttngcgcatttngantacccctcactttntggnaaattccccnccaccgcggnggttngccnaggtacttnancagnntttttncngcccgaggcatgggngacacggnatnctntnatanacacaanatttatatttcactccnggnttgttcaagagcctctcgatctggaagatggttgaaattngagaccccaagggctttcaccagcccctcgtacaccagcttnctncatggccacccangcatccaagaacgttcctttnccactgatcatantacctttatcatcntttgggggaaaaaagtcanccccaagtcntgaaatccctgnggccnagtgaaataagaatagacntccaagataagctcangncttcaggntcctttggaggggncnatcntaaaaagggctntccctaacaangggggntcttcatnnaaaagaaaaagntggggcccaccacccntnggcntgnancgantnaaaccaanggtcccntnaccnggcaatnaacaagnccttttntcnatnggggaaacttanctnctttngggaatanggcntttnnttccnaccncccatggnttggantatctncaaaaanaaaantanggcccccnggnntcaatngntanggncgaaaaattnttggnaattcaaatngngncccnaccnttcanccggngttacntattancantttggccnaanaaaagnananccttnncaaagggnncccnngggccccccaanatgggggcnaaatttcgngnnttttggnncctnnannnntncnnnnaaancatngggcncatgggtnnggntcgcngnaanangnttttnanngcnaaaccacggnnntaaaanctcnnccngncnngncntganncccncaagaaatgggncgtncntnccnaaaangtngangatngcggcnnatctnggnanttaanaaaaanggnnannctgtggcanctnccanaatnngnnggnngnatccacantcntannnataanngnggnaacagaanntctcancccnnaaatanaagaattngggaattcnc

SEQ ID NO: 7273 - DNA, 971 bp, Homo sapiens
  misc_feature 5, 32, 33, 34, 61, 103, 122, 154, 265, 327, 362, 396, 399,423, 442, 445, 459, 466, 484, 488, 495, 498, 504, 508, 520,528, 544, 546, 556, 563, 565, 576, 578, 579, 583, 584, 586,599, 604, 611, 612, 615, 638, 639, 642, 645, 646, 647: n = A,T,C or G
  misc_feature 652, 654, 664, 666, 668, 679, 683, 685, 686, 687, 691, 698,708, 710, 723, 725, 730, 731, 739, 743, 748, 752, 754, 755,757, 763, 766, 773, 776, 779, 781, 784, 785, 790, 791, 792,793, 794, 797, 799, 803, 805, 846, 848, 854, 855, 862: n = A,T,C or G
  misc_feature 866, 867, 868, 876, 878, 879, 885, 887, 894, 896, 901, 908,914, 915, 917, 921, 923, 924, 925, 931, 932, 935, 936, 939,942, 947, 948, 953, 954, 957, 959, 965, 967, 969, 970: n = A,T,C or G
gtggntcgcgtaattcgactcactatagggcnnnattggagctccccgcggtggcggccgnccgggcaggtactttttttttttttttttttttttttttagnagagacggggtttcactgngttagccaggattgtctcgatctcctgacctngtgatccgcccgcctcggcctcccaaagttctgggattacaggcgtgagccactgcgcccggcctccaagtatttttattactgaattacaatgaatgcttgttttaagangtttctgagcacttaatgtgacaagttctggagaaagaacttttattaatcagagggaccgntgaacatataaaagtgatgaatacctcggccgctntagaactagtggatcccccgggctgcaggaattnganatcaagcttatccgatacccgtcnaccttggagggggggcccngtncccaacttttgttncctttantgagggaaaaattgcgcncttnggcgtanatnaagggntcanaagctttttttnctgtggtnaaaatatggtttaatnangtttaacaanatccacnanaaaaattactnanncccnntntatgccatttaanaattnttaaaannccngggggggtggccttaattgaagnnganctnnnccttnanatttaaaatntncngcttgaggctnaaantnnncccnaattttncaatattcgngngaaaaactttatncntggcnnaagctagnattnaaaanaaantnntnccaatnccncccaggnganaangntgnnatttnnnnnatntngggntnacatttttactttttcttaatttaaaattacattcatattncntaatcnnattttcntttnnnatataatntnnttttantnttctatntnaaatngacggantaatanntntaantnnnaaaaannatnngtnatntatgnnatagnnaananataatntnanng

SEQ ID NO: 7274 - DNA, 949 bp, Homo sapiens
  misc_feature 36, 68, 95, 141, 166, 168, 170, 208, 317, 328, 351, 384,393, 394, 397, 406, 408, 409, 422, 451, 464, 477, 481, 486,489, 490, 522, 526, 535, 540, 546, 556, 557, 577, 582, 596,601, 612, 629, 633, 638, 639, 641, 648, 653, 658, 659: n = A,T,C or G
  misc_feature 671, 672, 675, 677, 679, 681, 683, 686, 689, 690, 693, 697,702, 703, 704, 707, 710, 713, 719, 721, 724, 725, 727, 728,731, 734, 736, 738, 741, 750, 764, 772, 775, 782, 783, 785,786, 787, 788, 789, 797, 803, 805, 815, 823, 824, 829: n = A,T,C or G
  misc_feature 835, 839, 841, 846, 851, 853, 863, 866, 871, 873, 874, 876,877, 881, 882, 884, 886, 888, 892, 898, 901, 908, 912, 913,915, 916, 918, 920, 922, 925, 928, 929, 931, 934, 938, 941,942, 945, 946, 947, 949: n = A,T,C or G
ggcgaattggagctccaccgcggtggcggccgaggnacttttttttttttttttttttttttataganaacaattttggaaaaagagagtgtctntttttagagcagagggcaggtttgtttgctgcccagtataattaanataatgtttccctccaaggcaaagntnanataggtttgcttgcagctccccgataatttattaaggnttcctatgctcagggtccctcagcagtgatactaacccacttgcacgtgcagctttcacccgggcttccacacatcacatccatgagacttgtaggggcatgaacggtntgaacacgaangttcatgctgcctgttgtcctangagtaattaagtctttttactttgacccaggantctttatgnnttntggcgcggnanncataaaaaccggnggcaagcattacttgaaaaactttttttnaaccaaaaaaatnaggattgcttgancagnacatnggnnttttttgaaaagaagaaaataaattatggggntccnaaaaaaacncgagnttatgnaaatttttgnnaaaagacttcccccatgggnaagtnatttaaccctaatnaagtnaaaataccttnagtatgtgggtttgggnaaangggcnntnttagggnaaggntgggnnggggtttttccnnctngngntntnacntgnntcnaggnaattnnnttnatnagnactgtnanccnngnnaangangntntangattggatnattaaaattaatcntaataatnggngttttcnntnnnnntggccacntctccntntggtaagggngggggacnnaaagnggttanaatnanccccncaaananctggaaaatnggntttgntnntnntttnnanancntttngaaatnaangttttgngtgnngnncnantnaanacnncnttntggngcnntannnan

SEQ ID NO: 7275 - DNA, 925 bp, Homo sapiens
  misc_feature 89, 91, 128, 146, 166, 181, 225, 243, 246, 291, 298, 311,323, 344, 355, 363, 374, 383, 384, 386, 399, 412, 423, 429,440, 446, 464, 468, 488, 503, 505, 509, 516, 528, 533, 535,536, 539, 540, 564, 566, 571, 573, 574, 581, 582, 585: n = A,T,C or G
  misc_feature 590, 595, 596, 612, 615, 621, 622, 627, 628, 635, 636, 638,648, 649, 656, 658, 669, 671, 681, 682, 683, 686, 690, 692,693, 698, 703, 705, 706, 709, 711, 712, 715, 720, 728, 731,733, 736, 742, 744, 751, 757, 761, 764, 765, 766, 768: n = A,T,C or G
  misc_feature 774, 776, 781, 782, 785, 786, 788, 795, 796, 802, 803, 814,815, 817, 818, 820, 827, 833, 842, 843, 846, 854, 856, 861,873, 875, 884, 888, 896, 900, 905, 910, 913, 914, 915, 916,917, 920, 922, 923, 924: n = A,T,C or G
ggagctccccgcggtggcggccgaggtactttttttttttttttttttttttttttttatagagaacaattttggaaaaagagagtgtntntttttagagcagagggcaggtttgtttgctgcccagnataattaagataatgttnccctccaaggcaaagtttanataggtttgcttgcngctccccgataatttattaaggtttcctatgctcagggtccctnagcagtgatactaacccnctncacgtgcagctttcacccgggcttccacacatcacattcatgganacttgtnggggcatgaaccngtatgaacaccnaagttcatgctgcctgttggncctatgaagtnattaagtnttttttacttntgacccagnnantcttcatgtcttntgcccggcatccntaaaaacccgngggccnggtttactttnaaaacnttttttcaacaaaaaatnaggnatggcttgaccagacatggnttttttggaaaaggngnaaangaatatngggggatccctnaaaancnnggnntttaggaaattttatgaggaaaancnccccncnncgggaannttnttttnccctnngtttgtgaaatacccntantttggnnggttnnggccaanngncccattttanngaaaggngnggaagggggtntnaccccctgcnnntanattngnncaatntaatngnnctnannggntcttnggccactnaangnatnttaagnanttggaanaaaatngacnttnnnanggggtngnttaannggnngntccactnntcctcnncggaatggganngnngnaaatggnttaaangacgccccnnatncctgtaangnagggnccttgggtctcntnttaaaaacntttnaaaaattnggtntgggntgtanccnnnnnacnannnc

SEQ ID NO: 7276 - DNA, 950 bp, Homo sapiens
  misc_feature 188, 373, 479, 535, 547, 576, 598, 616, 619, 625, 637, 638,645, 646, 652, 654, 655, 669, 694, 700, 702, 710, 722, 723,728, 731, 736, 738, 751, 753, 763, 770, 772, 784, 786, 792,803, 811, 818, 822, 829, 830, 841, 842, 844, 845, 846: n = A,T,C or G
  misc_feature 847, 848, 851, 857, 862, 864, 872, 877, 883, 884, 888, 892,897, 903, 913, 916, 918, 921, 922, 923, 928, 935, 942, 943,946, 950: n = A,T,C or G
gcgtaatacgactcactatagggcgaattggagctccaccgcggtggcggccgaggtacgcgggtgtgtttgtatatatattatatatacgtgtatacacgtatatacatgtatacatgtatacgtgtatacatgtatatatgtgtataatatatatacacgtgtatatatattatatatatatacgngtgccatgttggtttgctgcacccattaactcgtcatttacattaggtatttctcctaatgctatccctcccccagccctcaccccatgacaggccctggtgtgtgatgttccccgtcctgtgtccaagtgttctcattgttcagttcccacccatgagtgagaacatgctcgcaccgccgcttntaaatgtttttaaaaacaaagacaccaatgcccttcattggggaaatgaaagactttttaagtaaaacgattttgagtgaaaaaatatttgttggttttaaaaagntaatatttaaccactctccatcatatgtttgaaaattattttaaaatgtggaaagnttaaaaatttanaaaaccctttgtaaaaggggaaaaaattngggaaaaattagttttccaatngaacctttgaacaacaanggnaaaaanaattttttttannactaagnntacctngnnagccccctcacccnccaatttaaggaaaattcaaggccnaatttncnctttaatntttttaaaaaanncttcnccnttaantnatggttggtttgntnaaaacaaacntttaatncnccttattttttngnaccaangtaattaaaantattttgncttaaanttantaccagnnaaaaaaatttnngnnnnngtnttaaangggancntcattccnaaatntttttnntaanaaanttctntatttncaaaatgganatntntcnnnacccngccccanttttttnnaanttan

SEQ ID NO: 7277 - DNA, 938 bp, Homo sapiens
  misc_feature 154, 187, 239, 260, 387, 391, 393, 418, 519, 533, 554, 557,598, 612, 618, 630, 634, 643, 646, 649, 654, 656, 661, 663,664, 676, 682, 695, 702, 703, 709, 717, 726, 730, 737, 738,743, 746, 747, 748, 753, 754, 755, 765, 776, 778, 779: n = A,T,C or G
  misc_feature 781, 787, 789, 790, 793, 795, 799, 801, 803, 806, 807, 808,811, 816, 823, 830, 834, 835, 841, 847, 854, 855, 862, 863,870, 871, 873, 875, 876, 878, 881, 890, 898, 900, 901, 903,905, 906, 915, 917, 918, 925, 930, 932, 934, 935, 937: n = A,T,C or G
gactcactatagggcgaattggagctccccgcggtggcggccgcccgggcaggtacttttttttttttttttttttttttttaccaacaattattaaagctgtttttatttcccaaagatttctaaagttacatgaactaaaagacattacggntttcattttggtttcaaaatatttgatgtaagngcttatttttgtttaagccaattaattagtttttaaaaatataaacgttacncacaacacatatgtagctacncagaaagacggaagcagatcaccacaggggttgtaagatttttcatttgccagtttttaagttttttaattggattaccagctttagggtggagcgcttggaagaacagggccagcaaagggttctntggngnctcctgtttttcccagggagtccangctgttagagcttgaatatccacttttaattgaacctgatttttaaccattagcactctttaatattaaaagtccttcccgtggtcccggggaaattgggnggggttctttgggntctggacttccaaaaaaatgnaanccccgcggggacccctccgcaagggggaggtggttaacaancttctttaaagggnggggcnccattttgggangttntgggtcccnttnttnaatgntncgggnanngggtttcgggangttttnttttaatttcttnggggggnntttggnggggtttncccttgggncccnaaggaanngaaanctnnncaaannntttaacgggnggggggggtancnntnttttananngcngnttcngntnggnnnttnatatntttcctncctgggntggnncgtggngcttcncttgggnnttaaggnngggaaanntnanncnccnttttttggnagggtggnannantnnataaaacgnanngtggganccatngnannang

SEQ ID NO: 7278 - DNA, 1227 bp, Homo sapiens
  misc_feature 5, 11, 13, 14, 16, 18, 21, 23, 24, 27, 37, 38, 39, 49, 55,56, 58, 59, 60, 62, 63, 68, 69, 71, 75, 79, 80, 81, 82,83, 87, 88, 92, 93, 94, 95, 96, 97, 98, 99, 100, 106, 107,111, 112, 114, 115, 122, 123, 125, 126, 134, 183, 209, 228: n = A,T,C or G
  misc_feature 333, 343, 396, 398, 408, 428, 432, 445, 460, 469, 478, 480,483, 489, 491, 492, 498, 507, 528, 557, 562, 578, 604, 618,633, 652, 672, 674, 687, 696, 707, 710, 718, 727, 735, 745,753, 759, 765, 797, 805, 813, 826, 833, 836, 866, 873: n = A,T,C or G
  misc_feature 878, 884, 896, 902, 905, 925, 926, 939, 950, 955, 961, 964,965, 966, 973, 988, 991, 994, 1000, 1003, 1015, 1027, 1030,1035, 1040, 1062, 1074, 1075, 1076, 1077, 1086, 1087, 1088,1091, 1096, 1105, 1108, 1112, 1115, 1116, 1124, 1125: n = A,T,C or G
  misc_feature 1127, 1128, 1137, 1143, 1147, 1152, 1157, 1165, 1166, 1167,1168, 1169, 1172, 1176, 1177, 1188, 1191, 1197, 1198, 1203,1211, 1212, 1213, 1217, 1220, 1222: n = A,T,C or G
actcnattatntnncnantantnntcnttttttaatnnngttactatcnttgtcnnannnannaaatnntnaatntatnnnnntatnnaaannnnnnnnnagaggnntaanntnntttcatnncnntcactatngccgaattggagctccaccgcggtggcggcccgaggtacgcgggattgngaccccgttgcatgaagtcaggtgtnggagttttccacttgtggnatcatgtttgctgctgctcaagaagtttctgattttggaacattttggattttggattttcacattagggatacctaatgtgagagagactaggccgcacagctncctgcactgntgcctggtggtctgaactggggctctgattgttttctggagggggccttttgngngcctttctgnagaaggggccttgcattgantganttctaccactgtntggggctcagttgtngggagcaanacctttgtntngancccacncnnaggttntgacaagcnttaaaggggcaagcccctgtnatttttttattcttacaggaaggtattantttanatggattaaaaagatnctttttgggaaaacctttacctttanaaaaaccaaaaaanttggaaaaaccattnttccattggatggggcagnggaatttttccaaaaacccngnaaaaaaatttagnaaaattaanatttttaagtntgnaaacctcncccaattcnaacttttnaacctttttnaaacaagntttaanatttcnttaaggggcttcccccccctttaccctttgangattgtanttttttanaaaggccaaaatnccccaangtnttttccactttttttttgggaaaaaaaatngcctctncaatnaaccantattcttccttnaacaanaanaaaatggggacctctttttnntaaaaacttttantttttttaaangttgnaagaanttnnnccacccngcccctttccctaanttnctngaattnttncaataattttcnagggggttttgnaancccgnaaatnttttttaaaaaaattggggggnaaataaatgagnnnntttttttannnccnaaaantcttttganttnaatnggnnttaaaaannanngggctattncctctngccnccccnaaatnttgggaannnnnctnggcnntgggcccgggnccnctttcnnttttnataaacannnaggngtntnccccg

SEQ ID NO: 7279 - DNA, 900 bp, Homo sapiens
  misc_feature 50, 89, 95, 97, 116, 118, 124, 130, 191, 198, 263, 285, 305,319, 333, 346, 350, 354, 382, 387, 393, 415, 448, 456, 463,469, 470, 479, 480, 498, 522, 551, 552, 560, 575, 580, 582,593, 595, 606, 607, 611, 613, 614, 615, 619, 628: n = A,T,C or G
  misc_feature 630, 642, 644, 653, 654, 664, 667, 676, 677, 683, 689, 699,708, 716, 719, 726, 730, 735, 736, 739, 742, 743, 745, 748,757, 762, 765, 766, 769, 790, 797, 802, 804, 805, 806, 807,813, 814, 817, 824, 825, 833, 836, 840, 843, 846, 850: n = A,T,C or G
  misc_feature 853, 874, 875, 884, 890, 892, 897: n = A,T,C or G
gactactatagggcgaattggagctccaccgcggtggcggccgaggtacncggggctcataatagaattctcatgagatctggttgttngaaagngngtagcacctccaccttctntntctctntccctntccctctcctgccagccaagtgaagacatgcttacttccccttcaccttccttcatgatgntaccatnggaatgacatactgcatcctatagttataccatccactctgaaatcaatgtgactttaacttcanttccatacagaaactttttttncacaggtaagaaacggttgnactggatgcaattnttatcacagcttgngtaagactgcctntgtncctnctttcacatgccattggttaaccagcanacagngtgctnaggggcgttgccagctcattgntcttataagcctgtgagggaggaagaaacattngcttaccnggccagngacaannaatggattnnaaataccagtgtgtgaanctcaatgatggtcacttcatgccntgacctgggattcgggacctatgcgcctnnaggaggtnccctaacgtaaagcntctanangcccgaaaaantnggcctttgggnngccngnnnaaancaacagaantnccccccgggccngnggggaaacnnttaatttaanggnttatttttnncccctnggcccntcccgaaggnggggacccnccggaacnccnctttttnaaancccgnnaanaanngngtnttaaaactntcaancgnnggngggaaaaaaattggccataanccctttntcctngnnnnggaaanntgnttttccnntggccaanttnccanacnacnttancgnggcccgggggccgtaaaagtnnttaaaaacncggggngnccaanaag

SEQ ID NO: 7280 - DNA, 942 bp, Homo sapiens
  misc_feature 3, 4, 6, 344, 452, 465, 505, 522, 540, 594, 609, 610, 620,624, 631, 634, 654, 679, 683, 689, 719, 726, 731, 737, 742,745, 753, 760, 762, 763, 767, 770, 771, 782, 799, 813, 818,820, 822, 826, 828, 833, 834, 837, 866, 868, 875, 881: n = A,T,C or G
  misc_feature 886, 895, 902, 903, 905, 906, 908, 909, 910, 916, 919, 921: n = A,T,C or G
ggnnangagcgcgcgtaatacgactcactatagggcgaattggagctccaccgcggtggcggccgaggtactttttttgtttttttttgtttttttttgcaatccctctccccctgaaccaatttcacattgggaatgcaggacctagactgctgaataaaaagctacttcttctataattgtcaggttctctccaatttctcagcttcctcaaaggcatggggtggagttgggtgtgccatcactgagagagctctggaacttttgactcttagtgacatttttagatttaggggttcatggccttccacatgttgccaccaactggtgatctctgccccttnatgctgatcaagaaagtagaaactcctcgtcgccttcaggtttgtagtcgcagaaacattgcctgctgtggactgtcagcacaaaactgggacactggtgtcatttanactgtcagcagtncacatgattgtacgatagactccaggcaaccatgtgcatntgtgcaagaatgacctntgccccaagaagaagggntacggtctaattaaatgtttaccaaagatggtaccagtggggcctctcccccgnggtccttttggtggnnaatttgggancctngggggtnttnacaagactccaagggaaaantttttttaaggggaaaattggaaanaaangaaaantcaacccttttattggggttcctctttttnattgggnaaagnaggggnaaatnaantggaaaanaaaaatngnnaagntcnnaaaaggggaangggggggaaaaaggaantaaaaaaaatgggnatggncntnttgnanccttnnggnctttttggggcgaaccattgggaaagaantntcacgcnatgccnccacnttttttttnttttatnncnncnnngttttncgncncccccccccccccccccccct

SEQ ID NO: 7281 - DNA, 961 bp, Homo sapiens
  misc_feature 122, 190, 193, 253, 292, 324, 332, 364, 379, 380, 399, 401,412, 415, 416, 419, 429, 431, 432, 438, 444, 445, 446, 454,455, 457, 458, 484, 508, 510, 511, 513, 522, 531, 535, 539,556, 560, 563, 568, 569, 571, 576, 580, 581, 585, 590: n = A,T,C or G
  misc_feature 595, 598, 600, 603, 608, 611, 620, 625, 629, 633, 634, 636,639, 647, 654, 659, 662, 665, 673, 679, 695, 702, 706, 709,710, 715, 719, 730, 735, 736, 737, 738, 740, 747, 755, 756,771, 772, 775, 776, 780, 781, 786, 790, 792, 797, 801: n = A,T,C or G
  misc_feature 802, 811, 829, 830, 831, 834, 838, 844, 845, 852, 866, 867,878, 880, 884, 886, 889, 890, 891, 896, 899, 900, 906, 916,917, 928, 930, 932, 941, 947: n = A,T,C or G
gaattggagctccaccgcggtggcggccgggcatgatggctcatgcctgtaatcccagcacttcgagaggcccaggcaggtggattgcttgggcccaggagttcaagaccagcctgggcatnatgaagaaaccctgtctctactaaaaatacaaaaaattagccaggcatggtagctcacacctgtagtnccngctactggggaggcagaggcacgagaatcacttgaaccaggaaaggcacagggtgtggtnagccaaagatcatgccacttgcacttccagcattttcangcctgggcgacagaagcaaagacctcaatctnaaaaaaanaaaaaaaaaaaaaaaaaagttccctcggcccncttttaaaaactaannggattccccccggggcttngnagggaaatttngannttnaaagcctttntnngaattncccgtnnnaaccttcnnanngggggggggcccccgggatcccccanccttttttgggttccccttttaantnngnggggggttnaattttgcngccncttngggcgttaaatttaatngggncanaaagnntnttttncctnngggnaaaantttgntantnccngtttnacnaattttccnccacnaaanaatnnanaancccggggngccattnaaaantgnttnaaaacccngggggngggccctaattggggnggagccntaantcnncaatnaaanttggcgggttnccctnnnntngcccccnttttttcnnagtctgggaaaaaannttnnttgnngccanctgngnttttnaatnnattttgggnccaacccccccggggggnnnggngcgnttttgnngtttttnggggccctttttcnntttttcttgtntnaaananaannncattnacnncctggngggtgtagcnnctgttgggggngncngggtttttntttttntttttaaagggggg

SEQ ID NO: 7282 - DNA, 1001 bp, Homo sapiens
  misc_feature 255, 256, 261, 305, 312, 334, 342, 347, 358, 359, 414, 420,423, 426, 427, 433, 436, 445, 468, 496, 497, 499, 500, 502,503, 520, 522, 524, 525, 531, 537, 543, 552, 560, 562, 580,594, 597, 617, 619, 626, 634, 638, 643, 647, 655, 656: n = A,T,C or G
  misc_feature 665, 671, 687, 691, 692, 698, 707, 709, 710, 716, 737, 738,741, 744, 758, 764, 776, 781, 790, 795, 797, 802, 805, 808,809, 816, 818, 828, 838, 850, 862, 863, 871, 875, 877, 879,880, 887, 894, 896, 897, 903, 906, 913, 936, 947, 952: n = A,T,C or G
  misc_feature 968, 978, 981, 987, 990, 995, 996, 1000, 1001: n = A,T,C or G
actactatagggcgaattggagctccaccgcggtggcggccgaggtacgcggggggccggagccgggccgggcagctagcagggcgcttcggtcttaggtatgtctttatcagcagcataaaaacggactaatacaagtacacaagaatacaaagaaaagaacagcagacactggggcccgcttgagggtagaggatggaaggaggatgtggatcaaaggcctacttatcaagtatttacgcttattacctgggnntttgnaaataatcttgtatacttgaacccctgcaacacgcaattttaanccatatnaacaaaccctggcagaccgtancttgcccngggcnggccgcttttnnaaacttagtgggattcccccccgggcctggcaaggaaatttcgaataattcaagnctttanttngannacccgnccnaaccttctnaaggggggggggcccccgggganccccaaccttttttggtttcccttttanntnngnngggggtttaaaattggncncnncctttngggggnaaaaanaatggggcnataaaccngntttttcctttggggtggnaaaaaatttgtttnttnccctttctaaaaaattcccnanaaaaaanaaccaaancccngggangctntaaaaaannggttaaaangccctngggggggggccttaanttgnngggggngccctaacntnncaaatnaaaatttgggggtttggggcnntanttngccccccttttttnaaaatnggggaaaaaacnttttnggggccacntttgntnttaantanaanncgccccncnccccccgggnggaaaggggnggtttgtcggtnttttgggggccnnttttcccntttntntnntttaaantaaaaancnnttgggnccntgggggnttttggttggggggggggggggnttttaatttcnctttnaaaaggggggggaaanccggtttttnccnaaaaantanggggnnaaann

SEQ ID NO: 7283 - DNA, 952 bp, Homo sapiens
  misc_feature 73, 195, 405, 423, 430, 460, 485, 493, 496, 508, 513, 528,533, 553, 565, 567, 571, 580, 581, 586, 595, 604, 605, 606,626, 630, 632, 633, 636, 639, 645, 649, 651, 652, 658, 661,666, 668, 671, 692, 695, 697, 699, 708, 713, 718, 722: n = A,T,C or G
  misc_feature 724, 729, 733, 736, 738, 741, 747, 749, 760, 761, 764, 770,772, 773, 787, 794, 799, 804, 811, 812, 819, 820, 836, 849,866, 872, 880, 881, 883, 893, 895, 897, 907, 913, 927, 928,930, 931, 936, 938, 949, 950: n = A,T,C or G
gaattggagctccaccgcggtggcggccgcccgggcaggtacaacatggatgcatgaaattttagacatgatnctaaatgatggtgatgtggagaaatgcaaaagagcccagactctagatagacacgctttccttgaactgaaatttccccataaagaaaaaccagatttggagttcgttcttgaaatgtcctnaccacaactgataaaaacacatctcccttcacatcttgattccaccatctatctggaaagaaaactgcaaagattgtctatgtggccagaaatcccaaaggattgcctggtggtcctacttacccacttttcacaagggatgggcttttcctttattgccttgaatccttcagaacctttagagggaaattttaatgaagaaatttcatngttccggggaaaagttgnttgggcngggtccctgggtttgaccaatgttaaaaanggatgggggggggccgccaaaaaanaacaatgncancccgggaatccntttancctttttcttcccgnggggnttttttaaaaaaaaaaattnccaaaaaccttngnggantcccccaannggggntgggggaantttttgggnnnaaaaaactttggtccaaggngggnannttnttnaaaacnaaanannttgggnccnccctncnccntaatttttgttggtaaatggnaangnanaaaatcccntgggnccaancccntnctttngggngancnttngggccngntttaaaaaacnnaanggggantnnccccccgggccttnggggggnatttnataanttaaganntttttgnnaccccccgccccttangggggggggcccnggaacccccactttttnttcccnttttaatnngnggggggaaangngnccccctcggnggaaanatatgggacaaaanntnnttccngnggggaaaaagnnat

SEQ ID NO: 7284 - DNA, 1023 bp, Homo sapiens
  misc_feature 94, 169, 174, 178, 185, 188, 189, 190, 192, 193, 194, 195,199, 200, 201, 202, 207, 211, 221, 226, 235, 236, 241, 248,249, 250, 251, 252, 258, 269, 277, 279, 284, 285, 286, 287,294, 315, 325, 348, 354, 358, 372, 381, 382, 387, 397: n = A,T,C or G
  misc_feature 399, 400, 413, 414, 418, 419, 426, 432, 434, 436, 438, 439,443, 445, 449, 456, 459, 460, 481, 482, 494, 507, 510, 518,523, 524, 526, 551, 555, 571, 574, 585, 586, 591, 594, 595,597, 605, 611, 617, 625, 626, 627, 629, 630, 634, 642: n = A,T,C or G
  misc_feature 645, 648, 661, 662, 663, 682, 690, 695, 696, 699, 704, 712,715, 720, 724, 728, 737, 743, 745, 754, 771, 779, 781, 789,791, 794, 798, 801, 805, 807, 808, 814, 816, 820, 821, 832,834, 839, 851, 852, 853, 865, 866, 869, 870, 871, 879: n = A,T,C or G
  misc_feature 884, 885, 891, 895, 896, 897, 902, 903, 905, 911, 912, 915,926, 938, 953, 956, 962, 964, 965, 971, 972, 973, 994, 999,1007: n = A,T,C or G
gcgtaatacgactcactatagggcgaattggagctccaccgcggtggcggccgcccgggcagggactttttttttttttttttttttttttttncttttttttttttttttttttttttttttttttttttttttttttttttttttttttttttttttttttttaaanggggnaagnttttatnggnnntnnnncggnnnnggggngggncccccccaanggggncggggcttnnaaatngtttttnnnnncaattntttagggaccnaaaaaaancnttttnnnnttttttnaaaaaaaaaaaaaaaaccccntttcccgggnaaaaacccccccccgggttttgnctcttntttncccagggaaaaaangaaaaaacnnttttngggggggggngnntttttttttgggnnagannacagggngggggnancntnnaatncntttnaaaaaanccnnccttttcccgggggggggggnntttttttttttntaaaaaaaaaagnggnaccccccnttgtnngnctctttgggggggaaaaaaaaaaanaaantttttttaaaaaaaanggnaaaaaaagggnngaaanggnncntctccccngggggngatttngttttttnnncnnaaangggttccnaanaanaaaaaaaaggggnnngccccccccccccccccantatttttngggannaanaacgnggggcccntantattntgtnttgnccccattgntgggcncntcttttccnaaaaaaaaaaaaaaaanccttttgngngaaaaatngnggngggnccntttntnngggggnanaaannttttttttttnanccccncaaaaggggggnnnaaagaaaatccnnttnnnttttttangaggnngggggntccnnnacccnntnggggcnnaanaaaatacaccncttttttttggngggggctttttttgnggngggggnanncccccnnngggggtttttttttttttctnaaaanaaaggggngtttttccaaaaaaat

SEQ ID NO: 7285 - DNA, 983 bp, Homo sapiens
  misc_feature 316, 324, 339, 367, 372, 385, 389, 395, 418, 419, 453, 460,463, 470, 481, 486, 488, 518, 520, 534, 535, 537, 542, 549,561, 567, 582, 583, 597, 603, 621, 636, 641, 655, 656, 662,674, 680, 684, 689, 696, 709, 723, 725, 726, 728, 729: n = A,T,C or G
  misc_feature 740, 741, 744, 746, 752, 760, 763, 766, 774, 775, 779, 780,784, 795, 812, 821, 836, 838, 846, 847, 858, 859, 860, 870,873, 874, 882, 889, 890, 891, 894, 895, 904, 908, 913, 921,928, 929, 934, 935, 946, 948, 950, 951, 954, 959, 960: n = A,T,C or G
  misc_feature 963, 965, 966, 968, 971, 972, 974, 975: n = A,T,C or G
ggcgaattggagctccaccgcggtggcggccgaggtactccagaattcacacagcattactcacaacagtcaaaagacaacccagtagtcaaaaagccacccaagtgtctaatacatgaatagataaaatgtggtatatccatacaatggaatattattcagccttaaaaaggaataaaactctaatacatgctacaacacagatgaaccttgaggacttatgctaagtgaaataagccacttgaaggacaaatactgcatgattccattcatctgagtttatctaggagtagcccagattaatgaaagcagaatnagaggttnccagggaacctaaanggggagaaaggggattgaaggccagttncttgntttaaataaaaantacnaggggntttcaagttttgggaggagaatnnaaaaaaaaaatcaagggcccggggcccccggggngggcttnacnacccctngttaaaccctnagccncntttttggggaagggacccaagggaaggggncnagggtttggctttnnancctcncaagggngttttaaaaccncccaancctttgggggccaanncgggggggaaaaantccttntttttttggcccaaaaanttcccaaaaaaaacntttcnttggggggacaagnnggcccnaccccctgggtnttcctnggcntcccntggaaangggaagggccccnaggcgggggggggnanncnnccagggggccnnggngnttttgnaaaaaaanccnttnggccaaannaacnnttgnaaaaccccccnttttttttttaaaattncccaaaaantttccccccgggtgngngggggacnntgggccccttnnnatcccctaanctnntttggggnggggggnnnggnnggggtaatntttnttttngaaccccntaaaagnnttaannggtttcctttngnannctnaaaannctntnntnttnncnncccccccg

SEQ ID NO: 7286 - DNA, 678 bp, Homo sapiens
  misc_feature 2, 392, 468, 469, 474, 495, 579, 588, 619, 629, 647, 649,657: n = A,T,C or G
gnccgcgtaatacgactactatagggcgaattggagctccccgcggtggcggccgaggtacgcgggggagatctggttgtttgaaagtgtgtagcacctccaccttctctctctctctccctctccctctcctgccagccaagtgaagacatgcttacttccccttcaccttccttcatgatgttaccattggaatgacatactgcatcctatagttataccatccactctgaaatcaatgtgaatttaacttcagttccatacagaaacttcttttccacagatggagtttaagcccaagcttggagtgcgatggtgcaatcccaactcactggaacctttggcttccaagttcaaagctatttttctggcttaaccttccggagtagctnggaattacagatgtgcgcccccatggaccagtaagaaaccggtgaactgggatgccaatttttatcacaagcttgnngtaanaatggcctttgtcccttcctntcacaatgccaattgggttaaccaagcaaaacagtgtggctcaagggggcgttggccagcttaattggtttttataagccctgngaagggganggaaaaaaacattttggttaacccagggccnagtggacaanaaaatgggatttcaaaanancccatggnggggaaaacttgaatgaatgg

SEQ ID NO: 7287 - DNA, 654 bp, Homo sapiens
  misc_feature 377, 481, 547, 549, 562, 588, 630, 636, 637, 638, 650, 654: n = A,T,C or G
gagcgcgcgtaatacgactcactatagggcgaattggagctccaccgcggtggcggccgaggtacgcggggcgcctaaagctgacgggtttgaaatggcttcgatgttagccgggacccgactcagatcgatgctatagaagacaaacaagggaaggtttttttccttttgcatcatggctcaatttggaggacagaagaatccgccatgggctactcagtttacagccactgcagtatcacagccagctgcactgggtgttcaacaagccatcacttcttggagcatctcctaccatttatacacagcaaactgcattggcagcagcaggccttaccacacaaacttcagcaaactattaagttaacacaaactgntgcattgcaacaacaagccccaacttgcaagcaactgcattacaacagcaatatttacaaccttaagcagggcctgtatagtgtgcaacaacagttacaggctntaaactaagtgggatcccccggctggaggaattcgatattaaacttattgatacccgccaacctcnanggggggggcccgnacccaaccttttggttcccttttagnggaggggtaaattggccccccttgggggtaaataatgggcanaagctnnnttcctttggtgnaaan

SEQ ID NO: 7288 - DNA, 728 bp, Homo sapiens
  misc_feature 165, 182, 185, 278, 291, 296, 300, 323, 342, 351, 352, 386,392, 394, 395, 398, 401, 402, 406, 407, 415, 432, 433, 444,454, 457, 460, 474, 484, 498, 511, 514, 517, 519, 521, 534,536, 541, 544, 562, 567, 575, 579, 581, 582, 584, 598: n = A,T,C or G
  misc_feature 599, 608, 610, 614, 619, 633, 635, 645, 646, 652, 656, 657,666, 667, 671, 677, 679, 683, 685, 687, 691, 697, 698, 703,712, 723, 724, 725: n = A,T,C or G
tacgactactatagggcgaattggagctccaccgcggtggcggccgcccgggcaggtacttttttttttttttttttttggtgtaaactgaaaaagtgtgtgtgtgccctttttacccgttctttgttctgtggtgtgccgtgtggtgtgagcttggtgttttgnctcgaggaaacatgggnaanacacaaagtaagcctactccgctaggaactatgtagaaaaattttaaagaaggggattttaatgggagactatgggggttacctatgacaccnggggaaaccttanaaacnttgngatgaaaatagaattgggccaancatttagaaaggggggttnggccatcannaaagggaagcctgggaaaagggccccttgttttntaaaangnnttngcnncaannggtaaacntggggtaagttaaagannacttaataccnatgtttccantanaanaaaacaccttgggnttggcaaaanttgggggcctaagnccccccccacaanggnggntnanacaaggggcccgncncccanccntttgggttttttattaanccaantgggaccnagantnncnaggggaaaaaaaannccccttttntnccanccggnggggaaaaaaaaancntggtttaaanntttttntttnnaacccccannattnaaaaangnaccntntngganggaaanngggancccattttncccaaaatctnnncct

SEQ ID NO: 7289 - DNA, 649 bp, Homo sapiens
  misc_feature 4, 7, 64, 65, 69, 71, 80, 86, 87, 89, 142, 238, 279, 292,298, 303, 331, 340, 346, 349, 362, 374, 377, 381, 390, 400,411, 455, 471, 478, 497, 519, 532, 533, 537, 542, 544, 548,551, 563, 564, 568, 569, 570, 573, 574, 575, 579, 580: n = A,T,C or G
  misc_feature 604, 613, 615, 623, 632, 636: n = A,T,C or G
cgtntcnactcctatagggcgaattggagctccccgcggtggcggccgcccgggcaggtacttnntttntnttttttttncttttnncnacaaacggtaactggtattcattttttaaaaaggtttcttttttcattattcngcatcttgatttttccccctgtaataatggatcttggagattgcttcgcatcagtacataagttgcctaatgtgccatctttaatacttagggggncctctgtttcatacttttaataaatgttttatttgggggcntgtaaagaaactnattatnctacnaatggaatgagggctgaaaataaaatgngactttggnctatgnggnggtcccccccctngtttaaccctgngtnaccngaaataatnaaatagcttntgggaatgccnctggaactccctggtcttttgtgggcctgaccccattggcaatntttgaaaaaaaataantatttanttaattttaaaaaaaaaanaaaatgggtttttttttggctnggagccggttttnncatnaccantnaaanggngttccttttccnnggcnnnggnnntgcnnccccatgcccggggttttcccccnggcccggcnangtttttcncccctttgngaangggcccccaaccg

SEQ ID NO: 7290 - DNA, 653 bp, Homo sapiens
  misc_feature 338, 351, 353, 450, 453, 454, 462, 464, 478, 528, 539, 545,548, 553, 559, 565, 595, 610, 626: n = A,T,C or G
acgactactatagggcgaattggagctccaccgcggtggcggccgaggtacgcgggggaaagtgtgtagcacctccaccttctctctctctccctctccctctcctgccagccaagtgaagacatgcttacttccccttcaccttccttcatgatgttaccattggaatgacatactgcatcctatagttataccatccactctgaaatcaatgtgaatttaacttcagttccatacagaaacttcttttccacagatggagtttaagcccaagctggagtgcgatggtgcaatcccaactcactgcaacctctgcctcccaggttcaagctattttnctggcttaacctncngagtagctggaattacagatgtgcgcccccatgaccagtaagaaaccggtgaactgggatgcaaatttttatcacagcttggggtaaaactggcctntgnnccttcctntnaacatgccattggntaacccaagcagacaggtgtgcttaaggggcgttgggcaagctcaattgnttcttaatagncctggnganggganggaagnaaccantttgcttaacccaaggccaagtggaccaanaaaatgggggttccnaaaaaacccatggtgnggaaaccttggaaatgaatgggcccct

SEQ ID NO: 7291 - DNA, 780 bp, Homo sapiens
  misc_feature 1, 4, 5, 7, 63, 159, 317, 320, 384, 429, 457, 472, 495, 507,516, 518, 520, 539, 546, 549, 561, 573, 574, 589, 591, 592,595, 607, 612, 618, 623, 633, 643, 644, 652, 663, 664, 670,682, 683, 684, 688, 696, 706, 711, 717, 718, 724: n = A,T,C or G
  misc_feature 731, 732, 742, 747, 758, 770: n = A,T,C or G
ncgnntnactatagggcgaattggagctccaccgcggtggcggccgaggtaccgcgggtgtgntttgtatatatattatatatacgtgtatacaccgtatatacatgtatacatgtatacgtgtatacatgtatatatgtgtataatatatatacacgngtatatatattatatatatataccgtgtgccatgttggtttgctgcacccattaactcgtcatttacattagggtatttttcctaatgctatcccttccccagccctcaccccatgacaggccctggtggtgtgatgttcccccgtcctgtggccaangtngttcttcattggttcaagtttcccacccatgagttgagaacatggctttgcacccggccgcttnttaaaaaggttttttaaaaaaacaaaagaccacccaaatgccccnctttcatttggggggaaaatggaaaagnaacttttttaaaagntaaaaaaccgaatttttttgganggggaaaaatanaatattttngntnggggttttaaaaaaaaggntaaattnttnaaacccacttcnttccattcaatnnttggtttggaaaaantnntcncttaaaggaatngtggnaaaggnttaanaaatttaagnaaaacccttnngttaaaanggggaaaaaanngggganaattaggctttnnntggnaaccttgnaccccagggnaaaantttttnntttaanaacctannaatacctggnatgcnccccccccccnaatttaggaaanttcaaggccg

SEQ ID NO: 7292 - DNA, 653 bp, Homo sapiens
  misc_feature 338, 342, 345, 372, 380, 420, 464, 495, 497, 514, 516, 520,545, 578, 580, 583, 596, 597: n = A,T,C or G
atacgactactatagggcgaattggagctccaccgcggtggcggccgaggtactggctgggtcccaggtttgtctcactgctgtcggcttgatggaggtctcctcaccacagaacccaagtctctgtgggccctcagagcctcaggtccctttctctctgccttccagcatgttgccttccttttggaaggtgatcctttcaaagatgtgtcatctcttcttcccaggagctccccatgccttcttttcccactgctccctttcaactctcagcgccgctgggggcaggccccaagtgctggctctgcctgccaggccgcactccgcgtacctgcccnggcnggncgctctaagaactaagtggatcccccnggctgcangaattcgatatcaagcttatcgatacccgccgacctcganggggggccccggtacccaactttttggttcccttttaagtgaangggttaaattgcgccccttggcgtaatcatngncaaaagcttgtttcctngngtgnaaaatggttattcccctcacaattncacacaaaaataacgagcccgggagcattaaantngtnaaagcctgggggnngcctaatgaagggggcctaactcacaatttaattggggttggcgcctcacctgcct

SEQ ID NO: 7293 - DNA, 879 bp, Homo sapiens
  misc_feature 10, 24, 32, 35, 45, 50, 51, 71, 80, 83, 100, 103, 114, 119,130, 134, 137, 138, 139, 143, 145, 151, 153, 159, 160, 162,173, 174, 176, 179, 181, 186, 197, 198, 204, 205, 207, 210,219, 220, 230, 241, 255, 265, 271, 281, 285, 297, 299: n = A,T,C or G
  misc_feature 302, 305, 321, 533, 562, 642, 643, 650, 653, 684, 693, 710,715, 722, 735, 739, 745, 750, 753, 755, 772, 776, 779, 780,782, 789, 794, 799, 803, 826, 833, 836, 838, 839, 846, 857,858, 865, 877: n = A,T,C or G
gcgtaatacnactactatagggcnaattgganctncacctccacngcggnngcgggcaacgtactgagctncacaaacgntcntcatggcttggtgcggnaangattaatcacngaagnacactccaagngatnctnnntgcntnatccanantcggtnncntacagagggtnngngtncnagatngctttaagaannaagccnngnacnttcacatgnntgtgttacantttgtaaagangttaccgtctgcantctaaaactncaaatntgtccaggantagntgacattaaacnanctnacncaacaaagccaactcncccctaaatcccccgtacctgcccgggcggccgctctagaactagtggatcccccgggctgcaggaattcgatatcaagcttatcgataccgtcgacctcgagggggggcccggtacccagcttttgttccctttagtgagggttaattgcgcgcttggcgtaatcatggtcatagctgtttcctgtgtgaaatgttatcccgtcacaattncacacaacatacgagccgggagcataaantgtaaaagcctgggggtgcctaatgaagtgaactaactcacattaaattgcgtttgcgcctaactggccccttttcaatnnggaaaanctnttgtgccaactggctttaatgaatcggccanccccccggngaaaaggccgttttgcntattngggcccntttttccggtttncttnatttanttganttnanttggccttggaactttncggnttnncngccaagncggtntttantttnaaatttaaaaaagccggttattnccggttnttncnnaaaaaanaaaagggggannaaccccncggaaaaaaaanat

SEQ ID NO: 7294 - DNA, 892 bp, Homo sapiens
  misc_feature 354, 483, 514, 529, 532, 533, 534, 537, 543, 555, 583, 616,617, 628, 634, 639, 642, 650, 665, 673, 676, 692, 694, 697,698, 700, 705, 706, 707, 711, 712, 713, 715, 717, 718, 719,720, 721, 722, 729, 731, 733, 736, 737, 738, 739, 740: n = A,T,C or G
  misc_feature 741, 742, 745, 746, 748, 749, 753, 754, 755, 757, 761, 769,770, 771, 772, 774, 775, 779, 784, 785, 787, 790, 791, 793,795, 796, 797, 798, 803, 805, 807, 809, 810, 814, 815, 816,817, 819, 826, 827, 828, 834, 835, 836, 837, 838, 841: n = A,T,C or G
  misc_feature 842, 845, 846, 848, 849, 851, 852, 854, 856, 861, 864, 867,872, 873, 874, 882, 883, 890, 891, 892: n = A,T,C or G
ctatagggcgaattggagctccaccgcggtggcggccgaggtacaacatggatgcatgaaattttagacatgattctaaatgatggtgatgtggagaaatgcaaaagagcccagactctagatagacacgctttccttgaactgaaatttccccataaagaaaaaccagatttggagttcgttcttgaaatgtcctcaccacaactgataaaaacacatctcccttcacatctgattccaccatctatctggaaagaaaactgcaagattgtctatgtggccagaaatcccaaggattgcctggtgtcctactaccactttcacaggatggcttcctttatgcctgatcctcanaacttagaggaattttatgagaaattcatgtccggaaaagttgttggccggggtcctggtttgaccatgttgaaaggatggtggggctgcaaaagacatgcacccggatcctcttaccttctttttacngagggatattaaaaaaaaatcccaaaaacantgaagatcccacaanggnnnttngggaanttctttgggaanaaaaactttggtcaaggttgaatgtttnttaaaccaaggatttgtcccacccattaccctnnattttggatgntaaatngaaanggnataaattnccccattgggccaanccatactnggnggttcccctgcccggntnttnnanttatnnntagnnntnannnnnntttcttntntnaannnnnnntanntnngctnnntngacntttatatnnnntnntttnttttnntnttnntncnnnntcttntnantnnttcnnnntntgctgtnnntttttnnnnnctnnttnntnntnntntnttgtnttnganttctnnntccttctnnccctctnnn

SEQ ID NO: 7295 - DNA, 928 bp, Homo sapiens
  misc_feature 380, 427, 499, 506, 545, 548, 561, 577, 580, 587, 609, 637,650, 677, 686, 707, 727, 740, 759, 760, 761, 769, 775, 776,778, 786, 787, 793, 841, 843, 850, 867, 868, 880, 882, 889,890, 891, 893, 899, 910, 912, 919, 920, 924, 926, 927: n = A,T,C or G
gggcgaattggagctccccgcggtggcggccgaggtacttttttttttttttttttttttttgctctactaaagtttaatttaaagatttattttcatcaagtcgctttcaacacaggccaccaactacccctttaacttgctgcctatattggaactgctgtttgactctggccaaaagtattagacattctgactttataaccagacttcactgaatttcttttaagagcaacaatatttttctatttaacagtccaagataccactggggatgtatatttggagtctttaaatatataaatcctggaagaattaacttattctgaataaaactgtttaattttatctacctagaaaacatacatagcattaattgtnccattaattgtaaagacatttcaatttcaacttactgcaaacctaanaagaaggcaagactttccaacccctggagtcgccaatcagaagtaacttgaataaataatcactgcaaaaangaaaaangaaaatgatgtttaataaaaagccccactggcatttggntantaagccttttacnaaaaaaccaaaaaccnccngctttcnaaattaaccaaccttcacttgntggaaagaacttccattcttccctattnaaaggcccatgcnttgggctttaaggccaaaaaacctggnaaacaaggncacaagccccttttttggacnggatcaacttaaccatggantaaaaattttttnttaaaaaaggtggggcaannngccccccnatttgnntntttttacnntcaagnggaacctttccccctttaaaaagggaaggaaagggggaaaggaaaaantntggggtntcccccccttttgggcnngggcccaaaatncntaaaaannntntaaatnaattccccccncnctttttnntttnanng

SEQ ID NO: 7296 - DNA, 1209 bp, Homo sapiens
  misc_feature 2, 3, 4, 6, 8, 9, 10, 12, 17, 22, 24, 26, 27, 29, 30, 31,34, 37, 40, 41, 44, 47, 48, 49, 52, 54, 55, 61, 62, 67,68, 74, 76, 78, 80, 83, 85, 87, 97, 100, 101, 103, 105,109, 112, 113, 116, 121, 138, 144, 145, 147, 184, 232, 264,285: n = A,T,C or G
  misc_feature 300, 362, 384, 402, 406, 441, 459, 471, 495, 537, 562, 563,569, 580, 596, 605, 629, 646, 655, 657, 671, 696, 704, 731,734, 775, 790, 795, 800, 803, 809, 810, 812, 824, 833, 839,847, 848, 857, 858, 864, 869, 881, 894, 897, 905, 909: n = A,T,C or G
  misc_feature 916, 925, 929, 940, 943, 964, 969, 970, 971, 972, 973, 978,979, 981, 982, 986, 990, 992, 998, 1003, 1007, 1013, 1016,1017, 1033, 1035, 1037, 1038, 1041, 1042, 1044, 1058, 1062,1064, 1068, 1070, 1073, 1077, 1079, 1082, 1083, 1095: n = A,T,C or G
  misc_feature 1096, 1100, 1103, 1113, 1114, 1121, 1123, 1124, 1125, 1126,1131, 1145, 1151, 1154, 1156, 1158, 1160, 1161, 1162, 1166,1168, 1171, 1176, 1191, 1193, 1195, 1200, 1205, 1209: n = A,T,C or G
cnnncncnnntntgttncatantntnntnnnganccncannttngcnnntgngnntctctnntttgnnacgtgngncntnttncncntatttttatnttnntntngagntgnncgngagancgactcactatagggcnaattgnnanctccaccgcggtggcggccgaggtacaaaagccaagnatgcccattgtgggcctgggcacttggaggtctcttctcggcaaagangaaagaagcggtgaaggtggccattgatgcanaatatctccacattgacatgngcctatttctatgangaatcaacatgaggtgggagaagccatccaagagaaaatccaagagaaggctgttgatgccnggaggacctgttcatcgatcantcaagggtgttggcccantttnctttgagagaccccattgtgaggaaagtccttttnaataaggaccctcaaggnacctgtaagctngagctatccctggacgtcttatcnttattcactggccaccaggggatttcaaagacttgggggatnactttttttccccaaaggattgatnnaaaggntaaatattgantcagtgggaaaaaggnaacggttcntgggatgcctgggggaaggccatnggcagcgagccttgggntgggaaccnangggggcttgggtgnaaaagcccctttggggggtcttcanaatttttnaaacccaactttccaagaatctggatnaanggcttttttgaaacaaaacccttgggaacttgaaaatattnataaacccagttganttaancccanggnttgganntngttcaactcccntttcccttngacgtncaggggannaaaaccttnnattccnatttncccttggccccnggggcggggcccnatnctaaaaantggnggggggntttaatttngccnccccttggggncanttaaaatccaattggggccantaagnnnnngtctnncnntggngagngnaaaaanttgtntatncccccnttnncaaaatttcccccacncnannatnncntatgccccgggatngccncnaaangntgngtananccnntcggggggggcnntatntgnagtggagacnntcacttntnnnnatgtnaaatgtggtttgtngtgctntcnantncnnncgcntntanatacntgatgagaaaacacntntnttgtncccanattn

SEQ ID NO: 7297 - DNA, 1424 bp, Homo sapiens
  misc_feature 7, 31, 35, 57, 65, 139, 145, 149, 152, 157, 160, 162, 165,169, 180, 187, 194, 195, 210, 219, 226, 239, 248, 260, 279,281, 285, 286, 291, 292, 304, 320, 322, 323, 334, 346, 352,373, 375, 391, 403, 417, 456, 466, 472, 503, 512, 518: n = A,T,C or G
  misc_feature 561, 584, 586, 593, 595, 612, 617, 619, 645, 648, 654, 669,671, 675, 682, 689, 692, 703, 707, 712, 715, 724, 728, 754,765, 773, 786, 790, 792, 793, 804, 805, 808, 820, 841, 842,843, 844, 846, 855, 856, 882, 888, 892, 894, 897, 902: n = A,T,C or G
  misc_feature 905, 911, 912, 913, 932, 933, 935, 936, 946, 951, 954, 960,965, 967, 970, 974, 981, 991, 998, 1002, 1003, 1004, 1009,1023, 1024, 1027, 1029, 1030, 1043, 1048, 1050, 1055, 1066,1068, 1094, 1107, 1108, 1125, 1132, 1134, 1137, 1138: n = A,T,C or G
  misc_feature 1148, 1158, 1170, 1176, 1180, 1184, 1186, 1191, 1206, 1210,1222, 1227, 1228, 1238, 1245, 1255, 1256, 1260, 1263, 1267,1284, 1302, 1304, 1306, 1313, 1315, 1319, 1323, 1328, 1329,1334, 1337, 1338, 1339, 1344, 1346, 1348, 1351, 1352: n = A,T,C or G
  misc_feature 1356, 1366, 1371, 1378, 1383, 1394, 1399, 1400, 1402, 1407,1410, 1414, 1418, 1422, 1423: n = A,T,C or G
gggccgnaaatttggggtagtcttccaccgncggntggggccgggcccgcccggggncaagggtnacaaaaaaaggccaaggatgcccattggtggggccctggggcacctttggggagggtctctttctttcgggcanaaagtngganaangaaanccngntgnaaangggtggggccnatttggntggccannaattatttccgcccncaatttggnacctggngcccctatttttnttatttgangaaatcaaaacncttggagggggggggggangnaaannccccnnttccaaggaggnaatgaattcccccagnannaaaagggcttnttgtattgcccnggaaangggacccctggtttcatccgncnaggcaaaggggggggnggggcccccacntttttcttttttgnaggaagaacccccctttgttgaaggggaaaaaaggcccnttttggaggnaaaggnacccccttcaaaaggggacccttggaaaagncttgggagncttaantccttgggaacccggtcttaattccttttaattttccaccttnggggccccaaccaaggggggaantntccaaangnaacttgggggggggaantgggnanccttttttttttcccccccaaaaagngantggaantaaaaaaggggttananttanttgaacncccaggnggngggaaaaaaanaggngaaanccnttttctttngggnattgggccctggggggaggggccccnatgggggaagngaaacccntggggtggggacncccnanngggggggcctnntgngtgagaaaaaancccccctttgggggggggggnnnntnaaaaatttnntaaaaaccccctctttttctccaaanaatacngggnanagnggggngtntttttnnnaaaaaaaaaacccccgggnngnntgtggaaaanatatnaanaacccncgggngnggncatnatcaccncgggggtggnggggggnggtnnnccccngttttctctttagnnggncnngaggaaaaaaaanattgngnactcncagttataccncnggggggcccggttttttataaaaaancagagggggggannccccccccgggggcttngtggggngnaannttctcaattntttaaatacntttatttgatantccccntgtngaancnactgnggggggggggggggncccngtgtaaacccanaaaanngtttttgtgnccccccnatttaaaagnngggnggntttntaattattccccccctngtgggagaataaaaaagngngntcaatanantgtntttnctccnnggggngannnaaaantntntanntccnctcatacaanattancaacacncaaanaaatatacaancgcgnngntgtanacntatnatanatannt

SEQ ID NO: 7298 - DNA, 1197 bp, Homo sapiens
  misc_feature 10, 11, 14, 18, 19, 20, 21, 24, 27, 28, 32, 33, 38, 45, 46,47, 49, 50, 51, 54, 55, 61, 62, 63, 65, 66, 67, 68, 70,73, 74, 76, 80, 83, 84, 95, 98, 99, 100, 101, 102, 105,107, 117, 123, 217, 273, 332, 339, 366, 389, 404, 438, 439: n = A,T,C or G
  misc_feature 441, 446, 449, 471, 475, 498, 503, 504, 508, 509, 528, 554,556, 558, 561, 571, 587, 593, 595, 599, 602, 609, 617, 618,642, 644, 651, 656, 657, 658, 682, 686, 693, 697, 703, 705,714, 722, 743, 745, 749, 750, 751, 754, 768, 775, 777: n = A,T,C or G
  misc_feature 783, 784, 786, 787, 788, 790, 807, 809, 812, 820, 835, 838,848, 850, 851, 853, 854, 856, 865, 869, 870, 875, 876, 878,879, 882, 886, 890, 892, 899, 902, 903, 905, 913, 918, 920,929, 933, 940, 948, 952, 956, 957, 968, 981, 982, 983: n = A,T,C or G
  misc_feature 989, 992, 1004, 1006, 1007, 1011, 1016, 1017, 1019, 1028,1030, 1032, 1035, 1038, 1041, 1042, 1047, 1052, 1059, 1066,1067, 1068, 1069, 1071, 1078, 1084, 1086, 1090, 1093, 1096,1099, 1101, 1112, 1120, 1123, 1127, 1128, 1135, 1139: n = A,T,C or G
  misc_feature 1141, 1144, 1147, 1150, 1152, 1160, 1161, 1167, 1169, 1177,1178, 1180, 1181, 1188, 1190, 1195: n = A,T,C or G
ccccctaccnntanatannnnttntannacannatatnattatannntnnnaanntaatannntnnnntnatnnancacnaannttaacttagcngannnnntgncntattcgactnactatngggcgaattggagctccaccgcggtggcggccgaggtacatgcattgggattcatcaaggaaacaaagctggaccaaagatggctgactagaancagtgaggactcttggctctcatggagagaaatgaaaggggcaagtaaatacagcnacttcaactgaaacattcatgttctcacattgagactgatcagggaaagagctcaaccnatgcatnaaaggagaaaagcaaagcagggcgacntgcccactaggaaaggacatggnaccaagggaacctcntccctgcccaggcaaacagttgaaatgaaatatnngnccccntancatacccggacttttttttcantggnaccttttgtaaacatcttttggngtcannggannattccccttccattggaanttcccacttccactcaaaagtacctntngngtncctggaacancaacaaaaagcccttncaaatngnaaangtnttcctgncttacaanncaaaacttggccccagggggtgtngncaacccnggaannncccccagggaaggcttttaacaantacntcttggngccnccaagngnatacccctngggtctcnaggggttgaaatttgtgcaancntcannngcnccaagttggggcanggtttcngnaaccannannntnataacaaccccccttangnagngggggaancttgaaaagcccccnagnagggccccantnntnncnattagcccncttnntgggnngnnccncacntttncntgtggcnacnntnatacaagngaatnanagaacctcnacangagtttnggggaatntacncagnnaaatgaccccnctttttttaatgnnngggttnctncccttccttggngnnatanggganngnagcttcctnantnggnatnggnngcaanccccngttactnttgtttnnnngntttaggnacaatntnaatntcnttnccntncaatggtgtgnctgtttgnaantatnnctcaaanctcnanccncanctnanagtaactnnagtggnanaccttccnnanncattaancngtttnct

SEQ ID NO: 7299 - DNA, 839 bp, Homo sapiens
  misc_feature 284, 497, 605, 615, 632, 650, 651, 662, 694, 705, 716, 718,727, 731, 786, 808, 817, 818, 827, 838, 839: n = A,T,C or G
ggcgaattggagctccaccgcggtggcggccgaggtacagtctcttcactcgccgataataagcgtctttgtccagagtcacagccatagccccggacgccgcttctcctcgggttccgagaatcacgcgaggtcccggctcagccacccgctctcggcccaagaatcccgcactctccccgcgtacctgcccgggcggccgctctagaactagtggatcccccgggctgcaggaattcgatatcaagcttatcgataccgtcgacctcgagggggggcccggnacccagcttttgttccctttagtgagggttaattgcgcgcttggcgtaatcatggtcatagctgtttcctgtgtgaaattgttatccgctcacaattccacacaacatacgagccgggagcataaagtgtaaagcctggggtgcctaatgaagtgagctaactcacattaattgcgttgcgctcactgcccgctttccagtcgggaaacctgncggccagctgcattaatgaatcggccaacgccgccggggaagaggccggtttgcgtattggggcgctcttccgcttcctcgctcactgacttcgcttgcgctcggtcnttcgcttgcngccgaggcggtatccanctcacttcaaaggccggnnaataccggttnttccacaaaatcaggggataaccgcaggaaanaacattgtgangcaaaaggccnanaaaaggccnaggnaccgtaaaaaagccccgttgctggcgttttttccataggcttcccgcccccctgnccaggcataaaaaaaatcgacnctcaagatnnaagggggcnaaaaccccacnn

SEQ ID NO: 7300 - DNA, 865 bp, Homo sapiens
  misc_feature 402, 433, 436, 440, 446, 449, 450, 493, 533, 538, 542, 543,562, 578, 579, 595, 598, 617, 621, 635, 640, 645, 652, 656,664, 687, 693, 700, 701, 712, 721, 726, 742, 744, 760, 763,774, 779, 801, 808, 812, 818, 825, 833, 839, 854, 864: n = A,T,C or G
  misc_feature 865: n = A,T,C or G
ggagctccaccgcggtggcggccgaggtacgcgggggagatctggttgtttgaaagtgtgtagcacctccaccttctctctctctctccctctccctctcctgccagccaagtgaagacatgcttacttccccttcaccttccttcatgatgttaccattggaatgacatactgcatcctatagttataccatccactctgaaatcaatgtgaatttaacttcagttccatacagaaacttcttttccacagatggagtttaagcccaagctggagtgcgatggtgcaatcccaactcactgcaacctctgcctcccaggttcaagctattttcctggcttaacctccgggagtagctggaattacagatggtgcgcccccatggaccagtaagaaaccggntggactggatgcaatttttatcacagcttgngtnagantggctntgnnccttcttttacatgcccattgggttaaccagcagaacagtggnctcagggggcgttggccagcttaatggtttttatagcccngggangggnngggaaaaaaaaaattttgntttaaccccaggcccnngtggacaagaaaaaanggnattttgaaaatacccagtngtgngggaaagcctgaantgaantgggncactttncggngccttgtncctgggggattttggggcacctntttgcnccctggnngaaggggttcntaaaaaagnaaaangcctttaaaagggccngncaaaaatggggcaaanagnaagcccggggnttccnccaaaatttgaattttggccangttttancaanaaatgnagggaancaaggttnggaatnggcccttccaaaaanaaaaaatggnn

SEQ ID NO: 7301 - DNA, 1258 bp, Homo sapiens
  misc_feature 4, 5, 6, 7, 8, 9, 10, 11, 13, 14, 15, 18, 19, 20, 22, 25,27, 28, 29, 30, 32, 34, 35, 36, 37, 38, 39, 41, 44, 48,50, 51, 55, 56, 62, 64, 77, 79, 80, 82, 83, 84, 85, 86,90, 93, 96, 98, 100, 101, 102, 110, 325, 373, 374, 397,408: n = A,T,C or G
  misc_feature 488, 490, 495, 507, 511, 521, 527, 562, 565, 575, 595, 603,624, 625, 626, 633, 646, 649, 652, 687, 692, 699, 712, 741,747, 768, 783, 785, 795, 812, 816, 825, 829, 831, 840, 854,864, 866, 868, 869, 872, 873, 890, 893, 902, 905, 909: n = A,T,C or G
  misc_feature 922, 924, 931, 938, 943, 949, 952, 954, 956, 968, 974, 985,989, 995, 1011, 1017, 1021, 1022, 1023, 1031, 1037, 1039,1040, 1053, 1057, 1059, 1061, 1062, 1064, 1065, 1074, 1075,1076, 1079, 1086, 1091, 1097, 1101, 1112, 1116, 1117: n = A,T,C or G
  misc_feature 1119, 1134, 1143, 1148, 1152, 1156, 1157, 1168, 1172, 1174,1192, 1197, 1200, 1201, 1206, 1211, 1217, 1222, 1235, 1236,1239, 1243, 1244, 1246, 1254, 1255, 1257: n = A,T,C or G
ctcnnnnnnnntnnntannntnttntnnnntntnnnnnntnttnggtntnnttcnnatttantntatatgagttgtntnntnnnnngagngtngtngngnnngtcttatnctataactctagggcgaattggagctccaccgcggtggcgatcgtatatgattgaatagtagagaaggcacctgcaagtagaagccaatggcaaaagattgataaagcatctttcctggactctggtgcttcgggggtgccaataactgcactctgagtaatcctggtcacttcatcaattgagaagagtttaagtcaggggacttatgattttntttctcaacaaggaccagggtgaacgtgttttttgcagtttcctaaanntatttatttttggcaaaaatttnaaaattaagcncattattattctttcttaaaaaggcctttccctgggaggccaaaccaaaccccaaggaggggtaaccccccccctttctncngtttnccccttttttcnagcntttttaattncccgtngccttaccaattaaagggggggtttcaaccggttncancccccaaatnttgggaaaattggttcccanttcaaccnattccattaaaaccaattcannnaaatccnatttggggttttnaanaangccctggaatttaccattggccttataaatttggnaattnaaaaacntccaattttgggnaattttttttaacccaaagccccaaccanggaacncaaaggaattaggaatttttngggaccttgggccantnggggcccttnccttttaaccaccttcnattngggttcccnggangnatttaaagnaaaaaccttttaancttttttggngncnnccnncccctttttgtttaaangcnagggggganatncaanattcctttttaananttatttngggaacnttggnggtttnttnantnttttttgggccntggggntttttgccctntaancccaangtctttggggaaaaantccccngggnnnttttaaanggaaantnnggccccttttatnattngntnncnnggggctttnnnaanttttttncaaancccccngggnttttttttggncccnntntgggccccaaattgnaatggccanaaggngtgntccnnagtgaaaaaantttncnttttaaatcttttggggnaaaanaannggccnttttnaaattnggggncccattttttttnnctntttnngnaaaaaacnntnc

SEQ ID NO: 7302 - DNA, 938 bp, Homo sapiens
  misc_feature 44, 64, 114, 261, 272, 298, 337, 378, 379, 406, 416, 451,472, 482, 483, 494, 495, 510, 528, 536, 537, 538, 551, 555,558, 562, 563, 570, 573, 575, 576, 581, 587, 588, 592, 599,602, 611, 612, 614, 620, 625, 626, 637, 641, 642, 644: n = A,T,C or G
  misc_feature 651, 652, 660, 681, 685, 690, 694, 701, 715, 716, 717, 727,730, 731, 734, 739, 742, 744, 749, 757, 759, 760, 766, 770,773, 782, 788, 789, 790, 794, 795, 802, 803, 804, 810, 811,818, 824, 837, 843, 844, 848, 850, 852, 853, 860, 861: n = A,T,C or G
  misc_feature 862, 898, 904, 905, 908, 910, 923, 935, 936: n = A,T,C or G
agggcgaattggagctccaccgcggtggcggccgaggtactttntttttttttttttttttttncctttattctcagcaaacagcaattccactgccagagaggtagtttcctnttttctgcaccatgcagctccctgtcaacagcttatatacagcggtttccacttgtgtctcctgtgttaagctctaagcaacttgaggacggggctcacactctagtcagtgcttgtctgaaagcagcataatatgagtcaccagtntaacacagccncataattaaagattttttaacagccncattataaatgtaaaagaaaaaagtcgggcccgctctanaaactagggggatccccccggggctggaaggaaatttcgannttcaagcctttatcgaatacccggccnacccctcgangggggggggccccgggttcccccaactttttttgnttccctttaagggggaggggnttaaattggnnccccctttggnnggaaaaaacattggngccaaaaacctggtttcncctggggnnngaaaaattttttnttcnccnttcnnaaatttnccnannaaaanaattanngaancccgggnggnccttaaaanntngtaaanacccnnggggggggccntaanngnggggggnngccaaccnccccatttaaaattggggggngggncctcnaccnggccccnttttttcccaaagnnnggggaaaaanctnngtnggggnccnancttgntttttaanannaaattngggnccnccccccccngggggnnnaggnnggttttnnntatttnngggggcntttttnccctttttttgcntaaaannaaantncnntggggcnnnggggggtttcggggttgggggggaggggggttttantcttcnnttnanaggggggggtaancgggtttttccnnag

SEQ ID NO: 7303 - DNA, 1220 bp, Homo sapiens
  misc_feature 3, 7, 8, 14, 16, 21, 22, 23, 25, 26, 30, 31, 35, 36, 37,41, 42, 51, 53, 55, 58, 59, 62, 63, 64, 66, 72, 74, 79,80, 81, 82, 83, 86, 87, 88, 92, 95, 101, 103, 111, 113,118, 125, 362, 404, 408, 433, 455, 461, 463, 466, 477, 499,511: n = A,T,C or G
  misc_feature 517, 536, 542, 546, 549, 550, 552, 563, 577, 581, 585, 602,607, 637, 639, 642, 651, 654, 658, 663, 676, 677, 678, 679,690, 698, 703, 712, 716, 720, 748, 750, 757, 772, 779, 780,797, 801, 805, 823, 838, 842, 851, 855, 865, 867, 872: n = A,T,C or G
  misc_feature 873, 874, 875, 876, 878, 879, 881, 885, 886, 887, 891, 894,903, 923, 926, 930, 932, 934, 950, 951, 952, 954, 958, 961,967, 970, 974, 981, 984, 989, 996, 1000, 1001, 1015, 1016,1017, 1018, 1020, 1022, 1026, 1044, 1049, 1051, 1053: n = A,T,C or G
  misc_feature 1054, 1055, 1058, 1062, 1065, 1066, 1071, 1081, 1086, 1097,1099, 1125, 1126, 1127, 1128, 1132, 1134, 1136, 1142, 1156,1160, 1161, 1162, 1177, 1185, 1192, 1193, 1194, 1196, 1197,1201, 1206, 1210, 1213, 1219: n = A,T,C or G
ccnacanntcttananttttnnntnnattnnttannncacnncttgtattntncncannaannntntcggtntnttcannnnnccnnnatgngtntttcantnttgcgtantntactnactatanggcgaattggagctccaccgcggtggcggccgaggtacgcgggggctcacagtgggatcctgttaggtgtgggtggatgagagtcagggtccatcagtgtattcatttaactgttcatttgtataaccccgtttaagaatactgtcctccaagtgccaagaatggtgctcaggggattaccacctaattgctgactcaagttgctggttttgcaatgggccacagaactttctcttngtagggtggccatgagtttgaagaaaaggttcttggattcangagnattaggggggcccccctcttgattnaacccttccaccttccttattngggtantngangacaaagaagncttgggcccaattgccgccccngttcctttggtngggagnaaccggaacaattccaatngggggncttnccnncnaaggggtccantttggattggaccncccnaaanatttcaccacccgaacnttgcnaggctttggggaagaaccaagaaggaattncngangggggtttnttnaaanggggnggggaaacccttnnnntctttttccanttggaaanaaaancaaaccccncctnaaangagggggaagggtaaaaaaagggggccntncccaaangccccccaaaatttngccccannccttctttgggggtttngaancccntgggggaagggtatgaanttccccccccaaaanattnttaaaggancctntcgcccccangnatttnnnnngnncngaannntttntcngggcccccnaaaatttttaacccaaggcnttnggtntntnggaaaaaaaacccccnnnangggnggnttttgnacnaaantgccccnttntcccngggggcngggnncgttttttaaaaannnnangngggngattccccccggggcttngtggngnannnttntatnatnnaaaancctttttttngtatntccccctcggnancctcttagggggggggggccccccgnnnncccncnantatttngttcccccctttantatnnnggggggttaatttgncccccctngggcgannntnncatnggccnaaangantttttnc

SEQ ID NO: 7304 - DNA, 1314 bp, Homo sapiens
  misc_feature 2, 10, 13, 21, 25, 29, 31, 36, 41, 42, 43, 49, 58, 60, 61,63, 66, 68, 70, 71, 73, 76, 78, 80, 81, 82, 83, 87, 88,92, 95, 96, 98, 107, 112, 115, 117, 118, 119, 123, 133,140, 144, 146, 148, 150, 154, 158, 162, 240, 263, 335, 363: n = A,T,C or G
  misc_feature 390, 396, 450, 459, 469, 470, 500, 511, 515, 532, 537, 541,550, 551, 558, 561, 565, 573, 576, 600, 605, 606, 619, 631,672, 688, 689, 707, 710, 712, 715, 718, 731, 758, 777, 786,789, 796, 798, 806, 810, 815, 818, 824, 829, 836, 844: n = A,T,C or G
  misc_feature 870, 878, 883, 893, 898, 899, 903, 905, 906, 915, 918, 921,932, 933, 935, 937, 939, 943, 945, 947, 950, 954, 955, 960,961, 964, 966, 974, 977, 978, 985, 987, 988, 994, 996, 1003,1004, 1009, 1013, 1035, 1036, 1037, 1040, 1042, 1050: n = A,T,C or G
  misc_feature 1054, 1056, 1058, 1060, 1065, 1067, 1073, 1085, 1087, 1092,1093, 1118, 1131, 1137, 1139, 1140, 1143, 1150, 1162, 1166,1168, 1174, 1175, 1176, 1179, 1180, 1183, 1185, 1188, 1189,1198, 1202, 1203, 1214, 1215, 1217, 1228, 1229, 1233: n = A,T,C or G
  misc_feature 1234, 1238, 1239, 1240, 1243, 1245, 1247, 1248, 1252, 1256,1258, 1263, 1266, 1279, 1280, 1285, 1288, 1299, 1304, 1307,1308, 1313: n = A,T,C or G
cncaaatctntcntttcactnaacntgantntcttnttttnnntggggntttcgggtntnntntantntnncnatntnannnnttannactnggnntntgaatccgnatatnctnannnctanttagttaatnggaactntacngnangnggcnggcncganagtaccgccggggaggtacaaaatagccctgggctctgcaagctccacaggctcctggggtggagtccaaaatcactnattgtttgtgaaagctggagctnacaagcaaaaacaagcccacccatgaaagcttgttcggtgtggtctcctgctggtcaacgcctgggcccttntgcttgcttacccaaggcccaatgcccngaggtttctgccccaggcttctttggnttttcntgaagcctggtttaagactttttctttcttttcaattaaggtggaaaacccttnttggtttcnaaaagttttnnaggttcttttggcccaaaaatttttgggantggcccccccnttcnttggggaaaagccttgntttgnccangccccaaannttttaanggnaaanttgaaaanaangaattgccaaccggggaatccaanaaatnnttcccccttttcnaaaaaaaacctnaaagccccctttcatttttgggcggggaaaaaggtcccctngggtgggaaaaaaatnnttttggaaaaagaaaaantgntnaanttnggtgggttggaanaattgggttaaaaaaaaacctttttcnaatttcccttgggggtttncccaccttnggngcttttncnaaattggnacanccccnttngaatcntttcncttgggncagaaatngtataaaaaaattttttcaaaccggncttttggnttttnaaaaaaaaanacaanntttngnnttctttcanccnccnaaaatatatannanantnttancncntantacnnggggnnaantngggttccnttnncccgggngnnggggcngntttttannaaaanccangtgggggatcccccccccggcnnngcnangggaaatnttcngntntnttaananctttanttgaaatctccntncaccnncccatgagggggggggggccccccntataaccccaaantttttntnnttnctttttnatgtggaggggntttnantatgcnnnccnntgnantgnnataactaangggnntcataaagatnntntttctcttggnntgannaaannngantntnncctntaananaaaantgnctacacaaaaaannataanccngtggaggatcntaaanaannttaang

SEQ ID NO: 7305 - DNA, 1037 bp, Homo sapiens
  misc_feature 1, 2, 135, 143, 168, 170, 174, 210, 257, 276, 285, 291, 299,317, 321, 326, 328, 334, 339, 345, 346, 351, 352, 358, 368,371, 373, 374, 382, 391, 394, 407, 412, 413, 414, 418, 422,423, 424, 436, 441, 444, 448, 453, 455, 465, 477: n = A,T,C or G
  misc_feature 478, 482, 489, 492, 502, 503, 516, 523, 526, 531, 532, 537,541, 545, 560, 561, 563, 564, 566, 567, 569, 571, 575, 577,582, 588, 589, 591, 592, 595, 597, 604, 619, 621, 623, 628,629, 631, 635, 636, 637, 638, 642, 643, 653, 655, 657: n = A,T,C or G
  misc_feature 659, 661, 665, 666, 670, 674, 678, 682, 691, 692, 695, 698,699, 700, 703, 704, 707, 709, 710, 712, 715, 720, 721, 723,725, 733, 735, 745, 748, 752, 753, 754, 756, 770, 776, 777,779, 782, 784, 785, 786, 787, 795, 805, 812, 815, 819: n = A,T,C or G
  misc_feature 825, 826, 827, 829, 830, 842, 844, 847, 850, 855, 866, 869,873, 876, 883, 886, 889, 892, 899, 908, 919, 922, 928, 930,933, 950, 960, 961, 963, 965, 971, 979, 991, 992, 997, 1002,1006, 1010, 1013, 1014, 1015, 1019, 1026: n = A,T,C or G
nncactactatagggcgaattgggccctctagatgcatgctcgagcggccgccagtgtgatgggatatctgcagaattcgcccttagcgtggtcgcggccgaggtactttggcctctctgggatagaagttattnagcaggcncacaacagaggcagttccagatttnanctgntcatcagatggcgggaagatgaagacagaaggtgcngtgcacagttcgttgatctccagcttggttccctggccaaaactgtngggtgagctaccatactgntgacagtgnttcacngcaaaaantttatgctacaatttggngaantgatnanagtganattcntgaccnnatacnnacgtgncactttatcntgncnntggatgcnatatgggcnatncatgtatgcattnataannntcgngggnnncctcgggtgtcnactcntcnaacntttcnangatagattanctcgcgacacanntatnatccttnaanattcttgacnngagacactttaanatgatgnccncattnntatgncctnggtntcacataacatatgnngnnanntnanacantntatcntgtcanncnnatntncatcacncttcgttacactttncncntgatnncncacnnnnaaanngatgcgtgtnanancnanacannattnatgncctnattntatacttgnnagncannntcnngtnanntnatncatcnngntnactacacnanatgatattangtnatcnnncnatgtcgtgataatntttatnncntancnnnncgctactnatgactagtnaatatcntcntttnatcacnnnannttgtctactctntntcntgngtctntttgatgtgtnatnatcncanatcatanctncgntgnttagtcnatgacgctnttgacgtcttnatnatgatntnatntcgtctttacgacattncatgatatgnnancnttctcnacttaatnatgtatattttnngactntgtcntcantatntcnnntagnttatatntctatattacg

SEQ ID NO: 7306 - DNA, 933 bp, Homo sapiens
  misc_feature 36, 150, 168, 187, 224, 266, 305, 375, 378, 405, 429, 438,439, 454, 458, 464, 472, 485, 491, 495, 516, 536, 537, 538,544, 545, 548, 550, 558, 559, 563, 565, 567, 570, 578, 581,585, 617, 633, 635, 636, 637, 641, 644, 647, 651, 657: n = A,T,C or G
  misc_feature 672, 674, 680, 690, 692, 694, 695, 699, 704, 705, 707, 709,725, 733, 740, 743, 744, 747, 748, 754, 756, 757, 762, 765,769, 771, 774, 775, 777, 783, 784, 786, 788, 792, 795, 797,798, 801, 802, 805, 809, 812, 813, 814, 815, 817, 818: n = A,T,C or G
  misc_feature 819, 824, 827, 836, 838, 846, 851, 852, 855, 860, 865, 871,876, 882, 893, 901, 903, 904, 905, 908, 909, 910, 913, 915,919, 925, 927, 930, 931: n = A,T,C or G
ggccctctagatgcatgctcgagcggccgccagtgngatggatatctgcagaattcgcccttagcgtggtcgcggccgaggtacgcgggaatcattccttccacaactgctgcatgtccctgtgggtgaaacagaacaatctctgccctntctgcagcaggactgggnggtccaaagaatctggcanatgagagtggttagaaggcttcttaggcgcagatgtncagagccctggtggatcttgtaatccagtgccctacaaaggnttgaacactacaggggatgaattctttaaataggggccngatggatctgtggttctttgggactcatcaaagccttggtttagcattttgtcagtttatcttcagaaanttntctgcgaattaagaagataatttattnaaagggggtccttcctacctctgnggcgtgggnngcgcacacagcttanaagntgcttntaaaaaanggaaagagctccnaattgnattnccctttattaattttacccantttcatatccaaccggccgnnngaaagnnggntnagaaaaanntttngnangcntatgggtngancagnttaaataagaaatggttcaggtaaccaaatgnaagtgcgttttaaatncnnnatcncanagntatncgaaangttcctgtgccaggncnggtcanatttaaaggngncnnaatnccaanncncnttggcgcccgttactngatggganccgatgnccnnggnncccatntnntggcngtnatantnatnngncaatanngngnttcncgngnntgnnaantggnttnnnntnnnacaanatntcaccaaancntactatgncggcnngtnataanatgcnaaaacnccagnggggcntccattagagngggacatnannntannntgntntgcnaggccntntcnnct

SEQ ID NO: 7307 - DNA, 938 bp, Homo sapiens
  misc_feature 2, 4, 12, 16, 19, 21, 34, 37, 45, 191, 272, 321, 362, 392,395, 402, 423, 427, 429, 432, 438, 463, 467, 474, 485, 487,489, 500, 506, 511, 515, 521, 526, 527, 529, 537, 546, 553,558, 571, 574, 577, 602, 612, 614, 628, 636, 639, 650: n = A,T,C or G
  misc_feature 651, 653, 663, 664, 673, 682, 699, 704, 709, 716, 717, 722,730, 731, 734, 736, 742, 750, 753, 760, 764, 767, 782, 783,791, 800, 802, 810, 812, 813, 817, 819, 826, 832, 836, 839,845, 849, 854, 865, 866, 874, 876, 877, 883, 886, 891: n = A,T,C or G
  misc_feature 893, 894, 908, 911, 913, 917, 922, 926, 937: n = A,T,C or G
ancnctacttanggcnacnantcctatagggcgnatngtgccctntagatgcatgctcgagcggcccgccagtgtgatggatatctgcagaattcgccctttcgagcggccgcccgggcaggtactgtgacttccttgggggctcaagctgtgtctcatccccagcacccagaactgtgctggcatgtgtngggcacttaatgaagcatgaacaaatgagcaaacaaatgaagaaacggctcagggatggagtgagggaagcaaattagaanatatcttatctgaagcacctcacgtcagtatttctttagtagaatattncttgtgagtatacatagttctccagtgttcccactgttcangcttacagagtttgttcgaacaatgcatanaanaagtatnaagcaatttttatgtcacagntgananctnttcttnctaccacttgatattgagtaaaatntttngctcttnataggaattanananattttattttnagaagnttaantttnaaatgnctttnnanggccaggnccctccaanaaaaagnaaatntttacattacctngantanctaatcaaatccttgggaaaaaatnatttacattncntttatcttcaaganttggctcntantcttacccctnncnttttgggaannaagcttaangaaaccttngggcctcgaccaacgcntaatnggggnaatttcnnggcanttggcggnngtnantaaggngatccccnaantggggtncaantcntgggtctaatttatnngacttganttattcccngngttgaaantnntttncntgtttcnaatttncccnaanattagngctntaaancttaataggannaaatcctngnngtgctnttnggtgngnnctactctcaataanttngnttgncctcnattnccttcttttcnt

SEQ ID NO: 7308 - DNA, 927 bp, Homo sapiens
  misc_feature 2, 8, 243, 462, 463, 472, 494, 496, 515, 538, 552, 559, 577,585, 605, 613, 617, 627, 642, 646, 649, 650, 657, 658, 670,686, 687, 697, 698, 709, 721, 725, 728, 742, 746, 767, 768,770, 784, 785, 790, 796, 802, 808, 811, 813, 816: n = A,T,C or G
  misc_feature 817, 821, 825, 828, 832, 835, 838, 845, 847, 859, 862, 863,869, 873, 875, 876, 878, 879, 881, 885, 889, 895, 899, 903,907, 913, 915, 926: n = A,T,C or G
tnctactnaatgtatacgactcactatagggcgaattgggccctctagatgcatgctcgagcggcccgccagtgtgatggatatctgcagaattcgccctttcgagcggccgcccgggcaggtaccttaagtatcagctcagccacagtggggtagagcaccaagcgagctcttggagtccccaattcaaggccttggctcttggatggcatttctggatttgcacttgaccacaggcaagtncactgccctgaaggatgtgtcctaagcctggcagaacttactataaactgtctgaggagcccttgggccttaagtgaacatcggcagtagcctggcaatactctcttgtgggcctgtggtagtaatggtgatagggaagaggatccttttgcctgggaaaaaggggaagggaagaatggaaaatggccttttctttatgggtttgagggacagcttcanncccagtagnaatagagccccagggtagatcntntaaaggatttttgactttnaagttccctagcttcccacttanggcctgggggtttntttggtnacccttgaaggggaaggncaacaaancttggttgcttttggacctngtggtttngtanagcccttaanggcctttgaccaaanattnganntttgctnnctatgggggttncaaaggggacctgggnnaaaaaccaanncttggtttggntttaaggttttnaccnaancccagcctatattntatnatgggcccaaggggggttttnntnacccttatccccanntttangggggntaaaanaccctngcncnaanncacnttanggngaanttnaanatacatngnggcccgttatantgnnatcctncttntnncnnancttngtgnaaaaantggnaaanattnttctcngnaaaatttattnt

SEQ ID NO: 7309 - DNA, 1048 bp, Homo sapiens
  misc_feature 1, 2, 4, 13, 16, 206, 259, 262, 267, 275, 277, 280, 282,293, 294, 296, 298, 305, 306, 307, 308, 313, 317, 319, 324,325, 330, 333, 334, 340, 341, 342, 343, 344, 346, 348, 349,356, 362, 363, 365, 368, 375, 377, 383, 387, 390, 393: n = A,T,C or G
  misc_feature 394, 401, 408, 414, 424, 426, 427, 432, 434, 436, 441, 442,449, 459, 462, 468, 469, 473, 474, 485, 494, 496, 497, 499,504, 507, 511, 513, 518, 520, 523, 524, 529, 533, 539, 540,544, 546, 553, 557, 561, 565, 568, 570, 575, 577, 582: n = A,T,C or G
  misc_feature 583, 584, 588, 589, 592, 600, 601, 606, 608, 609, 611, 612,614, 622, 623, 626, 635, 638, 651, 656, 657, 667, 670, 673,679, 683, 691, 695, 699, 709, 718, 719, 722, 724, 726, 728,733, 735, 745, 748, 749, 755, 761, 763, 765, 766, 769: n = A,T,C or G
  misc_feature 773, 776, 778, 784, 786, 787, 788, 791, 793, 794, 795, 804,816, 817, 822, 823, 828, 832, 834, 835, 839, 840, 849, 851,852, 861, 863, 865, 867, 873, 874, 878, 883, 885, 894, 898,910, 919, 923, 931, 932, 936, 937, 942, 946, 953, 956: n = A,T,C or G
  misc_feature 957, 960, 966, 978, 979, 984, 985, 986, 992, 999, 1002, 1004,1005, 1010, 1013, 1015, 1018, 1020, 1024, 1026, 1030, 1031,1039, 1047: n = A,T,C or G
nncnctactatanggnatacgactcactatagggcgaattgggccctctagatgcatgctcgagcggcccgccagtgtgatgggatatctgcagaattcgcccttagcgtggtcgcggccgaggtactgcggcgggtaggcctaggattgtgggggcaatgaatgaagcgaacagattttcgttcattttggttctcagggtttgntataaattttttattattatgggctttggtgagggaggtaaggtggtacatantgnataantatactancnttncntgcgtgacggnnantncacttgnnnnaattntttntntctcnnatctngtnnataggnnnnnantnnaactttnctcaannanccnattgctntnctgacntttnganatnnatttccncataccntatgtntagtgtattnanntattnangngtgannggagatncttaataccngtngtttannatgnnaacaaaatganaaaaattantnntntttancanattngnatgcntnctnnatctngttntgggtnntttntntgccccnttanactnttanatntntaatntntcttnnntganntcntttcacgnnatatnanntnntntattatannatnatatgagtnatncctattaacaagntaaanntgatgtcatnacntgnattgtnattntatttacntatnatantagatattanttatatgannatntnangntgacnanataatatatnatnntcatanttgtgntnannttnttanatnanatcatntnnnttnannntattaattnatgatattatannactannctttnaaanannacanngattattanannattagaatnangnancattanntttnataantntcataaaantaanattatatgtcantataacgtnatanttattatnntccnnctatnaatnaacaatnatnnatnacgatnataatacattannataannnataatntatgatnatntnnatatnatntnacnanaaantntatnntcatattnatatcatnt

SEQ ID NO: 7310 - DNA, 899 bp, Homo sapiens
  misc_feature 429, 493, 542, 555, 556, 560, 570, 641, 642, 669, 681, 683,687, 702, 704, 707, 712, 720, 742, 747, 754, 755, 756, 764,765, 766, 771, 777, 790, 797, 803, 810, 811, 819, 823, 825,828, 829, 840, 856, 858, 863, 870, 872, 873, 878, 891: n = A,T,C or G
  misc_feature 897: n = A,T,C or G
tcactactatagggcgaattgggccctctagatgcatgctcgagcggcccgccagtgtgatgggatatctgcagaattcgcccttagcgtggtcgcggcccgaggtacgcgggaggcctggtgtggtggcccatgcctgtaatcccagcactttgggaggctgaggcaggcagatcacctgaggtcaagagtttgagaccagctggaccagtgcggtgaaacactgcctctactaaaaatacaaaaattagctgggtgtggtggtgcatgcctgtagtcccagctacttgggaggctgaggcaggagaattgcttgaaccccggaggctgagtttgcaatgaagtcaaagatcacaccactgcattccagcctgggcgatagagcgagactctgtctcaaaaaaaagaaagaaaggtggaaccctttgnagatagcaataggaagacaaaggagaaggcgtttgctttgaagaccctactaagaataaaatcnactgggagaactaaataaaagcctttggcagaaagagcttaagcttctncttccaagaacannaatnaaaatggcangaatacttaagaaaagtcttaattaaaatggcttgctgatctcctagttaaacaaagtgatattcaaaaannagttctttgcccaaaaaaaaagaaagntttattgcccanangaantaaaccccatgtttnanacncatanaaaattgncttataaaaatttgtgaggttnttttngcccatnnntaaaattnnngtttnacctgncccgggccgggcntttgaangggcgnatttcannacactggngggncnttnntttggaatccnaaacttggttacccantnggcgnaatcatngnncatancatggtttcctgngtgaancg

SEQ ID NO: 7311 - DNA, 941 bp, Homo sapiens
  misc_feature 4, 23, 32, 33, 34, 37, 44, 47, 265, 440, 457, 476, 563, 609,612, 639, 659, 661, 662, 683, 692, 694, 707, 708, 709, 722,723, 738, 739, 744, 745, 755, 758, 764, 768, 774, 779, 785,787, 812, 825, 826, 830, 832, 835, 849, 854, 863: n = A,T,C or G
  misc_feature 865, 874, 875, 877, 878, 897, 901, 907, 917, 926, 927, 933: n = A,T,C or G
atcnctactatagggcgaacgantcctatagnnncangcgcgcnctntagatgcatgctcgagccggcccgccagtgtgatggatatctgcagaattcgcccttagcgtggtcgcggcccgaggtacacagtggtggaaaattggcacagaacctacaagcatttcaatcacaataaggctgtccatgatttatctgttcaaacttgatgtccattttctactgatcaagttgaaaagaaaaaacctattctggccaggcacggnggctcatttttattttgtgtatttaatagaagatggggtttcaccatgttggtcatggctgatcttaaactcctaggaaagtcaaatttaaaaaaaatagcaatgacaatgcttaagttttaaaaaaaagttttatcagcttaagtctccaaaaaccagggaagaaaaatatttnaatggattaaaaacaangtatgacctgggaaagatnttagactaaaaggaggaaatccaattagcagggtgaaaatgttaaagggaaagctttcaaatccaccaactggaaaaaaggcatttntaattggcccacccaaattaccccgcgtacctgcccgggccggccnttnaaaaggggcgaattcagcaccacttgncgggccggttactagtgggntnncgagcctccggtacccaagcnttgggggtnantcattggtcatannntggtttcccgttnngaaaatttttttccnnttcannaatttccccncancataantgancccggnaggcnttaaantntaaagccttgggggggcctaatganggggcttaactcnntttnanttncgtttggctctctngcccnttttcaaancnggaaaaccnncnngcccacctggctttaaatnattngccacnccccgggggnggcgggttnnttttgnccctttcc

SEQ ID NO: 7312 - DNA, 902 bp, Homo sapiens
  misc_feature 9, 33, 544, 651, 661, 664, 681, 684, 690, 712, 723, 744,799, 808, 821, 824, 826, 830, 851, 867, 873, 883, 888: n = A,T,C or G
agaaaattnaaaccttttacgactactatagtncgaattgggccctctagatgcatgctcgagcggccgccagtgtgatggatatctgcagaattcgccctttcgagcggccgcccgggcaggtactgattaattactgcagtaacctggcaaagagatctctcaaaagccctgcagcatcaaggtttttatgaatggcttagatgaggtggatacagcattcctgacttgtcgagtcttagaaacacaaagctactgctacaagagtggccatggggtcccaaaagagtctttacacacattacaaaaggctaaatctaaaaggattcaacataataaggtaagtggaagttccgcctggaactcccagaaatttagttgctcacaaaaaagccaaaggccaattcagtcttaatctgatacactagaagcacagggtcaaaacaggatgatcttccctgtcgcttatcccccgactacacctgcagaaatgtgtccattcaaaagcatactcttttagagggacaatctattttcagcttantattagtttggtgcaaaagtaactgcagtttttgcaactgaaagtaaatttgcggttttttggcttgaacgccggcggcttaacgcctgtaattcccagcacttttnggaaggcccnaangcggggccggcttcacnaanatccanggagattggagaccaaccctgncttaacaccgngggaaaacccccgtctttttncttaaaattccaaaaaaaattagccccgggtggtgggtggcaaggcgcccttttnttttcccanctaccttgggganggncncaangaaaaaatgggggtttaagtnaaacccaaggaaaggnggagcnttgcaatganccctnaaatcgcgtccctg

SEQ ID NO: 7313 - DNA, 843 bp, Homo sapiens
  misc_feature 3, 4, 5, 700, 723, 738, 746, 770, 788, 813, 825: n = A,T,C or G
agnnngattgtatacgactcctatagggcgaattgggccctctagatgcatgctcgagcggcccgccagtgtgatggatatctgcagaattcgcccttagcgtggtcgcggccgaggtacgcgggggagaagccatctgccttcgagcctgccattgaaatgcaaaagtctgttccaaataaagccttggaattgaagaatgaacaaacattgagagcagatgagatactcccatcagaatccaaacaaaaggactatgaagaaagttcttgggattctgagagtctctgtgagactgtttcacagaaggatgtgtgtttacccaaggctacacatcaaaaagaaatagataaaataaatggaaaattagaagagtctcctgataatgatggttttctgaaggctccctgcagaatgaaagtttctattccaactaaagccttagaattgatggacacgcaaactttcaaagcagagcctcccgagaagccatctgccttcgagcctgccattgaaatgcaaaagtctgttccaaataaagccttggaattgaagaatgaacaaacattgagagcagatcagatgttcccttcagaatcaaaacaaaagaacgttgaagaaaattcttgggattctgagagtctccgtgagactgtttcacagaaggatgtgtgtgtacctgcccggcggcgctcgaaanggcgaatttcacacactggcggncgttactaatggatnccagctcngtccaagcttggcgtaatcatggncatagctggttcctgtgngaaattgttttccctcccaatttcncacacatacganccggaagcttaagtgtaa

SEQ ID NO: 7314 - DNA, 866 bp, Homo sapiens
  misc_feature 489, 541, 599, 606, 616, 666, 668, 701, 703, 712, 717, 732,734, 735, 738, 742, 745, 753, 754, 760, 767, 784, 794, 798,803, 820, 823, 836, 840, 842, 845, 852, 857, 862: n = A,T,C or G
actactatagggcgaattgggccctctagatgcatgctcgagcggccgccagtgtgatggatatctgcagaattcgcccttagcgtggtcgcggccgaggtacgcgggggggcgcactagaggtcgtttgaactccttcggctaccgtcgccgcgttctcgctgtgcactcttattctgcgcctgcgcgcggctacagcacggttcgtttttcctttagtcaggaaggacgttggtgttgaggttggcatacgtatcaaggacagtaactaccatggctcccgaagttttgccaaaacctcggatgcgtggccttctggtcaggcgtctgcgaaatcatatggctgtagcattcgtgctatccctgggggttgcagctttgtataagtttcgtgtggctgatcaaagaaagaaggcatacccagatttctacagaaactatgatgtcatgaaagattttgaggagatgaggaaggctggtatctttcanagtgtaaagtaatcttggaatataaagaatttcttcaggttgaattacctanaagtttgtcactgacttgtgttcctgaactatgacacatgaaatatgttgggctaaanaaaatanttccttttgntaaattaaccatttaacaaattaaaaaaaaaaaaaaaaaaaaaaaaaaantnccttgcccgggccggccgttttaaaaaggggcnanttccacccnccctngggggcccgttactngnngantccnaanctttgggnnccaaancttgggngtaaataatgggcaaanaagctttttncctnggggnaaaatttgtttattccnttnaaaattccccaanaaananacnaagcccnggaanccatnaaat

SEQ ID NO: 7315 - DNA, 819 bp, Homo sapiens
  misc_feature 343, 461, 483, 604, 648, 652, 659, 663, 665, 672, 700, 702,703, 710, 711, 716, 719, 729, 732, 733, 734, 738, 740, 742,745, 757, 766, 767, 770, 773, 779, 785, 789, 796, 803, 805,806, 809: n = A,T,C or G
gactactatagggcgaattgggccctctagatgcatgctcgagcggccgccagtgtgatggatatctgcagaattcgcccttagcgtggtcgcggccgaggtactggaaaaccacaggcaagtagaaactggagcaggtccccaggataccacagcagccctatggaaaagtggctagacggttatgtgggttcctgttcccatatctcctcactgggaaggtccttcaggcctggacctccagccacccactgccagagctattaaactagtaacaacttgacaactccctgggcagagcttccaggggcaactgaaaacctctctgccactgcctctgcantagaactgtctttgctaccctcagactaacaaaagaacaaagaccccacgtgctttatccacacttccaacaggctgcaatcaacccaaggagaagaagccagtccctttcccatgtngctacacacacccttccactgntcatcatcaggacagggacccctggcttgggcccacagcacagaccctccatcctaggcttgattggaccaaacaattgctgacctgtgtatctgttagagtgggagtcccccaggaaaangagccaaggggaccctttggcccttgacccacctactaaaaggntccnttccttntggntngcaaaanaagcctggggggaagggaacaattaaancnnttttttnnttggntcncccccaaagnttnnngttnananaancctttggggggntggccaaannccnttntttttnaccccngaantttaaanggggggngnnggnccccccccct

SEQ ID NO: 7316 - DNA, 817 bp, Homo sapiens
  misc_feature 10, 12, 24, 27, 31, 48, 50, 85, 88, 123, 168, 172, 215, 267,277, 311, 358, 367, 391, 448, 455, 457, 464, 482, 483, 504,512, 514, 527, 530, 550, 554, 568, 569, 579, 586, 588, 589,597, 599, 600, 601, 610, 612, 615, 617, 622, 624: n = A,T,C or G
  misc_feature 628, 630, 639, 646, 648, 658, 663, 664, 673, 688, 689, 691,696, 697, 702, 705, 706, 719, 721, 734, 737, 739, 745, 749,769, 770, 777, 790, 796, 798, 800, 801, 802, 807, 808, 813,814, 815, 817: n = A,T,C or G
ccttggactncntgctcgagcggncgnccgngcgatggatatctgcananttcgccctttcgagcggccgcccgggcaggtactnttnttttctttttttttttttttttttctcgggtattnactatagtttaaagtttcctttatctaaccaacataaagaaaacncagnattgtggactttaagtggaaccctacatcccccccaagttcanaaaattaaagcaaaacaattgtttctgcaagaatggagaattcaaatgttanacaaacattngttttgttaaaaatgccactgtattttgttttgnttttaaaatgatcacggctaccatacactggataatttggtcagcanaaatagctntgggaaaaaaaaatattacatgancctgttataatcaaggagattagtaaaaaaaaatgattttgccttattaatcacaangatgatnanctttctnaaggcttagaaatgtaanntgaaattctgataatccgggnctttttgntnaattccacccctnccncccctattttgcctcccggncccncccggctctcttcnncagggggganattttcncnncccacctngnnngggccggcnanttncntcggntncccnanactctgggngcccaancnttgggcgttnaatcnntggggggcncagccttttttttcnntnggggnnaaaanttnnttttttccccccncngtttttcccgggnggnantttccnaaanccgggcggggttttaaaagnntaaaaanccttggggggggngcccanantnnnggggnnccccnnncn

SEQ ID NO: 7317 - DNA, 813 bp, Homo sapiens
  misc_feature 6, 72, 79, 96, 111, 113, 122, 134, 137, 141, 152, 202, 209,361, 373, 396, 416, 418, 419, 423, 436, 452, 458, 459, 482,495, 497, 512, 530, 556, 564, 584, 614, 624, 636, 678, 680,688, 694, 700, 714, 721, 725, 733, 734, 753, 765, 766: n = A,T,C or G
  misc_feature 771, 776, 777, 781, 811, 812: n = A,T,C or G
ctatanggcgaattgggccctctagatgcatgctcgagcggccgccagtgtgatggatatctgcagaattcnccctttngagcggccgcccgggcnggtaccagaaggcangntgggtctanaaagccctgacngtntaanaaggtcctganttcaggatactgaatagtgttacttcacactctaatcaagtgattctganaccttancatgcatcagagggctggtaaaacagattgttgtctccacctcaaagtatgtgattcagtagatttggggtggaattggaattgtggatttttaacattcttaggtgatgctgatgttgtttgtggtccatggagctcacggttgaaaactnctgccctgggcnattgggatccatggaatgaatgnaagttgaagactaaaatgancnngacnggggtctaaaaangatgacgttttccaangggatnncttatatgagcacacgtgtagcncccaccccacttngncttcaggagtcacangcccccaccctttagatnctaccttgggggctggagcccccaangcactccnctgggtttgcttgcacctgnctgtcaacatgctcccctgtcctgccaaanggccctgganaatgttgtgggngggccaaacagatgagccacccccccttttggcaccgttctncnaaagtggnttcaanggaccnctccccctcctccnaaaaaantttncccccccnncccttttttggggtttaanaaaaaaaaaagnnggggnttgtnnaaanccttttttacaaattattttttttaaaaannt

SEQ ID NO: 7318 - DNA, 809 bp, Homo sapiens
  misc_feature 584, 588, 614, 616, 621, 625, 634, 638, 640, 642, 646, 652,660, 662, 672, 685, 732, 748, 752, 760, 762, 767, 769, 772,781, 788, 789, 802, 807: n = A,T,C or G
gactactatagggcgaattgggccctctagatgcatgctcgagcggccgccagtgtgatggatatctgcagaattcgcccttagcgtggtcgcggccgaggtacaggtttgaggaagcgatgaaggaggctcatgctgtagatcaaaagcttgcagagaagcaggaagatgaagccaccctggaaaataaatggcccttccttggggttcctttgacagtcaaggaagctttccagctacaaggaatgcccaattcttctggactcatgaaccgtcgtgatgccattgccaaaacagatgccactgtggtggcattactgaagggagctggtgccattcctcttggcataaccaactgtagtgagttgtgtatgtggtatgaatccagtaacaagatctatggccgatcaaacaacccatatgatttacagcatattgtaggtggaagttctggtggtgagggctgcacactggcagctgcctgctcagttattggtgtgggctctgatattggttggtagcattcgaatgcctgctttcttcaatgatatatttggacacaagccttcttcaaggtgtggttncccnacaaaaggtcaattttcctttggctngngggancccnaagaatttntttntngnggcncttggntccttatntncccccttttncttaaaaaccctngcccccccttttttgaaaggtcattggcagggacccctggggattcnaaaaaggttttaaaanctanaaaccaanangtttncnttnccccggggnggggccnnttttaaaaagggncaaantt

SEQ ID NO: 7319 - DNA, 1213 bp, Homo sapiens
  misc_feature 1, 4, 9, 12, 14, 15, 16, 18, 23, 25, 30, 33, 34, 35, 39,41, 45, 46, 51, 55, 60, 67, 70, 74, 75, 78, 82, 83, 85,90, 91, 92, 93, 94, 95, 96, 97, 98, 101, 104, 107, 110,114, 121, 262, 280, 302, 309, 343, 347, 361, 373, 430, 450,460: n = A,T,C or G
  misc_feature 472, 494, 516, 519, 553, 569, 599, 612, 621, 622, 638, 668,677, 686, 691, 703, 706, 717, 738, 751, 758, 766, 770, 782,787, 802, 803, 804, 827, 832, 848, 851, 866, 882, 884, 886,890, 893, 903, 909, 929, 940, 942, 943, 950, 954, 956: n = A,T,C or G
  misc_feature 957, 959, 962, 967, 985, 990, 991, 992, 1002, 1006, 1012,1013, 1017, 1022, 1023, 1027, 1031, 1046, 1052, 1053, 1055,1056, 1057, 1064, 1073, 1074, 1077, 1078, 1094, 1096, 1098,1100, 1111, 1117, 1134, 1140, 1148, 1150, 1159, 1162: n = A,T,C or G
  misc_feature 1171, 1173, 1178, 1181, 1183, 1187, 1194, 1198, 1205, 1206,1208, 1210: n = A,T,C or G
ntancttcnttntnnntnttttnangtaanatnnntttnanaatnnaaatnatgnttgtnttattanatnattnnttnaatnntnttttnnnnnnnnntcnttnggngtntgantgtaatncgactcactatagggcgaattgggccctctagatgcatgctcgagcggccgccagtgtgatggatatctgcagaattcgccctttcgagcggccgcccgggcaggtacttttttttttttttttttttttttgggatgtantttcactctgtcacccangctggagtgcagtggcacaatnttggctnactgccgcctccgtctcctgggtacaagtgcttntccngctgagatagttgnggattacagtcnttgcaccaccacaccctaggcattatttttgtattttttagtaagaaaacaggggtntcacctatggttaagcccanggcctggggncttaaaaacctnccttgaccttcaaaatggaatnatggccctggcctttgggaacntcnccaaaaagttgcctgggggattttaccaaggccnttggaaaccccacttnttgtaacccaggccccccgggaacattttnaccttttaccganttgggccanngggggtttaatttggntcccttttccttcttaattggcaaaaaacnaaatttttncccaacccnaggcnaatttctaccanatnaggaatttttnaaggggaagtaaaaaaccaanaaatttccttgcngtttagnccatgtgnaaanaaagaaagggtntttgnggcttttttttgaannnggcaaggggccccaaataggaantttgnttcccaattcccttgnggnttcccccacccccancttttccccaaacttngngntaanccnttttggaatnaagggnaaaccttttttttttttttnttaatcccccncnnaaaaaangggntnntnaanatttnaaaaaaaaatttttctancaaannnttttttttcnccantggggnnttanttttnngggngganaaaacaaaaaaaaanaggggnntnnngataaanaaccccccnnctnncttttataaaaaatananancnccccccccccncgtggnttttttttttccccctncccccnttttttcncnataatttantantcttttgtnanaaaanatntnggtngggggantctntttccgnngncnacc

SEQ ID NO: 7320 - DNA, 818 bp, Homo sapiens
  misc_feature 366, 547, 563, 647, 650, 659, 672, 675, 683, 685, 687, 694,698, 702, 704, 712, 716, 719, 724, 730, 740, 747, 749, 755,756, 759, 760, 763, 774, 778, 781, 783, 784, 785, 793, 796,799, 800, 806, 808, 812, 815: n = A,T,C or G
ggcgaattgggccctctagatgcatgctcgagcggccgccagtgtgatggatatctgcagaattcgccctttcgagcggccgcccgggcaggtacatgtctgtatttgaaattgcaaccctcaagattaaagatttaatagaggaatcaatttaaatattttcttatatactacaacagctatgcatttttgcttaaccataccatataacccaactgtaacatatgaaaattgcataggaaaaaaatgtggtcaccaggcaagatttatctttaaaaaaaaaaaaaaaaaaagcttgggtctaaggggtaatgtccatgcaaatattccatgccaaataagatatatgcaagacatgctgatttnctgccttccgccatccaaccgggaaccaccactgtcctgttaatcaagccagtagggtgggaaaataccactgtttaagaaatctggcttttatcagcctctgtcattggagaaacaaacgagactgcctcccagtaagcaaaagtgatcacattttcacaaatgaaaatgggtaaaaaanaagtttaaaattggtnaagagggaaaggaatgagggagcccccaagacaaaagaaaaattcaaaaggcttttaaaattttgctgcaaaaaaggtttttanctnaaacaaaanaaattttttttgnaanccagcttntnangtttaanttancctntnggccgcgnaccnccnccttnaggggnggaaatttcnaacccananctgggnnggnnggntttcctagtgngganccngnnncttggggnccnaanntttggngnaaanaantgg

SEQ ID NO: 7321 - DNA, 832 bp, Homo sapiens
  misc_feature 579, 585, 648, 652, 659, 672, 673, 677, 678, 691, 692, 693,705, 707, 715, 718, 741, 748, 751, 752, 753, 760, 771, 780,782, 789, 791, 793, 800, 806, 817: n = A,T,C or G
ctactatagggcgaattgggccctctagatgcatgctcgagcggccgccagtgtgatggatatctgcagaattcgcccttgagcggccgcccgggcaggtacaatgctcagttgccactataaagaatgagatgctgtgtccttctcagtgcctcagatcaggaggcacctggtgttggcttgtcacattactaatgatgtttacttccatcacttgattaaggtgatgtctgccagatttctctactgtaaagtttctattttttttctgtgtaatgaataagtatcttgtcaggagatgctttggacctatgtaagtatcttgtttctcatcatactttcaccaaactaattttagcattcgtggataattcttgtctgaaacagttattactacagtgtgtgccaaacagtgattttctacttccatcattacttctacatttgtcaattaaaatggttactataaggaagatattttcttttatattgaaaaaatgcaattttttaaaaatcagtctggactcttggattctcattatattgggtataacccatgacttttattaccatttttgngctcangattttttctaagattttttaccatttaagggatggcccccttcaaagttgggggttcctatngtanttttttngccccttttttanngggnngggtttttttggnnnacctggcccttntncctttttnggncccccccaaaagaaatttttttngggcttnaannnttacctntgggcccggcnacccccccntnaaggggngnanattttcncccccncttgggggggnggttttttttgttgg

SEQ ID NO: 7322 - DNA, 798 bp, Homo sapiens
  misc_feature 568, 622, 628, 630, 640, 645, 649, 653, 668, 670, 679, 707,713, 718, 719, 721, 729, 733, 742, 760, 765, 772, 774, 775,776, 777, 779, 783, 797: n = A,T,C or G
gtatacgactcactatagggcgaattgggccctctagatgcatgctcgagcggccgccagtgtgatggatatctgcagaattcgccctttcgagcggccgcccgggcaggtacccatataaatcccaaacccccagctccaaaaggagatgaatagaagagcagaagaatgcagagtggcaaggcaaagaatgggagaagagaaggagcatctgaaagttgagaggagttgggctggggacggtccgagaggagattggccgctggatggccaaattccaggagaaaaataatctcactccatcccccttccagctgcccatccaccctgctgagagccacttccatcactcaataaaacccccacattcatcctttaagtctgtgcgacttgacttcctggataccaagaaaattacctgggtcccaagagggcaccgagctggttacactcttcagctgtcttcagatggcaaatctaaaagagcacactgtaacacacacccacttgggcttcaggagtcacaggcacccacccttagatcctaccttggggctggagccccaangcactcgcctgggttgctgcacctgcctgtcaacatgcttcctgtcctgcaaanggcctnanaatgtgtggngggcnaacngatnaaccacacccctttngnacttcttgnaaagtggatcaaggaaccctcccccccncaaaanggatnntntcctcctntttngggggtaanaaaaaaaaaggggggggntgggnaaaaccntnnnncnaatnttttttttaaaaant

SEQ ID NO: 7323 - DNA, 802 bp, Homo sapiens
  misc_feature 566, 583, 593, 681, 693, 722, 734, 746, 753, 765, 766, 778,784, 800: n = A,T,C or G
actactatagggcgaattgggccctctagatgcatgctcgagcggccgccagtgtgatggatatctgcagaattcgccctttcgagcggccgcccgggcaggtaccatattccccacttagcacttggcaaaggccaaagccagttaagggcagggtgagcacttggcctccaagctctatgtccagtgctcgctccccacagggcccctaactcacccacagaagcggactcagccccaggctacgtctaacaaccacacacaaaagcagcaagaaatggcccatgctgccttctgggcaggacattccatcctgcagaaggaacctttaggctcactccgccacctgggaagccaggctgccaggggatggggcaggcggttggactcaccctgtctgctttcttctgctgtgtggagacagcagagagcctgctccaactctcccacacactgcctggaatactaaaggcggctggccagatcctcagactcctggaatgagagaggttcaaatggggcccaaaggactccccctaatggcctgtcaaagtgccaagttgaangatgatggggtgcccanattccgaccntctttctgcctggcagcatgctgagtgtaagccaaggcttgtaacttaacttttttctgatacaaaggatttctacattcttgaatgnggaacccttttnggttagaaaaagccaaaaaacctggtttnaaaaaggggaanaaaaaaaatttntttccanaagggaaagggnngggaacttttancacttntttttatttaacctgnta

SEQ ID NO: 7324 - DNA, 617 bp, Homo sapiens
  misc_feature 135, 141, 166, 192, 195, 197, 237, 246, 267, 271, 272, 320,345, 372, 399, 411, 447, 450, 478, 490, 492, 516, 523, 546,562, 570, 574, 580, 594, 599, 616: n = A,T,C or G
gactactatagggcgaattgggccctctagatgcatgctcgagcggccgccagtgtgatggatatctgcagaattcgccctttcgagcggccgcccgggcaggtactcgggacctagctcgggaccggcctgganatgganttcgactgcgagggcctgagacggntgcttggcaagtttttaaagatagtnctnanaaagacctgctgaattttactggcacaattcctgtgatgnatcagggtnatacatataacataccaattngttnntggattttggatactcaccctttcgctccccctatttgcttcttgaanccaactgcaaatatgggaatcttangtcggaaaacatgtggatgctcaaggnagaaatatattttgccctatctccaanactggagccatnctaaaatctgtcattgttgggattaaataaaagaantgnttgcccaagttttcaagaaggaaccttnccatgtattttntnattcatcatctgatggaggcccgncaagtancactttgctagcctatttttggnaaaatcactggaaggngtttttanaatncaaatncaaggagctgggcnaaatnattggggaattaaaacnt

SEQ ID NO: 7325 - DNA, 831 bp, Homo sapiens
  misc_feature 544, 554, 556, 596, 599, 615, 628, 632, 648, 651, 655, 673,678, 685, 687, 690, 695, 698, 705, 714, 722, 723, 733, 734,742, 746, 747, 748, 759, 784, 785, 787, 789, 805, 806, 807,810, 815, 822, 823: n = A,T,C or G
gggcgaattgggccctctagatgcatgctcgagcggccgcccgtgtgatggatatctgcagaattcgccctttcgagcggccgcccgggcaggtaccacagacaggcgcaagagggaggaagaaactataaaccgaaaaagaaactgacaaacttctctaattgggaatttacatgcagagagtgagagaagatacatctccccataaaaggattgagaggctgtcagattctctggctgtgctgtttggtgaaggtcttcccctatagaaagccagtttgtaaagattgagagaggtggctatttttcaaatgcaaaaatcacaacaaaaaataacaaggcacacaaagaaacagggaaatcagtcaaagaaacaaaataaatctccattaactgactccgaagaaacagagatctattagttacctgaaaaagaatttatgataatcttaaagaagctcaatgtgtttacaagagaatacagatagacagcttaatgaaatcacgccaacaaagcatgaacctgaatgaggatatgaacaangatttttttntnctttaaaaaaagaaccaacttggaaatttctggggcctgnaanaaaaccacctggttanggaaaaaatttcncctngtgggaaagaccaaanaangagnacttttgtttcccaaacnggggnaaggaantntanttttnctnttaaaanaacaaaggnattttttnnaatttttttnnggggcccngggnnngcccccccccnaaaaaaaaaaaaaaaaaaaaaaaanngncntttgggggggggggannnccntttgnggggggnnttttccct

SEQ ID NO: 7326 - DNA, 844 bp, Homo sapiens
  misc_feature 587, 598, 600, 622, 633, 642, 649, 651, 654, 656, 657, 692,693, 695, 697, 698, 699, 701, 707, 709, 715, 718, 737, 739,740, 745, 749, 751, 754, 763, 764, 771, 774, 781, 792, 796,798, 799, 811, 821, 823, 829, 830, 831, 832, 833, 835: n = A,T,C or G
  misc_feature 836: n = A,T,C or G
gactcactatagggcgaattgggccctctagatgcatgctcgagcggccgccagtgtgatggatatctgcagaattcgcccttagcgtggtcgcggccgaggtacggaaacaacacggagcctttgatcaccttggagggaagcatatccttcagatttacttcagaaggaatgaataccatcacagtgcaggtctcagctgggaatgccatcctacaagacacaaagaccatcgcagtatatgaggaattccggtctcttcgcttgtccttttctccaaacctggatgactacaacccggacatccctgagtggaggagggacatcggtcgagtcatcaaaaaaatccctggtggaagatccagctggagaaaacaaaaggtcaactgatgacctggagcagatatcagaattgctgatccacacgctcaaccaaaactcagtacctgcccgggcggccgctcgaaagggcgaattccagcacactggcggccgttactagtggatccgagctcggtaccaagcttggcgtaatcatggtcatagctgtttcctgtgtgaaaattgttatccgctcacaatttccncaccaacattncnaagcccggaagccattaaagtngtaaaagcctngggggtggncctaatnanggngnngccttaacttcacattttaatttgggtttggggcnntnannngntgcccncntttttncanatttggggaaaaaaacttntnnttggncccncntgnctttttaanngaaaaanggnccaaccncccccgggggnggangnngggttttggggntttttggggncncctttnnnnncnntttctccc

SEQ ID NO: 7327 - DNA, 615 bp, Homo sapiens
  misc_feature 4, 8, 543, 576, 609: n = A,T,C or G
ggtntatngaatatgactcactatagggcgaattgggccctctagatgcatgctcgagcggccgccagtgtgatggatatctgcagaattcgccctttcgagcggccgcccgggcaggtacgactgcaaagcctgactcttaaccattgtgttctgttgccttctccaagggaaaggagtgcttccagaaaggccattggaagtgaggagtgtcacctgataatagctggctcctcatcccactaggttaacaggcaacagatgggggccacagagttggctggagttagtcctggttgccaagggtaaatggggctgttaccatgcaatggatagaaactaggatgctcctgtgtgtctccttatatcctaccaggtgtagcatgaaggttaaggacaattccgtcctcttatttggagaggagaccaaggccctgtaggactaaaggtttgggtgagctgaaagccaagggcaattggcccagcttggggaggagagttacaaatacatttgtgactatcagaccagaaacagactgcggngttcacctgcggtttgggtaccttcggcccgcnaccacgcttaaggcgaattccaacacactggcnggccgt

SEQ ID NO: 7328 - DNA, 819 bp, Homo sapiens
  misc_feature 555, 607, 613, 624, 657, 724, 729, 744, 749, 774, 802, 817,818: n = A,T,C or G
gactcactatagggcgaattgggccctctagatgcatgctcgagcggccgccagtgtgatggatatctgcagaattcgcccttagcgtggtcgcggccgaggtactttaccctgcacagatgccctccttgccccactcaagctccaacacctggaactgaatagtcttcctgtatagataccctccccaccctacttggactctggcatctttgtctgggtagctttttcccaaggtggtaggttgcttgataggtgcttagtaaatatcatatttgattaactttttgtagcctcctctttagtctagaaattctagatcccaaatagaaggtaagatatggtatattctggacttttagttttctatatctccttttcaaatacagacctagggtgacagacaaaaaaatattgtgatcaaagtatatagcatttcctttcatggtggaaaaatgtgcctgataaatgttttctctgcattatttgcctccaaatatattttaatgacaggttatttggatatttcacactttatacttgacttgggctcanattaagtcttgtgttagttataacccttgaataacaaatttaggttcatganaaacangggatgggggnaatattttggttttttaaatctggttccccagncaccttaacccaagtggcttgagtttttatagggggggtcttccaaaaaaaaacctttgttggaaangaagnggggcctttttgggncaatnggggggggccctttttaattgccanaaaaaaaccttttttgggattcttgaanttttttagaaccctnng

SEQ ID NO: 7329 - DNA, 817 bp, Homo sapiens
  misc_feature 582, 626, 645, 674, 677, 679, 690, 693, 708, 710, 715, 724,726, 730, 731, 734, 738, 741, 742, 756, 763, 764, 769, 776,777, 779, 780, 795, 796, 798, 801: n = A,T,C or G
gtaatacgactcactatagggcgaattgggccctctagatgcatgctcgagcggccgccagtgtgatggatatctgcagaattcgccctttcgagcggccgcccgggcaggtacctggcttctcttggccagatcgaaggactgtaatatgatttaagttgtgaatatgccttagtatgtgagatgtcttttcatatgagggagttcttaacctactttagcttaatcaccagatccttttgtcttttatgctaacacataaaaaacacaggcttggtattacagctttttgtcttctatgcatgagcagttttgttttgtatcccagggatcccagaagaacagctttgcttggccagggtacctcggccgcgaccacgctaagggcgaattccagcacactggcggccgttactagtggatccgagctcggtaccaagcttggcggtaatcatggtcatagctgtttcctgtgtgaaattgttatccgctcacaattccacacaacatacgagccggaagcataaagtgtaaagcctggggtgcctaatgagtgagctaacttcacattaattgcgttgngctcactgggccgcttttcagtcgggaaaacctgtcgtgccccnctgcatttaatgaatcggncaaacccccggggaagaaggccggttttncgntnttttggggggnctntttcccgctttcttnanttaanttgaatttngnttgnnccncggnccnntttccgggttttcnggggaanncggtnttttatnntnnccttcaaaagggcgnngntanaaccggggttttccct

SEQ ID NO: 7330 - DNA, 939 bp, Homo sapiens
  misc_feature 2, 4, 6, 7, 8, 9, 10, 11, 15, 18, 19, 21, 22, 23, 25, 27,28, 29, 31, 34, 36, 38, 42, 43, 45, 46, 51, 52, 53, 57,58, 60, 62, 63, 66, 67, 70, 77, 80, 84, 86, 97, 98, 101,107, 109, 211, 311, 313, 340, 341, 345, 378, 386, 511, 515: n = A,T,C or G
  misc_feature 521, 530, 563, 571, 580, 584, 585, 591, 598, 619, 626, 636,639, 640, 645, 646, 655, 656, 658, 662, 687, 694, 695, 707,715, 727, 728, 731, 735, 741, 753, 761, 767, 780, 783, 785,802, 805, 809, 812, 814, 816, 821, 823, 824, 835, 839: n = A,T,C or G
  misc_feature 840, 841, 856, 857, 859, 866, 871, 874, 876, 878, 884, 886,891, 892, 895, 896, 897, 901, 902, 909, 910, 927, 928, 931,933: n = A,T,C or G
cncncnnnnnnactngtnntnnnanannnantantngntatnnanntggannngatnngnanntgnnaantaaagtnggnaatntntttattttganngangggggngnttgtatacgactcactatagggcgaattgggccctctagatgcatgctcgagcggccgccagtgtgatggatatctgcagaattcgcccttagcgtggtcgnggccgaggtacaccttcagcaggaacaggaagatccgaggctgccggctttgtaggttttgcgctttttgttccctcaattgcactggtatactgctccngnctgctgtcaatcttggaggactattgnngctncatgggtccgatttgacaccaactgcttttttntgcaacanactttattcaaaaaaatttctgcttccgctcttcttattcttggaagaagaatggaaccctttttaagggagttggaaaaacaacctttgaaaatgggttttcctttgggcaatcctgggaccanaggncacaanttcctttcntgggaccaattcttttctttgggccggtttttncttccaanaccaagccntttnnttgggnatctttncggcccttttccaaaattccnacttttnccctttttanagnncctgnntttattttnntncttntcccttccctcctcctccaaaggtntttttannggggccgggccnttccctancctggggttttnnctncccnaaatcngcctaattttancttctttnattagngcaacccttattncgntncctaaataacttccccngtncttnaanantntttgngnngttttcccttntcannncctcccaaaaagggnntngattttncttgncangngntttctntnttaannaannntttnntccaaannccttttttttccccccnnccngnggttgc

SEQ ID NO: 7331 - DNA, 932 bp, Homo sapiens
  misc_feature 347, 383, 466, 469, 477, 480, 482, 489, 496, 500, 510, 527,537, 555, 559, 569, 585, 586, 593, 601, 603, 605, 607, 615,619, 620, 633, 634, 638, 640, 642, 648, 654, 665, 672, 674,685, 699, 705, 719, 720, 721, 727, 737, 743, 745, 758: n = A,T,C or G
  misc_feature 761, 763, 769, 789, 792, 798, 805, 815, 832, 833, 835, 836,841, 870, 872, 874, 875, 876, 886, 887, 888, 893, 904, 908,909, 911, 914, 924, 932: n = A,T,C or G
gactactatagggcgaattgggccctctagatgcatgctcgagcggccgccagtgtgatggatatctgcagaattcgccctttcgagcggccgcccgggcaggtacatgtggctcagtaacttcatggctgaggtgaggacatgcttgtgggagggaagtctgtggcttggtgggtctgtgtgacctgcagtctccttatctgtgcaggtacctcggccgcgaccacgctaagggcgaattccagcacactggcggccgttactagtggatccgagctcggtaccaagcttggcgtaatcatggtcatagctgtttcctgtgtgaaattgttatccgctcacaattncacacaacatacgagccggaagcataaagtgtaaancctggggtgcctaatgagtgagctaactcacattaattgcgttgcgctcaacttgccccgcttttcaagtcgggaaaaccttnttngtgcccanctntnatttaantgaaatngggncaacttcccngggggaggaaggcgggntttggggtanttaggggcgcttcttttncgcnttttcttcgntttaacttgaacttcnnttggggncaaaggtncntntncgcctttnccgnnatagccgggaatnnaatntnanttccanaagggncgggtaaaaanccggggntnattcccccggnattccctggggganaaaccnccctgaaaaaaaannnttttgngccaaaaaanggcccnanccaaaaagggccnttngnaacccngtaaaaaaaaggccccgttngcnttggcngtttttnacaaaaaggntccccccccccttggannannattanaaaaaaatttaacccttaaatttaaaagntngnnnaaaaccccgnnnagggncttttaaaganaccnngncgntttccccctnggaaattn

SEQ ID NO: 7332 - DNA, 894 bp, Homo sapiens
  misc_feature 495, 610, 641, 648, 655, 666, 673, 675, 689, 693, 706, 715,738, 739, 744, 750, 762, 773, 794, 812, 819, 823, 830, 831,839, 859, 861, 866, 867, 879, 880, 883, 884: n = A,T,C or G
gactactatagggcgaattgggccctctagatgcatgctcgagcggccgccagtgtgatggatatctgcagaattcgcccttagcgtggtcgcggccgaggtactagtaagttgtgcttgttcctcagttgaaatagttactgtattctcattatctacaacagtagcaacaatggaagtaacttcaggctcaggaacaactggaacagttccactgacagtattagaagcagaagtggaagcattagcattggctgcagctgctactgctgctgccgctgctgctgctgcaacaacagcagctgctgcttcggcagcagccatggtgctcattgtggtcggaatttctgttgtagggactggggctgttgatgttgtggtgcactcttcttgcttactatacattaaaaaaagagaacactggtcatttcattattggtaatcagaaagctaaataaaggtagcttttaaaatggtcataaaatcaaataattnagaaaaataatttgaaggaaaaaaacggcaaggaaataccaagcccattaaaaaaagattttaaaaccccagaatgtaactgtacccttgccccgggccgggccgctttgaaaangggccgaaatttccagcacacttgggcgggnccgttanctaagtnggattcccaanctccggntncccaagccttgggnggtnaaacaatggggcnaaagcctgntttcctggggggaaaattttttnnttccncttcancaattttccacnccaacataacnaaccccggaagcattaaaatngttaaaagccctgggggngcccttnttgnaggtggnncttaaccnccccatttaattggggttgngncccanntgcccccttttnnatnnggggaaaacc

SEQ ID NO: 7333 - DNA, 895 bp, Homo sapiens
  misc_feature 428, 471, 655, 672, 676, 713, 719, 732, 734, 749, 752, 776,781, 785, 804, 816, 826, 838, 840, 843, 846, 859, 862, 867,873, 874, 878, 893: n = A,T,C or G
cgaattgggccctctagatgcatgctcgagcggccgccagtgtgatggatatctgcagaattcgccctttcgagcggccgcccgggcaggtacccacattacctctgggttacccagcatccagagccccaagggacctagctctcccggatatatattcctgcaatggactgacctttttacccacttgtctctggtggtgggagagcactctgaaccagaaaccaacaaggaatccacttcccacccaacttaagagtgtatgcacacatgtggatacacatgcacctccccactactcacacagaccccaacccccttcatgtcttttgaggggggctcaaactactgatgcctggggacacaagcaaagacctgggtccatggaaatgtgtgtgtgtgtgcatataagcacacccgcgtacctnggccgcgaccacgctaagggcgaattccagcacactggcgggncgttactagtggatccgagctcggtaccaaactttggcgttaatcatggggcattagcttggttttcctggggtgaaaatttggttattcccgcttcacaattttccacaacaacaataccaagcccgggaaagccattaaaagtgtaaaagccctggggggtgccctaatggaggtgagcctnactcacaatttaatttngcgnttgcgcctttacttggccgctttttccaagtccgggnaaaacnttgtctttgcccnancttgcatttaattgnaantcggccaaacccccccggggggangaggncggnttttgcgttatttggggcngctttttccggntttctttggnttaaattaactncnttnggncctcgggtctttnggntttgngggganncggntttaactttaattcnat

SEQ ID NO: 7334 - DNA, 889 bp, Homo sapiens
  misc_feature 469, 521, 607, 618, 639, 661, 717, 724, 755, 758, 764, 778,800, 807, 810, 812, 813, 822, 828, 839, 840, 844, 850, 855,868, 871, 878, 884: n = A,T,C or G
gactactatagggcgaattgggccctctagatgcatgctcgagcggcccgccagtgtgatggatatctgcagaattcgcccttagcgtggtcgcggccgaggtacctgcctctgcagatccattgctgattaacgtgtgtggtttccctcctccgttctccctctcaggttaccacaggggctgtaagacctagtgaccctcctaagtgggaaagaggaatggagaatagtatttctgatgcatcaagaacatcagaatataaaactgagatcataatgaaggaaaattccatatccaatatgagtttactcagagacagtagaaactattcccaggaaactgtgcctaaggccagtttcggtttctctggcattagtccattagaagatgaaataaacaaagggtctaaaatctcaggcctgcaatactctatacctgacacccgagaaccagacgcttgaattaccngaaagacaaagggagatgggaaaagcaaaataccggataagtgtcacgtttncttttacacttagactaacagaatcaaagcgtgcctggatttttaaaaccagaaagatcaagagggttttcaccgaccagattttngcccaagttgnttcttaagacccccaaagganggcaagggcttgcctaaccgtngaaccctaatggagggatggggggaattcaaggttcaagtttcttcccccttgaanaaaaatnccaagccccttggccaattttttgccctttnttngatttncccgaaaccccctngtccaaagttttttttccagtnggggganggncnnttgattttngttagncccaaaagggnngaanaaaatnccaanccggtttaatttntgntgccccnaaaaanaaaag

SEQ ID NO: 7335 - DNA, 697 bp, Homo sapiens
  misc_feature 332, 377, 395, 401, 403, 404, 407, 410, 423, 426, 427, 434,441, 442, 448, 449, 451, 455, 457, 473, 486, 491, 494, 496,499, 505, 512, 513, 514, 518, 519, 520, 542, 543, 583, 613,623, 628, 634, 647, 656, 661, 663, 666, 668, 669, 671: n = A,T,C or G
  misc_feature 672, 673, 675, 678, 679, 689, 691, 694, 695, 696: n = A,T,C or G
ggcgaattgggccctctagatgcatgctcgagcggccgccagtgtgatggatatctgcagaattcgcccttagcgtggtcgcggccgaggtacacagtgaactgaaatgcgatggatccgctgactgtttggatgcgtctgatgaagctgattgtcccacacgctttcctgatggtgcatactgccaggctactatgttcgaatgcaaaaaccatgtttgtatcccgccatattggaaatgtgatggcgatgatgactgtggccgatggttcaaatgaagaacttcacctgtgcttggatgttccctgtattcaccaaacccgtttcccggngtgacaaacaatcgcttggaattttataggtcaatggaggtggtnccaaaggggggtgggatngaactngnnggnaanattggaaacttgnttnnaaccccncaagggnncccctnngngatnanaaaaaccccccccctnaaaaccccatagnaaaanatngnttngggggntgggggnnngttnnnaaaacccccccccccccctttnnttcccccccccctttttgttttttttttttgaaattcccnaccccccccccccccaaaaccttttggccnttaaaaaaanggggnactaancttgtttttcctnggtgggtgnaaaantncgntnntnnncnttnnaaataatttncncannnt

SEQ ID NO: 7336 - DNA, 931 bp, Homo sapiens
  misc_feature 336, 463, 497, 515, 524, 577, 602, 605, 624, 648, 691, 713,718, 728, 729, 731, 736, 742, 744, 751, 762, 766, 767, 776,778, 779, 783, 803, 804, 834, 836, 840, 842, 854, 859, 862,878, 879, 881, 889, 896, 899, 913, 914, 915, 918, 919: n = A,T,C or G
  misc_feature 923, 925: n = A,T,C or G
gactactatagggcgaattgggccctctagatgcatgctcgagcggccgccagtgtgatggatatctgcagaattcgcccttagcgtggtcgcggccgaggtacatttggggacaaaatgtttttgtggagataatgtagacttaaaattttaaatccgtagctgtattttcgtcacaatgaaaatttgatgtccttagtaagccccgaatagaaagccttgacttgctttttgagcatagttaacagtgttgagataagagaggtttgctggcagttgcactgatggctgcactgttgtccagtgggcccagctgggtgtacctgcccgggcggncgctcgaaagggcgaattccagcacactggcggccgttactagtggatccgagctcggtaccaagcttggccgtaatcatggtcatagctgtttccctgtgtgaaattggttatccctcacaatttncacacaacatacgagcccggaagccataaaagtngtaaaagccctgggggtngccctaatnaatggaagcctaactcacatttaaatttgcgtttggcgcctcacttggcccgntttttccaagttcggggaaaaaccnttntccgtgcccaacctggcanttaaatggaaattccggcccaacnccccccggggggaagaaggccggtttttgcgggaatttggggngctttttttccgctttctttgntttanattgaaattnngnttgcnccttcngntcgtttncggcttgcggnaaanncgggtattnannttcnctcaaaaagggggggaaatnncgggtttttcccccaaaaaattaagggggntnaccncngggaaaaaaaanatttntgnatcaaaaaagggccannanaaaggccngggaaanccntaaaaaaaggcccnnnttnntttngncttttt

SEQ ID NO: 7337 - DNA, 925 bp, Homo sapiens
  misc_feature 12, 17, 218, 362, 374, 407, 409, 440, 460, 479, 483, 490,515, 532, 547, 568, 569, 572, 575, 594, 621, 643, 647, 648,653, 655, 671, 688, 689, 690, 694, 698, 699, 701, 702, 715,721, 727, 728, 729, 733, 738, 741, 751, 759, 760, 763: n = A,T,C or G
  misc_feature 765, 779, 786, 788, 792, 793, 794, 803, 819, 820, 821, 823,831, 859, 872, 878, 893, 900, 911, 914, 915, 924, 925: n = A,T,C or G
actactataggntatanggcgaattgggccctctagatgcatgctcgagcggccgccagtgtgatggatatctgcagaattcgcccttagcgtggtcgcggccgaggtactttttttttttttttttgagatggagtctttctccgtcactcaggctggaatgcagtggtgctgtcttggctcacgcaacctccatctcccgggttcaagtgattctnctgtctcagcctcccgagtggctgggattacaggcatatgcctccatgcccagctaattgttgtatttttagtggacacgggttttcgccgtgatggccaggctggtctcaaactcctgacctcaggtgatccgcctgccttcngcctcccaaagngctgggattacaggcgtgaaccacttgcacctngntccttaaagggcttaattttcttgggctctnttggaaaaaaccctagcttnttcccaaaatttactttanttcnacgaaanggctttttgaaataagacaaatttnttttttttaaaacctgnttttcttatttttanaaaaaaatggaagccattggnnggnatngaatttccaaaataaattnggtgggacttggccttattgaaccttnggggagtttcccaaaaaatggnttannaatcnangccccttttttttttnaattgaaaaaaaacccnnntggnttgnnanngggtttttatctnggaaanccttgnnngggnacccnctnaagaaagggnttttaaanncancntggaatggaaaaanaaaaacntngggnnncccctgggnttttttaaatttaacnnntngggcattnggttgggtgggttttaaaaaggggggcnaggggaaaaaaanattaantaaatccccaaaagntttaaantttttgggaanggnntatgttaann

SEQ ID NO: 7338 - DNA, 650 bp, Homo sapiens
  misc_feature 128, 156, 161, 164, 166, 176, 181, 188, 194, 211, 214, 219,225, 250, 253, 273, 282, 327, 377, 415, 420, 426, 434, 439,443, 444, 449, 462, 463, 471, 486, 498, 528, 535, 537, 542,552, 563, 568, 580, 584, 588, 590, 593, 612, 617, 629: n = A,T,C or G
  misc_feature 631, 633, 636, 640, 644, 645: n = A,T,C or G
atagggcgaattgggccctctagatgcatgctcgagcggccgccagtgtgatggatatctgcagaattcgccctttcgagcggccgcccgggcaggtacttttttttttttttttttttttgaggcanggtctcactccatcgcccaggctggggngcagnggngngaccacagtngaggngcccacnaacttntgagctcaggcagtccnccngcctnagcctnccaaaagtgctggaactataggcgnganccacagcgcccagccatgtnatcctgttnaatcatccctgctccaaggtcataaatattcttccatatttgttntctagaaataattttttttcatatttatctggaatccatttggtatttanttttttggatgtgggagtatgactttgatccctttacnagggnaaaganattcatgnggaanaccnnaggcnagaaactgaaagnngaatgccntttttttaaggcatnaaacgttgaaanggactggcccgccacccaacaagggcttanggaaaananattgngggggagcanatttttttctnaaaanccctttctggangggnccgnantanattttggggaccttttttnacccncccaaaaaactntngnaangaanaaannaacct

SEQ ID NO: 7339 - DNA, 981 bp, Homo sapiens
  misc_feature 1, 2, 3, 4, 5, 7, 10, 12, 22, 25, 27, 28, 29, 35, 40, 41,43, 44, 45, 48, 49, 51, 53, 54, 57, 58, 60, 64, 65, 71,84, 88, 90, 96, 97, 98, 99, 103, 106, 251, 252, 254, 267,300, 309, 317, 332, 335, 346, 350, 355, 372, 387, 421, 422: n = A,T,C or G
  misc_feature 444, 450, 453, 458, 460, 462, 466, 467, 469, 473, 499, 507,509, 537, 539, 546, 548, 566, 583, 587, 592, 594, 601, 603,606, 614, 615, 619, 630, 638, 649, 654, 655, 658, 659, 661,666, 667, 678, 680, 685, 688, 693, 696, 706, 708, 710: n = A,T,C or G
  misc_feature 712, 723, 737, 738, 746, 748, 749, 750, 753, 767, 770, 775,778, 779, 782, 783, 789, 807, 812, 813, 816, 817, 824, 826,828, 832, 841, 854, 856, 858, 861, 864, 867, 873, 886, 890,891, 892, 894, 897, 899, 905, 906, 909, 915, 918, 925: n = A,T,C or G
  misc_feature 929, 930, 935, 940, 942, 944, 950, 954, 965, 966, 968, 977,978: n = A,T,C or G
nnnnnanatntnaagtgaaaanatntnnntttaanatttnnannnganntngnntcnnangtanntgcatnattttaaaatttnattnangaggtnnnnttanacnatcatatagggcgaattgggccctctagatgcatgctcgagcggccgccagtgtgatggatatctgcagaattcgcccttagcgtggtcgcggccgaggtaccgcgggggagttttcttcgaagatttggggctccgcgatacanntnaggatggctgtantacctctgctgttgttggggggtttgtggagcnctgaggganccgtacancctgggtgttccccnccntacggctcccntggngaaancatactcaaatactgcnccaacaaaacagttnctgacctgcaacatcaaccaccagaccggtggcnnccttattggggggttcaagcgnttaagnggngggcnangncaanntnccangtgggaccaaggggtgggtaaacctntttttgcngngggaattggaccaagggcaacaccaggnantaccttngngaaaggggaattacccgnggggggggaaaggaagnttgncccancnaaatatngntgngttggaannaaangggggggaaancccccccncatttcaaagngtggnnggnntnaaagnntcccaaatttntnggganttnaacanctnctgtttccanancnancttgggtcacnggaaaaacccctannccattaangnnnaancccaaaatttttantcntttgnaannctnnattttnttggggaaaaccccaagntaaanngtnncaaagangncntttnttaggggtngaaggggaaaaangntnccnaanggnggggantcactccctcggnatannnanttngnaaaaannttngttttnttntaaaaanggannccccntttcntngnggtttnatantaagaatagtnntncaaaggttnncct

SEQ ID NO: 7340 - DNA, 663 bp, Homo sapiens
  misc_feature 144, 333, 347, 361, 395, 405, 445, 474, 527, 572, 585, 591,593, 641, 649: n = A,T,C or G
actactatagggcgaattgggccctctagatgcatgctcgagcggccgccagtgtgatggatatctgcagaattcgccctttcgagcggccgcccgggcaggtactgtgggcggctctatggcttaggcacaggagtggcccanaagcagaatgaggatgtggactctgcccaggagaagatgagcatcctggcgattatcaacaacatgcagcagtgatggcgccaggctctgcagggtgggcctgatcccagagtggtgcttactgtgctgactgtgtacctcggcccgcgaccacgctaaggggccgaattccagcacactggcgggcgntactagtggatccnagctcggtaccaancttggcgtaatcatggtcataagctgtttcctgngtgaaattgntatccactcacaattgcacacaattatacgagcccggaangcaataaaagtgttaaaacctggggggtncccttaaatgaagtgaagcctaaacctcaaaatttaaatttggcgtttggcgnctcaacttggccccgctttttcccaattccggggaaaaacccttngtccgtggcccancctggnanttaaattgaaaatcgggccccaaccgcccccgggggaagaaggccggnttttgccntatttggggccgcc

SEQ ID NO: 7341 - DNA, 657 bp, Homo sapiens
  misc_feature 146, 218, 239, 250, 260, 267, 314, 416, 429, 452, 472, 474,486, 499, 510, 523, 542, 547, 557, 558, 570, 582, 605, 608,618, 641, 645, 647, 648: n = A,T,C or G
ctatagggcgaattgggccctctagatgcatgctcgagcggccgccagtgtgatggatatctgcagaattcgccctttcgagcggccgcccgggcaggtacacagcatgcaggccgcagcctgggcccctgccaggcaagatgtanggtgtgaggttgtgctctgccccattcactctggaacagctccccccttgagtccaggatattttctcaagngcctccacgcatttgaccatncagaaaacatnccaactcagngtgcctnggccaccataaatcaagccaaccacacatgcttgccctcaatgcttntgaatatcaagggaaaggatctgcctcatcctgccctggtcctgaggcttgcgcattgacgtttgagttatgtcattatttttttaagtgatagaaatctangcaatgaattggnagcaatcaccactgtgcaaccgnatgccaaaaaaaaactctgngntattccttacangaaaggagggggngaaacccttanccaaaaatttaanggctggactttccctttgnacacnaattttttgnngattggggcccnacgttttttaanggttaagggcttaaaaaattcanggngcttggtggnatttaaaaaagaattattggacnaatngnnggaaaaaat

SEQ ID NO: 7342 - DNA, 889 bp, Homo sapiens
  misc_feature 2, 4, 5, 7, 8, 9, 10, 11, 12, 13, 17, 22, 23, 24, 25, 29,30, 31, 33, 36, 38, 40, 44, 45, 50, 53, 54, 57, 58, 61,62, 63, 64, 65, 66, 67, 71, 73, 75, 76, 77, 79, 80, 82,84, 85, 87, 90, 91, 94, 95, 100, 102, 114, 115, 116, 118,132: n = A,T,C or G
  misc_feature 183, 187, 241, 346, 349, 423, 426, 440, 451, 468, 475, 521,541, 552, 560, 573, 618, 629, 637, 641, 651, 660, 694, 711,721, 722, 739, 745, 757, 779, 793, 804, 808, 832, 833, 834,840, 841, 843, 863, 866, 875, 876, 877, 880, 881, 888: n = A,T,C or G
ancnntnnnnnnntatnatagnnnntatnnngnganananatgnntgttnctnnaannaannnnnnnagtnangnnntnngngnntntgnnagnnagggngntgaattctttgnnntntacgactcattttnggtcgaatccgggccctctagatgcatgctcgagcggccgccagtgtgatngatntctgcagaattcgcccttagcgtggtcgcggccgaggtaccatcacatgctggncagagtggccatttgtcccaagtcaaaacataacatgctacaagtgtggcagcagagaaaagcaaacatggctatttctcttggaggtaatgcaaactagatccnaanctgtggaaaccagtctgaagatttcttgggaaaaaaaaaggatggaaggcagagctatgctttgacccagcaantcnctaccccatgcatntaccccagggnaaaaaacacaatgcgtnttatcanaaaagaccacattgaccactcacaccgtgccaccgggggaggttgnttacctggaccagggaaatnaaaagaatggngggaaccntggaattccttangaatggccccacggaaaccagggaaaagaactggggaattttttncaaaaaaaaantggtgggngttnccccaattancaattacancaaagaaattgggcttagaaaaaaggcccccctnaaaggggaaaaaattanaaaccaccanngaaaaaccaaaaaattntttggnccccttcggggngaggggaaaccaatgggggttngggaaacctggggnagggcccaacnttcnttggttaaaaagccaaaccttggnnnggccanngnaacccacggaaaggaacccnaancccccttgnnnggnnttcttcnt

SEQ ID NO: 7343 - DNA, 633 bp, Homo sapiens
  misc_feature 120, 219, 301, 313, 375, 417, 423, 451, 454, 465, 466, 479,482, 506, 507, 514, 528, 568, 571, 572, 582, 597, 598, 604,606, 609, 614, 616, 617, 625, 631, 632: n = A,T,C or G
atagggcgaattgggccctctagatgcatgctcgagcggccgccagtgtgatggatatctgcagaattcgcccttagcgtggtcgcggccgaggtacttcccataatccccacatgttgngggacgcacccggtggcaggtaatggaatcatgggtggttacctccatgctgttctcatcatagtgagttctcatgggatctgatggttttctaacggncttttcccctttttctcagcacttccttttgctgccatcatgtgaagaaggatatgtttgcttccccttccaccatgattgnaaatttgctgangcctccccagccatgcggaactgtgagtcatgtaaacctcttttctttataaatcacccaantctcaggtatggtccttatagggagcctgagaacaagactantacacntggcaatgccaaaaactgatatattttnggngggattttaanncttaggcaaaagncangcctgcccaaccaaaaaacacctnncatcttnaaggcaacatgggnacctggccccgggcggggccgcttccgaaaaggggcgaanttnncaagcaacanctgggcgggcccggnnacctantnggnatccngnncctccggnacccannt

SEQ ID NO: 7344 - DNA, 410 bp, Homo sapiens
  misc_feature 43, 410: n = A,T,C or G
gattgtaatacgactcactatagggcgaattgggccctctagntgcatgctcgagcggccgccagtgtgatggatatctgcagaattcgccctttcgagcggccgcccgggcaggtaccatggtgctgcacagaccatcaggaagaactgaaaagttcaggcaacttgagaaaataaagtcaccaccagcaagaagctgtctaaaataaccggaagattataacccaagcacgtggaggagtgtgctagtgagtagaatgttatgaaagctactagaggtcctccatagatgcatgtgctagtcctaaggagaaggaagaggagaaggattgccacggaggaacacctgaagtttcagttgagcactttgtttggaaagttgtccaaggctggagttgtgagagctgggn

SEQ ID NO: 7345 - DNA, 411 bp, Homo sapiens
  misc_feature 5, 12, 23, 32, 44, 52, 97, 111, 122, 171, 254, 335, 354,359, 381, 405: n = A,T,C or G
gattntctacanactcctattangcgaatagngccctctacatncatgctcnagcggccgccagtgtgatggatatctgcagaattcgcccttagcntggtcccggccgangtacatatganaaacctcttgtgagaaggaggcggccaccatcccggtgctgacaagtancccccccaacatcactaccagacggtgtccgaaacgattgctcaggactgtggcgaggggagctgccgggaaagaacaaaacnatattttaactcacagaggcttcagggttagctgccataagactccttcctccacgtcttgcacatggagagatgatgtcnaatataaatatggcccgancgcantgactcatgcctgtaatcccancactttgggaggttgaggacggangatcgc

SEQ ID NO: 7346 - DNA, 1189 bp, Homo sapiens
  misc_feature 15, 16, 86, 207, 305, 312, 331, 337, 374, 381, 401, 423,462, 500, 505, 526, 560, 565, 574, 595, 605, 609, 612, 614,621, 626, 634, 653, 654, 659, 665, 669, 670, 672, 673, 683,686, 691, 694, 696, 697, 701, 711, 712, 715, 718, 723: n = A,T,C or G
  misc_feature 724, 728, 730, 732, 734, 745, 772, 773, 780, 782, 790, 800,803, 807, 814, 818, 835, 837, 843, 844, 854, 855, 856, 878,881, 885, 887, 888, 890, 893, 903, 911, 913, 918, 927, 947,951, 952, 956, 961, 964, 965, 966, 969, 978, 980, 983: n = A,T,C or G
  misc_feature 987, 998, 1001, 1004, 1007, 1010, 1012, 1013, 1014, 1018,1021, 1024, 1027, 1028, 1030, 1033, 1040, 1043, 1056, 1059,1063, 1069, 1073, 1075, 1076, 1077, 1088, 1089, 1095, 1102,1103, 1104, 1109, 1110, 1112, 1113, 1123, 1124, 1126: n = A,T,C or G
  misc_feature 1127, 1128, 1131, 1132, 1133, 1135, 1140, 1143, 1144, 1146,1151, 1153, 1156, 1162, 1163, 1170, 1171, 1177, 1180, 1182,1187, 1188: n = A,T,C or G
gccgccagtgtgatnnatatctgcagaattcgccctttcgagcggccgcccgggcaggtacttttttttttttttttttttttttngagtgggaagaaacttttatttccaggacacgtgtgcagaagcaacaagtcaaaattaaccattctatctgaaagagaagaaacatgtaccaacacatgtcattcaaggagtagaagtttntagaataaggcaaaagttacagggcagcagttatgacctttaatagaactttgttacactgaaagatacaagtctgccatacttgcagggaaaatgtntttcaanaagggtaacacccaatttnttccanacatttaaaaatagcctaatcttaaacttatcaaatnatttttnggatgagaaaacagggtccncccaagttagggtgaccatcanttatggcaaaaacaaagaattcggcatgttttttttttnttaaccccccaagcctggaaaatatttttccaactggncccancttttccccttttacttcaanggacttttatttttttttttactggaaaaacccnaaccnatcaaatgntccctttgtttctacccaaanaaattggttnttgnaananacgccanccggnttttttgnttttttttgaaggctggannaactnaaaccnggcnngnngtttattttnccngaccnggncnnttancttgaaggannggngtnaaggnnaaancncnanggcccaggttnttggaaaggctttttttgtttggaatnnttttccnancctttttnggttggtttnccnttgnaaaaggncctnttttgaccaattttttnangggtgnnaaaccccccnnnggggacttgtccccttaaaaanggnggtnanntnggnaaaagggggncaccccgntnttttngaagggganttattttaaaaggtttaaangggnntttnggggnttnnnccntgaaccacncnttngggnttttggggganggnccnttngtncnnnattnaanttnccnncnaangggaatntcngttttttccctanaanaaanaaaatntttnannncgtcccccccnnatgggnattaacnnnggggnntnntttgtggccnntnnnaannngnttttnttnntnttttngntantttttnntatttcnnaaaatnggngnatatnng

SEQ ID NO: 7347 - DNA, 1181 bp, Homo sapiens
  misc_feature 5, 62, 63, 96, 100, 128, 135, 218, 266, 378, 380, 442, 487,490, 507, 516, 552, 553, 598, 608, 614, 621, 629, 631, 638,639, 645, 666, 670, 677, 682, 689, 709, 718, 724, 729, 735,749, 792, 794, 800, 803, 814, 817, 818, 819, 829, 834: n = A,T,C or G
  misc_feature 838, 840, 841, 851, 856, 857, 860, 862, 875, 887, 892, 896,898, 905, 906, 924, 954, 958, 959, 961, 963, 978, 979, 983,987, 1001, 1003, 1011, 1025, 1035, 1037, 1039, 1044, 1045,1068, 1078, 1079, 1091, 1092, 1099, 1116, 1117, 1119: n = A,T,C or G
  misc_feature 1124, 1126, 1137, 1144, 1151, 1155, 1156, 1157, 1160: n = A,T,C or G
gccangtgtgatggatatctgcagaattcgccctttcgagcggccgcccgggcaggtactcnntttttttttttttttttttttgggaattatganaatntagctatttagtccataacacttcttanaggtcgngggacttaaaatgagctttgacaaatggaagacattttctacacacagaaatttgaaatccacattccatagcaaattagtanaaaagaagtaaacaagacctctgtatttcacccaattgttttaggccntgatactaaaaaaacagacactaaaattcttgtgagtggatattccctcctcctgggggaaacttagcttgcttcactatgcgcataaaaagagaactcatcagaacatttncncaggaaaagggagaatttaatgaagacactggaaagccaataaaaacttcatgttttcttgntttttgttagaccagcaaaacagcaaaatgacccttggccctatnccnatggtcaaagcacttgngggttttangcttgcctttttcttgggtttaaaaactatgcttanncctttcctctttgggaacattttttccagccccccgtggaaaatnggcttttatntttganaattttnaaaaaggncnctttttnnagaaancttaaatttttagaataaagncccntcccttnaggtntcattantggggaattttcaatttttnaattggtcncccaanttcanggaaangggaatttaaattnggccctaattttaaaaaaaaaaaagttttggccccaattgggngnttaaanaanatttttaaaanaannngaagtttaantagcncttncnngttttttttnccaannaancnaatgttttttttncctgttgaaccnaacanctgntnaattttnngccttccttggggaaatnatttttctttcccttaaaaaccaaaacctntggnncngntattaaaattttaannaccngggngggaaaaaaggccncntaatttcntttttaaaaggggngaaccttttnanancgaannatttttttttttaaaagggaggntttaaataanntatttttccccnntttttantttaaaggaaattaaanngnaaaanancttcttttacnggccttnataaaantccnnnggngttttttcttttgagcccctt

SEQ ID NO: 7348 - DNA, 1172 bp, Homo sapiens
  misc_feature 58, 131, 263, 271, 283, 300, 318, 389, 390, 442, 443, 466,492, 497, 512, 524, 534, 539, 616, 620, 622, 636, 638, 642,649, 664, 682, 688, 691, 694, 699, 703, 716, 759, 763, 766,767, 768, 769, 770, 771, 781, 784, 788, 794, 797, 805: n = A,T,C or G
  misc_feature 806, 807, 814, 815, 817, 818, 831, 832, 833, 835, 846, 854,860, 866, 870, 882, 889, 893, 903, 911, 914, 917, 922, 927,929, 940, 944, 951, 958, 962, 964, 969, 971, 976, 979, 989,990, 997, 1006, 1007, 1010, 1015, 1020, 1022, 1025: n = A,T,C or G
  misc_feature 1034, 1042, 1043, 1048, 1053, 1054, 1055, 1062, 1063, 1074,1076, 1079, 1089, 1090, 1098, 1101, 1102, 1112, 1113, 1114,1115, 1116, 1123, 1129, 1141, 1149, 1153, 1154, 1161, 1163,1165, 1169, 1172: n = A,T,C or G
gccagtgtgatggatatctgcagaattcgcccttagcgtggtcgcggccgaggtactnttcttttttttttttttttttgagatggagttttgctcttgttgaacaggctggagtgcaatgtcgcgatctnagctcaccacaacctccgcctcccaggttcaaacaattctcctgcctcggcctcccgagtagctgggattacaggcatgcgccaccacacctggctaatttttttttgtatttttagtagagatggggtttntccatgtnggccaggctggnctcaaactcctgacctnaggtgatccatccacctnggcctcccaaagtgcagggattagaggcgtgagccactgtgcccggcctataatttttgatagatgatttnnaattattttccacagataaaatgttaaatgggggctattatatcactgattnntttctgcaaattgaataaaattnttaattttctggcatgcacataatanaaaangtttttcataggttnggatttataccnaaggaaaaangattntccttgatgagccaccttttaacctgattttttctgttaaaagtttttaacaattttggttctttgggaagtcaagntccngnaaagggcaagtttngncaanttttttncacaaaactattttngggtgaaatccagaaagnggaaancanttngaaanttgnattgggaaaattnggtttttaaaaattggacttttgaaaatttccaaaaaaaaaanaaantannnnnnaaggtccttnccngggngggccnttncaaagggnnnaatttcnnanncttgggggccgtnnntngtgggatcccncctcgggnccaagnttgggngaantaatggggaaanaattttncctnggtgaaaatnttttcccnccnaantcccnaaatnanaagccggaacntaangttaaanccggggnggcncnaaaananccaanccnattaattgcnntcccccngccccttcnnagnggaancgttngnccnctgcaatanaatgggcnnccccngggannnggttggnnaagacccttcncntanttcccaaaannttggcggnaannggggggaaannnnngtattanagggtnatatggtttccnaaatgggnatcnnaaaaacngnanaaanccn

SEQ ID NO: 7349 - DNA, 1198 bp, Homo sapiens
  misc_feature 15, 98, 119, 125, 126, 246, 272, 335, 353, 371, 400, 412,414, 415, 417, 440, 441, 459, 462, 475, 487, 490, 506, 519,520, 539, 546, 556, 559, 561, 565, 567, 569, 573, 590, 605,614, 618, 625, 630, 642, 647, 648, 659, 661, 665, 666: n = A,T,C or G
  misc_feature 679, 682, 692, 701, 722, 723, 733, 734, 740, 741, 778, 784,789, 797, 799, 802, 809, 816, 824, 840, 842, 845, 846, 847,850, 852, 855, 862, 870, 904, 909, 912, 914, 918, 919, 927,930, 935, 947, 948, 954, 958, 959, 965, 978, 985, 988: n = A,T,C or G
  misc_feature 989, 992, 995, 998, 1008, 1011, 1014, 1034, 1040, 1042, 1050,1074, 1078, 1085, 1086, 1089, 1103, 1106, 1113, 1117, 1124,1130, 1137, 1147, 1149, 1160, 1161, 1162, 1163, 1165, 1167,1169, 1172, 1175, 1180, 1181, 1184, 1190, 1196, 1198: n = A,T,C or G
gccgccagtgtgatngatatctgcagaattcgcccttagcgtggtcgcggccgaggtacatgcaatatacaattatttgagataattaaatatatganataacgtagaaagggaaacanaaaagnngtcttagcctcctaaatcagcctaatgcttaactggaacctcaggtggaataggctgtttagctctaatagttaacaggatctcttgtgaccctccatcagtcctggatggtgcttcttnacaacttgctgctcagaattgtctgntgggccctattctggtccttgccatgctatgaaccagctagcctacatcctaacttctctttntttctgagacaacttttntagaagccccttcaaatngggctttctcctttccttggggcttcctnctttccttaaantnntntggcccttaccccagcttccaanngtttggctttctccctgntgnatctccaattttntttaccctcttnctngatgcttccggcctangggttcccgaacnntaaaaaaaaaaggggaaanccccggnggaccacctnttntngccnangntaanccaaaaaaatttttttngtaagggggtttttnggggccatntaangcccccnggganaaaaatttgggnttttnngaaaaaggccnanaaannttgggatgggggnggnttttaacccncttgggccncaatttttttggagaagtttnnccaattttanncaaaannttttttccctttaattttccctttggggggtttttgnaaaaanaaagnatttaaantnaanttttggnctttaanaaaacctntttttttttgtggccnanttnnnagngnacncttgggnaaaaattnttttttggaatttcctttaaacccctaaccttanaaccnttnancctnnaaaaaggnccnaaaanatttaaattaanncccttncttnncccctnaaaaaaaagggantccccanggnnatntgnctntttttggggnggnganttccgaaaaattttttttanaaaacntnttttttanttttttaaaaaaaaatttcttaangccngggaaanntancccttttgacccgnaanaaaatgngggntttaaanagggantttgttnggaaaaatananggcccctcccnnnngntntnaanaanaaaanncgngaaaanaagctntn

SEQ ID NO: 7350 - DNA, 1179 bp, Homo sapiens
  misc_feature 531, 534, 545, 558, 623, 660, 664, 671, 674, 723, 741, 750,754, 756, 772, 779, 791, 793, 798, 803, 811, 815, 816, 817,826, 830, 841, 845, 859, 865, 868, 875, 878, 885, 906, 923,936, 937, 943, 946, 947, 952, 955, 958, 959, 964, 972: n = A,T,C or G
  misc_feature 977, 981, 999, 1002, 1004, 1006, 1007, 1009, 1011, 1015,1016, 1033, 1034, 1060, 1063, 1070, 1074, 1075, 1076, 1087,1088, 1094, 1098, 1106, 1107, 1109, 1116, 1130, 1136, 1138,1141, 1148, 1154, 1156, 1161, 1171, 1172, 1174, 1175: n = A,T,C or G
  misc_feature 1179: n = A,T,C or G
gccagtgtgatggatatctgcagaattcgccctttcgagcggccgcccgggcaggtacacctttcccagggaaaaaaatgtcacactatatcaagaatcttttaaaacgttcacactccttaagagtgattctatttctaggaatcatttcaaaagaaaaaaaatcaaggatgtggatagtgatttatgtaaatgaatgtccatcacactgctactttaaagtgtcactgaataactgcaaatggtgtatattcccaatataaggaaaatagtaaaagaaattatggtataattatgtcattattataaacatttctacaaatcatgatactgaaaatactgaataacactaaaaaatgaacaatactgagtaagaaaggggatagaaaaatattacattatgacttgggattaatgacccaaggtcttagaacccaaacatacacttgccctttcacaccctcacaattttccccaaatttttatcccacagttcaatggaaaggaacacccaaaggaaaagccccagantgngaaagactggngtccttacttggncctttagcttctgggaattttagttcattttactttgggtttaagtgggattttaattttttctnctttgataaaagtggaagcttggtttggcattttcanaaancttttanggnggaaatcccccccacttttaatggtggaaaccaactgggcatttggggncctttccggcggtccttngggccgggnaccncncttaaggggggatttncagcccncttggcgggcgntnctttntgggntcccagcncggnnnccaagcttngggnaataaatgggnttancttgtttcctgggngaaaanttntattccnttnacaattncccccaaattacaacccggancttaaatggtaaacctngggggcccaatgnnggggcnacnnccttnatnggnngggcnacttgccngtttncatngggaaaattttgggccanttntnannantngccnnccccggggagggggttnntttggggccttccctttttggtcatnaanatttggntggnnnttggggggggnngggttncttntaaggggnnantgtttcnaatatggggacccntaaaantntgncaaaggnccaaangngaccnaaagggcggnntnntttn

SEQ ID NO: 7351 - DNA, 1188 bp, Homo sapiens
  misc_feature 60, 92, 163, 169, 171, 178, 180, 183, 201, 205, 209, 210,212, 217, 219, 222, 234, 245, 246, 248, 249, 251, 260, 273,275, 284, 288, 298, 317, 324, 332, 340, 345, 352, 360, 363,368, 376, 378, 384, 386, 411, 412, 423, 425, 426, 430: n = A,T,C or G
  misc_feature 434, 436, 445, 450, 454, 467, 470, 476, 481, 482, 494, 512,519, 520, 524, 525, 537, 543, 547, 552, 565, 567, 571, 573,574, 584, 587, 588, 590, 591, 600, 603, 605, 607, 618, 620,622, 623, 627, 643, 647, 654, 655, 663, 664, 666, 672: n = A,T,C or G
  misc_feature 683, 685, 694, 700, 702, 704, 705, 716, 717, 719, 724, 727,732, 735, 742, 743, 744, 750, 755, 760, 769, 772, 776, 781,782, 789, 790, 796, 806, 814, 827, 830, 835, 836, 843, 846,847, 850, 858, 861, 868, 869, 876, 884, 886, 892, 894: n = A,T,C or G
  misc_feature 902, 905, 911, 928, 932, 933, 934, 935, 937, 940, 943, 944,952, 953, 964, 965, 966, 979, 984, 1008, 1014, 1025, 1040,1041, 1049, 1052, 1069, 1076, 1077, 1078, 1108, 1109, 1110,1119, 1120, 1121, 1122, 1127, 1134, 1144, 1147, 1149: n = A,T,C or G
  misc_feature 1156, 1157, 1165, 1171, 1182, 1184, 1186: n = A,T,C or G
gccagtgtgatggatatctgcagaattcgccctttcgagcggccgcccgggcaggtactnaaatttttttttttttttttttttttttattnatttttttttttttttttttttttttttttttttttttaaaggggacccatttatttatttatttatttangagggngnctcactntntcncccaggctggagtgcagnggcncaanntnaaatnantgnaacctttacctncctgggtccanntnntntcctgcctnaacctcccaagtngntgggactanaggngccaccaccncccccggctaatttttggntttttanaaaaaacngggttttnccatnttggccnggccggtnttnaactnttgacctnangggatntncctgcctctggccctccaaaagggnntggggattttnanngggnttgnanccccccccnttccngccnaatggggccccanttnttttcncaagnntttttttttttnaaaaaggtcccccccaanaaaaaannaaannattttttttacngggggnaatnttgcnaaaggtttgaaantncagngnntttacccccncgnntnngggtttttnttntnanagaatttgggnanannttgnggcccgggaacaaccntttnagggggnnaaatttcnncnccctgnggggggggttntnttatgtggnacccanantnngggaccaaaanntnggggnaanaaatnggnataaaannnttttcntgggngaaanattttttcnttnaaanattcnnaaaaaannaaaacncgggaaaatnaaagggtnaaacccggggggnccnaaaannggggccnacnnccntttaattnggntggggcnnccgcccnttttaaananggaaancntgtttggnccntttttnaaaaaattccccccccngggnnnngnggnttnnaatttggnngttttcctttnnnttaaataaaaatntgctnggagtttggggggggggggggttnttctcnaaagggggggnttggttttccataannggggaacnganaaaaattttttaagggnttagggnnnatttaataggggttgtgggggtattattannnccccccctnnnnaaaanattcttntttggggggnacncnggtatanntaacggtntttttngaaaaatagtntntnta

SEQ ID NO: 7352 - DNA, 1220 bp, Homo sapiens
  misc_feature 344, 377, 384, 421, 444, 457, 465, 469, 472, 479, 483, 496,500, 502, 509, 529, 551, 561, 593, 597, 600, 612, 614, 619,620, 627, 632, 645, 648, 672, 676, 687, 688, 694, 698, 706,711, 717, 718, 725, 726, 727, 728, 744, 745, 746, 750: n = A,T,C or G
  misc_feature 753, 756, 760, 764, 767, 768, 775, 776, 777, 780, 785, 794,795, 798, 808, 810, 814, 835, 840, 847, 848, 865, 874, 884,894, 900, 902, 903, 926, 927, 933, 947, 958, 964, 966, 968,976, 978, 988, 991, 1000, 1002, 1004, 1008, 1014, 1016: n = A,T,C or G
  misc_feature 1017, 1023, 1024, 1029, 1030, 1031, 1033, 1038, 1039, 1041,1043, 1045, 1046, 1048, 1050, 1052, 1057, 1058, 1065, 1073,1074, 1075, 1076, 1082, 1084, 1087, 1092, 1098, 1109, 1120,1122, 1135, 1137, 1143, 1144, 1151, 1152, 1154, 1158: n = A,T,C or G
  misc_feature 1162, 1165, 1171, 1176, 1181, 1185, 1187, 1190, 1195, 1197,1199, 1200, 1203, 1206, 1212, 1216: n = A,T,C or G
ccgccagtgtgatggatatctgcagaattcgcccttagcgtggtcgcggccgaggtacaacaccgaacacataacatcatagccatctgcaaagatttcttttaaaaactgctcccgtaactcactctcataatttgctacaaggagcaccttgtaatcaggatggaggatggtatggctcacgcatgctgaatgccttcctgaaagagacacaggatggaaggcaacacccacagatggctttgatgtgtctgcgatgcccctgtatttcaaggaggggtatcacttgttcatttgggattgcacaaaaagcaggccagaaaaaacctgggtcaccaaaatanacttcctttttgacccacttgacccactttttnttcttangccctgattaaaaagggagaaagaggagagaaagatnataaattggaaaaaagagggatngaagccaaccctngggagttnattngtnagttctngganttggtaagcgttntttnanagcaagntgggccttttttttcaagcntcacattcatctaattccaatnctcccccaantgtggaccacccccttttttttaaccttttgnaagnccnccccttttttgntnttcanncccctcnccaangggggaatcttgnggntttggcctcccaacccttgggccnccantttttttcccnncagggncttnttcccttngggcncccggnnttttttnnnnaaaccccttggagtgnnnccanaanagncaancccnctnnccctttnnngcnttaanttacaaggnnccnggtccccttnanttcnttaggcgggcccaaaagtaanccaanccttccnntttttccccctgggggnttttgggtncccccctctnacaaaatttntccccngnngggtccctcgataggttccccannaaaatnattttttttttccnttacccctccnaaagancngngggaaaantnccaaattttnctngcccggcgngncntttnaaaggnanntttccnncttgnnncngtttnntntncnnantntngcaannttggggnaaaatagnnnnttatcncnggngaaantttttntatattttccnaaaattatctngnatataaagataancntgggcnnaaaaaannancacnaaantanggtgcnctttnccatnaatngnaanatttntntnnaantantttccnccgngggg

SEQ ID NO: 7353 - DNA, 1190 bp, Homo sapiens
  misc_feature 159, 293, 313, 335, 367, 369, 388, 391, 393, 448, 453, 457,460, 467, 485, 537, 550, 552, 553, 564, 573, 594, 602, 605,613, 623, 624, 632, 644, 650, 651, 652, 653, 654, 664, 669,671, 677, 691, 692, 695, 702, 708, 709, 711, 713, 718: n = A,T,C or G
  misc_feature 719, 727, 757, 758, 761, 762, 765, 766, 794, 799, 806, 812,829, 833, 841, 844, 845, 850, 864, 866, 867, 871, 886, 887,888, 889, 899, 905, 911, 913, 915, 919, 921, 922, 926, 927,929, 933, 943, 949, 952, 958, 959, 960, 961, 964, 966: n = A,T,C or G
  misc_feature 968, 971, 982, 987, 991, 993, 995, 1002, 1008, 1012, 1013,1014, 1022, 1031, 1042, 1043, 1044, 1049, 1053, 1074, 1076,1078, 1080, 1084, 1085, 1087, 1089, 1093, 1095, 1106, 1109,1116, 1117, 1119, 1122, 1125, 1126, 1127, 1128, 1136: n = A,T,C or G
  misc_feature 1139, 1141, 1147, 1153, 1158, 1161, 1166, 1169, 1177, 1180,1181, 1184: n = A,T,C or G
gccagtgtgatggatatctgcagaattcgccctttcgagcggccgcccgggcaggtacgttatttattccttatttcaaaaaaaaaatacttttgtgaacaggtgagaaaaggaaaaaaaagagaaggaagggaatatcctaaggaatagaggccacanttagaagaatgatagaaagaatatgcaggttactagtcaaacaattagagaatatttaccaggaataaatggtgtgtgaatcaacttcttagaattctagactagtgatattaaattaaagaaaactctaagtnacccacatatcctttgttgngctgggcaataatgatacgtgntgtttaaaataaacccccttaaaaaattaaangnaaccggcccgggcaacggnggntnacgcctgtaatcccaagcacttttggggagggcgaagtccggccggatcaccgangttangggngantccaagnacccattcctgggttaanacaaggggaaaaccccccgtttttttctttaaaaattcccaaaaaaaatttntccccgggccgtngnngggcaaggcgncctttttgntcccaggcttccttctggggngggtttangcnggaaaaanttggcctttnnacccccanaaggggggagcntttgcnnnnnggctagaaanttggncncttggncttcaaccctgggnnggnaaaatgnggaccnncntnttccnntattttantaatttggttaaatttaggggggccccccnnaannttnnaacttcctttggccggggccccccttanggggnaatttcncccccntgggggggccttttttngggntccccccnttnnccccnaactggggggaaananngggnaaactgtttccctgnnnnaaatgtttcnttcaanttcccncnanatanannccgnnanttantggaaaaccnggggcncanaggggnnnnacncntnatnggggggccccnggccntttntngngggaaanttctgncccnnntttttaantcccccccnggggggggggnnngattngggncttttcttttcttaaaaaatntngnantggnngngngggngnggggttttttnttnggggggnngntgnttnnnnaagggggntcntngaaaanattttntgcgncanatggngtnctaaaaanggnnttnttgttt

SEQ ID NO: 7354 - DNA, 1232 bp, Homo sapiens
  misc_feature 21, 320, 324, 335, 350, 396, 435, 456, 462, 467, 485, 490,496, 497, 504, 509, 511, 514, 526, 543, 553, 560, 566, 568,580, 587, 640, 656, 672, 674, 681, 711, 712, 732, 751, 757,758, 759, 763, 767, 768, 772, 776, 793, 796, 799, 802: n = A,T,C or G
  misc_feature 805, 813, 824, 843, 857, 858, 867, 871, 875, 898, 904, 906,942, 953, 955, 967, 970, 972, 975, 976, 981, 983, 984, 985,989, 991, 1008, 1014, 1016, 1022, 1034, 1038, 1044, 1046,1047, 1053, 1062, 1069, 1071, 1073, 1078, 1094, 1097: n = A,T,C or G
  misc_feature 1100, 1102, 1107, 1108, 1112, 1113, 1116, 1118, 1120, 1121,1124, 1126, 1128, 1133, 1138, 1141, 1142, 1146, 1150, 1152,1154, 1155, 1157, 1158, 1164, 1167, 1168, 1169, 1171, 1188,1195, 1196, 1200, 1201, 1207, 1214, 1215, 1219, 1220: n = A,T,C or G
  misc_feature 1224, 1225: n = A,T,C or G
gcctttgtgatggtttctgcngaattcgcccttagcgtggtcgcggccgaggtacaaaactgacaaagggctcagaaacttgtgagtagtgggggcaggggcggcacaggccaggccagtatttaggaaacgtcagggttaatgtccagaatctagcaatatgtttgggaagaaaaactgagaacagttgaaggacaacttacttggggtttggagggaagagattcaaagatatcaacagatcatggtcacacatggatgacaaacaaatgtgaagacaggacaatgggtaactaatgggattccatttcctactgcantttngggcaggagtnggggaaagctgcaanggggaggcaatcatggtggaaaagagggtgaaccagggaaaccaanggtccgttttcttgaccatgcttttggcttccttgcctncctttcctttctttaatctanccggcncaaangggatctttcaaccttcncaatntttttnnttcctgntgggncncangaaaagttccanaaaagcagccctttgtnggcccccttnttgaccnaacaanancttcccaaagcnttacttnaaaaaaggggaaattgaccactttttggaaaaggtgggaaccaaaaaaaaaancccttcaagggttttnaaaacttcctttgccncnttttttnggttctttttaaaaagggaactcggggttnncttattccccccccctcacncctttttttgctttaaaanagcttnnnttantttnnaagnccanaaaatttttccaaaaantanttnccngantttctttngcctatatttnttttaaaatttttttccanccccccccctcccnnaaaaaaaangggnaatnaatataggggggggggggggggngttttntntttaaaaaaaaacctttttttttcccggggggcccntttaaaagggnantttccccccccntgngnccnnttttngnnntccnanctgtcccaaactggggnaaaatngnaaaaanttttctctggtnaaantttttncnnaaattnccccaaatntaacccngntnatagntataaccccggggccncanaangnaaacnnccannaantngnnggnananccccntttanatnngganaatntncnncnnttttanaannncnccccccggggggggatntttttgnncttnncttccnaaattanngtgnnttgnngggggga

SEQ ID NO: 7355 - DNA, 1166 bp, Homo sapiens
  misc_feature 6, 16, 39, 42, 44, 365, 376, 464, 466, 516, 523, 525, 538,561, 564, 598, 600, 608, 618, 637, 641, 647, 655, 689, 693,704, 712, 725, 727, 728, 746, 747, 767, 776, 793, 794, 798,814, 824, 834, 836, 839, 841, 843, 845, 851, 852, 862: n = A,T,C or G
  misc_feature 864, 867, 873, 879, 880, 884, 904, 920, 940, 948, 950, 963,966, 968, 969, 973, 977, 979, 982, 983, 986, 990, 992, 993,996, 1004, 1009, 1012, 1014, 1018, 1020, 1029, 1039, 1042,1043, 1051, 1054, 1062, 1066, 1067, 1068, 1069, 1077: n = A,T,C or G
  misc_feature 1084, 1087, 1089, 1090, 1091, 1094, 1099, 1101, 1102, 1105,1110, 1113, 1115, 1116, 1117, 1122, 1123, 1124, 1125, 1126,1128, 1135, 1136, 1137, 1139, 1142, 1143, 1150, 1152, 1154,1155, 1164, 1165, 1166: n = A,T,C or G
gccagngtgatggatntctgcagaattcgcccttagcgnggncncggccgaggtacccaccaccacacccagctatttttttgtatttttagtagagacagggtttcaccatgttggccaggctggtctcgaactcctgacctcaggtgattcacccacctcggcctcccaaagtgctgggattacaggcatgagccaccgtgcctgaacttattttatagctctttggtctcctcccagatggcttggcaaacagcgattactgatgagtgttacccatcatgcaacaattctgctctcttttctgtcacacggtggtcaaaggctccagatagtcctccaatttaatgtaaaatgagacttgnttttgattganggtctgaaggactctgcttcatgggtgacatccataaattttatgttccagcatatggtttatcttggggaatgttccatgtgccctnanctatgcacccgacccaccacgtgcttctggtgcacattcaccggctcttnctgcctnantttctccttttgnaaaacaacagctttgtaaaaggnctngggatctttttcattcaccgggagtttttttaangntgccagcnaaagaaggtnggaaaaaggaccttgcccnggcnggccgnttcgaaangggcgaaatttcaacacaacttggcgggccgtantaanggggatcccgncttcgggnccaaagctttggngnnaaacatgggcaaaagctnnttcctgggggaaaattgtantcccttcanaaatttccccccaaaannccancccggaaacataaagngtaaaacctnggggggcctnantgngngncntacctnnaattaattgngntgngcttantggccnntttnaaagggggaaactttttgcncattctttaaaaaatngcccaaccccggggaaaggnggtttggnanttgggcctttccnttntnntaantaantnttnnctngggntnnggntggggganggttnaantnaatnangggggaatnggtttcccanaanngggggaanccnggaaaaantttnnnnaaggcccnaagggcngancnnnaanggggntnntgngtttntangnnnccccnnnnngnaaaaaannntnatnnggggggnancnnggataaaannn

SEQ ID NO: 7356 - DNA, 649 bp, Homo sapiens
  misc_feature 204, 205, 210, 216, 230, 231, 233, 237, 238, 248, 251, 260,262, 274, 278, 280, 286, 288, 291, 310, 312, 328, 332, 353,357, 363, 370, 373, 382, 399, 423, 424, 446, 448, 456, 463,469, 482, 487, 488, 490, 498, 499, 507, 509, 510, 511: n = A,T,C or G
  misc_feature 519, 521, 525, 534, 538, 544, 549, 550, 556, 561, 563, 567,569, 572, 575, 580, 585, 591, 593, 595, 599, 601, 618, 629,630, 635, 637, 642: n = A,T,C or G
gattgtatacgactcactatagggcgaattgggccctctagatgcatgctcgagcggccgccagtgtgatggatatctgcagaattcgcccttagcgtggtcgcggccgaggtactttttttttttttttttttttttttttttcttttttttttttttttttttttttttttttttttttttttttttaaaaaaaaaaaaggnnggggnattttnttaaaaaaaaaaannantttnnttttttaaantanttttgagtntncctaaattttanagtntntaggcntnaanaaaaaaattgattaaattntntttttttttaaaaaanaaanttccaaaaagtaaaagggatngctngggatncatttgnttntttttaaanatttttttttggtaaanaaaaacattttgtttttaaaatgnntccaaaattttgtttttttttntncaaacggntcaaaanaaaaanttcctgcccgggnggccnntnaaaagggnnaatttcancnnnctgggggncnttantaggggatncgancttggnccaannttgggnaaatnangggnanaanttnttccnggggnaaattntntncccntnaaattcccaaaaaatanaaaccggaaannaaaantnaaaancctgggg

SEQ ID NO: 7357 - DNA, 649 bp, Homo sapiens
  misc_feature 445, 453, 459, 481, 508, 518, 531, 533, 548, 586, 603, 604,606, 607, 616, 620, 623, 624, 625, 635, 636, 637, 638, 639,640, 645, 646, 649: n = A,T,C or G
gattgtaatacgactcactatagggcgaattgggccctctagatgcatgctcgagcggccgccagtgtgatggatatctgcagaattcgcccttagcgtggtcgcggccgaggtacaggaggccgacaatttggtgaccagtgatggcaggccactcagctttgagtagccatgtccgccacaggccctgcggcacatctcagctccctgggtgcagaattctgacatcatggccttcatgcccgtgctcagtgcgtggagctgtgagaacatggaggggggttgggcggtgttagggggcctccaccatagggaccaaccctgtgcaccacttactgagcatctactcatgcccagctcagctctgaggtccccgcgtacctgcccgggcggccgctcgaaagggcgaattccagcacactggcggccgttactagtggatccnagctcggnaccaancttggcgtaatcatggtcatanctgtttcctgtgtgaaattgttatccnctcacaattncacacaacatacnanccggaagcataaagngtaaaagcctgggggtgcctaatgaagtgagctaactnacatttaattgcgttgnncnnacttgcccntttncannngggaaaactnnnnnnccaanntgn

SEQ ID NO: 7358 - DNA, 643 bp, Homo sapiens
  misc_feature 104, 112, 117, 244, 307, 418, 544, 564, 586, 589, 591, 607,610, 642: n = A,T,C or G
gattgtaatacgactcactatagggcgaattgggccctctagatgcatgctcgagcggccgccagtgtgatggatatctgcagaattcgcccttagcgtggtcncggccgangtacnccgggtttagaaaagggtggttttgttctcactaatttcatgagagaaaagtggattggaggaacctacaagtgaagtggcatcattgtctggggtaaatacctggggttggtcattttgtgctganaagattaacaacatggacacgcacacatggaatgggttaaggagcggaaagtttaataagcanaagaaaggggagaggagagcagccgtctctgtctgtctcttgccagagagaggtatctgaaaaggaaagacctgctggtggcagagtgcactggattctacaggcaagctngagaaggcactgtctgatttatgtagggcccacagattgattggatcaggtgtgacatttacattgtgtgtgggaaggctggtcgccccaccctaatcttattatgcaaatgggctttccacttgnccagaaccatcttgtctgtncttactggaccctgcccgggcnggncntcgaaagggccaattncancacactggcgggccgtacctaggggatcccanc

SEQ ID NO: 7359 - DNA, 1204 bp, Homo sapiens
  misc_feature 36, 86, 113, 314, 395, 413, 435, 457, 471, 474, 476, 483,487, 492, 500, 508, 516, 517, 521, 522, 532, 558, 584, 585,587, 603, 606, 607, 618, 626, 645, 649, 659, 664, 672, 674,678, 686, 687, 689, 690, 693, 701, 704, 708, 733, 737: n = A,T,C or G
  misc_feature 749, 756, 760, 767, 779, 784, 788, 804, 805, 819, 825, 836,842, 844, 852, 855, 858, 860, 863, 864, 866, 873, 874, 879,880, 884, 886, 898, 909, 932, 936, 939, 941, 948, 950, 951,952, 953, 957, 960, 964, 965, 966, 968, 971, 981, 983: n = A,T,C or G
  misc_feature 998, 1002, 1007, 1009, 1010, 1012, 1020, 1021, 1025, 1027,1031, 1034, 1037, 1038, 1046, 1048, 1049, 1054, 1063, 1065,1075, 1086, 1096, 1101, 1109, 1125, 1126, 1127, 1130, 1131,1141, 1145, 1152, 1154, 1157, 1162, 1163, 1174, 1186: n = A,T,C or G
  misc_feature 1188, 1192, 1194, 1195, 1197: n = A,T,C or G
ccagtgtgatggatatctgcagaattcgccctttcnagcggccgcccgggcaggtacgcgggtgtctggaagctgatggagctcanaattccactgtcaagaaagagcagtanaggggtgtggctgggcctgtcaccctggggccctccaggtaggcccgttttcacgtggagcatgggagccacgacccttcttaagacatgtatcactgtagagggaaggaacagaggccctgggcccttcctatcagaaggacatggtgaaggctgggaaccgtgaggagaggcaatggccacggcccattttggctgtancacatggcacgttggctgtgtggccttggcccaccttgtgagtttaaaagcaaggctttaaaatgactttggaagagggtnacaaattctaaaaagaancatttgaaagtgaggtgtcatngatttaatttgaccccctgtcntattggcaattacnatntnaaaaacntttnttttntccacttntatttttnggtttttnntttnnaaaaaccttngacaaaaaaaaaaaaaaaaaaaaaanaaaaattttccttttgggccggcaannantccttaagggccgaanttnnagccccccttncggggccntttcttaattgggatcccnaaanttcggtaccnaaagnttgggggnanatcntgggtccnnannctngtttcctntgntggnaatttgttttcccctttaacaattncccncaaaaatttccnaaccggnaaancttaaantgtgaaaacctnggggngccnttttgggggggccaannttacatttttttgngtgggnctaacttcccnttttcnantgggaaanctnctntnccnntntttttanngaatnnccanancccggggggagnggggttgggtnttgggggcttttaaatttttttnaatnaantnttggttngnnnntcgnttngggnnngnttnaattttaaangngggaaccgttttcanaaancgggnanncncggaaaanntttngnaaangcnccnnaaggcggncnnaaaanggccggttntnttttttaatngtctccctttnaggtcaaaanatccntaatttangggggacccccgggannntannccgggttccngggnaatttgngnttnttaannccccaaataancgagtctttctntngaangnngntttataa

SEQ ID NO: 7360 - DNA, 1180 bp, Homo sapiens
  misc_feature 5, 8, 10, 11, 15, 17, 27, 29, 32, 34, 36, 38, 41, 44, 47,49, 51, 53, 57, 58, 59, 61, 66, 67, 69, 71, 75, 76, 84,87, 185, 192, 221, 358, 399, 421, 453, 461, 472, 473, 482,496, 506, 520, 528, 546, 547, 550, 551, 554, 560, 566, 569: n = A,T,C or G
  misc_feature 578, 591, 604, 611, 615, 624, 627, 633, 635, 647, 661, 664,679, 684, 689, 694, 700, 701, 702, 710, 718, 724, 734, 739,741, 742, 752, 754, 762, 764, 768, 769, 774, 777, 795, 805,808, 811, 818, 824, 825, 839, 863, 865, 867, 871, 882: n = A,T,C or G
  misc_feature 884, 885, 890, 900, 904, 907, 912, 923, 928, 938, 942, 947,951, 955, 970, 971, 980, 985, 991, 997, 1004, 1009, 1011,1013, 1024, 1029, 1032, 1033, 1034, 1039, 1042, 1049, 1051,1054, 1056, 1058, 1061, 1067, 1070, 1079, 1085, 1088: n = A,T,C or G
  misc_feature 1092, 1094, 1101, 1103, 1105, 1106, 1109, 1115, 1121, 1127,1138, 1145, 1146, 1148, 1150, 1154, 1156, 1161, 1163, 1165,1168, 1169, 1171, 1175, 1179, 1180: n = A,T,C or G
actgngtntnntatnantctaattaantnttntncntntanatnttntntntntgtnnntntatanntntntatnnatcaagancancgcaggattgtatacgatcactactgctatagggcgaattgggccctctagatgcatgctcgagcggccgccagtgtgatggatatctgcagaattcnccctttngagcggccgcccgggcaggtacacactanctgataagacactgttgcccataatgtctatttattggatcagcaatttataagtcccacattctcatgccacatagctctacacagctgcaaaaatataccatagcttgcaggtgatcattggtttgataaaaganatttgaggtcgctcatccttgtgaaaagtgatcttttgatntaaggagggagcatcaagccgnggggaagcttcaccaatgttcccggtggctcnacaccacncaagaaagggnntttttgggngtctttggtcattngtacttgggnttggccaaggttcncaatgggncaaatggggctttttttnnaannaanaagggncccttngtnttttttggnggggtttaaaccntggtgggttgttnacccttnctgnggcccggcntancccaancnccttataagggnccgaaatttttccnaancaacaacttgggccnggggnccganttacnttaagnnngggaattncccgaaancctttngggtaacccnaaaancnnttggggcggntntatttcantngggnncaatnaancttggttttttccttggnggaggaaaanatntgngttattncccgcnnttcaactaaatttncccccccccccaaccattttcctnangncccngggaaaggccntnnaacanatgggtacanaagnccntgggnggtgggccctnaatgnggagggggangccnttaancttnaccntttaaaatgtgggcnntttgccgcnttcancttggncccccnttttttncaatntngntgggaaaaaanccttnatnnntgccncanattttgntnatntnanatntaaaantcntgccccaancccccnggnggantnaagggcntntnnttngagatnttatgnggcccnctttttatcangcttttnncntnagantnaactngnanttnngntttnggcnn

SEQ ID NO: 7361 - DNA, 889 bp, Homo sapiens
  misc_feature 130, 132, 144, 146, 158, 167, 170, 173, 177, 186, 192, 221,225, 245, 285, 289, 299, 310, 316, 320, 329, 334, 352, 356,368, 379, 383, 386, 417, 427, 437, 443, 445, 468, 469, 484,487, 498, 507, 510, 511, 517, 520, 521, 530, 535, 546: n = A,T,C or G
  misc_feature 556, 566, 580, 593, 606, 607, 615, 626, 634, 640, 660, 663,668, 675, 678, 679, 684, 702, 707, 712, 718, 727, 729, 731,755, 762, 768, 769, 774, 778, 779, 787, 788, 793, 800, 812,818, 820, 821, 830, 833, 838, 845, 854, 856, 863, 866: n = A,T,C or G
  misc_feature 869, 875, 887, 888: n = A,T,C or G
tagggcgaattgggccctctagatgcatgctcgagcggccgccagtgtgatggatatctgcagaattcgcccttagcgtggtcgcggccgaggtactttttttttttttttttttttttttttgggacanantctctgtcactnangctggagtgcantggtgcganctnggntcantccaacatntgcctnttgggattcaagcaattctcctgcctcancttnctgagtagctgagcttatanacacaagccaccacacccagctaatttttggctttttagnaaanacggggtttncccatgttggnacaggntggncttgaactnctganctcaagtgatccacctgncttnaccttcccaaantgctgggattnacanggngtgagccaccacacccgggcccaaaaagtgntgacatttgnaaacataaanttccancntttttcaaatgggaaaggggccnntttttttttttaatnttnaaaagaaatanttttttaanagnntacccnggnntttccgcgntcccntttgggccccnaggggaaaanaaaattcctnaaaaaatttttttnaaagggaaggggngaaaaaaaggggnnaaatgtantttgtaaacanaacccccntttganaaaaagtttttttttttttnttnacaantatttanccnnatttncctgggttaaaaaaatanaaacntccanaaaaanttttttccntnancccatttacctttttttcccttgnaaacccnggaacnnccccntttnnggggaaanncccanaatttcncatttaaaaaantttttnannaccaaaaanttntaccntcctttncccaaacananttaaggntgnaancaaaanaaattttttacnnt

SEQ ID NO: 7362 - DNA, 918 bp, Homo sapiens
  misc_feature 80, 82, 90, 126, 147, 214, 230, 251, 272, 308, 312, 389,394, 400, 402, 415, 440, 442, 450, 463, 470, 481, 492, 495,507, 510, 511, 518, 521, 524, 539, 544, 552, 558, 560, 562,565, 580, 597, 599, 605, 608, 620, 629, 633, 638, 639: n = A,T,C or G
  misc_feature 644, 651, 653, 662, 669, 671, 676, 680, 683, 689, 690, 693,697, 701, 702, 703, 709, 713, 723, 732, 742, 743, 747, 748,750, 754, 760, 766, 768, 770, 783, 784, 785, 788, 792, 793,801, 815, 816, 824, 825, 829, 837, 850, 851, 854, 858: n = A,T,C or G
  misc_feature 862, 874, 877, 879, 880, 882, 885, 887, 888, 891, 899, 907,910, 911, 913, 914: n = A,T,C or G
gggcgaattgggccctctagatgcatgctcgagcggccgccagtgtgatggatatctgcagaattcgcccttagcggggncncggccgangtacacatggccctttgttcatgttactctaatcgnggaataatgcgttgtcacatntctgtcacttcctggaccctgagctcccgggggtggactcatgctgctaatgctcctactaagcctnctccattattctcttntttgttttcctcttacctatnatcatcactaacatttttatnattgtcatcattgcatctctatctaacctgaccctntaanacccagcacagagcatatagtaaatgcatcctgattaatttagaattagtaaggtaacttttatcaaatatataggnaaggngctttntntttttttttttanagactaaatggggaaaagcctcctnanctagcatnaagattgcttccnttttttnggatccctttnttttggaatcnatnaaaaaaagtggnttnntttcccnttnctncacacttttgggacnaaaanacccttgngaagcnananagntgttttttttttcancccccccgtggggggcncnggccanttnacccttgccccnggggacggngtcngttcnnaaaangggggcnanaatttcccnagcacancntgggngggngtnggttgnntanaagngggnnncccgancctntgggtatccnaaagctttnggagggggannaaanngngccnaaaccngggttntncnttggtgtgaaaannntgntaannccgggttncacaaatttccccnnccaaactnnctanagcccggnaaatcttaaaaannttnaaangccnggggggggcccntanannantgngnnccnaacctacnatttaaangcnncnngccc

SEQ ID NO: 7363 - DNA, 1290 bp, Homo sapiens
  misc_feature 1, 4, 5, 6, 7, 9, 11, 14, 16, 18, 19, 20, 22, 30, 31, 37,40, 45, 46, 48, 51, 54, 55, 59, 69, 75, 76, 80, 90, 96,97, 101, 110, 113, 124, 132, 139, 151, 152, 179, 191, 217,232, 248, 275, 302, 318, 367, 414, 417, 420, 431, 435, 453: n = A,T,C or G
  misc_feature 454, 459, 460, 465, 476, 481, 490, 492, 494, 498, 503, 514,523, 526, 531, 532, 534, 539, 547, 554, 555, 558, 566, 583,588, 591, 594, 606, 616, 619, 623, 627, 629, 630, 637, 640,642, 647, 649, 662, 672, 673, 675, 678, 686, 691, 695: n = A,T,C or G
  misc_feature 706, 713, 717, 718, 725, 732, 734, 742, 752, 758, 762, 765,785, 798, 804, 806, 811, 812, 824, 829, 831, 845, 846, 847,863, 865, 867, 868, 891, 893, 898, 899, 906, 910, 914, 915,920, 925, 926, 930, 937, 945, 946, 965, 976, 978, 980: n = A,T,C or G
  misc_feature 982, 983, 987, 990, 993, 1003, 1005, 1007, 1008, 1022, 1027,1030, 1033, 1042, 1061, 1069, 1072, 1080, 1088, 1089, 1097,1104, 1106, 1112, 1114, 1116, 1118, 1120, 1121, 1128, 1129,1131, 1132, 1135, 1136, 1140, 1142, 1146, 1151, 1154: n = A,T,C or G
  misc_feature 1170, 1178, 1179, 1183, 1186, 1197, 1200, 1203, 1207, 1208,1209, 1213, 1217, 1218, 1225, 1226, 1227, 1229, 1230, 1234,1235, 1242, 1245, 1249, 1251, 1255, 1259, 1274, 1276, 1277,1278, 1280, 1283, 1289: n = A,T,C or G
natnnnncntnttncnannnanactatcanntgtcangcntgtanntnatnctnntcgngtaatctaanacactnnatgngacgcctgangcacanngagnaggaggcgnagnttgaatacttntaactatngggcganttgggccctctnnatgcatgctcgagcggctcgccagtgngatggatatctncagaattcgccctttcgagcggccgnccgggcaggtacaangaaagagagagccttntggtgaaaatcaaagtcctggagcaangacaaggcaaggctgcagaggctggangatgagctgaatcgtncaaaatcaactcttagaggcaagaaaccaggggtgaaacaccgcctggnagtgttgagtaaacacgcaaattcagaatggaccttgaaatcaagtnggnaangacctcaaatntttnccccccaagggagggganngcttnntttanggaaagaatanggaanatccgggananangaangaaanaaagggaggtntcatcacanganacgcnntnataantgtgcttnacgatcnnatnacctggtntgacccttcgtggggcnccgtnagnaanccaaccgccctnaaatgggggnccnaaanattntnncaaaccnacnancttgngncccggggccccgngttatccatnnanttnggggaaanccctngaanactttcggggntaacccnaaannacctttnggggcgngntaacattnaaatggggtnccaatnaatnctngggtttctccccttggtggntgaaaaaattttngttaancnccggnnttctcccaaatntcgcnanctccaaaccatttnnncgcgatacccgggaanangnnctttataaaaggtgtttaaaaantnccccnnggggggngggncccnnaaaanggagnngggnagcctcnaaccttcnnccattataaattttggggngttgcgcgacncncnanntgtnccncgnttttttttcnanannccgggggaaaaaanccctnttntcnggccccacnacttgccaatttaatatgnaaaaaacngtntccaaacnctcccccnngggaaganaaggggngngttttntncntnannagggggnntnnatnntacnanggtnatctnttngggatcataacgtagnaatctcgnntcgntgnccttatggggncangtnttgnnnttantganntgaccannntnncgtnnttttcgnttnaaantncganaaancgcgcggtcaaatancnnngngtnttatcnc

SEQ ID NO: 7364 - DNA, 1210 bp, Homo sapiens
  misc_feature 1, 2, 4, 8, 10, 11, 12, 18, 20, 22, 30, 31, 32, 35, 36, 39,41, 42, 47, 48, 49, 53, 58, 59, 60, 61, 63, 64, 68, 71,74, 78, 81, 82, 90, 93, 111, 118, 222, 293, 297, 321, 330,371, 414, 420, 431, 465, 468, 489, 517, 519, 531, 534, 535: n = A,T,C or G
  misc_feature 536, 542, 556, 559, 567, 583, 599, 612, 616, 631, 633, 635,640, 649, 653, 654, 674, 684, 690, 694, 702, 706, 714, 715,729, 734, 739, 745, 752, 771, 775, 798, 801, 804, 806, 817,820, 826, 831, 839, 840, 847, 856, 863, 864, 867, 877: n = A,T,C or G
  misc_feature 882, 884, 889, 894, 895, 902, 907, 908, 912, 919, 922, 927,928, 933, 942, 949, 957, 965, 967, 974, 978, 986, 987, 988,993, 997, 1003, 1010, 1014, 1021, 1033, 1039, 1047, 1048,1056, 1060, 1062, 1076, 1082, 1083, 1085, 1086, 1087: n = A,T,C or G
  misc_feature 1090, 1122, 1125, 1138, 1139, 1140, 1145, 1147, 1153, 1159,1160, 1165, 1172, 1190, 1192, 1198, 1202, 1207, 1209, 1210: n = A,T,C or G
nncncgtnannngtaganananatgctccnnntannacncnnacatnnntagnatatnnnnanntatntanttncatnacnngtagggcnganttgagactttgtacgacncactatntggcgaattgggccctctagatgcatgctcgagcggccgccagtgtgatggatatctgcagaattcgccctttcgagcggccgcccgggcaggtaccaccgtancaggcattggtggtatctatgccctcaatatcagtattgcctgaatcctggaagagttccatgagcactgntttngacagctttggacttgtcaatganggtctcagngcctacttccagcctgcccacagagtcccatggggagctgnatgcgctccatcagcccgtttgcacccaccgtcaggcaccagnggaagntgaaagtcctntttgggacctggagcaggaaagccccataaccgnggntcttggccccaaaggcccccncctggtaattaacctttttcccttggcntntcccaacaattnggnnnaataanctttccttccaagnggntcaaggtnttgggggtccccaccnattaattttgggggcnttgggggaaaagnttangaaaccccttcccangnanccccnaggggaatnggcnnccaacggttcgccttttttngggccaaaanattatntctngggttttntggngccccaanngggggggaaccaangacanaaaanggcttnggtaagnaaaaaaaaccccttttggnggtnggggggccttaacctgggggganacnaangncccaaagaccnaangttgtntgaangggggaannggttttncccttggcnaccccgnnttncttttgatgnaaagntnggcangaaannggcgccnttccnntttnggggagnttnaaaannaaganccgcctgcnatttttnccaatgangggaggcnanatgcccngaanaaaccccnnncccgngttntcatgnaaaaccnccanactctgnaaaacccctttnggaaangaaaaaanncccctggntggnanccctttggggcccncgaaanncnnncgncctaaaggggggccggaaattttccgagacgncancttgtggcggggnnncgttntnctatanttaggnngaccnccaaacntcttgggatacccaaaancntgatgncggntatanann

SEQ ID NO: 7365 - DNA, 942 bp, Homo sapiens
  misc_feature 283, 334, 338, 339, 346, 349, 373, 380, 382, 396, 399, 432,436, 444, 451, 454, 463, 471, 479, 489, 496, 502, 533, 534,544, 546, 589, 590, 594, 632, 633, 634, 636, 637, 641, 642,657, 662, 663, 669, 670, 680, 695, 698, 731, 738, 741: n = A,T,C or G
  misc_feature 742, 743, 751, 756, 757, 779, 784, 786, 794, 795, 798, 805,808, 817, 828, 829, 831, 832, 835, 836, 837, 844, 849, 853,859, 869, 870, 871, 878, 887, 888, 891, 894, 898, 899, 901,904, 912, 925, 927, 936: n = A,T,C or G
gggcgaattgggccctctagatgcatgctcgagcggccgccagtgtgatggatatctgcagaattcgcccttagcgtggtcgcggccgaggtacgcgggaagagaaaatcacttggtttatagaaggcctttaacattttgtgagtatgtgttttaaaccaaaacccatagataggaagagccgacagggagctggaaactgcaataagctttcttctaactagcaaacgcagttgacagacatctttttatagacgtatctgtgattgcacgctgtttttangcttgataattttttcaacaaggaaaaacttttttttcaatttgaaaaaanctgnntttacangtnaaaatgggccaaagtttttgaggnaggaccncnaaaagccccatccntgnttcatttcttaaaagcttaaaatttgggggccnccantttccccnttaaaanggngtttggacncacccagnccccgccngtttgggaanccccaantttaanggggtggggtttttaggtggaaagggaaaanngttttttttngnaatacctggccccccccccaaataaaatttttttcaaaccccnntggnaattttttttttttttgggaaaaaaggggccccaaaannncnnttgnnaaagagggggaaaanggggnnaaaaannaaaaaaattnaatttggaaattttngcnaaaaattttttttttaaaccaccctcttggggntttcccnaannntaaaaaanaaatnnaatttttttaaagggcccgggnccccncngggggccnnccntcctttnaantcccccccnttttttggggnngnnttnnnggggggnccaantttncccggngggccccggnnnttttttnaaaaccccnnttnggnccannantcnttttaaanccctttttttttntntaaaaaaancaaaag

SEQ ID NO: 7366 - DNA, 1209 bp, Homo sapiens
  misc_feature 2, 3, 4, 5, 6, 7, 8, 19, 24, 25, 26, 28, 29, 31, 33, 39,41, 43, 45, 47, 49, 52, 53, 55, 56, 57, 60, 61, 65, 69,71, 84, 85, 90, 96, 119, 267, 331, 355, 389, 392, 393, 407,414, 415, 426, 450, 454, 457, 467, 476, 506, 520, 522, 535: n = A,T,C or G
  misc_feature 558, 568, 578, 597, 637, 640, 649, 653, 672, 675, 676, 679,705, 725, 732, 769, 783, 785, 786, 795, 807, 810, 823, 827,831, 836, 840, 854, 862, 866, 874, 881, 883, 884, 888, 890,891, 893, 894, 901, 908, 912, 914, 918, 921, 927, 931: n = A,T,C or G
  misc_feature 948, 964, 965, 966, 972, 975, 979, 985, 993, 994, 995, 999,1016, 1018, 1019, 1020, 1022, 1024, 1033, 1035, 1046, 1047,1051, 1053, 1072, 1089, 1095, 1100, 1101, 1108, 1116, 1118,1119, 1129, 1145, 1146, 1147, 1150, 1167, 1171, 1174: n = A,T,C or G
  misc_feature 1176, 1189, 1192, 1199: n = A,T,C or G
gnnnnnnntatatatatanatatnnntnntntntgtgtntntntntntntanntnnntgnntgtnttcncntatatcatatttnntaganaaggtnaggattgtgaacgcttactactnactatagggcgaattgggccctctagatgcatgctcgagcggccgccagtgtgatggatatctgcagaattcgccctttcgagcggccgcccgggcaggtacccatataaatcccaaacccccagctccaaaaggagatgaatagaanagcagaagaatgcagagtggcaaggcaaagaatgggagaagagaaggagcatctgaaagttganaggagttgggctggggacggtccnagaggagattggcccgctgggatggccaaaattncanngagaaaaataaatnttacttnnatccccctttncaacttgcccattacacccctgcntganaancccacttttncattcactncaaaattaaaaaccccccccacaatttcantccctttttaaaantnttggtggccgaanttttggaccttttttcttggggnattaccccanggaaaaaaantttaacccttggggggttnccccaaaagaagggggccaaccccggaagcctttgggttntanccaaccttntttncaagtcttgggtttttttnaannaantgggggcaaaaaatttttaaaaaaanaaagcccaccaacctggttnaaccacnaccaccccccccttttgggggctttttaatggggagntgtcaaccaagggncnnccccccaanccccttttaaanatnccctaaccctttngggngggnttggngaanccccccaaaagggncacctttngccntttggggngttgggntnngaancnntnnccttggntgaaaanacantncctnccncttgtncctnggaaaaaagggggcccntttaaaaaaattgtgnnntggtgnggngccnaaaacnagaattgnnntcanacccaccccctttgttncnnnancngttcctttngntaaaaggtgtnntcananggggaaaactttctatccnttcttcttcaaaaaatnaaaatntcacnnctccctntttgtttncnnggggttcgtnaaaaaaaaaaaaaaannntgnggggttaggataaaaancttnatncnccaaatctatttntantaagaanccaaaaaaag

SEQ ID NO: 7367 - DNA, 865 bp, Homo sapiens
  misc_feature 1, 518, 558, 573, 577, 586, 609, 625, 627, 628, 631, 640,645, 650, 654, 660, 667, 683, 689, 695, 711, 717, 718, 723,733, 739, 745, 750, 751, 765, 766, 778, 789, 803, 813, 814,819, 825, 830, 831, 840, 848, 858, 865: n = A,T,C or G
nactcactatagggcgaattgggccctctagatgcatgctcgagcggccgccagtgtgatggatatctgcagaattcgccctttcgagcggccgcccgggcaggtacaaaacaacacccattaccaccatgtagtttatgattgagccaatacgagaggggtaggcaatgacaaacaggcccagcacatcaaagaagaccatgtttccatgtcgatacttagaagcagcagccagcatatcagatgtagctagatgcttaagaactgctaaaatgttgtcacctgctctctgaatggaatctgttagaattctgtccgctgtgtcatacttggtgtgataaatgtatccattctcaataaaagctaagtctattcctggaatgttcccaaaatccctgtaggataccaaagtcagtatctgaagggaatgattccacttctgaaaaaccttctgagccaccacagaaagcaaaaggggtgttttagctgctgaaacataaactttgaaccaacccaanggattttttagggaccctaaaatgaaaagaatgaccaccnccatttgaaagggtntttncgggccaantttttttttaaaacatacctaantggtttttttcaaccncnnttngaaaaaccncgttnaaaangtgngttggnttttttngggaagaaacggggtnccaatnttgtanctttgggcccggggancccccnnttaanggggcgaaanttccangcacanttggnngggccgggtaattnnttgggattccgnaacttcgggtncccaaaccttgggncggtaaattnntgggncataancctgnntttccttgngggaaaantggtgtattncccgtcn

SEQ ID NO: 7368 - DNA, 604 bp, Homo sapiens
  misc_feature 1, 4, 5: n = A,T,C or G
nttnngattgtatcgactcactatagggcgaattgggccctctagatgcatgctcgagcggccgccagtgtgatggatatctgcagaattcgccctttcgagcggccgcccgggcaggtacacactagctgataagacactgttgcccataatgtctatttattggatcagcaatttataagtcccacattctcatgccacatagctctacacagctgcaaaaatataccatagcttgcaggtgatcattggtttgataaaagatattgagtcgctcatcttgtgaaagtgatctttgatataagaggagcatcagcggggaagctcacatgtcccgtggctcacacaccagaaggtatttgtgtcttgtcattgtctgtctggcagtccatggcaatggctttttcagagaggcctgttttgtggttaactgtgtgtacctcggccgcgaccacgctaagggcgaattccagcacactggcggccgttactagtggatccgagctcggtaccaagcttggcgtaatcatggtcatagctgtttcctgtgtgaaattgttatccgctcacaattccacacaacatacgagccggaagcataaag

SEQ ID NO: 7369 - DNA, 667 bp, Homo sapiens
  misc_feature 6, 500, 524, 607, 631, 640: n = A,T,C or G
gattgnatacgactcctatagggcgaattgggccctctagatgcatgctcgagcggccgccagtgtgatggatatctgcagaattcgccctttcgagcggccgcccgggcaggtacaccagcactgtgaaaacataatttaatgcttataaaggagagagtaaagattttgcttttaatgaagaaaagagaaacagttacatctaattaatcttagatatataatgtagcctaggattaaggcgagtcaaactataccatagctctttctgtgggttaatctgtcttttattagtgtatcatcactttttagactgtttgggctgttttacagaaatagcaaaaagaaaatacattaaatcagaatttatttaatctttacctaggtgaaagctaaaagttttatgctaagattagtgtaaacttgggtaactgaaaaattgtcccaagttttgaattaaatttggccacccaaggtacctcggccgcgaccacgctaanggcgaattccagcacactggcggncgttactagtggatccgagctcggtaccaagcttggcgtaatcatggtcatagctggtttcctgtgtgaaattggttatccgntcacaatttccacaccaacatacnagccggaancctaaagtgtaaagcctgggggtgcct

SEQ ID NO: 7370 - DNA, 593 bp, Homo sapiens
  misc_feature 2: n = A,T,C or G
cnacttactatacgactactatagggcgaattgggccctctagatgcatgctcgagcggccgccagtgtgatggatatctgcagaattcgccctttcgagcggccgcccgggcaggtactcacagctgcatcacactgaatatcatctccctgcactgccatttcatttgagcagggcgttgcctgtcaagaacattcatatcttttgataaacagtgcattttttccctgatagtctgtatgggacagcctccttgtttgcatctgaaggacagggacttcaggacctcctgctgtggtcaccaaggaatcacattcaaacttctcagcaaggtgttatggtccttctcagtttgcctacgatccattgaggcaaaggtttccttctctcaatacaccctctgctttagccagggggacctcccactgtcctctctatgtgttctatttgttcctgactgttagtcctcggccgcgaccacgctaagggcgaattccagcacactggcggccgttactagtggatcccgagctcggtaccaagcttggcgtaatcatggtcatagctgtttcctgtgtgaaattgttatccc

SEQ ID NO: 7371 - DNA, 609 bp, Homo sapiens
  misc_feature 2, 8, 15, 16, 28: n = A,T,C or G
gntttagnctttganngattgtaatatnactcactatagggcgaattgggccctctagatgcatgctcgagcggccgccagtgtgatggatatctgcagaattcgccctttcgagcggccgcccgggcaggtacacactagctgataagacactgttgcccataatgtctatttattggatcagcaatttataagtcccacattctcatgccacatagctctacacagctgcaaaaatataccatagcttgcaggtgatcattggtttgataaaagatattgagtcgctcatcttgtgaaagtgatctttgatataagaggggcatcagcggggaagctcacatgtcccgtggctcacacaccagaaggtatttgtgtcttgtcattgtctgtctggcagtccatggcaatggctttttcagagaggcctgttttgtggttaactgtgtgtacctcggccgcgaccacgctaagggcgaattccagcacactggcggccgttactagtggatccgagctcggtaccaagcttggccgtaatcatggtcatagctgtttcctgtgtgaaattgttatccgctcacaattccacacaacatacgagccgga

SEQ ID NO: 7372 - DNA, 608 bp, Homo sapiens
  misc_feature 2, 3, 5, 7, 26, 33, 35, 406, 546: n = A,T,C or G
gnntnanttttatcgactactatagngactaantntagggcgaattgggccctctagatgcatgctcgagcggccgccagtgtgatggatatctgcagaattcgccctttcgagcggccgcccgggcaggtacgctaggccgcggccttcttttctcccagaaaggtgaccctccccaccctgcgtcctgctccttccgtccatactgatgtttgttttgctggaggccagtagcaactggacagtagctctaggggaggagaatccacctgcggcgaagggtgggatttgttttctttgagccttctccagtgtggggcagctggcgcatctccacttagcgccgggggtccgggatcctacatcgcagggactggggatctcctgggttctgtacctcggccgngaccacgctaagggcgaattccagcacactggcggccgttactagtggatccgagctcggtaccaagcttggcgtaatcatggtcataagctgtttcctgtgtgaaattgttatccgctcacaattccacacaacatacnagccggaagcataaagtgtaaagcctggggtgcctaatgagtgagctaactcacattaattg

SEQ ID NO: 7373 - DNA, 591 bp, Homo sapiens
  misc_feature 3, 169: n = A,T,C or G
ganctttatacgactcactatatggcgaattgggccctctagatgcatgctcgagcggccgccagtgtgatggatatctgcagaattcgcccttagcgtggtcgcggccgaggtacgcgggatttttgtttttttatttgccaatatttgatattaggtcaaggcctanttgaaattccctgacatctttcttgtataaacaatacccacaatgctaatctttatgattttcaatctctgtctctctaaattggcatggtaatttaaagatattgggaaccaatctaaatgcagaatcctcctagatttttactaaatttccccaaaacttcttagttatctaacctacatcagctttagtattttttaatgactcattttgatgaaggccattcaaacattctgcttaattttgatagaaacaatcactttctgtttacctcgtatttcatggatttatatggaataatctgttcacatactatttaattcatacagttggagtaaagaggcttggggccaaacccagtacctgcccgggcggccgctcgaaagggcgaattccagcacactggcggccgttactagtgg

SEQ ID NO: 7374 - DNA, 662 bp, Homo sapiens
  misc_feature 542, 576, 593, 599, 648: n = A,T,C or G
gattgaatacgactcactatagggcgaattgggccctctagatgcatgctcgagcggccgccagtgtgatggatatctgcagaattcgcccttagcgtggtcgcggccgaggtacaggttatatgtggcatagcataaccacagtaagaacagaacagatattcagcagaaaactttttatactctaattctttttttttttttttgagacagagttttagtcttgtttcccaggctggagtgcaatggcacaatcttggctcactgcaacctccgcctcctgggttcaggcaattttcctgcctcagcctcccaagtagctgggattacaggcacccaccaccatgcccagctaatttttgtatttttaatagagagctaataattgtatatttaataaagacgggtttcaccatgttggccaggctggtcttgaactcctgacctcaggtgatcctcctgcattggcctcccaaagtgctggaattccaggcatgagccactgcgcccagtctacacactaattcttgttagcccaacanctgttctgttctatctacccctcatttcacgctnaaaggagtcatacctanaatagntacccacaagaaggaaactggaagccaaacactggacctgcccggcggncgttcaaagggcaa

SEQ ID NO: 7375 - DNA, 613 bp, Homo sapiens
  misc_feature 2, 3, 6, 24, 37, 42, 50, 530, 561: n = A,T,C or G
gnnttngattgtaatacgactcantatacggactcantatanggcgaatngggccctctagatgcatgctcgagcggccgccagtgtgatggatatctgcagaattcgccctttcgagcggccgcccgggcaggtacgcgggggacattcagaggtgagcccagagggggtaaagtggactggggagaacttcggaggatgttcatgtccaggagcagccccacgccctgtatggtcggtgtctagagcctcacagcaactaagaccaacccagctctcagaagaaggaatgtcaaaatgtcatgttcaattttacattcagtgcctggaatcttttcttcacaattgaaatgaaatgtgctgaaggaggtgaatccatgcattaatcttcagctcacaaaggaaatactacataagaagcaagaccacagactcaagacggacataattggattttttttgccatggcctggaaagaaaggtacctcggccgcgaccacgctaagggcgaattccagcacactggcggncgttactagtggatccgagctcggtaccaancttggcgtaatcatggtcatagctgtttcctgtgtgaaaattgttatccgct

SEQ ID NO: 7376 - DNA, 669 bp, Homo sapiens
  misc_feature 190, 215, 266, 271, 288, 293, 317, 344, 354, 385, 407, 414,415, 452, 462, 468, 471, 477, 478, 521, 522, 526, 533, 551,561, 562, 569, 574, 578, 581, 587, 592, 594, 596, 599, 600,614, 617, 620, 621, 625, 653, 657, 662: n = A,T,C or G
tagggcgaattgggccctctagatgcatgctcgagcggccgccagtgtgatggatatctgcagaattcgccctttcgagcggccgcccgggcaggtacttttttttttttttttttttttttttttaggcaaaataaatactttattggtttaatatatatatattttagaaatcagcctttgtgtgatntttcaaacatttataagccttttanagattctttcaaagaacactgttaacaactcgaccacttttgattaaaatntcacncccaaagaaacacaatnggagntgaaaaaattataaatgctagaanaaaaattctaaataaacatttgggggntctttacacntttatttaacgcatataaaaccaaatggggnaacccttttccttttttttcanaaaaacnnaggttttccctggtttaaaacctgaaactaaaattantttttattgnttgganggnggaacnnaattcttaaaatttaccttcccatttttggaaaaaaacaaaannaccnagcttanttcaatttcttatttcantttcaaagtnnataaggnccccntttnttntggggnatggnananctnntattttagggcctnggnaannaccncgaaaaaaagaaaccatttttccttctnaatnaaatngaaagcg

SEQ ID NO: 7377 - DNA, 868 bp, Homo sapiens
  misc_feature 463, 485, 563, 567, 575, 584, 608, 619, 636, 640, 645, 646,650, 662, 667, 674, 681, 682, 687, 688, 694, 695, 703, 706,710, 713, 714, 715, 726, 727, 732, 736, 739, 744, 746, 747,750, 753, 754, 756, 761, 763, 764, 768, 770, 771, 776: n = A,T,C or G
  misc_feature 779, 780, 787, 803, 809, 821, 823, 835, 836, 840, 842, 846,849, 850, 854, 855, 857, 863, 868: n = A,T,C or G
gactcctatagggcgaattgggccctctagatgcatgctcgagcggccgccagtgtgatggatatctgcagaattcgccctttcgagcggccgcccgggcaggtacaaactctcattggctgttgtttcaacagtgtaaccttaattacagaaaaaaaacctatctcaatatcctttgattaagcaaatatctaaaactatacaggttgaatatcacaaatctgaaaatctgaaatgctccaaaaccaataactttttgagtgctcaaaggaaatgctcactggggcgtttcagatttcagattttcagatttgggatggttaactgataagtataactcaaatattccaaaatttgaaaaaatttgaaatccaaatcacttctggttccaagtatttcagataagggatactcaacctgtatttagtaaggtgcagttgccgtgtgcattaaagaaaagctnaaggaacagaagaaaaccagtnaaatgttaacagtttattttttgagtaaccacattatagggtggtttgggtctttggtttttggttttggagaccagnggtnttttaaangggggttantgggcctgggtcattgggcttcantttgcaagccncaaaccccgccccaggncttnaaagnngatncctttcttaccnacaancctttcnaaaagtnngcccnngaaccnnttaagggnatnttgnccnnnttccccccccnnctaancctnttnaattntnnaanttnntnttttngnnaaanannggggngcnnccctttnttaattttttaccatngggccnaaaaaaaaaaantntttttttaaatnngggngntttnatnnttcnnanaatttnatttn

SEQ ID NO: 7378 - DNA, 638 bp, Homo sapiens
  misc_feature 524, 531, 534, 544, 548, 562, 575, 576, 604, 638: n = A,T,C or G
gaatacgactcactatagggcgaattgggccctctagatgcatgctcgagcggccgccagtgtgatggatatctgcagaattcgcccttagcgtggtcgcggccgaggtacaacaggcttcagatgttactatagataatcacaaggaacactgcgcttggggcatgactgccctcagcaacccttctggcggcagacacagttgttagttttccaacatcctgctttcatgagaacagttttctgtttgctcatatagccttcagtggtatactgagttggtcacgaccttcattctttcggcctgtagcatctccccatttttgtttttgcattaattgaataaaggtaattgcaggttgtgcagctctcaattgccgtttggtggtccagctgattttgcagacttatatcagctgtcagcagacttcgtcgcagggtttctcattctcgttctttctttgtcagtgtcagtttctctgctccagcaagaccttcactcacgttcctgtcctaggtgccangttgtcnctntttgggttgntatnggagtgaaccgaanggggatgaatgcnnaaaccgaaagaccaaagaccaaaaagtnttttttggaaagaaagggggcaggggggcttccn

SEQ ID NO: 7379 - DNA, 918 bp, Homo sapiens
  misc_feature 2, 116, 154, 291, 338, 352, 387, 393, 397, 402, 403, 411,422, 430, 449, 465, 466, 473, 477, 481, 484, 489, 500, 503,519, 522, 523, 528, 535, 539, 558, 562, 563, 568, 572, 575,576, 582, 585, 591, 592, 594, 598, 617, 618, 620, 625: n = A,T,C or G
  misc_feature 626, 627, 630, 635, 638, 639, 641, 644, 647, 650, 653, 664,685, 686, 688, 704, 705, 709, 710, 720, 728, 732, 733, 736,737, 742, 743, 754, 759, 760, 762, 774, 780, 783, 785, 790,794, 805, 807, 813, 818, 819, 826, 827, 832, 833, 836: n = A,T,C or G
  misc_feature 838, 841, 844, 847, 849, 850, 857, 859, 861, 862, 863, 869,870, 872, 875, 878, 879, 881, 883, 885, 892, 898, 907, 913,918: n = A,T,C or G
gngcgaattgggccctctagatgcatgctcgagcggccgccagtgtgatggatatctgcagaattcgcccttagcgtggtcgcggccgaggtaccattcttttttttttttttttntttaaaattagtccctcacttttccatgtggatatacnatataattaatcacttccctacggatggacattgagtttatttccaattttcacagttgcaagcaaagctgcaaaacacatcctcacgtagaaaaattggcttgcttatgacatgactctccagaatgaagtcccanaattgaaaatactcaagttaaaagctacaaactcagctgggcgcggntggctcacgcctgnagtccccagccctttggggaggcccaggcgggccnggatcnccanggccnnggagatcngatgaccattnctggcttnacacgggggaaacccccgntttttttcttttatannaaaatanaganttanatnatatnggttccctggnccngggggcgggggccgantcnntaagnggggcgnaaanttcccagcaacactggggngggnncgttnaccntanngggganttncagagnntngggntaccaaagctttgggcggnnancaaannnggngctanaanncnggnttnccntgngggggagaaanatcggttaattcgcgcttcannanttttccacaatcaaannttcnnagccccgggnaaggcttnatanntgnnaaaanncccgggggggngcccnnanggggtgggggcntaaccncananttttntttngggtttggggncncaactnggccnncatttcnnaagtnnggnanaanccntgntnntgccccncntnnnttttanntnaanacnngncncnccccccngggggnaaggggggnttttcngtatn

SEQ ID NO: 7380 - DNA, 648 bp, Homo sapiens
  misc_feature 2, 4, 7, 8, 9, 12, 242, 514, 562, 577: n = A,T,C or G
gnanagnnnttngattgtaatacgactactatagggcgaattgggccctctagatgcatgctcgagcggccgccagtgtgatggatatctgcagaattcgccctttcgagcggccgcccgggcaggtacaggcccttcccgaccgtagcgagggtgctgctgcgctgggggaaggaaaacgccgctttgactgtgccttgttctcacagctggcgggaagcaagcgccttttcgaaagccanaggctcgagttacccctcttaccaccgtcatggcagtcccaggttgcaacaaggacagtgtcagagcaggctgtaaaaaatgtggctaccctggtcacctgacttttgaatgccgcaattttctccgagtagaccctaaaagggacatagttttggatgtcagcagtaccttggccgcgaccacgctaagggcgaattccagcacactggcggccgttactagtggatccgaactcggtaccaagctttggcgtaatcatggtcatagctgnttcctggtgtgaaattgttatcccgctcacaatttcacacaacatacnaagccggaagcattnaagtgtaaaagcctggggtgcctaatgagtgagcttaactcacatttaattgcgttgcgctcactggccgc

SEQ ID NO: 7381 - DNA, 703 bp, Homo sapiens
  misc_feature 79, 157, 181, 349, 355, 357, 359, 364, 366, 367, 371, 372,381, 382, 383, 384, 387, 390, 392, 396, 401, 407, 411, 413,414, 424, 425, 433, 435, 436, 440, 441, 444, 457, 460, 470,471, 474, 475, 484, 485, 489, 492, 496, 499, 501, 503: n = A,T,C or G
  misc_feature 506, 509, 513, 515, 516, 518, 519, 523, 534, 535, 539, 540,541, 542, 543, 546, 547, 550, 552, 557, 558, 559, 563, 567,574, 576, 577, 578, 580, 585, 591, 595, 599, 601, 603, 607,608, 609, 611, 612, 613, 621, 622, 624, 628, 631, 632: n = A,T,C or G
  misc_feature 634, 639, 645, 646, 648, 650, 652, 653, 656, 657, 659, 660,663, 664, 666, 668, 669, 674, 677, 682, 683, 685, 688, 689,691, 693, 695, 698, 699, 703: n = A,T,C or G
ggcgaattgggccctctagatgcatgctcgagcggccgccagtgtgatggatatctgcagaattcgcccttagcgtggncgcggccgaggactatgaattttaaaattatttgcttagacagaatatgtggacatacaaatgatgaatgtgataatngtcatacatatatatttatcttanacacttagtcaaaacatgtggtttttggttatgagttatgacactgtcactttacctggaagatacaaagtaattgggtcatagactctcaaattatggaacacttagatttttcaggggaatgacatggagggagccaaggagtcttatgattaggtaaaatattgnttgggngntngaatncnnccanntaggactgnnnngtntcnangtgngactncataantccnannttgggccaannctggtatncnncatnnaanaggcccttggttnttntttggggaanngcnnggtcatttnncatntancctnccnangnccntantccntnntnntatnagatcttgggnnacannnnnagnntananataannngggnttanaatcctntnnnanaacancccttncccnagtntnanctgnnntnnnaggcaacnngntatnttnnantatanaacaanntntncnntanntnnctnntnanntatangcnccccnntnccnntngngnacnnacan

SEQ ID NO: 7382 - DNA, 883 bp, Homo sapiens
  misc_feature 3, 4, 5, 85, 499, 552, 559, 573, 575, 576, 582, 627, 651,668, 670, 687, 696, 699, 708, 717, 723, 747, 756, 810, 813,823, 830, 832, 836, 852, 854, 871, 872, 878, 883: n = A,T,C or G
agnnnattaaatccttttactatacggcgaatttggccctctagatgcatgctcgagcggccgccagtgtgatggatatctgctnaattcgccctttcgagcggccgcccgggcaggtacctgcaggcctcctacacctacctctctctgggcttctatttcgaccgcgatgatgtggctctggaaggcgtgagccacttcttccgcgaattggccgaggagaagcgcgagggctacgagcgtctcctgaagatgcaaaaccagcgtggcggccgcgctctcttccaggacatcaagaagccagctgaagatgagtggggtaaaaccccagacgccatgaaagctgccatggccctggagaaaaagttgaaccaggcccttttggatcttcatgccctgggttctggccgcacggacccccatctcttgtgacttcctgggagactcacttcctagatgaggaaatgaaacttattcaagaaagatgggtgaccacctnaccaacctcacagggctgggttggcccggaaggctgggctgggcgaagttttnttttttngaaagggttaactntnnaaaccncgaaattaataagccctttttgaagcccaacggactttcttgaanggggccccttgcaaaagtaattanggctttttggccttaanancctttttcctttcaagnccaaattanggnagctttttntttaacttnttcctnaacaaggcccttgggacccaaatngggaaaatnaaaagctttttttggatacccaaaaaaaaaaaaaaaaaaaaaaaaatacccttnggnccggggaacnccctttnangggngaaatttccaccccantnggggggcccgttttttnntgggantcccn

SEQ ID NO: 7383 - DNA, 924 bp, Homo sapiens
  misc_feature 3, 4, 5, 7, 85, 349, 472, 484, 485, 512, 516, 587, 592, 608,655, 657, 661, 662, 665, 677, 681, 686, 689, 695, 704, 716,717, 720, 733, 734, 739, 741, 755, 764, 772, 807, 813, 824,825, 827, 830, 831, 839, 841, 842, 844, 855, 858: n = A,T,C or G
  misc_feature 867, 868, 869, 871, 874, 876, 883, 886, 887, 889, 890, 898,899, 913: n = A,T,C or G
ggnnngnttgaatacgtttactatagggcgaattgggccctctagatgcatgctcgagcggccgccagtgtgatggatatctgcngaattcgcccttagcgtggtcgcggccgaggtaccacgcccagctaattcttttatgtttgtagtagagacgagtttcaccatgttggtcaggatggtctcaaactcctgacctcaggtgatctgcctgcttcggcctcccaaagtgctgagattagaggcatgagccaccatacctggctcttttgcttcatccatcccttaatttctttgctggagcattttaaagcaaatatcagacataccctttcacgccttacacttnaacatgcggcttgttgaaattcgtgctccacttccagcaactgctttcaaatcggagttccatcctccggccgcagtatgccctaacgcagccgttattctttaggagctaccaccagctttncgaaaacctttnngagggagcgcttttgccacccaccttncacnggggaaagcggcgcgtaaaaccaacctcggaaccccccccgcgttacccttgccccgggcggggccgcttngaaanggcgaaatttttcaancaacacttgggcgggggcgtttaacttagtggggatcccgaagcctncnggtnnccnaaagctttgggncggnaaatncanttgggncaataagcntggtttccttgnnggnggaaaattggttnnttccncnttcacaaatttccnccaccaacntttacganccccgggaaagcattaaaaggggggtaaaagcccntggggnggccttaaatnngnggnngcctaacntnncnatttaatttgnggnttggggctnnntnggncnttttttncanntnngggaaaanncttttttttggccntccccccccct

SEQ ID NO: 7384 - DNA, 965 bp, Homo sapiens
  misc_feature 5, 11, 19, 21, 25, 26, 36, 39, 41, 48, 62, 66, 67, 83, 89,102, 161, 192, 214, 264, 287, 306, 307, 314, 318, 324, 325,342, 347, 360, 364, 372, 374, 376, 380, 383, 386, 389, 395,403, 404, 406, 413, 429, 433, 435, 443, 448, 468, 472: n = A,T,C or G
  misc_feature 475, 484, 488, 490, 492, 497, 514, 517, 526, 536, 558, 561,565, 566, 570, 577, 578, 580, 584, 586, 590, 603, 623, 624,625, 626, 628, 629, 632, 643, 646, 660, 661, 665, 667, 675,676, 677, 689, 696, 698, 700, 720, 726, 733, 738, 748: n = A,T,C or G
  misc_feature 752, 754, 760, 762, 764, 765, 772, 775, 779, 786, 787, 792,800, 801, 802, 804, 805, 806, 807, 809, 814, 817, 818, 820,821, 822, 831, 836, 840, 841, 845, 848, 858, 869, 870, 884,888, 895, 896, 898, 902, 908, 912, 918, 919, 925, 931: n = A,T,C or G
  misc_feature 932, 933, 934, 935, 940, 943, 944, 945, 949, 954, 958, 962,965: n = A,T,C or G
ctatntggctntatggcgncntgtnnatgcatgctncancngccggcngtgtgatggatatntgcnnaattcgcccttagcgnggtcgnggccgaggtacancatgcactgcatttaatgtgtatatcaggacaaaaaatattaatgagagaacacacacngttttcttcctccccgaccagccaaattctncaccctccagccccattcaaanaaaggagagaagagtctttcttggtggataagaagcttgattgttttacntaatacaagaattgagaaaaaancgggaggtggggaggttannagggaanggantagccnncttagctcatctggaangtganttttgggaccgtntaanaataattncncntggnacntangancttggnaacccctnncntttgggnaaatctggttaacctnaggngngacctaanaaccnaatttgaatggcccctatantaanctnaacccgggntttngntngcttngggatacccccaaaaanaancctttggcntggtcccttntggaaggctttgaatactatgnaancttnntttnctagggnngngaangnggtnggaaccaaacccntgttcaagaaacccctaccnnnnannccntttttttgggnggntataaaaaaaaccnncatntncttgcccnnnttggggattttnaaccccncntntaaaaggtcccttggggtgngttttncccaaanaccanattttttgtnggcncntttttngngnnccccaantcnttgntttggannctggntgtttaannntnnnntnctttnggnncnnnaaatttttnttgancccnntggntgntctctccaanttttttttttnngggattttttggtncganaaaattnngntttntggtantttnaaactnntagccntggtgnnnnncaaanttnnntccnatggngagnggtnttn

SEQ ID NO: 7385 - DNA, 917 bp, Homo sapiens
  misc_feature 375, 432, 434, 465, 472, 486, 500, 502, 512, 550, 568, 570,582, 609, 623, 635, 648, 659, 662, 676, 695, 701, 702, 707,715, 716, 725, 732, 735, 744, 761, 767, 770, 771, 772, 773,780, 785, 798, 819, 820, 824, 828, 833, 836, 837, 842: n = A,T,C or G
  misc_feature 848, 854, 857, 859, 863, 882, 887, 890, 892, 895, 898, 901,907, 909, 914: n = A,T,C or G
gactactatagggcgaattgggccctctagatgcatgctcgagcggccgccagtgtgatggatatctgcagaattcgccctttcgagcggccgcccgggcaggtacctgggactacaggcatgcaccaccacgcccggctaatttttgtatttttagacgagacagggtttcaccctgttggccaggctggtctcaaactcctaacctcaggtgatccaactgcctcggcctcccaaagtgctgggattacaggtatgagccaccgtgcccagcagaattttttaactatttggttaccgactaatttggataatgtaagtgcatgcagctttgatttgtgccactaagaagtgggcaaactgtcttcctttttntgaatcaagtaaaaatttttccctcaacatgtgtttgacagttgtcattcactgctnangttaagggcattttgggtaaaccacacaagnctcttgnattccttttcctanccgacagccaccananaaaaaagggnggggcattgggggagggggaaaaaatggcttcttggtngaaaattggaacttgggnanggcaaaagcttnccacttttttttttttaagaaaaaaangattgtgagaatcnaaaaattaaccnaaattaatttttnctttcctttgngtnggaaattttcttgnggccctttccatagggtanccttcnnggccngggaaccnncgccttaanggggcgnaanttcccagcncaaaccttgggggggcnggttanctnnnngggaatnccggngcctcggttaccnaaagctttggcggtaaattcnntggnaaantaagntgnntttcntggggngaaaanttntntttntcccctttaaaaattttcnaaacnaananttnganacnccgggnanacatnaag

SEQ ID NO: 7386 - DNA, 937 bp, Homo sapiens
  misc_feature 3, 6, 34, 86, 128, 154, 157, 163, 217, 231, 259, 331, 410,424, 439, 442, 443, 445, 488, 504, 510, 523, 537, 540, 547,560, 567, 577, 580, 596, 600, 606, 618, 626, 627, 640, 648,675, 681, 724, 733, 759, 761, 764, 774, 777, 785, 791: n = A,T,C or G
  misc_feature 792, 801, 803, 805, 811, 827, 837, 861, 864, 865, 879, 891,893, 894, 898, 903, 904, 914, 919, 924, 925: n = A,T,C or G
agnaanatttagaaccttttacgaccactatagngcgaattgggccctctagatgcatgctcgagcggccgccagtgtgatggatntctgcagaattcgcccttagcgtggtcgcggccgaggtactnattttttttttttttttttttttttnacngggtanagttcagggtttattaactttatctgtactttacagcatgttctgtttgggcanagcctttatagcanttgagcatattcagtagcctagtcaganacaatgagatgaaaacttggcctctcatggatacaaaattatgtgattttttccccccccagacctcatagntattcctaggagtcaagaagatgattgcccacaatgtacaagcagtaattgattcactggccttggactacttgcaggncagcttgtcttcanataacagggttggtntanntnataaactattcacataatttatgcattttaagtaaaaaaaaantgttttaaaaacctgngctttnggggcaagtttgngaccctctaaaccnggnaaatttncctttgcctttcntcctggnattgttttcncanctttttttgtggcttntggncgcccntaagcccaaaanaaaagggnngcttctttggaanaaaaaaanttctttctttcaaaattttaagggccngctttnatttcaaagaattcccaccttttttttttaaaaattaaatttnttcccccangggtttttccaaaactttttttttcnanaanaaagggcccntgngccctttnttttcnntccaaaatngnanggggcncccaaaaacccctttnttccccgggnccgggggggctttggttcaactcnaannaaaacccccacatnggggcgttcaantnngttngcggnnttgggcgggngaaanaaaanntttttaaaaaat

SEQ ID NO: 7387 - DNA, 809 bp, Homo sapiens
  misc_feature 7, 139, 146, 183, 187, 210, 237, 257, 258, 271, 272, 289,294, 307, 313, 330, 338, 359, 370, 371, 374, 381, 383, 384,393, 394, 398, 407, 415, 417, 419, 445, 456, 459, 463, 478,481, 487, 503, 504, 511, 520, 524, 527, 528, 532, 540: n = A,T,C or G
  misc_feature 543, 545, 548, 557, 558, 559, 562, 565, 567, 572, 575, 576,579, 591, 594, 598, 599, 606, 610, 629, 630, 631, 634, 638,639, 643, 646, 651, 660, 661, 662, 664, 672, 680, 682, 683,686, 687, 691, 693, 696, 704, 705, 708, 709, 713, 714: n = A,T,C or G
  misc_feature 715, 716, 718, 719, 721, 722, 727, 731, 733, 741, 742, 743,744, 746, 748, 750, 753, 755, 760, 762, 765, 768, 780, 785,786, 787, 789, 792, 793, 794, 798, 799, 801, 802, 803, 806,807: n = A,T,C or G
aaagggnttgtatcgactactatagggcgaattgggccctctagatgcatgctcgagcggccgccagtgtgatggatatctgcagaattcgccctttcgagcggcccgcccgggcaggtaccaggctaagtgggtagtnatatcgngactggctccgcaggagagggtggctttttccctgtntatnatacagggtggctggagactgcntcatcaccatttctccagtggtgtctnggagccagagtaagcaaganngaagagaagctgnncttggggctttcatggntccantgggtcctaactngatcangtaccctcacctgcgtncctaaggncccaaactaagggccgaattncatcacactgnnggncctgtantnntggatccgnngctngaaccaagnttggcgtnananatgggcatagctggttcctgttgtgnaaattgttatnagnttantattttcccacaatntantaaccnggaaagcaaaaaaagnntaaaagncttggggtngccntannagtnaaggcctnaantnacnattaaattnnngtnggngntttanttnnccnctttttaattgnggnaaannctttggntccnaggttgttttaatgaaaannnggnaacnncccnggntgagngcggtattnnntnttggggcnctaatttncnnttnntagntnaanttaatttnntgnngttnnnntnntnntgttntcgntnaagggttnnnntntntnttnanataantngtnttngtggtattttantaaannnanggnnnttcnncnnnttnntt

SEQ ID NO: 7388 - DNA, 786 bp, Homo sapiens
  misc_feature 4, 6, 8, 283, 387, 402, 415, 429, 441, 442, 462, 484, 516,528, 543, 553, 563, 564, 578, 584, 591, 597, 599, 602, 609,613, 630, 633, 645, 658, 669, 681, 691, 693, 713, 715, 720,741, 758, 763, 765, 775, 786: n = A,T,C or G
tgantntngggcgaattgggccctctagatgcatgctcgagcggccgccagtgtgatggatatctgcagaattcgcccttagcgtggtcgcggccgaggtacctgctgtcttatgcatgtttaacacaacagcaacaataatataagtagttagcatatattaaagcattaacgaacaccaagcattgttaaatatattacatgtatttttgcttaattttcacaacattactaatggttaaatattattacccattttgtagggcaaaaaactgaggcttanaaacattgaaaaaaacttgctcaaccgttgcaaaacaagaaatttgtgacactggaattgacatttacaaggggactgatgtaactaaattgctgggatcattntccctcaaagaccanaaacagatcttgnattctagtggatcntccgcccgcaanngaggggccttgaaaacagantaccttgccccgggcggggccnttcgaaaagggcgaaattccaagcacacttgncgggccggtacntagtgggattccganccttcggtancaaacttggnnggaaatcaatgggncataancctggtnttcccngngtngaaaatngtanttccgcttcacaatttncancccaacattacngaacccgggaggnttaaaatggtnaagcccgggggngcctaatggngnggggctaactccccattaantngggtngcgcttaactgcccgcttttncaatcggggaaaacctnttggngncccccttgcntttaaagaaan

SEQ ID NO: 7389 - DNA, 823 bp, Homo sapiens
  misc_feature 39, 147, 151, 152, 207, 375, 382, 389, 404, 439, 459, 482,499, 508, 511, 520, 541, 549, 556, 566, 574, 585, 601, 607,608, 609, 623, 626, 641, 667, 668, 675, 691, 697, 699, 700,714, 719, 728, 735, 740, 744, 748, 757, 765, 774, 775: n = A,T,C or G
  misc_feature 779, 780, 785, 790, 798, 800, 801, 806, 807, 815, 817, 820,823: n = A,T,C or G
agggcgaattgggccctctagatgcatgctcgagcggcncgccagtgtgatggatatctgcagaattcgccctttcgagcggccgcccgggcaggtacgcggggaggcattgaggcagccagcgcaggggcttctgctgagggggcntttnncttgaggaaaccgcagataagtttttttctctttggaaagatagagattaatacnactacttaaaaaatatagtcaatagggttactaagatattgcttagcgttaaagtttttaaccgtaattttaatagcttaagattttaagagaaaaatattgaagacttagaagagtagcatgagggaagggaaaaagataaaagggttctaaaacattgacccgganggttganaatgaanctttcttccattggnggtaaaaaaaatggtttttaaaaagaaaaattggngaagaaaagggccttcccgnagcccccgaaattaaattacccnaattagaaaggccaatncctttttanaantaaaaaggnaggggggccttttaaaccagncttttaanggtttanttttaaaaanggttggtnggggggatttnaaaaaaatttttggangggggnnnttttttttaaaaangangaatttaaaccccanagggggggattttaaaaagaactttnnaattccntggcccccaggggggnaatttncnnccattttaaaaggncttgntttaacccnttttttnttaancccnaacnaaaatgggnaagaattntttgggganngggnnggggntaaancaatttgngnnaaatnnaaatttgnantgnggn

SEQ ID NO: 7390 - DNA, 827 bp, Homo sapiens
  misc_feature 12, 27, 38, 45, 97, 104, 114, 120, 124, 126, 129, 131, 144,148, 177, 196, 232, 251, 258, 261, 262, 264, 269, 272, 274,283, 284, 290, 293, 294, 303, 324, 325, 326, 328, 331, 342,343, 344, 350, 352, 353, 369, 373, 374, 375, 376, 383: n = A,T,C or G
  misc_feature 384, 385, 393, 394, 395, 400, 406, 407, 409, 413, 414, 427,428, 432, 433, 434, 437, 438, 444, 449, 450, 453, 457, 463,479, 482, 483, 485, 486, 490, 492, 493, 496, 503, 506, 507,510, 516, 521, 522, 527, 528, 536, 537, 538, 539, 542: n = A,T,C or G
  misc_feature 543, 544, 548, 549, 553, 554, 556, 559, 561, 563, 564, 566,568, 581, 582, 585, 587, 588, 594, 598, 600, 611, 612, 616,617, 624, 629, 649, 650, 651, 654, 661, 662, 664, 667, 669,675, 679, 681, 682, 684, 685, 686, 688, 691, 692, 693: n = A,T,C or G
  misc_feature 697, 701, 702, 703, 705, 706, 717, 720, 721, 723, 731, 738,751, 756, 759, 760, 761, 768, 772, 773, 776, 779, 781, 783,785, 787, 794, 797, 801, 802, 803, 804, 805, 814, 818, 819,822, 826: n = A,T,C or G
agggcgaattgngccctctagatgcangctcgagcggncgccagntgtgatgggatatctgcagaattcgcccttagcgtgggtcgcggcccgaggnactctcntttttttttncttttntttngntgncnacttttcaggttnaaanttatcttttttcttctaaaagttgcctcnatcttctaatttccctatnttctgtattcttttcttcgccttcccgaactttgtnttttattggtatttccctnttttccnttnntncttcngcnangtttttaannattttnacnntgagaccgnggtaaaaccgcgcctcgccannntngtnaaaattttttnnngggggnannttttatccctcctcangccnnnnaaaattnnnattttttnnnggccnagggcnngncgtnncccttgggcccanncaannnaanngtgganatttnncangggntcttcncgggcttttccaaaanaanntnntaanannatntgtgganaannganttttgncaccnnttttnnaaagctgnnnnaannntttnnacanngntcngncnnancntaggtggaaaaannttngnngttttnccananttcggggaaanngggnnggggggnctttnaaaaaaggatcccattttgnnnttntgccccnngnccntntttttngaananngnnnanttnnnccantaannnanntccccccgacntannanatgccttngcctgtngtccctcaaattngtggnagnnntttattnttannatnctncncntnanaaatgtncancggnnnnnaaatatctntccnnttntaanc

SEQ ID NO: 7391 - DNA, 764 bp, Homo sapiens
  misc_feature 5, 6, 7, 8, 9, 183, 184, 520, 562, 576, 630, 635, 656, 685,695, 723, 725, 761: n = A,T,C or G
agttnnnnntacgactactatagggcgaattgggccctctagatgcatgctcgagcggccgccagtgtgatggatatctgcagaattcgccctttcgagcggccgcccgggcaggtacatgtgctgacgaagaaaagggaagatggagcctccatgttgaacatgcctggccctcaggtaacnntttttgttggcacaactgctggcattcacctgtgcaagcttccagcttgcttatcggtgtttgcagctcgatatttcaggctgctctttgttagaaaataaatgatttgggggctgctttttgttaaaagggaaattctgccgaggactctgttctccttactatctgcctaaataatttctttctagctcctgtatcaaaagcattttttaatattgtaaatttgggaatattatattacctgattttaagactgctttaaagctagagtaaattaaatgtgtgagatgaacataagaacaaacatatggataagtgaaacaaaacggagttcanaaataaaccccacctatatagaaaattaaatattggatctangggccaagtaattnaatttaggaaggtttttttcatttaatgataccagaacaagtgactatttctgngcacnaaaaaaaaccctgcttctttnctcatatatatcaaaaataaatggaatgnccaaattggnacccaccctaaaatgtcattaactgggngnaaggggtgacccaaattgggggtacatttttacaanggg

SEQ ID NO: 7392 - DNA, 752 bp, Homo sapiens
  misc_feature 457, 509, 579, 581, 600, 647, 653, 657, 660, 687, 697, 700,707, 725, 728, 751: n = A,T,C or G
tacgactactatagggcgaattgggccctctagatgcatgctcgagcggccgccagtgtgatggatatctgcagaattcgcccttagcgtggtcgcggccgaggtacagtttctgagtatgggaacttccctccccaagtggtgggaagttacagttaactacagcttactcaactatcacttccagaggtttagtgtttttaatatgggaaagaggagaaatctcaggtctaatcagggttctgcccatcagcttttcactgaaactttcaactgtgttttgttttttgtttttttttccatctttcagtttctagctgtgtttgccttctccctccgcgttccctcctctttttttgcttttggtctcctttccagcttcatgtctccatgagttcagctgtaccctgcatttgggaacagagagaaaaacaaagaatttgctgaaaaaaaatangccagggtgccgggggctcacacctgtaatttcagcattttgggaggctganaatgggtggatcaccctgagggtcaggagttcgagaaccagcctggccaacatgggtaaaaccatgtctntntttaaaataccaaaattangctgggccgtggtggcactttccctgtgaaccccagctacctgggangcttangcanganaatccttgaaccctgggaaagtggganggcttgcaantgnaacccanaacatgccccctggactntanccctggaacaaccaaagccaggnt

SEQ ID NO: 7393 - DNA, 772 bp, Homo sapiens
  misc_feature 3, 315, 371, 409, 465, 541, 563, 596, 598, 599, 645, 649,650, 674, 686, 694, 699, 709, 713, 731, 755: n = A,T,C or G
ctnactatagggcgaattgggccctctagatgcatgctcgagcggccgccagtgtgatggatatctgcagaattcgccctttcgagcggccgcccgggcaggtacctactagatgccaaggtcacgaattagggtaggaaaggagctaagaagagcaaaaatgttaaaaggaatccaaatgattttataggagtggtgagatggtggtaggaagagttgggatgacatcaaggtggaagaagtgttttgttttggagacagggacttgctcttttgcccaggctggagtgtagatcacggctcacttgcagcctngatctcctaggttcaagcagtcgtcctgccccagcctccaagcagccgggaccacngatgtgtgtcaccatagctgggctaatttttaaattgnttgtatagacagagtctcactatgttgcccaagctgattggtcttccgactcctgngctcaaggtgatctttccattttggcctccaaaagtgctgggattacaggccttgaggcaccatacccagccctangaaaaattattttacaaggccncctttgaaggatttggctttgcttaaataaaantnnaaaaaaactgacttgtggaggggggggaattgacccttgatgaaanttgnnccttttgttagaagcccttggccnttgccaaaattnaaaaaaanggttnttttgataangggngttaaaaaaacccctgcntttttttttaggggacattttaanggggggtttttagggat

SEQ ID NO: 7394 - DNA, 980 bp, Homo sapiens
  misc_feature 174, 348, 356, 426, 428, 450, 493, 495, 500, 526, 565, 568,599, 637, 643, 669, 708, 711, 719, 722, 725, 726, 732, 739,742, 744, 745, 753, 754, 761, 791, 793, 794, 797, 800, 810,812, 820, 836, 837, 856, 868, 872, 875, 881, 882, 883: n = A,T,C or G
  misc_feature 893, 895, 904, 913, 922, 923, 924, 925, 926, 936, 938, 949,958, 961, 962, 963, 967, 978: n = A,T,C or G
gactcctatagggcgaattgggccctctagatgcatgctcgagcggccgccagtgtgatggatatctgcagaattcgccctttcgagcggccgcccgggcaggtacgcgggatacttggaagtaaagctctcctcagcaaatgtaaaagaacagaaattataacaaactatctntttgaccacagtgcaatcaaactagaactcaggattaagaatctcactcaaagccgctcaactacatggaaactgaacaacctgctcctgaatgactactgggtaaataacgaaatgaaggcagaaataaagacgttctttgaaaacaatgagagcaaagacacaaccgtgctnagaatctntggaacacacttaaagcacgggtattataggggaaattttatagcactaaatacccaccaaggagaaagnanggaaagatcaaaatcaaacacncttaacattcaataaatttaaaaaggaacctagggagaaggcnanggagncaaaccaaaatttcaaaaaagcttgncaagaaagggcaaaggaaaaataaaccttaagtattcangangccatgaaacttggaaagggaggaattaggnggacccccaaaaaaccttttcaaaaaaaaaatcaaacngaattncccgggaagctttgtttttttttggnaaaaggattcaaaccaaaaatttggattggacttgttangcnaggacttnatntannggaagnaaaaggnggngnnaggaaatnnaattcgnttggttttaaaaaagtgaaaaaagggggantnntcnccncccaatcccncnggaaattngcaaactttccctttnnggggaattctttttaaacncccttttccccnaaanttnaacttnnnaaaaattttntnaaagaaatngggtaaaanttccttggnnnnnataccgggcntnccaaggacttnaaccccggnaannngttngaatttttttntt

SEQ ID NO: 7395 - DNA, 932 bp, Homo sapiens
  misc_feature 1, 5, 10, 11, 20, 22, 27, 28, 31, 32, 33, 34, 37, 42, 43,45, 49, 55, 56, 59, 61, 62, 66, 67, 72, 88, 89, 90, 94,95, 98, 99, 101, 106, 213, 348, 387, 397, 433, 450, 457,463, 465, 479, 497, 500, 511, 513, 531, 532, 535, 540, 544: n = A,T,C or G
  misc_feature 545, 557, 602, 605, 606, 608, 609, 610, 611, 616, 619, 625,629, 638, 640, 647, 652, 653, 655, 657, 670, 673, 676, 683,698, 709, 710, 716, 717, 723, 724, 728, 735, 738, 740, 753,754, 758, 761, 767, 774, 788, 790, 792, 793, 795, 800: n = A,T,C or G
  misc_feature 809, 813, 823, 824, 827, 841, 842, 844, 845, 849, 854, 855,868, 870, 871, 881, 885, 890, 891, 898, 899, 903, 905, 908,912, 913, 917, 921, 922, 928, 930, 931: n = A,T,C or G
nctangcatnntatgaattntnaaaanntannnnttntaatnnangttnataatnngtntnntttnnggttnctatcccaccaccctnnnaganngannancgctngaatacgactcactatagggcgaattgggccctctagatgcatgctcgagcggccgccagtgtgatggatatctgcagaattcgcccttagcgtggtcgcggccgangtacaatttaaagaataattttaaagtgaatactacgtaactccatccaagtcaagaaattgccagcttctcggaagcccactgtgtctccttcccctacctgcaacctcttccaggctcccttttccagccttnccctttttcccttttattttcatgccttgatttgacttntgttggtggngaaacaatgtgtaactatggaaaaccttaaaacccntggctgcccaacccaanaagccangcttgntngaacccaaaggggncttggccttcaaagggtngtntgggccccacngncaaggatatggggacttnnctncttcntggnntaggcttggganccccatagtaacctcttgtaaacccttttccaaagggggaccaantgnnannnnttatnttnttaaangaangggggcttncncccttgngggtnntngnaatccaaacgacncancanaggcttngtgcgttttccttantcctaaacagnnattgcnnttgtanngggntttgganaananaaaatttcgtgcnngcantcngtgttntttcagnaacccattttgcgngnannangcatncgttttatnttgngtaaaaaaanngtnttttggggttattnnannttangaatnngcaactccctttntnngttttctcanaagntacannaaccctnncttnanaanatgnncttntccnntttccncnng

SEQ ID NO: 7396 - DNA, 1006 bp, Homo sapiens
  misc_feature 41, 42, 228, 312, 316, 324, 346, 351, 360, 403, 422, 423,425, 448, 453, 456, 459, 465, 467, 481, 487, 489, 491, 497,499, 500, 502, 503, 513, 516, 517, 520, 530, 537, 539, 544,548, 551, 557, 562, 568, 574, 576, 577, 579, 598, 601: n = A,T,C or G
  misc_feature 620, 628, 629, 632, 634, 636, 640, 648, 656, 660, 664, 669,673, 674, 681, 684, 687, 698, 713, 715, 727, 730, 732, 734,736, 740, 742, 743, 747, 750, 754, 765, 775, 791, 792, 794,800, 804, 808, 813, 815, 817, 819, 820, 828, 829, 831: n = A,T,C or G
  misc_feature 838, 845, 848, 860, 861, 862, 871, 877, 878, 879, 885, 886,888, 890, 891, 895, 899, 900, 901, 903, 905, 906, 912, 917,921, 924, 925, 926, 931, 943, 944, 952, 954, 963, 970, 976,984, 985, 987, 994, 995, 996, 1001, 1002, 1004: n = A,T,C or G
ggcgaattgggccctctagatgcatgctcgagcggccgccnntgtgatggatatctgcagaattcgccctttcgagcggccgcccgggcaggtacgcggggcaggtgtgagccaccatgcccagcctatgagggtttttttttttttaagacatgaattcccagacttccctgtagagactgatgtaaaggggggatttaattttttcaaaaagctccctaggtgatnctgatcattcacgtttgaggatcacaaaacctgaatatttgaattaagcttacatgtatatgtttatttctcaggtggatggtnattntagttaangtgaggaagtaaagccagggcnccggncggccttgngccctttgggttctcaggctaccttaagggaaagctaaagggnggagactttggagccccanngnaggttgggacacccgccttttgngccangtnttnaggggnanaaccccctgtcctncccctngnancacggnanncnngtatgtacanaannggnggcccttttnggggccngnggacncaanccncttaanggggncggaantttcancnncnactggggcgggcccggttnacntaagtgggaatacccgggnccttgggnnacncnanaccnttgggggngtaaattnatgngggncaaanaagnntgttttnccncgngggggagaaantgggtgatccccttnanaatttttccccncanancntnacgnannccgnganagcnttaaaacgtgnaaaacccctnggggggggcccttaanngngggggnggcntaancctcncncntnnaattgggnntngggcatnaaatgcnccnattttttcaagnnncgggaaaancctgtnnngccccnncntnnattnaaannnananngcccanccccnccgnggnnnagggngggtttgggtanntggggagncntttttcccntatcttntttaantttgaaannantgggccnnnggtcnntngg

SEQ ID NO: 7397 - DNA, 896 bp, Homo sapiens
  misc_feature 363, 459, 465, 546, 547, 562, 569, 607, 610, 613, 634, 640,644, 646, 648, 658, 678, 679, 686, 694, 701, 721, 729, 733,735, 737, 739, 740, 746, 749, 760, 765, 769, 775, 808, 822,828, 834, 836, 850, 851, 861, 869, 877, 889, 891: n = A,T,C or G
cgaattgggccctctagatgcatgctcgagcggccgccagtgtgatggatatctgcagaattcgcccttagcgtggtcgcggccgaggtaccaactgatctttgacaaagcaaacaagataaagtggggaaaggacaccctattcaacaaatgatgctgggataattggcaggccacatgtagaagaatgaaactggatcctcatctcttaccttaaacaaaataaattaactcaacatggatcaaggacataaatctagaacctcaaactataaaattctagaagataacaatggaaaaacccttctagacattggcttaggcaactatttcatgaccaagaacccaaaggcaaatgttatnaaaacaaagatataaagctgaaacttaattaaactaaagagctttttgaagagcaaaaggaacagtcagcaagagttaaacagacaatccacagantggganaaaatcttcacaatctatacgtctaaccaaatggattaatttcccagaatctataataaactcaaacaaatttcccaaaannaaaaaaaaccccccngacgatncccttcaaaaaagtgagtttaaagggacatttgaattnccnccnatttttcaaaaaagaagggcnttaccnaatngncnaaacaaaacnttattgaaaaaaaatggctnnacccatnccctttantgattcnaggggaaaaatgccaaattnaaaacccnccantntngnntacccnccntggccttcctnccaanaagngggccnttgatccaaaaaaaattcaaaaaatttaatttnaaaagtttggcttngggttncccgtngnaaaaagggggaacnnctttttcccnctggtggnggggaatntgaaaacttttncncccct

SEQ ID NO: 7398 - DNA, 968 bp, Homo sapiens
  misc_feature 5, 8, 23, 30, 31, 34, 37, 38, 42, 43, 44, 52, 58, 62, 64,74, 76, 77, 78, 84, 85, 98, 103, 106, 108, 112, 119, 126,134, 136, 145, 147, 155, 186, 217, 273, 348, 370, 394, 401,413, 427, 442, 451, 465, 469, 481, 487, 488, 490, 511: n = A,T,C or G
  misc_feature 532, 537, 545, 549, 552, 587, 619, 627, 630, 633, 640, 642,646, 661, 664, 675, 677, 686, 691, 699, 710, 722, 730, 735,745, 752, 754, 756, 763, 769, 780, 781, 784, 787, 788, 795,797, 802, 813, 815, 825, 831, 838, 847, 853, 855, 860: n = A,T,C or G
  misc_feature 862, 863, 872, 875, 876, 882, 889, 890, 894, 896, 898, 905,915, 917, 923, 930, 944, 960, 966: n = A,T,C or G
ctccngcntacatgatgtgtctnttattannttntanngtannntgtatttnttatgntgtnangactaatatntnnntatatnnctccccctcctcngtagngtngntttntggtttnctactcntttactgnanggcggaatngngccctctnaatgcatgctcgagcggccgccaatgtgatngatttctgcagaattcgccctttcgagcggncgcccgggcaggtactggaccggccattggaccatttgttccaaaacccataaatngttgcctaaatttataattgatcatgaaaccctaggcagaggaggagaaaattgaaggtccagggcaatgaaagnaaaaatggcgccctctcaattntagtcttctctcattgaccattgnttttcanatttttgacctnaaaaaaatggccangctgttgggtttagnggctttggntttaggagtgcaancaanggccaacattgnaccaannantggggtgggccaccggcctgnttttttttaacccaaagcccncttgnccttgtanccantancaacattggccaaccaccccctttcttgttggatnaattctttttgggtccctttttaaggaattgntttcaaanaantancttacangnttanggttccctttttttngtnttaggccgggntntttataaanttacnattttttnggtccccaacnacaaatggtgancccctatnttgtnaaaaaaaaancaaatgngntnccctccngaaatnggccttttctnngtncannttggaantntttcnaatttttttancncccagggctnaatttntcctttnttcttgggntgggtngntggantnngaaacccanatnntggggntttttgnncttntntnattaaanccctttcctngnttgggngtacccntaaattcttcaacnttggggcccccatttnttaaancg

SEQ ID NO: 7399 - DNA, 1278 bp, Homo sapiens
  misc_feature 5, 6, 7, 9, 14, 16, 20, 29, 30, 42, 46, 49, 57, 59, 63, 64,70, 71, 73, 75, 77, 78, 79, 80, 81, 85, 90, 91, 93, 98,99, 108, 109, 142, 183, 198, 332, 361, 370, 375, 385, 389,393, 407, 410, 417, 418, 429, 433, 450, 475, 506, 514, 531: n = A,T,C or G
  misc_feature 533, 535, 546, 557, 559, 568, 570, 575, 577, 581, 595, 602,603, 606, 608, 641, 643, 655, 665, 666, 667, 673, 676, 679,700, 701, 704, 710, 711, 721, 723, 724, 725, 726, 734, 745,746, 748, 749, 753, 755, 787, 788, 790, 814, 815, 821: n = A,T,C or G
  misc_feature 827, 833, 834, 836, 837, 838, 845, 864, 868, 879, 889, 896,898, 902, 903, 910, 919, 922, 928, 930, 936, 940, 949, 950,953, 961, 964, 980, 985, 986, 992, 996, 998, 1000, 1002,1004, 1014, 1017, 1018, 1023, 1025, 1026, 1028, 1030: n = A,T,C or G
  misc_feature 1037, 1043, 1044, 1045, 1049, 1050, 1052, 1057, 1059, 1061,1063, 1064, 1072, 1077, 1079, 1081, 1089, 1090, 1091, 1097,1099, 1110, 1112, 1114, 1116, 1123, 1132, 1134, 1136, 1139,1140, 1145, 1146, 1150, 1154, 1162, 1164, 1166, 1167: n = A,T,C or G
  misc_feature 1170, 1172, 1173, 1174, 1183, 1185, 1186, 1193, 1201, 1204,1206, 1214, 1223, 1233, 1238, 1241, 1246, 1247, 1253, 1256,1267, 1274, 1277: n = A,T,C or G
ccgcnnngnttatnantttntttattccnntttatacccttnggtnccnattatttncntttnnttcttnncncncnnnnnagantaatnntnctcanntagggcttnngggccctccgatgcatgctcgagcggccgccantgtgatggatatctgcagaattcgccctttcgagcggccgnccgggcaggtacacnggagcagctataaccacttaaaaagagcaacaaggcaagacctggaaattttttaaaaaattggcccgggtgtggtggcagcatgtctgtggtcccagctactggggaggctggggtgggaggatccccttgangcccgggaattcgaaggtttgcaactgancctgtgaancaatngccaaccgcnactncaanccccttggtcaacnagnaagatannggacccccttngaanttcctaaaaaaaaaagngaaaaaaaagggccaaccttccttngtaacattcaaaaggttccctacctttaatnattaaacnacggccgaaatggccangncntctttctttcnaataaaaaagncntgggcctgntntagangnaaanactttaattgttcnggggggnnaantnccaggcttccaattggggtttgtaaaaaaaaangnctccttgctccnaactggcaannnagaaanccnaanggccccggggctgggggtttnntantgggannaaaggccctngnnnntaaaattncttctccaccnngnntgcngncacccggtttaaaattttttttgggccttggnntnggccattaaatttgggtgggaaannctttantggaancaaccnngnnngtggggnaacctcatttctaaccctnttcnttttggcccangggaagaccnggggaantnttgnntcccccnggcccccangtnggttcnanttcccnaggngaacccctnnggnccccaatnaantggccctctccaatantcccnntgggcnccgnangntngncccatttttntcnnatatngnncnanaaaatgnaccccnnntttnntntcccntnangnnaatactanatggnanangtttcccnnntgcccngnatatagggccnanananctctcgnccccgtccnantnccnntaaanncctncttnggtctttntntnnttnannnaccttttgncnnggggaanttttatgncancnactaactngtgtgtgcnccactaattntcgcntcnccatnnttttanggngaaaaaaaccntccccgnatnc

SEQ ID NO: 7400 - DNA, 413 bp, Homo sapiens
gattgaatacgactcactatagggcgaattgggccctctagatgcatgctcgagcggccgccagtgtgatggatatctgcagaattcgcccttagcgtggtcgcggccgaggtacccagttgtttggacaatggaaaaacaccagtctagatattactgtgaaggcatttttaatatgagagtaatatttaaagcagtaggcttggagtaaagcagactactctctgtcatgtggatgggcccatctcatcagttgaaggcctcaacaggcaaaagactgaggttccctaaggaaaatggaattctgcctccagtctgcctttgaactcacgtcttccctgggtctcagcctgccagcccaccctgcagattttagacttgccagtctccaccatcacatgagccaattcttt

SEQ ID NO: 7401 - DNA, 397 bp, Homo sapiens
ttgtatacgactcactatagggcgaattgggccctctagatgcatgctcgagcggccgccagtgtgatggatatctgcagaattcgcccttagcgtggtcgcggccgaggtacaggtttgaggaagcgatgaaggaggctcatgctgtagatcaaaagcttgcagagaagcaggaagatgaagccaccctggaaaataaatggcccttccttggggttcctttgacagtcaaggaagctttccagctacaaggaatgcccaattcttctggactcatgaaccgtcgtgatgccattaccaaaacagatgccactgtggtggcattactgaagggagctggtgccattcctcttggcataaccaactgtagtgagttgtgtatgtggtatgaatccat

SEQ ID NO: 7402 - DNA, 932 bp, Homo sapiens
  misc_feature 1, 2, 4, 8, 10, 12, 14, 15, 19, 23, 33, 40, 41, 43, 50, 51,52, 53, 54, 58, 59, 61, 64, 65, 69, 71, 72, 74, 75, 78,80, 81, 82, 83, 85, 86, 87, 90, 91, 92, 94, 96, 101, 103,110, 111, 115, 124, 126, 127, 128, 131, 133, 135, 149, 151: n = A,T,C or G
  misc_feature 159, 181, 195, 210, 403, 418, 462, 467, 469, 511, 538, 544,556, 570, 574, 581, 582, 584, 625, 628, 632, 645, 676, 706,711, 720, 729, 742, 775, 776, 799, 804, 807, 808, 817, 826,833, 870, 876, 882, 883, 904, 911, 916, 931, 932: n = A,T,C or G
nncncccntngncnnttanattnttgggtgatngttaatnngngtaaggnnnnngtgnntnaanntacntnncnngtncnnnnannnagnnncntngatgncnatttttnntctnagtaagagngnnntgntntncatacttactattngngccaaatngggccctctagatgcatgctcnagcggcccgctcantgtgatggatatctngcagaattcgccctttcgagcggccgcccgggcaggtactttgctacacggtcgggggccattgagactgccatggaaagacttgaaaggtcacgtagctgaggacttctggagagaccattcaaggcttctggctcttgacaaagatagaccactggaacaatgagaaggagagaattctactggtcacagnacaagactctcttgnatctgcaaatacggacttcatccatgcctgagttgtgtgcagcntgccnancggattcctctggagccgcctgtcttatccgcattctgcctnggggcaagtttcacccttccctggggnattgtncccctgggacanagaagacaaagggngtanaggcctnnanggaatcctacctgggggggaagtacccgggagggaagccangtnctcnttcttgtcccgcntgggaacccccattggtcccaactggaaagntcccttattgcctaactttttccacctggngccantccttatgnaaaaatacnacccaggtggagngaaaaatttccctttgaaaaatttttgccaaanntttgctcttgggggttcaaatgnttctnaannctttggttnccaagcttntccccanaaattggccccaccaaaagaaattccaaccttgggantccttnggaaannaagggaaaaagaaaaactggnttgggtngtttnaacctgaaaccccann

SEQ ID NO: 7403 - DNA, 645 bp, Homo sapiens
  misc_feature 17, 614: n = A,T,C or G
gggcgaattgggccctntagatgcatgctcgagcggccgccagtgtgatggatatctgcagaattcgccctttcgagcggccgcccgggcaggtacatagccccagaagggcggactggccggagtccagggatggcagccaacgccccataacagagatcagcattggactacaagaagaggcaaggagaaatcaaggatcaaaatttaagtaaaagaaaagccaagtcattaaaaataaccccctcattgaagagtgggaacgtaggtgtgatgttctggcataaggagtgaaaaagaaaaagctctattacttgaagcttttcaccaggggcagagagaatggccggaagtgagaaacgtgtgtgtggatgcttacaccgatgccgtctcctaatattggaacatggctccagaaaggagaaccaattattcctaattccacgggcggcattctctgactcccaaactcccaaagtggagggcaggagctgcccttaccttgaggaagctcagagtgttgtggtaaaactctcccggggtgcgacataggatgcttttcagagctccctggacaatggtacctcggccgcgaccacgctaagggcgaattncagcacactggcggccgttactagtggatcc

SEQ ID NO: 7404 - DNA, 637 bp, Homo sapiens
  misc_feature 519: n = A,T,C or G
gggccctctagatgcatgctcgagcggccgccagtgtgatggatatctgcagaattcgccctttcgagcggccgcccgggcaggtactgttggtaagcattatgtcccgaggatgaaatcggaggaccaacaggcccaggaggcttcacagcgaacaccacatgcctcgcgcccaaaaggacaacagaccgcgcttcagaacggaaccgccttctccatgtgtaatggataggtaacagagaagacctcgtcccttcctagtcagggcatcagcatgactgagtgcttcctgccccccaccagcagccccagtgaacaccgcagggtggagcatggcagcgggcttacccggacccccagctctgaagagatcagccctactaagtttcctggattgtacctcggccgcgaccacgctaagggcgaattccagcacactggcggccgttactagtggatccgagctcggtaccaagcttggcgtaatcatggtcatagctgtttcctgtgtgaaattgntatccgctcacaattccacacaacatacgagccggaagcataaagtgtaaagcctggggtgcctaatgagtgagctaacttcacattaattgcgttgcgctcactggccgctttcaat

SEQ ID NO: 7405 - DNA, 635 bp, Homo sapiens
  misc_feature 91, 580, 627, 635: n = A,T,C or G
gggccctctagatgcatgctcgagcggccgccagtgtgatggatatctgcagaattcgcccttagcgtggtcgcggccgaggtacccattncatcttgcacccgcaataccagggattgttgcgaagaatcagttgtgttatattgtccaaatcatcaaagataccctgaggtaaattacttaggttattattggacatatccagtcgatagagctgccttagataagaaaaagcatttgggggcacccgattgatgtggttatcttgaagataaagcttcctcaggtttgtgcctggaaggtttactggtgcagcagtcagggaattccgcaccagggacagctctgtcaaattaactaggttgaagaaaactttgtcacctaaaccatgattgttcaacaggtttccatctaaaaccaggcgttttagactagtgagaccttgaagagatggtgatgaaatagtggatatgcgattatcatccaagcgtagttcttctatagtcctgggcaaaccccaagggaattgtgctaaggtgattaccgggacagggaaaagcagtccggagaatagtttgcntgtctcggaatgctcccctcttctatgctaactggcagagacaaganttgtcatn

SEQ ID NO: 7406 - DNA, 900 bp, Homo sapiens
  misc_feature 2, 6, 8, 414, 435, 463, 481, 488, 510, 511, 524, 533, 538,553, 561, 563, 566, 574, 575, 577, 580, 649, 665, 670, 672,688, 691, 692, 695, 696, 702, 715, 719, 721, 722, 725, 729,738, 739, 741, 746, 759, 761, 763, 775, 779, 785, 790: n = A,T,C or G
  misc_feature 796, 803, 804, 806, 807, 818, 826, 829, 839, 850, 851, 852,853, 875, 878, 879, 883: n = A,T,C or G
anggcnanttgggccctctagatgcatgctcgagcggccgccagtgtgatggatatctgcagaattcgcccttagcgtggtcgcggccgaggtacgctcactgcctggacatctttattgatggcctggagtcctcccttttagaagacaagtttctgggataaccacttagcttcattggttagggaagagaagaattcgactctcaggtaagttgagaagagactcctcttaaaatgccatttctccactaatttatcaaaataaaaacaaaacaaaaggctcttggctactttgcctagtattagatagggttttgaagaaactaacatgaacaccctttcatcagtaaagactaaaaaccacctggaatatatatatcactgctgtttttttggtggttggtttttgggntttttttttttatctaaaaantgcccagggtgggctttaaagggcttgnccagactggcaccgccanattcttnccaggcaaaccaaggggccttnntattcccattctnccaaacttngggancgggggggaaaaaanggggaaantnttnttgaaaanngnaanggaaaaaaaaggagggggggaaaaaaatattacccaccaacccttttcccccaccaaaaaaaaaggggnaaaaaaaaaaaaaagnaaccntngcccccggggccgggnccnnttnnaaaaanggggcgaaatttncaancnnacntggncggggccgnntnattanttggggaatccancntncggtacccaaancttngggggnaaaanatgggnccataanntnntttccctgggnggaaaatnggnattccctttncaaattttccnnnnaacatcataaagccgggaaaantannaaanggaaaaacccgggggcg

SEQ ID NO: 7407 - DNA, 1042 bp, Homo sapiens
  misc_feature 174, 371, 379, 386, 388, 396, 412, 415, 436, 462, 465, 499,520, 527, 541, 549, 551, 552, 560, 575, 594, 597, 603, 605,615, 621, 623, 631, 638, 642, 650, 662, 665, 669, 672, 674,684, 698, 699, 705, 715, 717, 719, 726, 728, 739, 750: n = A,T,C or G
  misc_feature 794, 800, 801, 805, 816, 832, 839, 845, 850, 860, 862, 874,875, 889, 894, 895, 902, 904, 906, 908, 910, 913, 914, 917,922, 930, 937, 938, 940, 944, 945, 951, 957, 959, 974, 983,987, 988, 993, 994, 1009, 1013, 1021, 1022, 1026, 1038: n = A,T,C or G
  misc_feature 1041: n = A,T,C or G
attgggccctctagatgcatgctcgagcggccgccagtgtgatggatatctgcagaattcgccctttcgagcggccgcccgggcaggtacagaggtgaatgtcttctcctcggctacagcctccaccccaaatacaacccaccagttaagagggataacactaaacaatgctgnttagtgtcatgttgcacccatctacatgaccagaaaaatactgttcaatgcaaaaaaatttactaatttgttaatgcctggccagatgttcttgtgaagagcaaggcagaggaaaaacatgttatcaagtgaatactctattccaaactccagggagaaaacatcttccagtttttcttcagagttcaaatttttgnttcttttnaaactgnangggtcccntccaatttcctttggncanttgaggaggggaaaccagctnaaaattttattgaaaaaaaccagggntgntttccacgaaaaacccttattggccagggtgatntccccccccttggggaaaaangggaaanggttggaggccaancaaatttnannccttaaanaaacaccttgaaccntgaacccttctattgaacntangccaangncccctaaacnttttgnangaaaaganctggttncccntttcctanaaaaattttaanttncttnatnangaattgggcnaccacccaaaaggnncctaantttaaagganantnggctttntnggccttccctnaaaaaaggggnatttaaaccttttttttaaagggattggtttttttttggacccnttttannaatntaaaaaaaagntgcccttaaagggggncccgaantttggngggcntcaaaacccntnggaaatttccannccctttttggggangggcnnaacgggnangntngnttnnccnctgtnccgggganatttgannancaanncctggnttaaancnggggtgaaaaccccntgtttcttnactnnaaaannatttaaaaatatttncccncgtccctnngttntggggggaaaanttng

SEQ ID NO: 7408 - DNA, 901 bp, Homo sapiens
  misc_feature 158, 160, 166, 168, 170, 171, 172, 177, 180, 188, 189, 193,195, 201, 202, 205, 219, 221, 224, 230, 235, 239, 242, 243,246, 249, 250, 252, 253, 256, 261, 269, 273, 274, 277, 278,279, 285, 287, 291, 295, 301, 304, 305, 309, 313, 316: n = A,T,C or G
  misc_feature 317, 320, 322, 326, 332, 338, 339, 354, 361, 363, 364, 377,380, 386, 390, 396, 428, 438, 453, 456, 457, 464, 472, 476,484, 491, 503, 508, 509, 516, 518, 520, 522, 527, 531, 548,552, 553, 565, 570, 572, 573, 576, 578, 579, 580, 590: n = A,T,C or G
  misc_feature 595, 606, 620, 623, 629, 637, 641, 657, 663, 674, 686, 687,694, 696, 699, 700, 704, 705, 712, 713, 717, 727, 731, 732,754, 756, 760, 764, 771, 775, 778, 785, 790, 791, 797, 799,801, 810, 815, 816, 827, 875, 877, 882, 883, 885, 893: n = A,T,C or G
  misc_feature 894, 897, 899, 900, 901: n = A,T,C or G
aattgggccctctagatgcatgctcgagcggccgccagtgtgatggatatctgcagaattcgccctaagcgtggtcgcggccgaggtactttattttttttttttttttctctttttttttttttttttttttttttttttttttttttttttccctnanccaaangntnnnaattnatnaaaatcgnncttntntacaannaangatttttggggttngnaanccatgnctgcntttnttnnccnccnnannccnggaanaaaatttncaannggnnnggttcncncagntaanaaagcntanngggngggnccnnaananggcnttcaanaaaaannccccccgaatttccntttgacngnnttcccttgggagnctntgatgngggngccccntttttttaaaaggaaaataaaattttcaatcngggtgggttntttgccctggggccnctnncaaaaantcaaaagncccngctttaanttttttnttgttttggggnaaaanntcccttngntntnaactngcantttgcccaaccttttanttannttggaccccccntttgnannggnannnggcttttccntgggnaaaaaaaaaanccttgtgaggggtnccnatgggnccggaaanaccntttcccgggggggggncctttnaaaaagggggntaaaatttcccnnccccccntnggnngggnncggttannttanggggtacccngaannttgggaacccaaacttttgggngntaancaangggacantaanttngttcctnggggnnaaattntntnttccccttnacaannttcccacaaanaaaccaaacccccgaaaacatataaaatggtaaaaaccggggggggcncntaaanngnggggcccnnccncnnn

SEQ ID NO: 7409 - DNA, 862 bp, Homo sapiens
  misc_feature 121, 139, 154, 168, 173, 221, 281, 283, 297, 303, 322, 328,332, 345, 399, 401, 433, 457, 474, 485, 504, 521, 530, 545,554, 566, 567, 570, 616, 621, 624, 625, 633, 636, 637, 640,647, 678, 685, 714, 733, 737, 743, 773, 777, 779, 780: n = A,T,C or G
  misc_feature 781, 784, 788, 792, 806, 810, 815, 827, 829, 836, 840, 842,850, 851, 852: n = A,T,C or G
aattgggccctctagatgcatgctcgagcggccgccagtgtgatggatatctgcagaattcgccctttcgagcggccgcccgggcaggtacttttttttttttttttttttttttttttanaacaaggacaggggactntgatgccttcagctntggccatcctgagngctgngatctgcttcccctgcttcctacaccacccacaatcccaccacgctgntgcagtcactgccaactcatagtgccttctaagggccccagtgtctttgggacacccctntnccctgggagggaancaaggngctcatgaatgtcccaggnggaggngctnaaaaagtgtgganatgccttcttgagtgtcaaagtctgggattccagctttcagcctcaggctccangngtgtgtgctgaaatggaattttcttctctcgntcactctcctgtctggtcaaaggnacttggggagtttcctnttctagggganggaaaggccctggagaggnggccttgccctgaactngggaggggngggccctggggaaancaagggccngggctctgctannggnttgctgacaacttgggaaaaaaacacttggccctccccttaacttncctgnctnncttttttntgnnttnaataaanggggggagggggggaagggggattttttggntttttanttcccaaatcccttggggcacccaattgntaagggaacctttgggccngcgnaccccncttaagggcgaaattcccagcccaatgggngggncnnnttnttanaagnaacccaaactcggnaccnaaacntggcgaaaaaanangggcaanaaantntttccttnnnagaaaaatgg

SEQ ID NO: 7410 - DNA, 839 bp, Homo sapiens
  misc_feature 34, 79, 119, 133, 136, 139, 140, 143, 177, 252, 260, 261,268, 269, 271, 299, 303, 331, 357, 367, 381, 385, 386, 406,411, 412, 427, 437, 446, 491, 518, 556, 583, 621, 640, 664,672, 677, 682, 696, 700, 728, 749, 755, 765, 781, 791: n = A,T,C or G
  misc_feature 812, 815, 823, 826, 827, 829: n = A,T,C or G
attgggccctctagatgcatgctcgagcggccgncagtgtgatggatatctgcagaattcgccctttcgagcggccgcngggcaggtacctgccttgttcatatccaactaattttttntggctaattaagtnatnatnntcnaaacacttaaggttttaaaggatgaatgaccagntgagagttacttcttatttgctcctaaatccaatatatttcctgatcagtcaataacacttagaacatctagttntaattggnnatacaanngnctaaaaaatgataattaaaaggactaanactntatatggtcttttgaggggataacaacntgaattatttaaacaaagtatattangataataaancaccgagaagtcantccnntggttcaatccattattcanaattnnattctgtgtataatnaagcaacagngaccttcangttagtcttggcttagctgttaacaaccagctgggagaaagctgnaggctattttttgcaattataatctgngaagattgggaaaacgttaaagataaattaaccgtgtncaccttattaacaggcaactcattttncacacttggaatacctattcaatagggggttcccaagntcaaatcttccttaaacgncttttctaacttttttaaagacanccccctgntaagngaggngggcgccctactgnactntttaatggggctttgcaatctacttttnaaaaggcttgggggaaggggngatggntttgttgaantaattgcccaattctnaaaggctttnaaaatcctttttgggaagganaanaattttcntannanagacaaattg

SEQ ID NO: 7411 - DNA, 849 bp, Homo sapiens
  misc_feature 2, 33, 226, 234, 240, 252, 256, 262, 368, 373, 398, 399,414, 463, 466, 467, 474, 481, 484, 491, 525, 537, 552, 555,559, 568, 569, 578, 582, 597, 601, 626, 632, 647, 666, 667,692, 703, 711, 712, 720, 721, 740, 744, 763, 767, 771: n = A,T,C or G
  misc_feature 782, 808, 819, 834, 835, 839, 845: n = A,T,C or G
tngggcgaattgggccctctagatgcatgctcnagcggccgccagtgtgatggatatctgcagaattcgccctttcgagcggccgcccgggcaggtacttctgggtctaattaccaaattggtcccagggcagagaactctctctcctgcattgcaggggatgcctaggcagtgtgtaggcctaagcctgagaactacccaggccttcccatactttggaagcagntgacactngacttnttggtttccatntttncactgngctgtgtagccctgtgtgtaaacagcaggcactcatgtgccattgactcacggtcagaagcaccacagcattgactgtgtgctctctgactgaggtgggaactgcngtcancactgggtaacaggttggactgaanntggtctcatttgganagtggggagcaaagggtctgcctggaggccttgctcacgtaaggctatnggnnctttcangtctgtngtnaacctgntgaatattctgccatggctttgcaccttgccaantctgtgccctgngcacgttccagcctnaanctgntcgaaactnnctgctttcnctgnggaaggaggcctttncccnccaaacataaagggagctactttcntttcangactggtgaaacccnactttcaaattgttcaccnngggacatttttaaaaaaaacaaccncttcaccgatnttaattcnnttgcccannggggaaacattacccaaancctnaattttggaaaaaaataantggnggtntttttggccangaaaaaaactaccaactggacttttntttggctcccnaaacataaccccccnngtanaaaacnaaat

SEQ ID NO: 7412 - DNA, 889 bp, Homo sapiens
  misc_feature 1, 5, 457, 499, 524, 539, 541, 567, 571, 577, 582, 600, 642,657, 667, 679, 682, 693, 694, 740, 756, 762, 764, 768, 772,785, 786, 793, 801, 814, 815, 823, 826, 834, 837, 843, 851: n = A,T,C or G
nggcnaattgggccctctagatgcatgctcgagcggccgccagtgtgatggatatctgcagaattcgcccttagcgtggtcgcggccgaggtacgaaatgtgaaatgtttagggacatctccatgctgtcacttgtgatttgccctcttatgtattttggtcatattgccaactggaaagtcaaaattttctaacaactttaagtaagttctttgaagacttagtgctgtttttaatccagtttagaaagtaacttaattttaataccactactaaaaattcgaaaatttcttctttaatcacattcaatatggttaaaagaacaacactaattgacattgcgtgggctttttctccctttgtttaaaatgtcatttgttgagcaagagttgtatagtattatctacttacttgaggctgttaatttttcattacagtgttttgtaaatgtatcccncgagaccatgatgcattggtttgggctcaacttgtgttttgnatttaaagcattttgaatggaaggngtattttttataaancnatttaaaattttatgctcctttaagnaatngggacncccgnaaaaaccaaacccttttnaagtccctgatttaaatcctggaacccaataaaccctgtggngggcctaccaaaggngattaatttntttttaaaatgnttncctttaaaaannccttttttttttaattaaaaaaacttttgcaaaaaagccttggggngaaacttccttggccntaaaangntaantttngtttgcttgggannccccccncaactganaaaagggggctgnntaaacctnggncccccctnttncccaanaaaaaggngaaattttttttttttaaaaaaaaaaaaaaaaaaaaat

SEQ ID NO: 7413 - DNA, 868 bp, Homo sapiens
  misc_feature 6, 8, 10, 12, 14, 15, 16, 17, 18, 19, 20, 21, 22, 23, 24,25, 26, 27, 28, 29, 30, 31, 32, 33, 34, 35, 37, 38, 41,42, 46, 47, 48, 49, 52, 56, 58, 59, 62, 63, 65, 66, 67,70, 71, 72, 73, 75, 76, 77, 78, 79, 80, 81, 82, 83, 84,85, 86: n = A,T,C or G
  misc_feature 87, 88, 89, 90, 91, 92, 93, 94, 96, 97, 98, 120, 121, 124,138, 144, 229, 691, 710, 766, 787, 792, 828, 839: n = A,T,C or G
ctcccncncntnannnnnnnnnnnnnnnnnnnnnntnntannattnnnnttnatgngnngannannntgnnnntnnnnnnnnnnnnnnnnnnnnannnagggattgatacgactcatatnngtntagggcgacttggnccctgnatatgcatgctcgagcggccgccagtgtgatggatatctgcagaattcgccctttcgagcggccgcccgggcaggtactttcttnaccaatctcatgaggagcgggaacatgctgagaaactgatgaagctgcagaaccaacgaggtggccgaatcttccttcaggatatcaagaaaccagactgtgatgactgggagagcgggctgaatgcaatggagtgtgcattacatttggaaaaaaatgtgaatcagtcactactggaactgcacaaactggccactgacaaaaatgacccccatttgtgttgactttcatttgaggacacatttacctgaatggagcagggttgaaagcccattcaaaaagaattggggtgacccacgtgaccaacttgccgccaagatggggaagccgccccggaatctggcttggcgggaaatatcttcttttgacaaagcacaccctggggagacagttgataatggaaaagcttaaagcccttcggggcttaaattttccccccattaagcccgtggggggtggacnttccccttgggtccacccnaggggcagtggccatgccattggtttggggggtttttcctttttaccccttttttnttataaagtttggtacccctncgggncccggcgggaaccaaccgccttaaaggggccgaaantttccagccancaacttgggccgggcccgtttacctaaag

SEQ ID NO: 7414 - DNA, 995 bp, Homo sapiens
  misc_feature 4, 9, 14, 16, 24, 25, 26, 27, 28, 29, 36, 37, 40, 41, 43,48, 56, 57, 59, 63, 64, 68, 69, 73, 77, 81, 86, 93, 94,95, 96, 97, 101, 102, 110, 135, 136, 141, 200, 201, 202,224, 245, 255, 256, 274, 286, 289, 302, 304, 308, 309, 316: n = A,T,C or G
  misc_feature 326, 333, 344, 350, 358, 387, 408, 409, 431, 448, 466, 473,487, 493, 504, 513, 518, 536, 537, 541, 551, 555, 560, 565,567, 573, 580, 587, 590, 593, 601, 604, 607, 623, 629, 645,659, 668, 672, 673, 680, 685, 693, 696, 715, 731, 734: n = A,T,C or G
  misc_feature 736, 772, 784, 797, 799, 803, 820, 822, 828, 835, 845, 847,852, 855, 866, 869, 872, 874, 883, 884, 885, 886, 887, 889,897, 906, 914, 919, 928, 933, 937, 938, 945, 948, 966, 967,974, 975, 982, 983, 984, 994: n = A,T,C or G
cccnccgtnaatgncntatattannnnnntattatnnttnntnttagnatataagnnantatnnaatnntttntatnactnttttnttctttnnnnncagnnagagggantgtatacgactcactataggtctanngggantcgggccctctagtatgcatgctcgagcggccgtcagtgtgatggatatctgcagaatnnnccctttcgagcggccgcccggncaggtccgggcaggtactttntttttttttnnatcccatttttttttagnagagacggggtntcnccatgttggctangntggnntcaaacnaattgacctnagggganccggtcagctnagcctnccaaaggngctgggattacaggcgtgagccaccactnccagcccacacagccccattnntggagcacacttgggggatttnacacctcagcccttggnagccattcccaaagagtnggggggncagggagggtatgnaatttnaacaaacaacnccctttggnccctnggtaattttggaacaacnnttcncctttttgtntctngtacnacaantncccccnacaaaancaccccncanagnatcccttnaangtncaaccttaaaagattntcaaanccccttcttaagcccncttggggaaaattnttgggcccntaannaagaacnccccnttcccttnccncttgggcccttaatatatnccccccaatttttgtnacntnacacaaaggggcccccctttaaaaaatggggaattntttgttttttcncccaacatttccngnggcnccccaaattcccccacncncccggntttgtangaacccccancncttgnttncccttctgggnccnggngnaaccaaacnnnnntnaagggggnggaaatttnccaagtcnaccancttggtcgnggggncggnntaacttnagntgggaaatccccgaagcnntctgggnnacccaannnctttttggcng

SEQ ID NO: 7415 - DNA, 972 bp, Homo sapiens
  misc_feature 10, 11, 13, 14, 16, 23, 25, 30, 32, 38, 40, 44, 48, 50, 51,54, 56, 59, 60, 61, 62, 63, 65, 78, 81, 82, 85, 86, 87,91, 93, 96, 97, 101, 102, 114, 119, 121, 129, 133, 134,144, 163, 207, 210, 283, 289, 314, 325, 341, 384, 390, 408: n = A,T,C or G
  misc_feature 414, 440, 472, 474, 490, 504, 510, 520, 523, 535, 539, 544,547, 549, 558, 565, 569, 572, 584, 585, 588, 604, 607, 614,617, 619, 622, 624, 628, 642, 654, 661, 665, 668, 671, 677,682, 690, 691, 695, 696, 700, 701, 709, 715, 717, 719: n = A,T,C or G
  misc_feature 724, 725, 737, 751, 752, 758, 763, 766, 771, 772, 781, 784,786, 795, 796, 803, 807, 814, 816, 828, 832, 834, 836, 840,843, 854, 863, 867, 872, 875, 879, 880, 885, 886, 887, 888,900, 903, 907, 912, 913, 917, 923, 925, 935, 942, 944: n = A,T,C or G
  misc_feature 945, 948, 953, 957, 958, 959, 960, 963, 965, 969, 970: n = A,T,C or G
cctcacgttnntnntnttaatantntttantntcattnangtanttgntnnganantcnnnnnantattatttcattntcnnatnnntaantnganngggnntgtgttatgatnctctnantatcgtgntatnngggccctctncatgcatgctcgagcggcncgccagtgtgatggatatctgcagaattcgccctttcgagcggncgnccgggcaggtactgggagggtgaatggactctcaaacttctagacagccatagtggcatgggcaatggaggtngcatgngggatgaaatgctcttccaagtctnaagtagtcttntgagtcccaattgtgnttggcaatggttgcaattggggcttgtgtaggccagtctctanagccanttgttggtaacttgcagngtatanaagcaataataagggtgggtagccangacaggggtgtattacaccctaactctcaatngnccccaaaaaggacaangactttgggtttgntcccangactgggatnagnaattaagggatngggnggganacncnttctccaanggacccnttgngantatatgcaaatnnttnaatcttcaaagggganaanattgganttngnatnancttnggcgtttggggagnccataaaaaatntggcccncatnaangcntatatnccccnccacggtnnggtnngaannatggttcnttggcnancnataanncgttatatattntggtatagggcaanntttaanggggntanaatcnntacaccaanggngncttggggtnnaaaaatngacntatgcgnantgaggggggggncaantntntcanacntgaccctttgntggggttgnctgnacaanaantggnnaaggnnnntgaattgggatncgntgtnccccnngatnacaccncncaaactattngaaattngnntgntatgngggnnnnctnanttanncg

SEQ ID NO: 7416 - DNA, 912 bp, Homo sapiens
  misc_feature 2, 6, 7, 9, 14, 20, 25, 26, 27, 28, 29, 31, 35, 38, 39, 42,45, 48, 49, 52, 53, 54, 57, 59, 60, 62, 63, 64, 65, 66,68, 71, 74, 75, 80, 88, 90, 91, 92, 93, 94, 95, 96, 97,99, 102, 103, 104, 108, 109, 111, 117, 120, 123, 124, 125: n = A,T,C or G
  misc_feature 127, 132, 134, 136, 142, 147, 347, 430, 473, 522, 529, 544,571, 578, 579, 589, 614, 645, 656, 667, 677, 695, 724, 727,733, 736, 779, 782, 799, 803, 822, 827, 845, 854, 855, 863,875, 881, 886, 889, 892, 904, 908: n = A,T,C or G
cncccnncncgccncatatnattannnnnantttnttnnttntgnatnngannnttntnnannnnntnatntgnntaatnactgcgtnannnnnnnncnagnnngagnngnggtggngcncgnnnanctctnantntagggngaatngggccctctagtatgcatgctcgagcggccgccagtgtgatggatatctgcagaattcgcccttagccgtggtcgcggccgaggtacctgaagggtatgtctgggagacagcgcctcggactctaaataagtggggcatcaaaggagaaccgtcctcccagagccatgggtagctggggttcctccgagacagccccatncagaatggaaaactggaataggaaattgcttgcttggatgaagtccagatcagctgtgctattaattttcagcaacttgggcntccaaagacaagcacttctcttggctcttttcccagtttaaantgagccccgagggaaaaattagggtaaacagtttttctcccatgccagnatccagntctttgcgggacaangggagcctgaaacaatttgcttactcntcttcanntggtttcttngggagattcaggatttcttgggtgngtggaaagatttcccattttggcttcttttnggaatttcctncaatttcaagncctttcccgnagccaaagggggtttttnctaattcaattttccctttggaaggttancgntttttnctngaacttcccttggttggaaagcctttctttctttggctttggnatnggcccggggccttgaanaatncttgttcccccttcccagnttttnttttttttcttgggccgnaggtttaannattttggncttttggccttntttggntgttntanggnaagggttccaanaacnaccc

SEQ ID NO: 7417 - DNA, 642 bp, Homo sapiens
  misc_feature 246, 309, 475, 476, 547, 548, 560, 564, 612, 616, 637, 638: n = A,T,C or G
tgcatgctcgagcggccgccagtgtgatggatatctgcagaattcgccctttcgagcggccgcccgggcaggtactttttattccactctcttcttgcttgcgtggtttctgaaaagacagctgcagtttgcatctttattcctctataagtaaggtttatttttccctcctctggtttctttcaaagatttatttttttatccttggtttcctgcagtttagatatgatatgccttagatgtggnttttttttttttttttttttggcttttatcctgtttgttgttctctgagcttcctgaatctgnggtttcgtgtcacatattaatttagaaaaatctcattcattattgctttgaatatttcttctattcctttctctctttcctctccttctggggttccactatgcatacttacatcttttatagttgtcccactgttcttggatattctgttccttttttattcaannctttttccctttgctttcatttttggaagtttctcttgaaaaaatactggaagctccagatttctttcctnnacccccacaatncaantctgctaaatgagaactttcaaacacccatggccttcaattttttggntaanttttctttgggacccttctannaaag

SEQ ID NO: 7418 - DNA, 659 bp, Homo sapiens
  misc_feature 490, 581, 613, 623, 639, 659: n = A,T,C or G
gtaatacgactcactatagggcgaattgggccctctagatgcatgctcgagcggccgccagtgtgatggatatctgcagaattcgcccttagcgtggtcgcggccgaggtaccaaaatcccaagttctagacttgtgctgagttaacagatgtaaaaatagaattgtttttttccccccttttgaagcaagggtctcaccaaaaggctcaaacacgtcctagacataaaggaacaaacagatttaagtcaaggtggagtggaacaatatgcctcattatccacaccataggtctattagcttgtattttttaaagagtttaagcttggcattcaatgaattctttaaatacagagtgtggttataggtttattcatttgttttttcaagaggtccctccttcttccttgaaattccaaagctttcatttcactggaattattggcttctaccacgagtatggtgtatatgccatacatgagggccctcangtaatagtatgtgtacctgcccgggcggccgctcgaaaagggcgaattccagcacactggcggccggttactagtggatccgagctcgggnccaagccttgcggtaatcatggtcatagctgnttcctgtggngaaaattggtatccgntcacaattccacaccaacan

SEQ ID NO: 7419 - DNA, 658 bp, Homo sapiens
  misc_feature 140, 340, 453, 463, 519, 539, 550, 555, 565, 605, 607, 613,628, 634, 635, 640, 646, 648, 652: n = A,T,C or G
ggcgaattgggccctctagatgcatgctcgagcggccgccagtgtgatggatatctgcagaattcgcccttagcgtggtcgcggccgaggtacaagccttgaacatcgtcctgcttcccagtgggttcagacctcacctntcagggagcgacctgggcaaagacagagaagctcccagaaggagagattgatccatgtctgtttgtaggacggagaaaccgcttgggtaacttgttcaagatatgatgcatgttgctttctaagaaagccctgtattttgtgattgccttttttttttttttaagatgctttcattttgccaaaataaaacagataatgnggatggtttaagggttatagtattatagtttaaataataacaacaaaattcttcccaggaactctgctggaaggtaaattaaaatacttgtttttccatttggtaaaaatatntgttgcactntgtgaaccaaaaaggacagtctaagtttgggagggacatagaaccggaacctcatntttaaacataccttccccancccgtcttggnccttncttaagaccnactttggcccatcccctggcattttgggggccgcctatgngnaaatgntggaattgcccctgngggtannctgcnccgggncngggncggttc

SEQ ID NO: 7420 - DNA, 654 bp, Homo sapiens
  misc_feature 131, 266, 291, 373, 422, 441, 444, 515, 581, 584, 591, 599,633, 636, 645, 651, 653: n = A,T,C or G
tcctatagggcgaattgggccctctagatgcatgctcgagcggccgccagtgtgatggatatctgcagaattcgccctttcgagcggccgcccgggcaggtacttttttttttttttttttttttcaattnacaatataggggatctgaacaagacataccccaaagcaatttctttttaaacttttattaccctataaattcctcaaatatcaaactccatgttacttttttttttagcaattaatgaaaacagttttggagaanaagaaactgaggggagatttgtctntaatacaaaaacttgtttattccaactgcagacagtcttttcataattttatgagccacaaaataagaaacagtttctactnttgggtgtcatttgcaaataggagacaatcaagattcaaaagaagcccntaagaacagcaggagactntanaaggcacaagatgtgggatagaatcctacaaggagatgatgtacggtgcagctgagaggaaggaaacaganaggtaaatttgttttcaaatattttaatgcctccggtattctgaatctaagtatttcctgatcttngcncactcancctattanaaaactgggggtagcttttttatttcccccaaanccnagccttttnatcacntng

SEQ ID NO: 7421 - DNA, 634 bp, Homo sapiens
  misc_feature 524, 613: n = A,T,C or G
cgaattgggccctctagatgcatgctcgagcggccgccagtgtgatggatatctgcagaattcgcccttagcgtggtcgcggccgaggtacgcgggcaaactcattagcaaagcacacaaagacctttgtgatgtggtattgctgaattaaactactggcagccctagaaaggtaaagtgtatttgatgcttctgtgctgttcccttagcccagaaagcccttccagtttctgtttagtaaagtcctattcatctttcactactcaatgagtcataagtaatcccattaggaaagcctgtgtgatctacctcctccctaatttgccagcttgagtttgcttcaccccttcataatactcagtcaatcataatgtcttataatccatcatagcacctcacacaatgaactccaatgtctggtttgttgggatgtccgccttactacattgtaagcttcttaagggtagaaaccagttctgataggcttagggcagtggaccaccaacagaaaaagtacctgcccnggcgggcgctcgaaagggcgaattcagcacactggcggcccgttactagtggatccgagcttcggtaccaagcttggcgtaatcatggncatagcttgtttcctgtgtga

SEQ ID NO: 7422 - DNA, 995 bp, Homo sapiens
  misc_feature 2, 5, 8, 25, 30, 34, 38, 43, 52, 53, 57, 61, 63, 65, 69,76, 80, 89, 91, 92, 93, 96, 97, 102, 111, 117, 118, 119,120, 121, 134, 135, 141, 185, 196, 206, 213, 216, 226, 230,239, 270, 282, 284, 303, 328, 330, 386, 431, 470, 471, 526: n = A,T,C or G
  misc_feature 533, 542, 569, 571, 572, 577, 581, 583, 585, 586, 591, 598,605, 606, 611, 615, 644, 645, 652, 654, 655, 674, 677, 681,685, 686, 691, 693, 696, 702, 708, 711, 713, 720, 722, 735,753, 761, 772, 774, 792, 795, 799, 801, 802, 805, 825: n = A,T,C or G
  misc_feature 828, 832, 840, 848, 857, 858, 861, 870, 877, 883, 887, 892,897, 901, 902, 907, 912, 918, 922, 923, 927, 936, 947, 953,956, 961, 964, 965, 967, 975, 977, 980, 984, 988: n = A,T,C or G
tntgnatntatatgtattatatatntattntgtnatgntgttnataatatanntatntatntntnatanatacatntatngatatatancnnnatnnaggtngggagcganatgttnnnnnatttacgagcganntagggncctcttgatgcatgctcgagcggctcgccagtatgatggatatntgcagaaatcncccttagcgntggtcgnggncgaggtactntttnctcaatganacctaaagtttgcttatggaagggagcacangaagaattgcancntgtgagttattgtaaagtntgttcaaaggctgggcgcccatgtntnacgcctgttaaccccaagtgctttgggagaccgaggcgggttgatcacaaggacanggagattgagaatgatcctggctaacacagtgaaaaccccccgtntttacttaaaaaattaccaaaaaacttaagctcatggcnncggtgggcaacgcgccctgttaaatccttaagtcttaaccttttgggggagggcntgtaaangccatgggnaataaattttggctttggaaacccccnanngaaanggcngngnnagggntatggtnaaaatgnnaggcnccgnaaggaattcaacttcccaaatttggcacnntcacaancnncttgtgggccaaaccaggnagntggnacanncttcncngtncttttntgtaanganangatatangntatgagacgacangggtttcccttttgtccnccggggcnggggacccgtntncttaaaaggggggctganaantttncnnagntaacaaactttgggccgggntcncgtnataacatnatggttgngaaataccnnaantctctcggngttcccnaaagantttntgggntgtanatanntgggnacatnacgacntgtnnttcncttgtgggntgaaaaatagntttatnatntatancannanatgtgtcncntancaangatntcacgtg

SEQ ID NO: 7423 - DNA, 747 bp, Homo sapiens
  misc_feature 12, 13, 23, 29, 40, 54, 56, 71, 73, 76, 79, 104, 110, 118,119, 202, 213, 236, 249, 269, 365, 372, 409, 477, 489, 498,520, 521, 532, 535, 536, 538, 542, 547, 551, 553, 558, 562,584, 585, 604, 615, 618, 631, 632, 634, 636, 642, 654: n = A,T,C or G
  misc_feature 663, 665, 669, 671, 681, 683, 689, 704, 706, 721, 722, 730,741, 743: n = A,T,C or G
gttgcccctttnncccccccccntttggnaaaattcccgngccctctagatgcntnctcgagcggttttcngngtnttngatatctgcagaattcgcccttagngtggtngcggccgnngtacttatttagagcccagcagaggaagtggtaaaggaaactagctgagtcgttttctgagaagagaccatatttgttcgcanaggaagccgtngctttctgggatctggctacggnagaaaagacatcnggctccaacaggggttgttncacagggtagctgggagttggaagagccaagaacgccttcgagctctggatttgagcttctctgcccatgggtgaagcgcccatgctcaagcttgngagcttnttcccgggagaagcagccatggcacttgagggaatgngcccctttcgctcaaaagggtcactggggcctggggacccccgaccaagcctttgctgacttatttcnaaagaaagctcnaacttatanaggaacttgtgaagaaaggcanntgaaagaaagnacnntngccncgggnccgngnccagnttcnaaagggggccgaatttccaggnnacaacttggccgggtcggntacctaggtgnggnatccgtagccttnngnanccaaanggctttgggcantaaatacantngggncnaaaggcctgntntcctgntgtggaagaatttgntnaacacccgcttcacnnatattccncaccaacatancngagg

SEQ ID NO: 7424 - DNA, 810 bp, Homo sapiens
  misc_feature 2, 3, 4, 5, 6, 13, 434, 435, 436, 437, 438, 439, 440, 441,442, 443, 444, 445, 446, 447, 448, 449, 450, 451, 452, 453,454, 455, 456, 457, 458, 459, 460, 461, 462, 463, 464, 465,466, 467, 468, 469, 470, 471, 472, 473, 474, 475, 476: n = A,T,C or G
  misc_feature 477, 478, 479, 480, 481, 482, 483, 484, 485, 486, 487, 488,489, 490, 491, 492, 493, 494, 495, 496, 497, 498, 499, 500,501, 502, 503, 504, 505, 506, 507, 508, 509, 510, 511, 512,513, 514, 515, 516, 517, 518, 519, 520, 521, 522, 523: n = A,T,C or G
  misc_feature 524, 525, 526, 527, 528, 529, 530, 531, 532, 533, 534, 535,536, 537, 538, 539, 540, 541, 542, 543, 544, 545, 546, 547,548, 549, 550, 551, 552, 553, 554, 555, 556, 557, 558, 559,560, 561, 562, 563, 564, 565, 566, 567, 568, 569, 570: n = A,T,C or G
  misc_feature 571, 572, 573, 574, 575, 576, 577, 578, 579, 580, 581, 582,583, 584, 585, 586, 587, 588, 589, 590, 591, 592, 593, 594,595, 596, 597, 598, 599, 600, 601, 602, 603, 604, 605, 606,607, 608, 609, 610, 611, 612, 613, 614, 615, 616, 617: n = A,T,C or G
  misc_feature 618, 619, 620, 621, 622, 623, 624, 625, 626, 627, 628, 629,630, 631, 632, 633, 634, 635, 636, 637, 638, 639, 640, 641,642, 643, 644, 645, 646, 647, 648, 649, 650, 651, 652, 653,654, 655, 656, 657, 658, 659, 660, 661, 662, 663, 664: n = A,T,C or G
  misc_feature 665, 666, 667, 668, 669, 670, 671, 672, 673, 674, 675, 676,677, 678, 679, 680, 681, 682, 683, 684, 685, 686, 687, 688,689, 690, 691, 692, 693, 694, 695, 696, 697, 698, 699, 700,701, 702, 703, 704, 705, 706, 707, 708, 709, 710, 711-810: n = A,T,C or G
gnnnnngaatacnactactatagggcgaattgggccctctagatgcatgctcgagcggccgccagtgtgatggatatctgcagaattcgcccttagcgtggtcgcggccgaggtaccattaaacactgtccattctgtcccagaggactttgcagcccagaaaagcaccttggagaaattacttatccgtttgcttgtagaaaaagtaattgttcccactgtgcactcttgcttctgcacttgtctcctggggcggctggaagctcgcgagtcaaacatcagtgccatcagtgttcattcaccacccctgacgtagatgtacctgcccgggcggccgctcgaaagggcgaattccagcacactggcggccgttactagtggatccgagctcggtaccaagcttggcgtaatcatggtcatagctgtttcctggnnnnnnnnnnnnnnnnnnnnnnnnnnnnnnnnnnnnnnnnnnnnnnnnnnnnnnnnnnnnnnnnnnnnnnnnnnnnnnnnnnnnnnnnnnnnnnnnnnnnnnnnnnnnnnnnnnnnnnnnnnnnnnnnnnnnnnnnnnnnnnnnnnnnnnnnnnnnnnnnnnnnnnnnnnnnnnnnnnnnnnnnnnnnnnnnnnnnnnnnnnnnnnnnnnnnnnnnnnnnnnnnnnnnnnnnnnnnnnnnnnnnnnnnnnnnnnnnnnnnnnnnnnnnnnnnnnnnnnnnnnnnnnnnnnnnnnnnnnnnnnnnnnnnnnnnnnnnnnnnnnnnnnnnnnnnnnnnnnnnnnnnnnnnnnnnnnnnnnnnnnnnnnnnnnnnnnnnn

SEQ ID NO: 7425 - DNA, 902 bp, Homo sapiens
  misc_feature 3, 4, 5, 6, 7, 9, 13, 27, 29, 33, 34, 38, 39, 40, 45, 51,52, 55, 57, 61, 62, 72, 74, 78, 82, 84, 87, 88, 90, 95,104, 106, 113, 115, 118, 120, 131, 137, 145, 151, 288, 306,353, 363, 412, 426, 443, 453, 475, 477, 478, 505, 537, 541: n = A,T,C or G
  misc_feature 543, 552, 583, 599, 610, 615, 639, 641, 670, 678, 685, 711,728, 733, 742, 747, 761, 764, 774, 809, 848, 854, 856, 870,894, 900: n = A,T,C or G
tcnnnnnanaacntttatacttaattntntatnnattnnntattntttctnnctntntaannataaatgatntnaacntgtntnctnntnttagnttgggatgntnaattgtngnttncnttttactatcnggcganttgggccntctagnatgcatgctcgagcggccgccagtcgtgatggatatctgcagaattcgcccttagcgtggtcgcggccgaggtacacttaaaattggtgccgagcagggatataacctgcagttaagtgaaaagaaaatccagcctncccctccaaaaaaaaaanaaaaatttaatttttaaaaattagtggtatggcaataagtacacttnagaggctatnttaacctctgaatacccatcttctagtttaaagacagagacatcccatntggaaaatgttaancttgtgtttgccatctncgttgccggnagtaaagtaggacatatagganannagtttaagaagtaacaaaatatagganaaaaatttttggatgggtccaccaaatggagnatanantatttaagnaattatttacctatttcccaatggattaaanatggaggggatctttngaaaaataaanatttnttggaagttcttttctcaaatttntnttacatttttaatttggggaggggggtcnccctggangtttccntgtttcaaacctttttttttaatttntaaaaggttcttctttnggccntctttaaanttttngtggccaataaaantgnttaaaaaacnctttcccaaaaaaaatggaaaagtgtttaggcctnttccttttccttttgaacctttttttatttaaaattttnaatagnanaaaattatggaccntggagttaggttaaaaaaaagttntttttngc

SEQ ID NO: 7426 - DNA, 631 bp, Homo sapiens
  misc_feature 457, 510, 550, 552, 602, 629: n = A,T,C or G
gggccctctagatgcatgctcgagcggccgccagtgtgatggatatctgcagaattcgcccttagcgtggtcgcggccgaggtactgtaaacaactcacacatggttgtaactagccagggcccagaactggttaggcagcttttctcccaaggccacagtgaagaatcagtctcagccaaaacacaggagtcctggaaagaagacttgaactccctcttttctggcaggagaatggggaaagggaggctaaacagattaccttttaactaacaactttatctaaacggattaacattgaagattaaccttcctggagccacagagctgaatccccactcctagggtgcatggctgagtggaagctggtctctgctctcagccaggatctggttccaacctctgtctgaaacggagggcagtatcttaagctaacttccttttaaaggtgctctctnaagtctctccagaaatgggctccatggaaagttaatccccaggctaaggggtnttatcttccagtatccaactgcagcatttaaatgcccttnantttcctgggaacaacaggaaaaatacagtgaaagcttcaaaatgagggcnggtgacaagggacttggggaaagaaangg

SEQ ID NO: 7427 - DNA, 883 bp, Homo sapiens
  misc_feature 1, 2, 3, 6, 7, 8, 9, 13, 14, 16, 18, 20, 22, 26, 28, 30,31, 32, 35, 36, 37, 38, 43, 44, 45, 46, 48, 49, 51, 52,54, 64, 71, 76, 78, 81, 82, 85, 92, 95, 96, 97, 99, 100,106, 107, 108, 109, 113, 117, 118, 119, 120, 121, 126, 127,131: n = A,T,C or G
  misc_feature 379, 459, 461, 501, 527, 531, 538, 557, 601, 615, 616, 617,618, 634, 652, 656, 673, 689, 690, 698, 699, 707, 723, 726,738, 743, 745, 753, 762, 784, 792, 801, 807, 820, 821, 822,823, 845, 871: n = A,T,C or G
nnncannnngcgnntntngnanatananannngannnnaatgnnnntnngnncntggatgtttntttattngtttntnttnnttntaaattnatnnngnntggggnnnnccanaatnnnnnactcnntatngggcgaattgggccctctagtatgcatgctcgagcggccgccagtgtgatggatatctgcagaattcgcccttagcgtggtcgcggccgaggtacgcgggggtagtttgtagcggacaacatggcggccttcatgctgggctcgctgctgcggacgttcaagcagatggttccttcatcagcttcaggccaagttcgaagtcactatgtagactggagaatgtggcgcgatgtgaagagacgaaaaanggcctatgaataccgcagatgagaggctaccgtattaattcactcagggaagaaataccatttttgccaaataattcttnangatgtgggcttgaatgaaagaaaattgctgccctcccccnggggattagcttgttccttggttagnaatncaagaanatccggttgtggttatgancgatccccggttcccgccgttggtggtgtaagccgggctgcctnggaaggccttaagnnnngtattaggtctttccngtcaccttaaactggacncaangggggccaacctttttntgggggattccaggcnnaggcggannaatggggnaaaatggagccttccnaanaaacccttattntggangnctttggcnaggggcaangcccacagcctttgcaagtttnccaggcanaggcaaaangaattnttttttttaattnnnnacccaaaaccccttaaatcttnttacaagggggccccaagtaccctgncccggggccggg

SEQ ID NO: 7428 - DNA, 776 bp, Homo sapiens
  misc_feature 2, 3, 5, 9, 10, 11, 12, 15, 16, 17, 18, 20, 21, 22, 30, 32,35, 37, 38, 42, 43, 44, 45, 48, 49, 52, 53, 54, 55, 57,62, 63, 69, 70, 71, 72, 73, 74, 75, 83, 86, 89, 91, 95,98, 108, 112, 632, 664, 670, 685, 712, 719, 729, 738, 744: n = A,T,C or G
  misc_feature 749, 765: n = A,T,C or G
cnncngccnnnntannnntnnnatatactncnttnanngttnnnnttnnttnnnngncccannagtttnnnnnnnagcgggantcnatnanttcnctncttcttaggncgantcgggccctctagatgcatgctcgagcggccgccagtgtgatggatatctgcagaattcgccctttcgagcggccgcccgggcaggtacaagaaaaaaaccccacagcctaaatctcacacagcttctcagcaggagttggattaaactgagaaaataattttaatatcaagggataatgcacgcaagatgggaaaactttaaagcaaactctgcagtgaaaagtgtttcccccactcccttgggcgagggaagggagaagaagatagataatgaggagaactataaggccctggattcaggtttctggaaactgttttttttttttcaaccctcggaggacaaatcaagctctttcctggaatccaagaaaagcacattcaagaaatgcccaatgacaggaccacaggcccaaaatattgggcagggcaaactggatttggttcttgcgatttcccattcttcctctccacatcccgaaaaaatgccttcagcttacaggctaaaaaaaattaaataanttaaataaaaaaaaaaaaatttcccccgaatncaaagncatgcctttgggccnccacccagggaaaagccttaaatggcntggggantcaattaatnagccccctncccaantcaanttgggggttgttggtngtgttggtcgt

SEQ ID NO: 7429 - DNA, 605 bp, Homo sapiens
  misc_feature 110, 187, 202, 203, 204, 205, 208, 209, 212, 217, 219, 224,229, 232, 234, 235, 246, 247, 248, 249, 250, 260, 261, 262,266, 270, 273, 274, 277, 278, 281, 282, 283, 285, 287, 289,292, 293, 295, 300, 303, 305, 308, 311, 312, 313, 321: n = A,T,C or G
  misc_feature 322, 323, 325, 326, 329, 333, 337, 338, 339, 340, 341, 347,348, 380, 382, 385, 400, 404, 413, 415, 416, 417, 426, 427,428, 429, 430, 433, 434, 446, 467, 470, 475, 479, 484, 485,486, 491, 497, 499, 502, 503, 505, 506, 509, 519, 522: n = A,T,C or G
  misc_feature 525, 528, 533, 534, 536, 548, 553, 554, 568, 580, 581, 585,586, 587, 589, 595, 604, 605: n = A,T,C or G
gggccctctagatgcatgctcgagcggccgccagtgtgatggatatctgcagaattcgccctttcgagcggccgcccgggcaggtacttttttttttttttttttttttnctttttttttttttttttttttttttttttttttttttttttttttttttttttttttttttttttttttttttttnaaacccttttttttnnnnaannggnggggntnaaagnaaaanaantnnaaaaaaaattnnnnnaaaaaaaaannnaaancccnggnnccnnggnnngnancnccnnanggggnaantncancannngggggggnnntnntangggnaccnnnnnggggannaaaaaggggggaaaaaaagggaaaaaaggggntnccnggggaaaaaatgttntccncccaaatancnnnaaaaaatannnnnggnnaaaaaaaaaggnaaaacccggggggccccaaanagnggggncccnccccnnnttaangggggngnccnnannagnccccttttanaanggnganaaaanncngggggggccccntttannttaaaaaaaaaccncccccccccccnngggnnnangggggnttttttttnn

SEQ ID NO: 7430 - DNA, 586 bp, Homo sapiens
  misc_feature 547, 555, 558, 573, 581: n = A,T,C or G
gggccctctagatgcatgctcgagcggccgccagtgtgatggatatctgcagaattcgcccttagcgtggtcgcggccgaggtacccaaaagtgggccttgaaatataattgtttctgagaggaacttattctcaggatatttttgtaagagggacaaaactacttaacagtgtgtatccttgcaataagtatattaatgaatacgatacaaccattttatacaggcaaaagatggtttaatgccaaagcacaaactcataaacccagttgatgaggagccagaacaatggtcattactgtatagagatgttttaaaaagtcaccatataagctttgaaataattctaatgaaaattatatgaccttgaggctgggcgcggtggctcatgcctgtaatcccagcactttgggaggcccgaggtgggtggatcacaaggtcaggagatcgagaccatcctggccaacatggtgaaaccctgtcactactaaaatacaaaaaaattagcccgggcatgatggtgcatgcctgtagtccccagctttttnggaggctnaangtgggggaaatcgcntgaacccngggga

SEQ ID NO: 7431 - DNA, 897 bp, Homo sapiens
  misc_feature 1, 3, 10, 12, 13, 14, 16, 18, 20, 21, 26, 29, 32, 39, 43,51, 52, 53, 54, 59, 60, 62, 63, 69, 76, 77, 78, 80, 85,86, 89, 90, 92, 94, 95, 96, 97, 107, 108, 110, 112, 114,116, 119, 120, 123, 135, 139, 215, 447, 448, 471, 483, 484: n = A,T,C or G
  misc_feature 500, 506, 529, 562, 566, 587, 589, 591, 625, 628, 642, 650,651, 664, 669, 671, 715, 721, 744, 749, 755, 761, 771, 782,827, 829, 842, 856, 864, 886, 888, 893: n = A,T,C or G
ncncccgtcntnnnancncnnatttntanttntttattnacgntgataatnnnnataanntnnagtttntcacttnnntnattcnnttnntncnnnncagtaggggnngntnangnttnnttnttatccagggcnaatngggccctctagtatgcatgctcgagcggccgccagtgtgatggatatctgcagaattcgccctttcgagcggccgnccgggcaggtacactcgcctgtggccagcatccgatgggctacatcctcaatgaaagacaggatccctgagaatgagacgtccatcccctttacagtgtatggcagctcaactagcttcttgcctcgctttgccatctgttcaatgttgtatcctggacttgggtcgttagaaatcttcagcactcgagcaaaacgatcccagacaatttacccacctgcaatatccgatgnnttttccccaaaaagaataccggntaaaccgtaatnnttcccgaggttattgncaaatncacccttggcgttattttcctcncaccttcacaataacaaaccaccggggtttggngccntggttgggccttccaagttgnantngaggggccggggcccccaattcttcgaaaatggntgnggcccctaataacnaggttggnntgttcaacacccncaacncnaaaatggggcttttaattttcccaaccaaggtttggggggcccnaacaanataacccttttcgggtcccggangaacncaaccngccttnaaggggccgnaattttcccangtcaccactttgggccgggcccggtttaacttaagtggggaatcncntaagccttcgggntaacccaaaaggcnttggggcngtaaattcattgggtccaatangncttgntttt

SEQ ID NO: 7432 - DNA, 631 bp, Homo sapiens
  misc_feature 56, 294, 357, 377, 379, 393, 395, 397, 401, 402, 407, 408,414, 417, 418, 420, 421, 437, 454, 456, 457, 459, 460, 464,467, 469, 470, 473, 477, 479, 484, 485, 491, 493, 496, 498,500, 512, 514, 519, 525, 531, 532, 534, 541, 542, 544: n = A,T,C or G
  misc_feature 551, 552, 559, 563, 565, 567, 568, 569, 571, 573, 580, 583,588, 599, 600, 609, 610, 614, 619, 620, 625, 626: n = A,T,C or G
atgctcgagcggccgccagtgtgatggatatctgcagaattcgcccttagcgtggncgcggccgaggtacatgttaaggtttggtgaatgcatgcattcacggaactaccactccagttgtgttagtttcccatggcagctttaacaaattactgcaaatttcatggcttaaacgaacacacatttatgcttacacagttctggcagctaaatgaccaatgggtttcattgggacaaaatcaaggtgatggcagagccctgcttcttttgggggctctagagtccatctgcttncttcccttcttccagcatctggaggtcacctcatttattggctttgggtcccctgaactgcantcacctttttttttcttggngnccatttgggttttntnantttnnccctnntaatcntgnngnnaaaaaacctccccttnccctttcttttaaaaanannannaccngantnntcntttntnatatnnaaaccntnggngntnggcccccccccntntcccnaaaaanttaaanngncccctanncnaaaaaannacttttntggncnannntncnttatttnctntggangaaatttccannagggttttnnatgnaaganntattnntgaag

SEQ ID NO: 7433 - DNA, 862 bp, Homo sapiens
  misc_feature 5, 9, 12, 14, 16, 21, 22, 24, 25, 26, 28, 29, 35, 39, 40,42, 43, 46, 51, 52, 53, 54, 56, 62, 63, 64, 65, 69, 71,72, 74, 76, 81, 82, 85, 87, 88, 89, 90, 92, 94, 97, 98,105, 108, 111, 113, 117, 121, 126, 129, 345, 422, 475, 495,497: n = A,T,C or G
  misc_feature 541, 579, 673, 684, 722, 730, 739, 756, 763, 795, 806, 809,810, 811, 842, 853, 858, 862: n = A,T,C or G
caccncccntcnantntttcnngnnnanntatttncttnngnnaancaatnnnntnattggnnnntctncnnananaactnntcntnnnnantnagnnagggggntantancntttncttntcttntanggcgatttgggccctctagatgcatgctcgagcggccgccagtgtgatggatatctgcagaattcgcccttagcgtgggcgcggccgaggtacaggtgccagacaaacctctccaccctcagtgacccggtgcagctagaagtccatatcggctggctgttgctccaggcccctcggtgggtgttcaaggaggaagaccctattcacctgaggtgncacagctggaagaacactgctctgcataaggtcacatatttacagaatggcaaaaggcagggaagtattttcatcantaattctgacttcttacatttccaaaaaagccaccacttcaaaaggacaggcngggctccctactttcttgcnangggggggctttttttggggaagtaaaaaaaatgtggtctttcangaagactgttgaaacattcaacccattcaccttccaanggttttgggccaggtggtccaaaccccattcttcaattcaatttcttttttccaacccctggggggtacccttggcccccgggccgggccccgncttctgaaaanggggccgaaaatttcccaagccaccacctggggcgggncccgtttnccttaagtngggaatcccccgaagcnttcgggnaaccccaaaggctttggggccggttaaatccnatgggggccantannncttggttttcccctggtggggggaaaaattngtttaatcccncttcncaan

SEQ ID NO: 7434 - DNA, 863 bp, Homo sapiens
  misc_feature 2, 6, 9, 11, 14, 15, 20, 23, 25, 26, 31, 35, 36, 37, 38,44, 46, 47, 52, 53, 56, 57, 58, 59, 61, 63, 65, 67, 71,72, 73, 74, 75, 76, 77, 82, 84, 85, 87, 93, 96, 97, 100,103, 107, 109, 112, 114, 118, 119, 120, 121, 122, 124, 125,127: n = A,T,C or G
  misc_feature 129, 131, 135, 136, 138, 141, 149, 513, 522, 525, 539, 543,556, 569, 586, 595, 625, 635, 643, 654, 661, 679, 685, 687,701, 706, 708, 734, 748, 749, 750, 754, 762, 767, 777, 781,792, 795, 799, 832, 836, 850, 853, 862: n = A,T,C or G
cntccnccncnacnntctanttntnnatcantttnnnngacttntnnttcanngtnnnngntnancnactnnnnnnngcatnanntntgtacnatnnacnccntttntnagnanggannnnntnntnananttcnntntanaaggcganttgggccctctagcatgcatgctcgagcggccgccagtgtgatggatatctgcagaattcgccctttcgagcggccgcccgggcaggtacaatgccctcatcgaagctcctaaaacttcctgaaaaaaatgaagctttaacgtccagcttccactgcttaaactgagcacaggacgtgcacttggatagtaaaccaggtgtctcctcaaagccctaatatattcagcatctctatcaaaggcgcctttcatttgacttctttgtttctggcaaagactctctccttttaaattttctttttttgtccttattcattgcaaaaatatttggggccagttttacccctattggggtttcattgcanaatgggatngtntttgccaaattggnaaanttttgtgtccccntggaacttaaaanaactgccaacccaggtncttcgggangtaaaaccgaaaaaatggcccccactgccnggatattctngaccaccntttcccatttnaacaagncatttcttaacaaaatgnaggttncntattttccccaacnttcangntttttccaggggaaatattccaaatnggtaagggcttggnnnaggnaaaacccncttgnattggttagnaagnaaaaattcacnttncctngtttgaaaaaaaaaaagtttggttttttgaagnaaantttcaagccttccntgnaaacccaang

SEQ ID NO: 7435 - DNA, 899 bp, Homo sapiens
  misc_feature 262, 402, 403, 405, 459, 485, 521, 536, 550, 554, 589, 606,662, 683, 689, 691, 694, 699, 702, 730, 744, 752, 767, 768,779, 786, 796, 806, 809, 814, 817, 825, 827, 830, 835, 841,853, 861, 866, 867, 873: n = A,T,C or G
gggcgaattgggccctctagatgcatgctcgagcggccgccagtgtgatggatatctgcagaattcgccctttcgagcggccgcccgggcaggtactttttttttttttttttttttttaatatgcaaacaaaaaaatgcaaaaatgaaaatgacaacacaacatcagaaagacatttttttaacttcattcgctacaacagtcacgaactggttgaactctacctgccatccaactttaagaaacaaagacccggcactgngaaaaagaaacaaaacccaaacaaaacaatgatacaaagcaactgcgaattaatgtaaaaatggagtgcaaatgcgactacagaatgcaaaaaaacatcagcgttgcagattccagcaacacttatcaaaataatttctnnanatgggttcatatgaaacatagacaaaggcgttaaaaaggaggattatatgtttnatcatctttaagcataaccaatgtgnggttaaagagcttaaaaaattaaaaaaaaaaaaagntaccttgggcccgcngaccaccgcttaangggncgaatttcagcacactgggcgggccgttactaagngggatccgagctcgggncccaagcttgggcggaatcatgggtcataagctgttttcctggggtggaaaatggntattccggtcacaatttcccncacaancnatnccggngcncgggaaggcttaaaagggtaaaaagccngggggggggccttnaatgaggngggggcttaaactcnnatttaattggnggttggngctcactggnccgggttttncangtccnggnaaaccttntntgncccancttggnttaaatggaatnggggcaantcggnnggggangaggcccccccccccccccccccccc

SEQ ID NO: 7436 - DNA, 886 bp, Homo sapiens
  misc_feature 45, 48, 75, 81, 83, 90, 97, 99, 104, 115, 117, 120, 128,129, 134, 139, 157, 175, 177, 235, 245, 251, 255, 267, 287,323, 344, 349, 378, 412, 462, 466, 549, 564, 583, 586, 594,601, 633, 642, 649, 667, 676, 679, 692, 695, 700, 706: n = A,T,C or G
  misc_feature 714, 722, 755, 760, 770, 780, 789, 793, 794, 797, 799, 800,801, 806, 819, 823, 833, 836, 841, 846, 862, 868, 874, 879,880, 885: n = A,T,C or G
cctctagatgcatgctcgagcggccgccagtgtgatggatatctncanaattcgcccttagcggccgcccgggcnggtacnanagaatcnctgcctnancaggntctgagagaangnaangggccagnntcttncaaantgaaacaagatacagcanagggaatatacttaattnanaaaagcagcttggcaagactgaaaggagcctgaagtcaaaactcagagactcccaggnctgatttatncttctntccnttggctacatgntcataagctgaatgttccantcatgggaaatgggcgtgagttcaaaaatgtgctangtgtgactgtaaaatgctttntcctnatctttcggattccagagactaaatactnatatggaaattagcctattaataagcatcttatngtaaggataaattacagtgccatccatgagcaaaggactggcaaattatntagngactacagccttttaagataggggccagggaggaaataaaggccaactttttacctaacttgatatgtgaaagggaaaccagnagccaaaggttcctncacgtttctcccatggtgncancttccctnaatctgnggaaaacttcgttcatttgattggaaccaggntttacctgnagcctcnccaacccattttaatgcnaagggtctngtnccttcggcccgtnaanccacnctttangggcgganttcccaancaccaactgggcgggtcggtttctaggggggantcccnagctcgggtnccaaaggctnggggggttnaatnnatngnnnaatanctgtgtttccctngggnggaaaattgntantttgntttcnacttttcccccccccncccccncccccnggttnnttttnt

SEQ ID NO: 7437 - DNA, 880 bp, Homo sapiens
  misc_feature 1, 6, 7, 8, 9, 10, 11, 13, 15, 24, 25, 27, 28, 30, 31, 32,33, 34, 35, 38, 41, 42, 43, 45, 48, 52, 54, 55, 59, 62,63, 69, 70, 73, 74, 76, 77, 79, 80, 81, 84, 85, 86, 87,88, 90, 91, 92, 98, 101, 102, 103, 106, 111, 117, 118, 119: n = A,T,C or G
  misc_feature 125, 127, 132, 135, 138, 142, 148, 409, 424, 449, 479, 505,528, 544, 546, 547, 571, 583, 589, 597, 620, 657, 670, 694,700, 702, 703, 708, 714, 735, 745, 791, 796, 799, 801, 817,819, 826, 835, 844, 849, 855, 859, 868: n = A,T,C or G
nccctnnnnnnanantttatcaannanntnnnnnnatntcnnnanttntttntnntatnatnntctttnntcnnanntnnntcnnnnncnnnccaggnggnnnttnttatncttttnnnttctananctatnganganttgngccctntcatatgcatgctcgagcggccgccagtgtgatggatatctgcagaattcgcccttagcgtggtcgcggccgaggtaccggttggaaggcactccctggtgtaatctgagatactgcacagacccatccactgtggaggacaagtgtgagaaggcctgccgccccgaggaggagtgccttgccctcaacagcacctggggctgtttctgcagacaggacctcaatagttctgatgtccacagtttgccagcctcagctagnactgtgggccccagngggagaatcaaggtgaaagggtggnacaaaatggttttgcttggggaaggccctnggggtttttgggggggagggaagggncatttgccttaccctgcggaagnaccccaaaaactgcangnnaagctaatctttgcaagaccaagnaggaaggaaggnaacctngggggtanttctggtggacccaagccccccnttcccaaggcctaagatgcccttgcaagggaaaccantttcttgggaagnaggaaaattcaaaaacccccattngcccantnnttacnaaaaanaacacccccttctttcctttnggtgcaaatngaatttttcattcaatttcaggaaggaccacccccattcctttcanaaaanttnanacttttcccaaaatgntnacccctncccccaacnttggggaanattgnaaaaanttcnaagcctttncaaagacttggc

SEQ ID NO: 7438 - DNA, 602 bp, Homo sapiens
  misc_feature 303, 375, 395, 401, 439, 455, 456, 457, 477, 478, 480, 484,487, 490, 500, 516, 531, 536, 539, 553, 564, 579: n = A,T,C or G
gcatgctcgagcggccgccagtgtgatggatatctgcagaattcgcccttagcgtggtcgcggccgaggtactttattttttttttttttttttccctctattttgtttcattttttcatttcttttcattttttcattttttcttgtccttttctttttatagatgctgaataaatatctgtagaatgagcaaatgattatattctatagaatgaaatatctgtagaatgagcaaatcactattgaaaaatgatttgggcatggaaatccaggagcacagtgattcaacagatgattattgncttgctttaatgaatccttctttatccattgcttttagaagcaatgggggaaataatccacaagtcattcanacaaaagcactatttagttntacgcncagcttaaagataatgtgaccattggcattttactggntcataatcaaagggannnagaaaactgggataattccnngncagnatnctngattccttanacttttaaataagggnagaattcccagaatngttcnaanttaaacaaaataanggtggggaacnttattagggcctaantttttattgaaattaaaaagggg

SEQ ID NO: 7439 - DNA, 877 bp, Homo sapiens
  misc_feature 125, 144, 392, 429, 503, 543, 576, 596, 604, 605, 606, 607,614, 640, 658, 659, 672, 674, 684, 698, 708, 719, 730, 734,749, 755, 757, 758, 765, 768, 773, 775, 792, 794, 800, 802,809, 810, 819, 820, 840, 852, 855, 856, 859, 869, 871: n = A,T,C or G
  misc_feature 874, 875, 877: n = A,T,C or G
gggcgaattgggccctctagatgcatgctcgagcggccgccagtgtgatggatatctgcagaattcgcccttagcgtggtcgcggccgaggtacttttttttttttttttttttttttttgcttngctttttaagtgctactgnagaacccaagacaatttacatttcaaaccaaattgagatgtggaaaaaatagacagaaggaaatacagctctagagtgtgtgtgtgggagaaagcacttcaagtatttattctacagccaactgagaaaaacaatcaattatacataagccaacttcatagttcaggtatctcaatcttaaattataatactaaactaatgatttccctagtctcctaacttattcagtataatgaattgcattcagntgtaaaatgtaaaattcaaagaaatgcaattaagggnaggtaaagagaacggttactttcaatctaaaatgcttttttttttaattattttttgagctttcaaaagtactntatggaaattaaaaaaaaaaaaattgaaaagtcctgcccnggcggcccgttcgaaagggcgaattcccagcancctggcgggccgttactagngggatccnnnnctccggnacccaagcttggcgtaattcatgggncataacctgggttcctgnngtgaaaaattggntnttccggttcncaaaattccccccnaaaaattccnaagccccggangccataaaagnggtnaaagcccctgggggngccctnannggggggnccnaaccncncatttaatttggggtgngncctccncntggcccnnttttcaaannggggaaaaccttttttttgncccccccccccnaannaanagggaaaaantnttnngn

SEQ ID NO: 7440 - DNA, 489 bp, Homo sapiens
gggccctctagatgcatgctcgagcggccgccagtgtgatggatatctgcagaattcgcccttcggccgcccgggcaggtacgggggccaaaagaggaaacagcaaggagaacatttgctttgtttgtaggagggaagtggtcgagctacaaacaaatctttaggcatctgaggaattgctaagtttctaatttcatatggttgctgacaaggaggtgcagacaaggaccctcttgctttcctcactatggatagtctgttgcctccatctagattctcttatttcaaaaaatatcctctccatgcaattaggagatatttatcgacgctgagaaaccaaagagccgaagaacaggttgcacgttttcaaaaaatcctaatggtgaaaatgagacaatgattcctgtattgacatcaaaaaaagcaagtgaattaccagtcagtgaagttgcaagcattctccaagctgatcttcagaatggtctaaat

SEQ ID NO: 7441 - DNA, 581 bp, Homo sapiens
  misc_feature 8, 10, 11, 12, 14, 15, 17, 18, 19, 20, 24, 30, 31, 32, 33,35, 38, 39, 41, 43, 44, 50, 52, 81, 93, 98, 99, 103, 114,117, 127, 130, 131, 134, 137, 148, 149, 160, 163, 164, 176,178, 180, 188, 189, 190, 213, 232, 240, 273, 277, 294: n = A,T,C or G
  misc_feature 304, 307, 334, 368, 369, 428, 441, 450, 453, 454, 463, 488,502, 515, 557, 569, 573, 574: n = A,T,C or G
ccccccanannnanngnnnnacancgacgnnnnanacnncnannccagcngnggaacaaaaaactttgatagcgttaaagngccctcaattgnaaacnncccncagcatgcacnacnccgccagcgngannccntcnggggggggcgnngcgggctggcngannaaaaaaattttntntntttcctgnnncatctctgctacccaagcctcangcctgggcctcaaggattntctccagngcataccttaggctacagctatagggcagctgnggtnagggaagggccctattnagaatacgtnggncaaaaagcacatcacttccggcccttncttgcagaactggttgctgctctggaatgaaagnntcgattggtctgttagccacgcccacctggattgggaaagccaatagaaagaatcttcngcccctcccatcngcaggcgcntannaaccctggnagcccagaaaatgggcaattatacncgaacaaataccgnaatgaacagaccntagacaatgctgggactggccgccggaaaaagcacatgaagnccatgccgtgcnacannaggaccc

SEQ ID NO: 7442 - DNA, 510 bp, Homo sapiens
  misc_feature 1, 7, 17, 47, 51, 53, 76, 83, 84, 85, 93, 96, 104, 106, 111,115, 116, 215, 329, 342, 346, 397, 444, 449, 463, 464, 480,509: n = A,T,C or G
naatcgngccctctagntgcatgctcgagcggcccgccagtgctgangcananctgcagaattcgccctttcgggngggcggnnngggccggnacnaaaaaaantnttttntttnnttttggcgggtgaaggtgtgtgtcagcttttgcgtcactcgagccctgggcgctgcttgctaaagagccgagcacgcgggtctgtcatcatgtcgcgtnacgggcggtacctcggccgcgaccacgctaagggcgaattccagcacactggcggccgttactagtggatccgagctcggtaccaagcttggcgtaatcatggtcatagctgtntcctgtgcgaaantgtnatccgctcacaattccccacaacatacgagcccgaagcataaagtgtaaanccctgggggtgcctaatgagtgagctaacctcacattaaattgcgtngcccntcactgcccccttnncaatccggaaacctgncgtccactgcaataaatgaaacggccaanc

SEQ ID NO: 7443 - DNA, 533 bp, Homo sapiens
  misc_feature 4, 6, 7, 12, 22, 31, 47, 125, 126, 137, 141, 423: n = A,T,C or G
gagngnnaatgnatcgactctntatagggtnaattgggccctctagntgcatgctcgagcggccgccagtgtgatggatatctgcagaattcgccctttcgagcggccgcccgggcaggtacccnnaaagattattnaatnattgcttatgactgtggcaaacaattttgttaccgacaagaactctggagaagtcatgacagtaggaatcaatgctataaaggagataacagctcgatgtcctctggccatgactgaagaacttctccaagacctggctcagtataaaacacacaaggataagaatgtaatgatgtctgctagaactttgattcacctcttccgaacactgaatcctcagatgctgcagaagaaattccggggtaagcctacagaggcctccatagaagcaagagtacctcngccgcgaccacgctaagggcgaattccagcacactggcggccgttactagtggatccgagctcggtaccaagcttggcgtaatcatggtcatagctgtttcctgtgtgat

SEQ ID NO: 7444 - DNA, 410 bp, Homo sapiens
gattgtaatacgactcactatagggcgaattgggccctctagatgcatgctcgagcggccgccagtgtgatggatatctgcagaattcgcccttagcgtggtcgcggccgaggtacgcggggagagagagagaggcggaagacgaagaaggagggagtcgaaggctttcccgatcacaaatctcacctccactacaactctctttatacttttcttgcagaaataataatagaaataaggaggtggtggggtttccaaaaatcttaaccttcaaccatctggggaaaaggcaaaaatcccatctaccgcaactctcagttcgagagtaaaggtttcccaacagtgatgtcacaagattgaccacattgatcacaatatggagtctggagaacggttaccatcctcagcac

SEQ ID NO: 7445 - DNA, 402 bp, Homo sapiens
  misc_feature 166, 233, 266, 278, 356, 362, 378: n = A,T,C or G
gattgtatacgactcctatagggcgaattgggccctctagatgcatgctcgagcggccgccagtgtgatggatatctgcagaattcgcccttagcgtggtcgcggccgaggtactttttttttttttttttttttttttttttgcaaatcaggaatgatctgagtntttgccagcacccaaataatcccaacagactacaatttttttgagtaactgatactatatttaaaanaaattatggcctattttattgtcatcaaacttntgaacaaacctnttaataattactaaatgtcctacaaaaattatgttgtatacatgggagtcaaatggatgacatggatgcggaaagcanaaaganactggaaatcaacatntcaattcagccttccaaaaagtaa

SEQ ID NO: 7446 - DNA, 390 bp, Homo sapiens
  misc_feature 1: n = A,T,C or G
nacactactatagggcgaattgggccctctagatgcatgctcgagcggccgccagtgtgatggatatctgcagaattcgcccttagcgtggtcgcggccgaggtacagcctccctcccagctgctttcatgggctcgtgttgagtgtctgtggcttttccaggtgcatggtgcaagctgttagtggatctgccattctggggtccagaggacagtggcccccttctccccagtagggactctgtttgggagctccaactccacatttctcttccacactgacctagcagaggttctccatgagtgccctccccctgagcaaacttctgcctgggcatccaggcatttccatacatcttctgaaatctaggtggaggttcccaaacctcat

SEQ ID NO: 7447 - DNA, 412 bp, Homo sapiens
  misc_feature 149, 360, 389, 398: n = A,T,C or G
gattgtatacgactcactatagggcgaattgggccctctagatgcatgctcgagcggccgccagtgtgatggatatctgcagaattcgccctttcgagcggccgcccgggcaggtactttttttttcttttttttttttttttttcggntatttactatagtttaaagtttcctttatctaaccaacataaagaaaacacagcattgtggactttaagtggaaccctacatcccccccaagttcagaaaattaaagcaaaacaattgtttctgcaagaatggagaattcaaatgttagacaaacatttgttttgttaaaaatgccactgtattttgttttgtttttaaaatgatcacggntaccatacactggataatttggtcagcanaaatagctntgggaaaaaaaata

SEQ ID NO: 7448 - DNA, 413 bp, Homo sapiens
gattgaatacgactcactatagggcgaattgggccctctagatgcatgctcgagcggccgccagtgtgatggatatctgcagaattcgcccttagcgtggtcgcggccgaggtacataccttctgatgaagagaaagcaccatatgtggaaaacttgcaaactggaaaagcataaagaaaatgagctgacttgagagatgctgccacaggagttggcttgttcccccatcgccaaacttctcctcggtctcagatcgctccatggcataaacaaccagatccaccaactggtcctccagcacagggcagcgctgcttgtgctgtagggcagagattaaatacagtattccaaaagcctctcggttagtttcagaagttaccagttaatgggcattaattgtaacaagaggctg

SEQ ID NO: 7449 - DNA, 402 bp, Homo sapiens
gtatacgactcactatagggcgaattgggccctctagatgcatgctcgagcggccgccagtgtgatggatatctgcagaattcgcccttagcgtggtcgcggccgaggtactttgcttcctggattgttgaatacacatactgaacaggcttggaagacctgcttaactgccaaggccaagttaggcccaatgaagggcctgttgaccatacccagagtggcctctctcaccatatggtaagagttatgcagggtttttgtaacttttcattgagctgtttgagggagatataattttgatcccatatatcatcagaatcctcatttttgacctccttgctcctttattaactgtttttcctgtgatgtgtattcaggttctattagggaatcatagaaggg

SEQ ID NO: 7450 - DNA, 406 bp, Homo sapiens
ttgtatacgactcactatagggcgaattgggccctctagatgcatgctcgagcggccgccagtgtgatggatatctgcagaattcgcccttagcgtggtcgcggccgaggtactgcagaggacatagcagtattaagggataatgaagtcacagcttcagagcctccatcctttctttagcaagttagctctacttgtatctgttctgttttatataatatggttgcatctaactgtttttaaaaaaagttctgttcttcaaaaaaattttaagctatgaaaatcactgattaagtcaaaccctcattttacaaaagaggcaacacaaactcagagcacttatgcctcaccataggtcacaaagccaagtagctccaggccagaaatgggctttaggtcttccgtt

SEQ ID NO: 7451 - DNA, 789 bp, Homo sapiens
  misc_feature 4, 436, 437, 438, 439, 440, 441, 442, 443, 444, 445, 446,447, 448, 449, 450, 451, 452, 453, 454, 455, 456, 457, 458,459, 460, 461, 462, 463, 464, 465, 466, 467, 468, 469, 470,471, 472, 473, 474, 475, 476, 477, 478, 479, 480, 481: n = A,T,C or G
  misc_feature 482, 483, 484, 485, 486, 487, 488, 489, 490, 491, 492, 493,494, 495, 496, 497, 498, 499, 500, 501, 502, 503, 504, 505,506, 507, 508, 509, 510, 511, 512, 513, 514, 515, 516, 517,518, 519, 520, 521, 522, 523, 524, 525, 526, 527, 528: n = A,T,C or G
  misc_feature 529, 530, 531, 532, 533, 534, 535, 536, 537, 538, 539, 540,541, 542, 543, 544, 545, 546, 547, 548, 549, 550, 551, 552,553, 554, 555, 556, 557, 558, 559, 560, 561, 562, 563, 564,565, 566, 567, 568, 569, 570, 571, 572, 573, 574, 575: n = A,T,C or G
  misc_feature 576, 577, 578, 579, 580, 581, 582, 583, 584, 585, 586, 587,588, 589, 590, 591, 592, 593, 594, 595, 596, 597, 598, 599,600, 601, 602, 603, 604, 605, 606, 607, 608, 609, 610, 611,612, 613, 614, 615, 616, 617, 618, 619, 620, 621, 622: n = A,T,C or G
  misc_feature 623, 624, 625, 626, 627, 628, 629, 630, 631, 632, 633, 634,635, 636, 637, 638, 639, 640, 641, 642, 643, 644, 645, 646,647, 648, 649, 650, 651, 652, 653, 654, 655, 656, 657, 658,659, 660, 661, 662, 663, 664, 665, 666, 667, 668, 672: n = A,T,C or G
  misc_feature 673, 674, 675, 676, 677, 678, 679, 680, 681, 682, 683, 684,685, 686, 687, 688, 689, 690, 691, 692, 693, 694, 695, 696,697, 698, 699, 700, 701, 702, 703, 704, 705, 706, 707, 708,709, 710, 711, 712, 713, 714, 715, 716, 717, 718, 719-789: n = A,T,C or G
actnctatagggcgaattgggccctctagatgcatgctcgagcggccgccagtgtgatggatatctgcagaattcgccctttcgagcggccgcccgggcaggtacttttttatagaagcccaactggactgacagatgtcaaggggttgggggatcctcagtaggctaacctagcagagttcttgctaaaactgggctagacaggccacagacaagatagccaaaatcaaagcctagttgagaagggaattcagaggagcatgactaaaatttggtcaaggggagagtctttgtcaccccagcacctagcacaagtggttggtacctcggccgcgaccacgctaagggcgaattccagcacactggcggccgttactagtggatccgagctcggtaccaagcttggcgtaatcatggtcatagctgtttcctggannnnnnnnnnnnnnnnnnnnnnnnnnnnnnnnnnnnnnnnnnnnnnnnnnnnnnnnnnnnnnnnnnnnnnnnnnnnnnnnnnnnnnnnnnnnnnnnnnnnnnnnnnnnnnnnnnnnnnnnnnnnnnnnnnnnnnnnnnnnnnnnnnnnnnnnnnnnnnnnnnnnnnnnnnnnnnnnnnnnnnnnnnnnnnnnnnnnnnnnnnnnnnnnnnnnnnnnnnnnnnnnnnnnnnnnngggnnnnnnnnnnnnnnnnnnnnnnnnnnnnnnnnnnnnnnnnnnnnnnnnnnnnnnnnnnnnnnnnnnnnnnnnnnnnnnnnnnnnnnnnnnnnnnnnnnnnnnnnnnnnnnnnnnnnnn

SEQ ID NO: 7452 - DNA, 414 bp, Homo sapiens
  misc_feature 229, 306: n = A,T,C or G
gattgttatacgactcactatagggcgaattgggccctctagatgcatgctcgagcggccgccagtgtgatggatatctgcagaattcgcccttagcgtggtcgcggccgaggtacagtggagagaaagcctacattcagggcctcaaggagaagtttccacaggaggaagctatcattgacaagtatataaagctggttaaggtaacatggacatgctgaggacccanagtttgttctcgataaggctgggtttctttattattagtggaggcactgggggtggagagtgcagtgcgggaggcangaagggaggaagagtcacatctgttcttagctcagcctccacccaagtccatccagttctctgtctctctctctctggagccttggctccacggctgctgctgtcacc

SEQ ID NO: 7453 - DNA, 485 bp, Homo sapiens
  misc_feature 87, 88, 221, 479: n = A,T,C or G
cctctagatgcatgctcgagcggccgccagtgtgatggatatctgcagaattcgcccttcgagcggccgcccgggcaggtactaaanntttttttttttttttttttttaaagataaatcttgcctggtgaccacatttttttcctatgcaattttcatatgttacagttgggttatatggtatggttaagcaaaaatgcatagctgttgtagtatataanaaaatatttaaattgattcctctattaaatctttaatcttgagggttgcaatttcaaatacagacatgtactcctttaaaataagccactgtagattttcatcaactcaaccatgtaacatcaaactcaagcttttaaaactttggacattcattaaccttttctattactttcatatatagacacatacatacaggtatatatgtatatatactatgtatatatctatatttttagaacaaatatctgcttctgtgngttttg

SEQ ID NO: 7454 - DNA, 1066 bp, Homo sapiens
  misc_feature 9, 20, 25, 45, 86, 160, 206, 227, 253, 257, 263, 308, 312,317, 322, 373, 391, 399, 401, 402, 424, 432, 443, 462, 465,518, 525, 539, 556, 563, 580, 601, 602, 604, 615, 621, 624,630, 638, 644, 650, 659, 669, 672, 681, 686, 698, 700: n = A,T,C or G
  misc_feature 706, 721, 739, 768, 774, 797, 832, 841, 851, 867, 874, 895,896, 903, 905, 906, 914, 919, 924, 927, 928, 939, 940, 942,945, 951, 955, 959, 960, 974, 976, 988, 992, 996, 1006,1010, 1013, 1014, 1018, 1020, 1021, 1025, 1026, 1032, 1034: n = A,T,C or G
  misc_feature 1039, 1040, 1045, 1049, 1052, 1054, 1059, 1060, 1063: n = A,T,C or G
tgcactggngaatagtgccntctanatgcatgctagagcggcctncagtgtgatggatatctgcagaattcgccctttcgagcggncgcccgggcaggttcctgggtgatggccatactgcgtgccgccatagctcaagccatgtgcctgaggctgtgcntgagggagagaaagaatgtccactcccaaaagaactgattcaggcntgaacagaaccattgcacatnctcagggaggttctagcaaacctgcncatncatgtnttgcacttagaccaacataaacagagttgagaatggcttccctanaagncacanctagnaaagttcaacctgggccaaacgaacccagggaagtaaatttttcaagcttncattcccttttaccaggnaaaaaatngnnaaacctttccccaattggggangaagggancaatgggaatnaaattcatggtaccaaaangancatatgccgggggaggaccttcgtttttcctttttttcttggcaaccgttggncttgggntaccctttgtggcncggccggaacccacccnccttaangggggcggaaattttcncaaggccaccacctttgggcnngncccgtttaacntaggtnggnaatccngcagcctncgggtnaccccnaagtccttnggcggttaanttnattgggggncaatnaggcctggattntnccttgngggtggaaaaatttngtttattcccggctttcncaaattttcccccaccaaaccattaccgnaacccnggaaaaacccttaaaaggttgtntaaaagccccttggggggtggcccctaaattggangtgggagcnttaacttccncattttaaatttggcncgtttgncgccttccactttgcccccgnnattttcnanntcgcgggnaaaanccttngtnngtaggccccanntngcnttttanatgngaanntggggcccaaaccncnccccgggggganaaanggcngggtatttgncatnttnngggncnncctnnttttcngnttttnntgggnttanctntnacttnnccnggg

SEQ ID NO: 7455 - DNA, 1031 bp, Homo sapiens
  misc_feature 1, 5, 7, 20, 21, 25, 167, 170, 172, 208, 213, 221, 261, 266,272, 276, 283, 285, 292, 300, 320, 328, 334, 343, 347, 359,369, 372, 373, 392, 399, 400, 407, 413, 423, 435, 439, 457,460, 461, 471, 472, 476, 487, 496, 498, 501, 511: n = A,T,C or G
  misc_feature 514, 517, 520, 527, 536, 545, 549, 564, 571, 577, 583, 585,586, 589, 598, 599, 600, 601, 610, 642, 643, 648, 653, 656,658, 661, 667, 672, 678, 680, 681, 690, 693, 703, 704, 711,727, 731, 732, 740, 741, 744, 748, 769, 774, 778, 783: n = A,T,C or G
  misc_feature 792, 793, 796, 798, 800, 802, 803, 810, 820, 824, 832, 837,840, 853, 858, 859, 860, 861, 864, 869, 882, 904, 911, 914,920, 923, 933, 936, 942, 949, 950, 952, 954, 956, 962, 972,973, 988, 990, 999, 1000, 1004, 1005, 1006, 1007, 1008: n = A,T,C or G
  misc_feature 1013, 1015, 1021, 1024, 1025, 1026, 1028, 1030: n = A,T,C or G
ntatngngcgaattgggccnnctanatgcctgctcgagcggccgccagtgtgatggatatctgcagaattcgccctttcgagcggccgcccgggcaggtactttttttttttttttttttttttacttttttttttttttttttttttttttttctttgggaaaacnaancntgctttatttcatttttttcacaatttatttaaacnttgcncatttacnaaaaaggtccaatttaatttttctggcttgcccaagaaanaaagnttctgngganccttggnantaagatnaaaatgantactggcaaagaaacaaatncctgaatntgtaanaaagagggnccancctttggggcanaaaaaattcngcnntacctttttaaattggggnaataaannatggggnaaaaantattggaaantggcttataaantccnaaaattttttttaaaaanaanntacccccccnngagngaatccccccngcggttacncnttnggggcccggnganacnccnccccttnaaggggccngaaattttnccangccacccacttgggnggggccnggtatnccttangnnggnattcccgcnnnnctttcgggngaccccaaaaggctttggggcgttaaaatcanntgggngccantangnctntgtttnccctngggggngnnaaaaatttntgnttattcccgnnttccccnatattttccccccccnacanntattttcnnagncccngggtaagcccatttaataggnggttnaagngcccntgggggggnngcncntnanntgggagngggagccctnaccntccccatntaaanttngcgtgttaggggncctcnnnntgncccgngttttttccaacntgcgggggaaaaccctgtttgngtgcccnacnttgctnttnaaaagaaaancgngccccnccccccnngngnanagaggncgggttttgnntatatttgggggcgncntttttcccnntttnnnnngtgtnancatgantannntngng

SEQ ID NO: 7456 - DNA, 851 bp, Homo sapiens
  misc_feature 412, 544, 593, 594, 616, 618, 625, 633, 635, 647, 658, 686,723, 732, 737, 755, 763, 772, 779, 781, 784, 785, 800, 801,802, 816, 818, 822, 827, 832, 836, 841: n = A,T,C or G
ctatagggcgaattgggccctctagatgcatgctcgagcggccgccagtgtgatggatatctgcagaattcgcccttagcgtggtcgcggccgaggtacagagaaaccacaggttgccctttccacagctggatagacttatccaaaacggcaggatgattctgtattaatctttttggaaagcatgtctgtattaagattgcaaaacatacagatagctaccacaaattaggtcaaatgactgatcaagttgtaacatctgtgaggtcaaattccagttataataaagtgcctagatacacatttatacaacagaccataagagctgaattctttacaaatatctttatgggcatgtaaaattgactctgcatttctgcatgtgtgcattcacataagagaggccagtctncactgagtcatatatactccaacttgaaaaaagtaagtgtaacaactggttaatcattgcaagtctgtttggtaatataacaatgactgggtaaaacattgaatttctcgcacagtagttaatagggtgcanctcattaaaaaaccactaccggaaaaaaaccactggtattttgggtgcnngtattcttgatttttcaaaggngnttagttnaccttgancntttaaaaaatangttttggaacnaattttaaaaaaggggaaaggaccaacntttttaacttaaaaaaaggaaatcccaaagtttgggnaaaaaaatnttgtnttttccaaaatgttaaantagaaacntaaggttgnggaaccnantcnncattaaaaatttggnnnaacccttggaaagncnatanatttnaaccntaanttatnaaagggccaa

SEQ ID NO: 7457 - DNA, 982 bp, Homo sapiens
  misc_feature 29, 34, 316, 349, 435, 469, 481, 484, 488, 495, 513, 517,520, 523, 533, 559, 565, 569, 574, 579, 601, 610, 626, 627,638, 640, 648, 661, 674, 676, 682, 683, 685, 690, 704, 712,727, 737, 744, 749, 762, 773, 775, 778, 784, 787, 796: n = A,T,C or G
  misc_feature 797, 808, 815, 817, 821, 825, 826, 839, 844, 850, 860, 861,866, 876, 884, 893, 899, 918, 925, 934, 945, 955, 957, 958,969, 970, 979: n = A,T,C or G
tatagggcgatatagggcgaattgggccntctanatgcatgctcgagcggccgccagtgtgatggatatctgcagaattcgccctttcgagcggccgcccgggcaggtacattgtcagttgcttccctcggttcacctgcagtcggcggtccaccaggttctgaactttttccagtccagcagtggtgaaaagcgtgtccagttcctcttgtgtgaagaagtaaactctggttccatcacctctcacatagaaatttccagatagacactgaccttttttaaactgaagctgagccatgtcatagcggccgtaatnttcgcagaagtacctcggccgcgaccacgctangggcgaattccagcacactggcggccgttactagtgggatcccgaagctcggtaccaaagcttgggccgttaatcaattgggtcanaagctgtttcctgtgtggaaattggttatcccgntcaacaattttncancacnaaccatnacggagccccgggaaagncatnaanagntgtaaaaagncctggggggtggcccttaaattggangtggangccnttaancttcnaccaattttaaaattggcggtntggcgggcnttcaccttgcccccgnnttttttccaantntcccgggnaaaaaccccttgnttcgtgtgccaancnttgcanntntaaantggaaatttgggtncaaaacgncccccggggggaaanaagggccggntttttgnctttnattttggggggcngcttctttttncnggnttttcnttngggtttaanntgtgaacttcngcttggngncttncggnnccggttttcgggncattncgggcngaaagccggnnatttnaatcttttantttaaaanggggcgggntaatancgggggtttttcccacaanaaataangggggggantaaacccccanggaaaataanannttttttttgannaaaaagggncct

SEQ ID NO: 7458 - DNA, 1019 bp, Homo sapiens
  misc_feature 6, 7, 9, 15, 54, 58, 177, 242, 310, 318, 353, 362, 363, 426,431, 436, 438, 450, 460, 486, 491, 492, 505, 509, 511, 516,534, 592, 602, 624, 651, 660, 669, 670, 681, 694, 699, 708,710, 713, 728, 729, 740, 741, 753, 754, 762, 763: n = A,T,C or G
  misc_feature 767, 772, 782, 784, 785, 789, 790, 804, 817, 819, 820, 822,827, 840, 849, 854, 860, 865, 866, 875, 878, 880, 883, 886,893, 894, 899, 901, 905, 906, 909, 911, 916, 920, 924, 927,943, 944, 946, 951, 952, 954, 958, 961, 964, 969, 971: n = A,T,C or G
  misc_feature 973, 974, 976, 977, 979, 982, 1009: n = A,T,C or G
taactnngnaaaaangccgaattgggccctctagatgcatgctcgagcggccgncagntgtgatggatatctgcagaattcgcccttagcgtggtcgcggccgaggtacctgccgcaggaggggaaggatgggcttcctgcaacctcccttgccccacggcttcccatcctaccccnggccgcgtcagctgaaggccagcagggacagcaaaagttttttaggccccttaggtctttaggtntagcatactgtatcaaggtacagtaactaccatggctcccgaagtttttgccaaaacctcggcatgcntggccttntggccaggcgtctgcagaaaatcatatggcttgtnagcattcgnnggctatccctggggggttgcaagctttggtataaagttttacttggtgggcttgaatcaaaangaaangaaangncttacctccagnatttttctancaagaaaaccttaccaatggtcatgnaaaannaatttttttgagnggangnattgnagggaaaagggccttggnttattcctttttcaaagaaattgtaaaaaagtttaaattccttttggggaaattattnaaaaaggaanttttcctttccaaggggtttgnaaatttaacccctaggaaagttttggntccacttgnacttttggnngtttcccctgnaatcttatttgancaccnatgtgaaantnttngttggggcctttaannaaaaaataacnntcccctctctgnnttgaaaannaaancccanattttcgatnannagtnnataattactatttnatttactgtttananngngcccnttgccccttggcnggggcccgnttttnaaaagngggcnnaaatttttnaancnaanacnttgggcnngcccngnttannttngntgggnaatntctnacncttgggttacccaaanncnttggnncnaaanaantantgggntnannanntntgngtctcccctggtgttgaaaattttttntttccccttc

SEQ ID NO: 7459 - DNA, 1028 bp, Homo sapiens
  misc_feature 1, 5, 182, 198, 227, 241, 247, 261, 270, 284, 285, 290, 309,331, 349, 354, 361, 362, 367, 369, 372, 391, 415, 416, 418,428, 433, 435, 459, 461, 468, 495, 497, 500, 501, 509, 521,530, 533, 540, 559, 562, 564, 584, 588, 589, 594: n = A,T,C or G
  misc_feature 604, 610, 619, 624, 627, 628, 642, 647, 651, 654, 657, 662,673, 686, 693, 719, 720, 724, 730, 737, 742, 746, 749, 753,758, 759, 764, 778, 781, 786, 789, 790, 795, 801, 806, 808,813, 818, 849, 853, 859, 860, 862, 871, 872, 878, 882: n = A,T,C or G
  misc_feature 889, 890, 893, 903, 909, 910, 913, 914, 923, 925, 930, 937,938, 947, 950, 955, 962, 965, 970, 971, 982, 985, 987, 990,991, 995, 1005, 1009, 1013, 1020, 1021, 1024, 1025: n = A,T,C or G
ntatngggcgaattgggccctctagatgcatgctcgagcggccgccagtgtgatggatatctgcagaattcgcccttagcgtggtcgcggccgaggtactttttttttttttttttttttttttggggccttttttttggtcaaataaaaaaaaatcactttagcagcagttcagcaatctntaattgtagggcttgntgtaaacctcactgctctaccttatctgntgttagggaaaacnaaaatntactggaaattcantttaacatnaaagctaggttcannagctnatgcccttgaaaaaggatntttttgccccccagaataaacncaactcaaaataggaatncctantataaannagccntnganaaaaaaatcccttttctancaaattaattttttggaaaaagcnngnaaagggtaancattncntggaaaatgccttgtgggttcagntngccattngaccaaaggttttaaaaaccttgggcnanggnnacttcttncccatggggccntttttttantanattggcnaagtgggtccattccaatnttntnccccttggaaaggtgcttcncccnncccangggaaagatnggaggntggcctttntacanggnnttcaacttgggtgnaccanaccnacntgnttttnaagggggaggncggtgttttttcnagacacncgcgtagtggaggtttttattaggannggcnccttgntttatanatatnaaancanattnccggnnccccnagccacaaaccccngtntttanggnnggaantttccntttgngngggtnttccntccttattttcccaaccatttgaaaaccccnttgntttttnntngaagggganncttttntttngtgcctnnttnttgggcttcngggggnnggnncatgtttananaaccntttctgnntgaggttgnggnttttnccggtanaangtttnnaaggggtagtncgngnaannaaanggttccttgncccngggngcgggcnnttnntaa

SEQ ID NO: 7460 - DNA, 862 bp, Homo sapiens
  misc_feature 532, 556, 569, 570, 587, 593, 613, 624, 629, 643, 654, 673,678, 684, 714, 715, 726, 727, 732, 738, 753, 755, 756, 769,772, 787, 792, 805, 809, 817, 819, 831, 832, 834, 839, 850,853: n = A,T,C or G
ctatagggcgaattgggccctctagatgcatgctcgagcggccgccagtgtgatggatatctgcagaattcgcccttagcgtggtcgcggccgaggtacatgggtctgagtgcgtatttattttgtgagccaaggtttatgccttcttctataattttctttcaccgaaaattacctggagagctagaaactccatttttgtcagtgtaagaagctttagaatctatatccagaccaaggccatggaacaatgtagattcactcagtaaaaactcactagcggccttctttgtacctgcccgggcggccgctaagggcgaattccagcacactggcggccgttactagtggatccgagctcggtaccaagcttggcgtaatcatggtcatagctgtttcctgtgtgaaattgttatccgctcacaattccacacaacatacgagccggaagcataaagtgtaaagcctggggtcctaatggagtgagctaactcacattaatttgcggttgccgctcactgccccggctttncagtccggggaaaaccctgttcgntgcccagctgccnnttaaaatgaaatcgggnccaacnccgccgggggaaggaggcgngtttttgcagnatttnggggcgcttttttnccgcttttctnggcttaaacttgacttcgntttgngccttngggtccgtttccgggctttgccggccgganncggttattcanncttcnacttcnaaaagggcgggtaantnncgggttattccancanaattccaggggggantaacncccaagggaaaanaaancattttgnancaaaaagggccnncntaaanggccctgaaanccntaaaaaagg

SEQ ID NO: 7461 - DNA, 1041 bp, Homo sapiens
  misc_feature 4, 6, 97, 304, 342, 384, 399, 408, 421, 428, 448, 450, 482,488, 492, 525, 527, 528, 529, 533, 536, 544, 547, 554, 555,568, 579, 587, 597, 604, 628, 647, 665, 680, 699, 701, 706,714, 721, 723, 732, 737, 739, 761, 770, 773, 774, 785: n = A,T,C or G
  misc_feature 786, 789, 796, 799, 800, 808, 811, 814, 819, 820, 824, 829,835, 844, 864, 867, 871, 881, 882, 885, 886, 894, 898, 899,900, 907, 915, 931, 936, 938, 942, 944, 947, 948, 949, 955,956, 964, 967, 972, 974, 976, 984, 986, 989, 990, 993: n = A,T,C or G
  misc_feature 997, 1001, 1005, 1007, 1015, 1017, 1023, 1028, 1030, 1039: n = A,T,C or G
actntnggcgaattgggccctctagatgcatgctcgagcggccgccagtgtgatggatatctgcagaattcgcccttagcgtggtcgcggccgaggnacgcggggactctgatgagggctcagacttgataacagcccgtggtgccccatccctataggagctggtgagattgcagccctgctgcctcccctccatcagccacagctattggatttcccacccagaatctttaggtaaatgaggtaagtcctgatttttaaaacttcttttgaatctggaatccaaacacttgagtggaaagangaagcctgctttaaactggggcagattgaaaacttagnaacaggacttctttgggagaccgggcttgggcatgggaagtngaaagcctccaaccntttaacccntgggggctttacncttcaancttgggggttcaaaaattcnangtaaattttttatttttttggggaggggggcnacgggntttngggcttacctttttggggaataattaattcctngnnngaanatntttccctngcnatttggnncttggggaccttncttaaaattcntctttggnggaaattttnaaaaaangccccccctttcggtttttccccntattgccccttggggggtnggggcaaaaaacccaatntccccccttgggggnttggaaaatttctttctgngnaaacnaaaaattntgggccnanccttaagangaatnanggtggggcctcttggataattnaaccttcanaannaaaaaaaaaannggntttgggnccnntaagtatnccntgngttanngggncttcnaataanttacccttncccccggggcgcgggccggnttnttanaaagggggcnnaannttcccagntacnnncttgggngggccggntatcttaattgggganccccngngctngnggnnnccaaannctttgggnggnaaaantnantggggtcnanaannttnttancctngtgngngggaaaantngttatnccccntnaacaacaancc

SEQ ID NO: 7462 - DNA, 856 bp, Homo sapiens
  misc_feature 471, 480, 516, 519, 559, 576, 625, 638, 648, 670, 672, 678,684, 689, 696, 697, 711, 715, 727, 739, 744, 761, 763, 764,765, 766, 772, 773, 783, 796, 797, 802, 815, 817, 818, 820,828, 835, 851: n = A,T,C or G
ctatagggcgaattgggccctctagatgcatgctcgagcggccgccagtgtgatggatatctgcagaattcgcccttagcgtggtcgcggccgaggtacaacaacttgagcgaaaattctcttcctggaaacttcttctacctgaccaccctgcgtgcactctatctaagtgacaacgattttgaaatcctgccgccagatattgggaagctcacaaagttgcagatactcagccttagggataacgacctgatctcgctgcctaaggaaatcggggagcttacccagcttaaagagctccacattcaggggaaccgcctcaccgttctgcccccagaactaggaaacttggatttaactggccagaagcaggtattcaaaagcagagaacaatccctgggtgacccccattgcagaccagttccagcttggcgtgtcccatgtttttgagtatatcccgtctgagacatncaaatagtnaggtagactcttgattttcttgaaatagtagactgnganttttataggtattttataaattaccccccttaaaaaaatnttaatgtggacaagtanttccttatttggattggcaggttaagcaacttttagccatttttttaangattgtttttaanttaaaaaacnttgcattgttctgggccaaggngngtgggnggtggnttccncaagctnntaatttcctagcantttnggggaaagttcnagaacttaaganggganttgctttggagccccangnnnnttttgnngaacccgggnccttggggcaaannaatgngcaaaggaacccncnntntttttccntaaaaanaaaaaaaaaaaaaaanaaagg

SEQ ID NO: 7463 - DNA, 1101 bp, Homo sapiens
  misc_feature 8, 11, 18, 22, 33, 34, 38, 44, 57, 58, 61, 62, 203, 228,241, 243, 273, 296, 312, 325, 333, 337, 342, 345, 349, 362,370, 371, 379, 381, 382, 398, 399, 403, 415, 425, 426, 427,429, 430, 432, 447, 449, 451, 460, 461, 464, 466, 474: n = A,T,C or G
  misc_feature 482, 487, 503, 508, 513, 514, 517, 521, 529, 536, 545, 550,552, 558, 567, 570, 572, 573, 577, 583, 586, 588, 590, 597,615, 617, 620, 630, 633, 635, 659, 662, 664, 668, 671, 674,675, 696, 706, 707, 712, 717, 722, 726, 727, 728, 732: n = A,T,C or G
  misc_feature 748, 754, 759, 760, 761, 765, 776, 778, 779, 784, 793, 797,798, 801, 803, 809, 811, 816, 821, 823, 826, 827, 830, 835,836, 838, 841, 843, 845, 848, 849, 851, 855, 856, 861, 862,869, 870, 871, 874, 875, 885, 886, 887, 888, 890, 896: n = A,T,C or G
  misc_feature 899, 908, 918, 929, 932, 936, 939, 941, 942, 947, 960, 963,968, 970, 972, 977, 984, 987, 993, 994, 997, 1000, 1014,1015, 1017, 1023, 1024, 1035, 1038, 1043, 1046, 1048, 1054,1070, 1078, 1079, 1090, 1091, 1092, 1095, 1099, 1101: n = A,T,C or G
actatatngcnaatcggncccnaatagatgccnnctanatgcangctcgagcggccnncanngtgatggatatctgcagaattcgccctttcagagcggccgcccgggcaggtactttttatgcctcaattatatcacctatcaaagagcctgctttgtatgatggtcgtgtttgtcttcccatttgagttggtttcctgctnaaattggaccataagacattctcancctggagtgggangntgagttggtgataaggccgaggtcaaagtncagcctgcaagaagcttttgctncttgaagggacctacnttttaaccttttntttaaaangaangcaanagntggntgataaaagtggnatttggannaaaatggngnngttttacaaaaatacnncgtncattttgcaaanttacatgtannngnncnaaacccaattggtgngnangttttaatnncantncatacctncttggccnaaaantgtgaaaggggggcanacaantattnnccnaaancaaatatnttttgcntttcttcanccttntnaaaagncccccatgngangnnaccnatcatnggntncnacccttnacatgggtttttgggaancncanaccctggggnttngnaaaaaaatttttaaacaaggtttntcncnacgnaanccnnccccttgtataaatttttggnataaattttnncttgngaaancacanttannncagngggcctttaaaggtanacggtnggttnnnttanctttacgagantnnaaatnggcttcttntgcnnatnancccatnantttcnacatntntanntgnacccnncntcncntntannanagannaacanncttttannnggnnaaaaagattnnnnancaaggnaanaccatgtgnaaaattgggngggattacccntgngccnttnanntttcntgagggggaagcncanataanantngtgtntgcattncgngggcannttnttntgggggccaatttnntntaaccnngagtgattttntcnacccnatntntttttngtattattcccagcanttctaaannttgggggggtnnnaancatnan

SEQ ID NO: 7464 - DNA, 599 bp, Homo sapiens
  misc_feature 3, 4, 13, 16, 19, 24, 29, 32, 33, 34, 38, 42, 44, 45, 48,62, 63, 67, 70, 71, 72, 73, 82, 92, 97, 106, 107, 151, 183,244, 269, 277, 293, 298, 313, 322, 333, 335, 341, 350, 351,355, 369, 383, 391, 400, 406, 411, 414, 420, 441, 445: n = A,T,C or G
  misc_feature 448, 450, 455, 461, 472, 483, 486, 508, 510, 511, 514, 516,518, 523, 528, 529, 533, 535, 544, 545, 548, 549, 550, 551,552, 554, 558, 561, 563, 565, 572, 582, 586, 592: n = A,T,C or G
cgnnctcaccctntantcntgctnttaantannntaanttantnnttnttctagtcagagtnnaagnaannnnttttaattntaaatgctcntatangcgaattgnnccctctagatgcatgctcgagcggccgccagtgtgatggatatntgcagaattcgcccttagcgtggacgcggccngaggtactatttttcttttttttttcatttgtgggtggggagggaatcactggtgctatanaaattgagatgtccccccaggccancaaatgtncctttttgttcaaagnctatntttattccttgatanatactcttntttttattttngnggatgngggactagnnaatntattctaataggtnctattaaacatggnaaggagancgtgtgcgnctccancccanccncgctgntcactatcaccctctctccanctgnctntngctantaaggnctctgagactncaacctatatnctntatagaccctactaactaagcntnnagncnanccttnctggnnttcntncttagactnnatnnnnnanttcnttntncnaccgatntttataaganatanttaccnaaacacg

SEQ ID NO: 7465 - DNA, 865 bp, Homo sapiens
  misc_feature 479, 516, 530, 593, 652, 697, 714, 717, 724, 731, 732, 734,736, 740, 744, 745, 755, 757, 758, 759, 761, 762, 768, 771,778, 779, 781, 782, 783, 785, 786, 793, 796, 797, 798, 800,802, 806, 812, 817, 826, 829, 831, 832, 837, 838, 843: n = A,T,C or G
  misc_feature 848, 851, 857, 858, 862: n = A,T,C or G
attgggccctctagatgcatgctcgagcggccgccagtgtgatggatatctgcagaattcgccctttcgagcggccgcccgggcaggtactaggccattccagctgaatctcaaacagaaggcagtaatgagagcctacaaatgggagggacctaagtgcctacctactcgctaatcgcaggtgcaaacacacaaggagtttggtgggcttaaggtcagaggagtgtgtagggagggatgtatgtggaaggtaagattcaaggcaagctaaaaatccgatactgtaacgttttccaaaatcccagaaggcaaactgtgcatgttctaccctgaaccacccaagcaacactttctaccttgccttatttttaattggattcactgtccaaaatgcagaggtttgctttgcttttttttcagaagttccaaacagcaactttgagagcagtggggtgcttggcagctgttctgtgtttttncaggaattcaactgagcattgaaaatctctcattttncccgacttattttnatagggaaagcccatttaaaaaaaaaaaaaaaaaagttttctttatagtattgggaactactnctaattttaaaatgactttttttggatgtatttttttggttaaaatactaatgtagggngtaaatggaataaattgctcttggttttattggcttttaacaatncatattttattaaaacnagnataatgntcttttnngnanaaanactnngaaagaacanannntnntttatnggncgcctanncnnncnnggagggnctnnntnanaccntatggncggcntttttttanttngnntcccnngctcntaacnaangctttnncccncct

SEQ ID NO: 7466 - DNA, 837 bp, Homo sapiens
  misc_feature 562, 607, 655, 690, 703, 720, 722, 748, 754, 761, 766, 767,775, 810, 812: n = A,T,C or G
gggccctctagatgcatgctcgagcggccgccagtgtgatggatatctgcagaattcgccctttcagcggccgcccgggcaggtacgcggggtccttaatccttcattgtgatgccccttcttggagttggcattttgtgacaattcatagagatcttgcagcaatatttggctattggttttattaacttaaaattcaacagaaatggagtaattaaaaaaaaacaaaaaacagagaagaattgcaaaatctgaagtggaatggcacttccttgggtatgtaagggttgtttttagataaaactcccgatttgttcttcctacactttaatagtctcaaattctttctggggaagcaacgtcagtgtctacctccacagtaactatgatataggaaattgtcctttcagtggtttctaggtataacaaacaagccgttaaaaatgagtgaccattttgtaggttacagcctcagcaatctgtgtcatttgaaagcaaatatcctgatatttttaaataaggtgagcagggcaggcaggaaaccaatatttagtacttttgngattaaacattctagaccaggcttggttgatatgtatgccaatancctagaattttttggcttaagtggtaaaaaaaaaaatgtcttttctantgggggctggatatccggtttcttgtaaataagantcagttttggttngtcctcttgggcaccantnggttttggcccttaattttttttttnggcttngcatcanccaannatctttcnttcccagagcttgcttgagaaaaaaaatacattgntngcccaaccttttttttacccccccc

SEQ ID NO: 7467 - DNA, 869 bp, Homo sapiens
  misc_feature 131, 134, 171, 187, 192, 215, 297, 302, 331, 348, 361, 372,377, 392, 425, 426, 471, 480, 482, 511, 520, 532, 550, 593,611, 636, 637, 657, 659, 661, 672, 686, 690, 695, 696, 709,728, 737, 742, 749, 755, 758, 764, 772, 789, 794, 804: n = A,T,C or G
  misc_feature 809, 823, 824, 828, 835, 836, 839, 855, 857, 858: n = A,T,C or G
ctatagggcgaattgggccctctagatgcatgctcgagcggccgccagtgtgatggatatctgcagaattcgcccttagcgtggtcgcggccgaggtactttttttttttttttttttttttttttttttnganatggagtctcgctctgtcactgaggctggagtgcggnggcatgatctcggctnactgnaagctccgcctcccgggttcacnccattctcctgcctcagcctcccaagtagctgggactgcaggcatccaccaccacacccagctaatttttttgtatttttantaaanacgggtttcaccgtgttagccaggatggnctcgatctcctgacctnatgatcaaccctnctcagcctttnaaagngccgggattacaggngtgagccaccgcacccggccatacccagttacnntttataaactaagggctctatggttttgcatgtaattttcttccnctatggaangnctttttacccttctctatttgggaaaatnatacaggcnctactaacttgntctaaatataaagctatnttctattcccctaaccttaaaatgctcccccaaattcgatctngtacctgccccgggcggnccgttcgaaaagggcgaattccaanncactgggcgggccgttactnangnggatcccgagncttgggtaccaaancttnggcgnnaattcaatgggcnatagcttggttccctgggngggaaaaanggttnttcccgnttcaanaanttcccnccacaaanattaccgagcccggaangcatnaaaagtggtnaaagncccggggggggccnnaatnggggggnnctnaacccacatttaattntnntcccccccccc

SEQ ID NO: 7468 - DNA, 477 bp, Homo sapiens
  misc_feature 467, 472: n = A,T,C or G
gggccctctagatgcatgctcgagcggccgccagtgtgatggatatctgcagaattcgcccttagcgtggtcgcggccgaggtacgtggcgtagcattccatgttcagctttgacatttattttctcatatcaaccctttttacacgtgaaacacaatctcgctcttgaagtcttaactgcatgatctgtgaaacctgtatttatattttcttcagtgtattcttgtcgtgtgtgtgtcctaaacaaaccaaaagaaaactttccaaatctaaagtattcattctccaattggagcaagaggagtcagttagatactatcacggcattcatttgtggctggcttgcatatttacttatgattgataataaatctattttgctttttagagcctcccgagaagccatctgccttcgagcctgccattgaaatgcaaaagtctgtttccaataagccttgggattgganaatgnacaat

SEQ ID NO: 7469 - DNA, 834 bp, Homo sapiens
  misc_feature 570, 600, 621, 627, 730, 759, 761, 762, 771, 774, 805, 815,824, 830: n = A,T,C or G
tagggcgaattgggccctctagatgcatgctcgagcggccgccagtgtgatggatatctgcagaattcgccctttcgagcggccgcccgggcaggtactgcccttactgccttcaggctggggaaggaacaaagggcctggttgatatgccggcacctccagcatgccacagccaccctatgaaaaggagctcagtctttcttccctgtgagtcctcacccccaactcttcaccaggcagggcccctggctcgggaccacagaacagctgccccaccccaggctaagcattcttactggtagttgctctgggtttcccagggatggagctctcagaagaaaccaacagcttctccgctatggctcctgcagtggttctgcccttgctgccccaggactgggaaaggagcaaagagtttgagggctctactcacatttccagcatgccacagtcaccatacagataggagtatagtcaccccttcctgtgagccttgacccccagcttttcaccaagcagggtccctggatgaatattcagccacacccagctgaacattcccgttagcangatccttgtatttctttgaggtgaaagctncaaagaagcaactgaaaactnctctgncactgtaactgcagtggtacctcggccgcgaccacgctaagggcgaatttccaacccacttgccggccgttactaagtggatccgagctcggtacccaacctngcgtaatcatgggcataagctgtttcctngnnggaaaattnttnttcccctcacaattccacacaacataccaanccgggaagcntaaaagtgntaaaancctg

SEQ ID NO: 7470 - DNA, 582 bp, Homo sapiens
  misc_feature 4, 9, 10, 15, 20, 21, 22, 25, 27, 29, 30, 37, 39, 40, 41,42, 43, 44, 46, 47, 48, 52, 54, 55, 57, 59, 61, 73, 77,84, 87, 90, 96, 102, 148, 187, 205, 272, 360, 379, 395,408, 456, 457, 458, 464, 497, 520, 523, 544, 582: n = A,T,C or G
ttcnttatnncgtcngcgannngangngnngcgatcngnnnnnnannngttntnntncncnaggagaggtganttgngccttgncanccntaattngaacgngccctctagatgcatgctcgacggccgccagtgtgatggatatctngcagaattcgcccttagcgtggtcgcggccgaggtacangaactagctgggtgtggnggcgctcgcctgtagtcccagctactcgggaggctgaggcaggataattgcttgaacctggcaggcntaggttgcagtgagccgagatcgcatcactgcactccagcctggcgacagagcgagactccgtctcgggaaaaaaaaaaaaaatcctnaacagctgagaatggctangagtttaggcgctgcncactggcaagcanctcctttgaccccaggcacttcactcctcatttctttcgtcaacagtnnnccagcnagggatcctggaggtcacaggtgtgagatgcgnaaaaaaaaaaaaaaaagatttanctncctaaaatgtttaaaactttnatatggcaaatgacactgtatttactattaagaaatan

SEQ ID NO: 7471 - DNA, 482 bp, Homo sapiens
  misc_feature 6: n = A,T,C or G
cgaatngggccctctagatgcatgctcgagcggccgccagtgtgatggatatctgcagaattcgcccttagcgtggtcgcggccgaggtactaggattacaggcgtgaagcagcatgccacgcctatagtgatatctttaagtaagcctctcctatcttttttgagcagtttttcaaagcaacaggcaccttattaaattagaaagttgatgtgcttccctaatgcctactaatgaggtaaagaactaaagaacctctgtgatttcaatgaagtcccttcagatgttatgggctacttgttactgacaagtatggtaggaactgtaggtcaagctgtcataggcaaatagatcttgctgaagaggaaagaattattggctaagataacaccctaggacacctgcatactttagacacagctaaattgaatgctttctgaggaggagtgtattaatctgttctcacactgctataaagatatt

SEQ ID NO: 7472 - DNA, 584 bp, Homo sapiens
  misc_feature 1, 3, 5, 8, 11, 13, 15, 20, 21, 22, 23, 24, 26, 30, 32, 33,36, 39, 42, 44, 45, 46, 51, 54, 57, 60, 61, 63, 64, 65,66, 67, 70, 71, 76, 87, 94, 95, 99, 101, 104, 106, 109,112, 121, 176, 209: n = A,T,C or G
ntnanctnctncntnatgtnnnnngncatntnntgntgntgntnnngatgntgntgnganntnnnnnagnnaaggntgaggttgagnctttacnncccntntantngantgngccctctanatgcatgctcgagcggccgccagtgtgatggatatctgcagaattcgccctttcnagcggccgcccgggcaggtacacgggggccganagtctgtgcgaaggtccgtggacagactgctttgcctgttgttgctcttcggaggcggcgatccccgaaggcgagctgaaatacggctgcaggctacaatttgcagccgaccattatggatgacaaggagccgaagaggtggcccaccctcagggaccgcttgtgctcggatggcttcttatttccccaataccccattaaaccgtatcatctgaaggggatccacagagctgtcttctatcgtgatctggaggaactgaagttcgttctgctcacgcgttatgacatcaataataaagacaggaaggaaaggacccgccctacatttggcctgtgccactggccaaccggaaatggtcctcggccgcgaccacc

SEQ ID NO: 7473 - DNA, 578 bp, Homo sapiens
  misc_feature 1, 2, 3, 9, 15, 20, 22, 25, 26, 30, 35, 42, 43, 44, 45, 46,47, 49, 52, 55, 56, 58, 61, 66, 68, 77, 92, 116, 121, 122,128, 133, 135, 137, 143, 144, 146, 169, 177, 182, 216, 225,235, 237, 261, 265, 275, 279, 282, 285, 293, 298, 308: n = A,T,C or G
  misc_feature 389, 423, 425, 454, 455, 494, 506, 516, 518, 531, 534, 538,562, 571, 573, 577, 578: n = A,T,C or G
nnntccttngcggcncgttngngtnnttcnccttntttcacnnnnnntnttnccnngnttnggagngntgatcgttntatccttatgtctanttggtccctctagatgcatgctcnagcgnncgccantgtgntngntatctnnanaattcgccctttctagcggccgnccggacangtacncgggggggggtaaagtggactggggagaacttcngaggatgtncatgtccagnancagccccacgccctgtatggtcangtgnctatagcctnacancanctnatgaccancccanctctcagaanaaggaatgtcaaaatgtcatgttcaattttacattctgtgcctggaatcttttcttcacaattgaaatgaaatgtgctganagaggtgaatccatgcattaatcttcagctcacnanggagatactacataagaagcaagaccacnnactccagactggacataagttggattttttttgccctgncctggaaagaangggttcctcngncgcgaccccgctnagnggcnaatttccagcacactggcggtcgntactattgngncccnn

SEQ ID NO: 7474 - DNA, 479 bp, Homo sapiens
  misc_feature 478: n = A,T,C or G
cctctagatgcatgctcgagcggccgccagtgtgatggatatctgcagaattcgccctttcgagcggccgcccgggcaggtacgcgggatggtcggtgtctagagcctcacagcaactaagaccaacccagctctcagaagaaggaatgtcaaaatgtcatgttcaattttacattcagtgcctggaatcttttcttcacaattgaaatgaaatgtgctgaaggaggtgaatccatgcattaatcttcagctcacaaaggaaatactacataagaagcaagaccacagactcaagacggacataattggatttttttgccatggcctggaaagaaaggtacctcggccgcgaccacgctaagggcgaattccagcacactggcggccgttactagtggatccgagctcggtaccaagcttggcgtaatcatggtcatagctgtttcctgtgtgaaattgttatccgctcacaattccnt

SEQ ID NO: 7475 - DNA, 516 bp, Homo sapiens
  misc_feature 10, 24, 34, 63, 72, 75, 77, 87, 95, 107, 116, 256, 342, 396,445, 456, 462, 508, 516: n = A,T,C or G
gaaaaaattnaaaccttgtgaaanccccaatttnggaaaggtccccccagaagcatgcttttncgggcgccnttntnacggtttttngcacaacncgcccttagcgngggcgcggncgaggtacagcgggtcacatatgtccctaaattatttttcaaaaactcagacatacaccaaacagatatactggcacataagcctcaaataaggaggaacagaggactaaaactctgactgctgttctttgttctaaatntcttcctgaggggcctaaaagagccagaatgaacatttttttctactgatcccaaatttttagacaaaacttctccttaaccaatnacaaatcaaaaatctttaaatccacctataacctgtgggcccctgatttgagangacctgcctttttaaatcaaaccagtatataacctccatatattgattnataactgctgnaactcngccttcctgccttagaaacccttaacctgtaagccatctggaaggncaggactn

SEQ ID NO: 7476 - DNA, 584 bp, Homo sapiens
  misc_feature 4, 9, 10, 11, 12, 14, 15, 16, 17, 18, 19, 22, 23, 25, 28,29, 31, 32, 33, 35, 36, 40, 41, 42, 44, 45, 49, 50, 51,52, 53, 54, 55, 57, 58, 59, 60, 61, 62, 63, 64, 65, 68,72, 73, 74, 75, 76, 84, 88, 96: n = A,T,C or G
tctntctannnncnnnnnnctnntnttnntnnngnngacnnncnntgannnnnnntnnnnnnnnnagntagnnnnntcgggacnttcntataggcnaattgggccctctagatgcatgctcgagcggccgccagtgtgatggatatctgcagaattcgccctttcgagcggccgcccgggcaggtacctgccaggtcttcatggagctctgtatggtcctacctgaggggagcgtcctgtatgcagctgctgaagacattgcctgtcctagagcttgattagagcccagaggctgctggaaactggcaggtttgctggttgaagtggtctggtgctttgatttgggatctttaactggtttggtccagaccagtgcctccccaacctggagagcagctcccaacttctgagccatctccaccatcttgtgtccacaaaggaagtaaaagaatcaaaagccgtgactgtcagagacaagccaacccacttctttggtcttcgagctggggttttagctgaaataagtgtctggtcgtacctttctttggaatgggtttggttcgaccgtcatacttcttcaaggt

SEQ ID NO: 7477 - DNA, 599 bp, Homo sapiens
  misc_feature 4, 7, 8, 13, 15, 16, 19, 20, 22, 24, 25, 26, 28, 31, 34,35, 37, 40, 41, 44, 46, 47, 51, 53, 54, 55, 56, 59, 61,62, 63, 64, 65, 67, 69, 70, 73, 76, 78, 83, 94, 95, 104,107, 113, 117, 121, 124, 125, 136, 140, 152, 153, 156, 163,171: n = A,T,C or G
  misc_feature 175, 177, 178, 198, 200, 205, 208, 217, 251, 264, 277, 309,347, 476, 501, 511, 551, 572, 587, 599: n = A,T,C or G
cgtngcnncccanannccnnangnnntntancannanganngancnngccncnnnngtngnnnnngncnnagnaangngaganttgacacgttnnaataccccnaantttttntagngccnccnnagcatgctttncggncgccattttganntgnttttttnacaattcncctngnnagcgggcgccctgacaggtncnggctngtnccttgtggngatcacatggctcccacagaaagcacccgggatntgacactaacagnccagctacagagngcatgctcctggcttaccatgacaactgccanaactctggatgctttcatgggcacacacaaatttgatncatgtgtgagaccccatagaatagacaagcaacctcagtatgagaggagaaaataattctctataaaatgaatcttacttggacactatacaatgtgggtttaatttcaaatacccaaaaggcttcatntgtggcctcacctaacaagaagttngccattgctnggattttgaagcgcagctccagtttatttaggaacctcangttattttggaatctagaggnagagaactgcctatntccaaagtaaan

SEQ ID NO: 7478 - DNA, 567 bp, Homo sapiens
  misc_feature 2, 3, 6, 7, 9, 10, 11, 16, 18, 19, 20, 22, 24, 25, 26, 27,30, 32, 35, 37, 38, 39, 41, 46, 48, 49, 51, 52, 54, 55,56, 57, 59, 60, 62, 63, 64, 66, 71, 72, 73, 74, 79, 80,82, 85, 86, 89, 92, 94, 96, 98, 101, 363, 470: n = A,T,C or G
tnncgnnannntttgntnnntntnnnntangntantnnnangtgtngnntnngnnnncnntnnntntaagnnnngaagnngngtnnatnttngncnantgngccctctagatgcatgctcgagcggccgccagtgtgatggatatctgcagaattcgccctttcgagcggccgcccgggcaggtacagctaatcaggcaaattgtcagatgcctcctaactctggttggacagaggactggtcttacaaggattctttccagatgagcagctgtagccctcaagtccctttggagagcttgtgcacaaactgcctttgtgtctgatagctcaccttttgatgtaaagagccaaattccacctnattttaatgctaaaatcctgcccctaagtgaacatgggatgtgttacatgtatgtttatccattgcccatgtaagttggctcccctcataaatatatatagcttttncccaaaccttactgaatatgcattgactctattatataatacccgaccctgtaaggcacaaaatccaagctgcccttgccctctttgaagaaaggag

SEQ ID NO: 7479 - DNA, 466 bp, Homo sapiens
cgaattgggccctctagatgcatgctcgagcggccgccagtgtgatggatatctgcagaattcgcccttcgagcggccgcccgggcaggtacaggtgaattgctaccaaaaagaagcagcaatcatatggaggcttctgtatcctatctttgcaaaataacttcattgaaagaaagatttaggacagtttttcacatagaggacaaaacatctgtgttgccaagaatctcttcttggcttgttaatgcccttatctaattaggaaatttaaggctaggtttgcaaagttacttttcatgagatttgggtgatttcatattaggattacacaatccagtttttgtgagaaagaaacaactattcactctatattctgcaaaatgtaattattttaggaaattaagtctctaggttaataatgtttacagttctaacatctgtgttttagattttgtgagaaattggt

SEQ ID NO: 7480 - DNA, 461 bp, Homo sapiens
  misc_feature 356, 420, 425: n = A,T,C or G
gggccctctagatgcatgctcgagcggccgccagtgtgatggatatctgcagaattcgcccttagcgtggtcgcggccgaggtacgcgggaaatgaagaaaagcaaatcctgccctctctacttttcacctcctgctccccatgttccctgcctggtttgctgttgatctgttgattgacttagactgtaagcacatggggcagggccagtcactttcttctcatgacagagctcactgcagggctgtgctcggtgctagggaagcagcattagaataaaaccccacctggatgcagtgctgggtcttgacaagttctctcttctttcatcacccatccaacccaaagctcccggntcacgcagctgtgaccagagtgctgaacagagaggaaggaaaggggtccacatcctgcccttgntgctngatttagattctgggaagggcatttccctcttctgg

SEQ ID NO: 7481 - DNA, 467 bp, Homo sapiens
  misc_feature 368, 442, 443: n = A,T,C or G
gggccctctagatgcatgctcgagcggccgccagtgtgatggatatctgcagaattcgcccttagcgtggtcgcggccgaggtacgcgggaagactacccacaaaaacatgacctcaccaaacaaactaaataaggcaccagggactaatcctggagaaacagatatacgtcctttcaaacagacaattcaaaatagcttttttgaggaaactcaaagaaattcaagataacacagagaaggaattcagaattctatcagataaatttagcaaagagattgaattaattaaaaagaatcaagcagaaattctagagttgaaaaatgcaattgcatcctgaataaggcatcaagaggctcttaatagcngatttgatcaagtgcaagaaagaattagtaagcttaaagacagggcatttgaaaatacacagaggagaaaaaannatctaaaaaaaaaaaagtacctgg

SEQ ID NO: 7482 - DNA, 460 bp, Homo sapiens
  misc_feature 322, 381, 384, 388, 403, 412, 419, 440, 460: n = A,T,C or G
cctctagatgcatgctcgagcggccgccagtgtgatggatatctgcagaattcgcccttagcgtggtcgcggccgaggtactttttttttgtttttttttttttaaaccttggagaatatgtatttcatctcccaggatgagagccaacctatgttagtgagtaaatagagttaatactatcctgttttttatttttatacctcttaaaaaaggaaacaaaaaaaaaccttaaatcaaacctaaattattttgtgtcttttatgttttttttccattcattctttaaatgccagctccagtgacactttctctgtgaaactntccctgcccagtcactctgagcaagagttaagtataccatagaaaggaatttaaaattncantccntcctcttaaaactcnttttataantcaatgnacccatccttttttctcggcntttctactaaaggcaaggtn

SEQ ID NO: 7483 - DNA, 466 bp, Homo sapiens
attgggccctctagatgcatgctcgagcggccgccagtgtgatggatatctgcagaattcgcccttagcgtggtcgcggccgaggtacagtttccctcctggctgctttcacaggctggtcttgaatgtctgcagcttttccaggcacgtggtgcaagctgtcagtggatctaccattctgggatctggaggatgctggcctccttctcacagctccattaggcagtgctccagtaggaactctgtgtgggggcaccgacctcacatttccttttcacactgccctagtagaggttctccataagggccctgcccatgcagcaaattctgcctgggcatccaggcatttccatacatcttctgaaatctaaggtggaggttcccaaaaccccagttcttgactaatgcgcacttgcaggctcaacaccatgtgaagctgccaaggcttggggcttgcaccctctgg

SEQ ID NO: 7484 - DNA, 1152 bp, Homo sapiens
  misc_feature 1, 5, 6, 7, 9, 11, 12, 17, 19, 22, 23, 26, 27, 31, 37, 38,40, 44, 46, 47, 48, 49, 50, 51, 53, 54, 63, 64, 65, 66,67, 70, 74, 80, 82, 88, 90, 91, 92, 95, 96, 97, 98, 100,101, 105, 108, 109, 113, 115, 117, 375, 419, 441, 456, 474: n = A,T,C or G
  misc_feature 484, 506, 521, 533, 542, 546, 578, 592, 645, 652, 659, 679,688, 711, 759, 775, 792, 806, 819, 847, 873, 877, 878, 888,900, 909, 914, 961, 964, 965, 970, 973, 978, 982, 999, 1000,1024, 1028, 1036, 1040, 1042, 1044, 1045, 1046, 1050: n = A,T,C or G
  misc_feature 1054, 1069, 1071, 1073, 1079, 1085, 1087, 1094, 1102, 1111,1113, 1121, 1131, 1132, 1137, 1138, 1141: n = A,T,C or G
ncccnnncncnnctttntnttnntgnntttngatttnntntatnannnnnntnnaatatgctnnnnntgntcgncccatnantttttncnnnctnnnngnngggntgnngtcntnancgactcctatagggcgaattgggccctctagatgcatgctcgagcggccgccagtgtgatggatatctgcagaattcgcccttagcgtggtcgcggccgaggtacgcgggtaagagatctgaaataagtttaaaaggagtttagtatttttaaaagtcacctcaaaatcttgagaaatattgtgtgtatttcttcgtatacttacaagttaataggagtagtgtagatggtataagaaaggaatgaaactcagaaggnaaatacaccacattggccataaggaaataaacctcacaaatttntatttgtttctcttccagatcncgacgttatcctganaggggaaaagttccattncaagcagagnagcctcccacccggtaattagnctccatttaggcttngggagccctggnctaggcaancacnttacctgtcaagtttaagggcagttcctggantggtattcttggtnaccctggccccgggggcggggcccgccttccgaaaaagggggccgaaaatttnccaagcnaacaacnttggggccgggccccggttnacctaaggntggggaattcccggaaggcttcnggggtacccccaaaggcttttggggccggttaaaattcaattggggtnccattaaaggcttggntttttcccttggtgggngggaaaaatttggntttattccccggnttccaccaaattttccccaccacccaancaattaacctgaagccccgggggaangccnntaaaaaggtnggttaaaaaggnccctggggnggtgncccttaaatggaggttggaaggcttaaacctcaccaatttaaatttnggnngtttnggngcttncaanttgggccccggtttttnnccaggtccggggaaaaaccctttntcgntgggcccnagcntngnnntttnaaanggaaattcgggcccnancncccccngggggnanaaggccngggttttngtcgttatntngggccgcntctttaccgnntttcnnttngggttaacttg

SEQ ID NO: 7485 - DNA, 579 bp, Homo sapiens
  misc_feature 2, 4, 6, 7, 8, 10, 12, 13, 15, 18, 19, 20, 21, 23, 24, 25,26, 27, 28, 29, 32, 33, 35, 36, 39, 41, 43, 44, 46, 47,48, 49, 50, 51, 52, 53, 54, 55, 56, 59, 60, 61, 62, 63,64, 65, 66, 67, 68, 70, 71, 72, 76, 77, 82, 84, 197, 199,247: n = A,T,C or G
  misc_feature 274, 290, 309, 358, 431, 453, 483, 559, 561, 564: n = A,T,C or G
tntntnnngnanntnctnnnntnnnnnnngtnngnntantntnntnnnnnnnnnnnatnnnnnnnnnnannnggtnnacgtntncgatcactattgggcgaattgggccctctagatgcatgctcgagcggcccgccagtgtgatggatatctgcagaattcgccctttcgagcggccgcccgggcaggtactaaantntttttttttttttttttttttaggagagatggggtttcaccatgttanccaggatggtctcaatctcctgacctngtgatccacctgcctnggcctcccaaagtgctganattacaggcgtgagccaccgcgcccggcctttaattggttcttaagganactccctttgagtgagacgggaatttcttgtagggttttaagcaaaggagtgccttgatttaactgacgtttnaataggatccctctgactgcantatggaaaacaaactgcaggggggcttggnaggccaacttgccaaccattgcaacaaatccaggtgagatgggatgaagtgggctttggaccatggtggtagtgantncanacactagggtggggc

SEQ ID NO: 7486 - DNA, 1121 bp, Homo sapiens
  misc_feature 3, 4, 10, 11, 14, 15, 16, 17, 18, 19, 21, 24, 26, 28, 29,34, 35, 38, 41, 44, 45, 47, 53, 54, 63, 64, 65, 67, 68,70, 73, 75, 78, 80, 82, 83, 85, 87, 88, 90, 93, 96, 97,101, 102, 107, 108, 114, 115, 119, 123, 489, 536, 537, 538,544: n = A,T,C or G
  misc_feature 545, 546, 560, 570, 594, 610, 680, 681, 700, 717, 720, 722,733, 745, 749, 760, 784, 800, 804, 808, 814, 824, 828, 836,840, 842, 860, 865, 866, 877, 887, 892, 908, 909, 910, 911,914, 923, 925, 934, 937, 941, 946, 948, 968, 970, 972: n = A,T,C or G
  misc_feature 977, 978, 989, 990, 995, 1008, 1009, 1013, 1016, 1021, 1047,1056, 1057, 1069, 1075, 1082, 1085, 1091, 1092, 1096, 1098,1101, 1107, 1113, 1114, 1115, 1117: n = A,T,C or G
ccnncgtccnnctnnnnnngngangntnntgtannctngtntcnnangactcnngtgtagtgnnntnngncgntnctncntnnantnnanagnggnnttcnncgttnngactannctcntatngggcgaattgggccctctagatgcatgctcgagcggccgccagtgtgatggatatctgcagaattcgcccttcgagcggccgcccgggcaggtacgcgggaggcattgaggcagccagcgcaggggcttctgctgagggggcaggcggagcttgaggaaaccgcagataagtttttttctctttgaaagatagagattaatacaactacttaaaaaatatagtcaataggttactaaggatattgcttagcgttaagtttttaacgtaattttaataagcttaaggattttaagagaaaatattgaaaggacttagaaagagtagcatggagggaaagggaaaaagataaaaaggtttttctaaanacatggacgggaggtttgaagaatgaaaagcttctttcatgggagcnnnaaggannngatgataaaaaaangttacccttngggcccggcggacccaccgccttnaggggccgaaatttcnccagccaccaccttgggcgggcccggtttaccttaagttgggatcccggaggccttccgggttccccaanncctttgggcgggtaaaatncatggggtccataaggnctngnttttcccctgntggtgggaaaanattngtttattcccngccttcccccaaattttcccaccncccaacccaattaccnaagngccngggaangggcaatttnaaangtgggtanaaangnccttggggggggggcccntaaannggagggtggangcctaaaccntcacnaattttaattttggcnnnntgngccgcctcnanttggccccngcntttntcccnanttccgggggaaaaaacctgntntntgtgnnccaactcttgnnctttnaaaatgggaattnngtgnccncaacnacccccggggggaagaaaggcccggntttttgccnntttttgggggcncctttnttgcacncgnttcgtnngacncnaantggganatagtnnntngtgc

SEQ ID NO: 7487 - DNA, 1224 bp, Homo sapiens
  misc_feature 4, 8, 9, 10, 16, 20, 22, 23, 24, 26, 34, 35, 40, 42, 43,46, 47, 51, 55, 56, 57, 58, 59, 60, 61, 63, 65, 69, 75,76, 77, 78, 80, 85, 86, 87, 88, 91, 92, 93, 97, 103, 104,105, 107, 108, 112, 114, 116, 120, 121, 123, 207, 213, 223: n = A,T,C or G
  misc_feature 225, 290, 327, 357, 359, 395, 410, 424, 441, 463, 471, 498,501, 510, 527, 536, 563, 580, 593, 614, 622, 655, 657, 658,687, 689, 707, 712, 714, 721, 737, 762, 780, 794, 795, 811,819, 831, 834, 838, 855, 868, 877, 882, 885, 891, 896: n = A,T,C or G
  misc_feature 907, 934, 942, 947, 951, 958, 968, 971, 977, 980, 985, 986,989, 995, 1001, 1009, 1012, 1013, 1015, 1017, 1029, 1033,1034, 1036, 1038, 1046, 1047, 1051, 1063, 1066, 1069, 1070,1072, 1074, 1076, 1079, 1089, 1092, 1096, 1103, 1106: n = A,T,C or G
  misc_feature 1110, 1115, 1116, 1137, 1141, 1146, 1147, 1149, 1150, 1156,1167, 1173, 1183, 1195, 1196, 1202, 1206, 1211, 1212, 1214,1215, 1216, 1217, 1220, 1223: n = A,T,C or G
cccncccnnnccaagnattntnnnantttaatannttatntnnttnnatcntcannnnnnnantnatanatatcnnnnanaggannnnttnnnctcnctagcnnngnnaagntnangtanntnattcactatagggcgaattgggccctctagatgcatgctcgagcggccgccagtgtgatggatatctgcagaattcgcccttancgtggncgcggccgangnactcttttttttttttttttttctctaatcttgtcttcatgctttatttcattaagttgatcttnaatctctgatattctttcttctgcttaatcaattcanctattgatacttgtgtatgctacacacagnancttgtgctgtgtttttcagctccatcaggtcattantgttcttctctaaanctggttattatagnttaggcaatttccttcntaacctttttttttcaaaggtntcttttangctttcccttgccattttgggggtttnggnaaaaccaantggccttctcttttaanccttttggngaagggaaggttcttggttttaatttnaccccccaccccttttncttggaaaaggcncttaccttttccttggttccnagggtttncaattcaaaaaaccttacaattttccttcccgntnncccaaggtttttttggtttcccccctttngncttgggccaaaggggaanttttngnggaaatncccctttttgggggangaaaaaaaaaacaagggcccatttnccttggggtttttttggnaaaattttttcaanntcttttttttttggcncctggggnttttttttcccntcnaatnttttcggtggggaaatnttaaattctttanccccttttnggggntcnttttanggaantctttgggccngaaccccttttcgggaattgggggggntttttttnggggnggtngggaatngccccctctntcntgggtnttnggatnnaantatttntccccntttcatanaannangnccaaggggaatncctnncnancctttggnnccgnttttgttttggnaanttnncngntnggngagggtcccnccntccnaaaaccnccntggnttttnntccctgggggaaatcaaactnaaanggggnngnntcttcnacaataaatanaccggngatccccccncgtgaacctctnnccccgngggncgggnncnnnnttntang

SEQ ID NO: 7488 - DNA, 1133 bp, Homo sapiens
  misc_feature 2, 5, 6, 9, 10, 11, 12, 16, 17, 20, 21, 25, 30, 31, 34, 42,43, 46, 47, 48, 53, 57, 60, 66, 67, 74, 75, 76, 78, 86,87, 89, 90, 92, 94, 95, 96, 97, 98, 99, 100, 102, 103, 105,111, 113, 118, 121, 122, 123, 124, 128, 136, 140, 141: n = A,T,C or G
  misc_feature 149, 160, 188, 471, 481, 546, 561, 569, 583, 589, 598, 610,611, 623, 626, 673, 714, 724, 751, 777, 800, 850, 861, 879,918, 934, 939, 942, 962, 975, 979, 1000, 1003, 1007, 1019,1022, 1030, 1033, 1036, 1057, 1073, 1078, 1081, 1082: n = A,T,C or G
  misc_feature 1084, 1089, 1093, 1113, 1119, 1133: n = A,T,C or G
cnccnnctnnnncacnnctnntatntactnnttncttgtctnnttnnngttantaanatnagtacnncctcacnnngnaactctanncnncncnnnnnnncnngnaggggntnaatcnttnnnnaagncacctcantttnnggcgaatngggccctctanatgcatgctcgagcggccgccagtgtgntggatatctgcagaattcgccctttcgagcggccgcccgggcaggtaccaaggaatgattgagattgtggaggagggccgatatgaaaggtgaggtctatccatttggcatcgttgggatggccaacaaaggggattgcctgcagaaaggggagagcgtcaagttccaattgtgtgtcctgggccaaaaatgcacaaaactatggcttacaacatcacaccccttgcgcagggccacagttgggaatgttgtgaaaagatcagtttggcttcattaacctatngaaagtaggnagataagccaaggaagctcttttttccatgtgaaaaaggaaagtttcagggattgggccatttgnagcttaccaggccanggaagatnaagggtgggagatntctcangtgaatttnctttaaattcannccgccacttggnccnaaggttggcagccgcccttgttaattggtttttgggccggggttccntggtggaagggggcccccccaaaagaacttggtttggcaanccttcccttncggaacccttggaatccgggtttgggntccaaatccccctttggaaaggaaantattcaacttcttggggattgantgccccaagttggccttccttccgcccttaaattggggtttccttttccntccaagccccnaaggggggaccccagaantaaaccttcaaattgggggggtttttggggttggccaanaaaaaggaaaaagaantcccngtncaaaggccttgggtgggtcntttggaacttaancccnccatttccccccaaaaagccnccncccntttaattccccnccntttttgantcnaanttggggggggggaaatttttngttggaaaagggtttnctganaannanttttncccntttttaaattcccctcccgnaaaaancttggaaaataccn

SEQ ID NO: 7489 - DNA, 1113 bp, Homo sapiens
  misc_feature 9, 11, 20, 24, 25, 26, 34, 38, 41, 43, 45, 47, 52, 55, 57,59, 60, 61, 66, 68, 74, 80, 83, 93, 95, 101, 104, 106, 109,110, 112, 113, 114, 117, 120, 126, 131, 409, 540, 574, 642,651, 658, 709, 720, 758, 763, 782, 785, 799, 821, 823: n = A,T,C or G
  misc_feature 827, 828, 848, 862, 870, 888, 922, 927, 930, 931, 937, 941,947, 948, 952, 958, 967, 972, 973, 981, 997, 1011, 1012,1014, 1020, 1037, 1059, 1080, 1081, 1093, 1095, 1101, 1106,1108, 1109, 1110: n = A,T,C or G
acccccccnanggttacttntttnnngttattanctgngtngntncnacgtnctntntnnnatttnantatttnttattnttnattgcccttncnatatgngangnttnntnnntcnttnacttcnctatngggcgaattgggccctctagatgcatgctcgagcggccgccagtgtgatggatatctgcagaattcgcccttagcgtggtcgcggccgaggtacgcggggctctcgccaggcgtcctcgtggaagtgacatcgtctttaaaccctgcgtggcaatccctgacgcaccgccgtgatgcccagggaagacagggcgacctggaagtccaactacttccttaagatcatccaactattggatgattatccgaaatgtttcattgtgggagcaagacaatgntgggcttccaaggcagatgccaagccaggatcccgcatgtcccttcgcggggaaaggcttgttggtgcttgattggggccaaagaaacacccatggatgccgccaaggccatccgaggggccacccttggnaaaacaaacccagcttcttgggagaaaacttgcntgcctcatattccgggggggaaaatggtggggctttttgtggtttcaccaaagggaagggaacccttnaacttggangaattcnagggggacaatggttttggcttgggcccaaaataaaggggggcccaaggcnttggctttgcncccgtggcttgggtggcccattttggccccccatggtngaaanggtccaccttgtggcccangcncccaagaaacaacntgggttcttcggggcccccgananaaannaaccttccttttttttcccnaagggcctttttanaggttatncacccaccttaaaaaatnctcccaggggggccaccccaatttggaaaaaatnccttngannttggantgtnggcaanncttnattccnaaggacttngggannaacaaaangtggggggaggcccangccgaaaagccccnncnccttgnttggaaacaattggttncaaacaattttttccccctttnttcctttttggggccttgggnncaatcccaaacnangggggntttcnannnaag

SEQ ID NO: 7490 - DNA, 470 bp, Homo sapiens
  misc_feature 408, 413: n = A,T,C or G
gaattgggccctctagatgcatgctcgagcggccgccagtgtgatggatatctgcagaattcgccctttcgagcggccgcccgggcaggtacttttttttttttctttctttcttttttttttgtatttttagtagagactaggttttaccgcgttagccaggatggtctggatttcctgacctcgtgatccgtccgcctcggcatcccaaagtgttgggattacaggcgtgagccacggagcccggccataggcctgtttcttattctatattcctgttaatgtaaacctcctgagattggaagacaatcagttttacagggtaagaattgttttaattatgtggcagcttttctccaaacatgaagagaaacatttagaaataccgtttaataaaattctctattnatttnggtttctttcaggtaatataattttctcgacttattgatgttagtacaaaacgtttt

SEQ ID NO: 7491 - DNA, 783 bp, Homo sapiens
  misc_feature 548, 553, 573, 616, 623, 626, 675, 688, 692, 698, 706, 726,729, 733, 734, 740, 748, 755, 757, 765, 771, 773, 782, 783: n = A,T,C or G
atgctcgagcggccgccagtgtgatggatatctgcagaattcgcccttagcggccgcccgggcaggtacaatgacagtaacagccgcgtggtgctgccaggactgcccttgggcatatcagtgacagcccaaatgtgggtggaggaaacctgtaatttccttcttaacatgtgtttgaaataccaagtgaataatactgttctggaaaaaaatgataaactagtggaaattaaagaaattaagggttttatataatagacaggccccacctctcaaaatatttttagaagtctttttgtaaactaatttcttttgatcactattttgcatcaagtaaaatgatttttttaaaaccaataaatcatcaattattagaaatagttgtctcacagtgatactggtttttcttttgtgctgttatgatttaacattgacaggaacactattttaaatccttacgttcaggtgtttggaaacttggccttataattaggctgaattatggcttcaaggtctacaattttatgtgtatgggttcacaagcctanccttntatttaccattttgaaaatnacagaatttttttaccaacctttgggaattcctttttttaagnttaatantgntttgggcttttcccttttttaaaattgggtccaaaacctattttttttnaatggggccaagntttnttaacnactttggnaaaattcagaatacctggcnccnaaannccaggnggtttttncccgtangngttttttnatgaangngggcccccnn

SEQ ID NO: 7492 - DNA, 1102 bp, Homo sapiens
  misc_feature 2, 5, 6, 7, 9, 10, 11, 12, 13, 15, 17, 19, 24, 26, 27, 36,37, 40, 44, 47, 51, 52, 53, 54, 58, 65, 71, 72, 76, 77,78, 80, 83, 84, 86, 88, 91, 93, 97, 100, 101, 112, 115,119, 138, 381, 388, 402, 417, 434, 447, 448, 450, 468, 503: n = A,T,C or G
  misc_feature 523, 549, 557, 583, 589, 598, 606, 621, 625, 640, 644, 645,658, 686, 696, 719, 724, 779, 782, 807, 844, 849, 850, 852,853, 858, 865, 879, 885, 888, 896, 899, 902, 913, 917, 924,932, 933, 935, 939, 951, 956, 958, 961, 970, 971, 975: n = A,T,C or G
  misc_feature 977, 981, 982, 1002, 1012, 1016, 1023, 1028, 1036, 1039,1051, 1056, 1068, 1072, 1080, 1084, 1095, 1096, 1101: n = A,T,C or G
cnacnnnannnnntntnanttgtntnntatttattnnatnattnttntttnnnntatncttcaantttttnntatnnntnttnntntnttntngggngtnnagcgttattantanttanggcgaattgggccctctanatgcatgctcgagcggccgccagtgtgatggatatctgcagaattcgcccttagcggccgcccgggcaggtacgcgggcttgactaatttttgtgatttttttttggtagagaccaggggtttcactatgttgaccaagctggtcttggaactcctgggctcaagtgatcctcctgccttggcctcccaaaatgctgggattacaggcatgagccactgtgcctggctggatattgaaatttnttttttntttttttttagaanacagggttttcgctnttgttgccagggcctgngagtgcaatgggnngngatctttggctcacttgnaaccttcggcctcccggggttcaaagccaattctnctgccttcagacctcccaantagcctggggatttaccaggttgttnttgcccancccatgcccaaggccttaaatttttntgttantttttcaanttagaaanaacggggggtttttncttnccattggctggggcncaannccttgggttcctncggaaaactttcctggaacccttcaagnggtggaattnccaacccccggctcttttaaggnccttncccaaaaagtggccttgggggaatttaaccaagggccaaaaaaagccccaaaacnacnacccccccgggcccttggggattanttaaaaatttttattaaattacccccttaacaaggtngccanncnnccaangtaaagnaattgccccccttncaaagnccnccttttgnttnttnaaggggaaaanttanccttttnggcccggnngnaccnacccgcttaaanggggncnaanatttccaanncaancnactnnggcgggggccgttttacttnaatggggatncccnaaacctnctggnaacccaanccnttgggggaaaanacaantgggggcaatancctngttttccntggngttaaaaatannttatnc

SEQ ID NO: 7493 - DNA, 1077 bp, Homo sapiens
  misc_feature 4, 6, 7, 8, 10, 11, 13, 16, 17, 19, 21, 22, 24, 25, 26, 28,29, 30, 32, 33, 35, 38, 39, 40, 41, 42, 44, 45, 46, 47,48, 50, 51, 53, 54, 55, 57, 58, 61, 62, 63, 65, 69, 71,73, 74, 75, 76, 78, 79, 81, 82, 83, 84, 85, 86, 87, 88,89: n = A,T,C or G
  misc_feature 90, 91, 94, 101, 102, 103, 104, 113, 116, 539, 545, 739,763, 770, 784, 822, 829, 850, 862, 897, 906, 933, 934, 949,976, 978, 981, 983, 986, 1005, 1018, 1069, 1071: n = A,T,C or G
ctcncnnnannanttnntngnngnnntnnnannanatnnnnntnnnnntnntnnntnntgnnnanacanantnnnntnnannnnnnnnnnnagntgggttnnnnctttgaaanccnactcactatagggcgaattgggccctctagatgcatgctcgagcggccgccagtgtgatggatatctgcagaattcgccctttcgagcggccgcccgggcaggtacagctcctaataaccttgatgtcagagttgtcacttggttggaattattatgatcccccaatttaaattttcttgataaactcagcgttgtttgttttcagtgacaagaaaacatacatggaaaggggacccaagacagttcaccaagatagttcacagccctttgcaggatatgcctttggtgggtgggagcacctagattttagagggactattaaaaacgccatgtttaccttttgtttgaaaattttcttgatggaaaaggtctttttgtaacttaacattcccaccatttttcattttaaaaaaggtcccagnaaatantaaaactatcccaaattttacaacctaagggtggggtattctgtaaaaaaaccctttaaagaattagttacctctttccccaaaggaagaattaccagccgttctaaaggggggggggggaaaagaaaagcattctgaagccaggtaaaaaagtcaaagcctggttaaaaaaatcccaattaccaggaaattantcttaaattaaaaccccattaaanggtttanttttttaaccttgnagaaaataagaatttcttggcttgcccccttaccaggncattttngggtggccccaaaaaaacttnttaaagccattnagaaggtggatttctttactttttgaaaaatttantccccttangttaggaaaaatttaaaagaagtggtnnacttaattttaaagncaaaggttccacttacccctttttaantnaangnccncccttggtttttggcaccntgggccctttcangccaagccaagggggaatgaaagtttaaattccccattggccttggttccncntttttt

SEQ ID NO: 7494 - DNA, 884 bp, Homo sapiens
  misc_feature 158, 166, 169, 178, 194, 195, 196, 199, 201, 205, 206, 213,222, 227, 228, 229, 231, 234, 239, 240, 242, 243, 245, 246,253, 255, 259, 261, 263, 264, 265, 272, 273, 274, 279, 284,285, 286, 294, 298, 306, 307, 317, 318, 319, 322, 326: n = A,T,C or G
  misc_feature 327, 330, 333, 337, 338, 342, 356, 357, 365, 367, 376, 379,380, 381, 382, 385, 386, 387, 388, 400, 406, 409, 424, 425,426, 427, 438, 444, 450, 459, 460, 469, 470, 489, 493, 506,508, 509, 510, 512, 513, 518, 526, 527, 528, 537, 539: n = A,T,C or G
  misc_feature 540, 555, 577, 592, 596, 617, 620, 622, 624, 625, 633, 634,637, 640, 643, 644, 647, 652, 659, 669, 671, 672, 675, 676,680, 690, 691, 697, 701, 706, 707, 712, 719, 722, 724, 729,730, 732, 733, 738, 739, 744, 748, 752, 756, 761, 762: n = A,T,C or G
  misc_feature 763, 767, 768, 776, 777, 778, 785, 796, 797, 808, 809, 810,813, 818, 822, 824, 829, 837, 838, 841, 845, 847, 848, 849,853, 854, 856, 857, 858, 865, 873, 883: n = A,T,C or G
atgctcgagcggccgccagtgtgatggatatctgcagaattcgccctttcgagcggccgcccgggcaggtactttttttttttttttttttttttttatttttttttttttttttttttttttttttttttttttttttttttttttttttttttttnaaaaaacnacnttttttaanttttaggccaattttnnnttntnaaanncaaaacnatcaatttnttttnnnanccngggcnnanntnnaaaaacntntttnangnnncccgggnnnggggnacccnnncttttggnaaanaaaaaccnngctgggggannngcncccnnttntangaanncaangccaaaatcccttnnaaaaaagntnttaaaaaantannnnccnnnntttttttggggngggganccnctctatggttttttnnnnaaaaaaaaaancccccngggggnacccccccnnaaacggggnnttttttaaaaaaaaaaacncccncttttttttttcncnnntnnggggngggggggnnngcccccccngnnaaaaaaaaccccccntttttttttttttttttttaangggggggggcccacntttnaaacctttttttttttttttnggngnanntgggggcnnggnaanacnnccntttanggggggngaaaattttnanncanncttngggggggccnntttatnttanggganncccanccttggnccncnaaaanntnnggggnngaaanaatngggncaanaaacnnntttnnctttgggnnnaaaaatnttttttccctnnaaaaatttccnnnaanaaaanatananagccngggaaaannaanaaangnnnaaanncnnnggggggnccaaaaanaaaaaaaaana

SEQ ID NO: 7495 - DNA, 463 bp, Homo sapiens
gaattgggccctctagatgcatgctcgagcggccgccagtgtgatggatatctgcagaattcgccctttcgagcggccgcccgggcaggtacttttttttttttttttttaaacagagcactttctaaaggtaaaatataggttggggaaatctttttcttgttagtattattcagccaaaacagtaaatctttttaaaaagcttcatatttaatgttcactcctacacatttaaaatatacatggttgcacagcctattcatggttaaaaaaattaatatatatttgtattaataatagaaaagttataagatggaaaagtataaaggaaaaaataaacttaggggataggtgtaagcattaggtttccatgattaacttatgcattttcattaattttaggtaaaacatgtctctattttaacatgatgtcatctctaatggaatacattagagctgggtt

SEQ ID NO: 7496 - DNA, 933 bp, Homo sapiens
  misc_feature 4, 5, 129, 312, 341, 354, 356, 414, 430, 432, 448, 453, 462,481, 492, 497, 498, 530, 539, 540, 551, 562, 567, 574, 575,579, 591, 615, 618, 625, 628, 634, 636, 646, 647, 648, 649,650, 653, 658, 665, 674, 681, 691, 705, 707, 714: n = A,T,C or G
  misc_feature 728, 741, 748, 750, 755, 760, 765, 769, 772, 774, 776, 789,802, 808, 816, 836, 837, 839, 842, 851, 855, 858, 860, 862,863, 870, 883, 899, 914, 916, 921, 923, 930, 933: n = A,T,C or G
agtnncccagcgcgcaattaaccctcactaaagggaacaaaagctgggtaccgggccccccctcgaggtcgacggtatcgataagcttgatatcgaattcctgcagcccgggggatccactagttctanagcggccgcccgggcaggtacagtggtccttttcagagttggacttctagactcacctgttctcactccctgttttaattcaacccagccatgcaatgccaaataatagaatttgctccctaccagctgaacagggaggagtctgtgcagcttctgacacttgttgttgaacatggctaaatncaatgggtatcgctgaaactaagttgtanaaattaacaaatntnctgcttggttaaaatggctacactcatctgactcattctttattctattttaattggnttgggattcttgcctnangtgcgtattccaactnttggntttaccctnctaatagtcatactagtangtcatactccnggggnngggggggtatttccataaaaaaccttttaaanggctggganngccagccaagncattcaaaatnagtgnaatgggnnctcntcttttgggctnggaaattttcaaaaaaccttcaanaanaaaatgnggnccattncngggaggaaannnnnaanaatanccccttngaagggganaaaaaanccccccaaantggggggggggaanangattaanttcccccttaaaangccttttaaaaanttttggngnaccanatttntaccntatnggntnancgccattttttgncccagggggggcnttaaanggctcccnatacctcccaacctgtgaanntnttnaaaggaaanaaanaantnanncccattnaaaaaaaaaattnaaaaacccatttttanaaaaaaaaaaaaacncncgggngnttcccantcn

SEQ ID NO: 7497 - DNA, 805 bp, Homo sapiens
  misc_feature 3, 4, 5, 6, 7, 8, 9, 13, 637, 659, 662, 677, 693, 715, 719,776, 780, 799, 802: n = A,T,C or G
agnnnnnnncccngcgcgcaattaaccctcactaaagggaacaaaagctgggtaccgggccccccctcgaggtcgacggtatcgataagcttgatatcgaattcctgcagcccgggggatccactagttctagagcggccgaggtacacttgctctttctgtggcaaaaccaagatgaagagacgagctgtggggatctggcactgtggttcctgcatgaagacagtggctggcggtgcctggacgtacctccagaggtaactgtgctcacgaacagccctgtggaactgagagagcccaacgtcctcatctgtttcatcgacaagttcaccccaccagtggtcaatgtcacgtggcttcgaaatggaaaacctgtcaccacaggagtgtcagagacagtcttcctgcccagggaagaccaccttttccgcaagttccactatctccccttcctgccctcaactgaggacgtttacgactgcagggtggagcactggggcttggatgagcctcttctcaagcactgggagtttgatgctccaagccctctcccagagactacagaaaacgtggtgtgtgccctggcctgactgtgggtctggtgggcatcattattgggaccatcttcatcatcaanggagtgcgcaaaaaccatgcancanaacccagggggcctntgtaaggcacatggangggatggtgtttcttaaaaaanaaancacttgaaaaacttttggtttaatgacttacaaactggcaatttttcaatccttganctantggaaagcaatcatttttnaangtt

SEQ ID NO: 7498 - DNA, 824 bp, Homo sapiens
  misc_feature 598, 624, 681, 712, 716, 723, 760, 769, 796: n = A,T,C or G
gcgcaattaaccctcactaaagggaacaaaagctgggtaccgggccccccctcgaggtcgacggtatcgataagcttgatatcgaattcctgcagcccgggggatccactagttctagagcggccgaggtacagatacatggacacaatcatggcagccagctcgaggcccccaattccagctgccacaccacccacggtgactgcattagttcggatgtcatacaaaagctgattgaagcaaccctctactttttggtcgtgagccttttgcttggtgcaggtttcattggctgtgttggtgacgttgtcattgcaacagaatgggggaaaggcactgttctctttgaagtagggtgagtcctcaaaatccgtatagttggtgaagccacagcacttgagccctttcatggtggtgttccacacttgagtgaagtcttcctgggaaccataatctttcttgatggcaggcactaccagcaacgtcagggaagtgctcaccatttgtggtgtacttcacacttactaagatgttaaaactatatgaattattgggcatatactgactggactgcatattttggtagtaaaataggggnaaaaataaagtattttaagtttggangggataaattttgaatccgaatcaccctgaattgttcttattgtaaatgggaaaaanattctttttccttggcttttctttgggggtnaaangggatantatttcttattttgggattgggaaattccttatttcnaaatacaantttttttttaaaaaagtttacctcctnatttgggaccaaaaaaaaaaaaaaaaat

SEQ ID NO: 7499 - DNA, 846 bp, Homo sapiens
  misc_feature 496, 525, 577, 648, 673, 680, 718, 732, 745, 749, 751, 759,760, 770, 773, 790, 803, 815, 820, 824, 829, 833, 836, 842,845: n = A,T,C or G
gcaattaaccctcactaaagggaacaaaagctgggtaccgggccccccctcgaggtcgacggtatcgataagcttgatatcgaattcctgcagcccgggggatccactagttctagagcggccgcccgggcaggtaccaattgtcaactaaggtaagaacattgggtgtgttcccacccacaaactccttcatcacctttgctacattggtgccgctttggtccaagttgcgggcttgggctcgtgcccgcaatttgcttactagttctaccacactgcaggtaatcccagccacagcagctgctgctcccagacccatgccagtgtccaagagcacaaaactgattccttctgtgaagggtgccagacccaggccgaggagggtcaggatgccagaggtagtgccaacagagttggacaccacattggcaatggtggtgcctctgtgggacctgctcaacctccttccgcaagggcacgggagcttccttatgtnatcctcaagcttcccttttcaacccgaanggaaactcttttcaaaaaaccacttgccctgtgctggttggtcttttatcgngggcgggtttttgtcctttcattgaccatgttgacttttgcaaagcttgtttccaaaagcttttaacggangcttcattttgcccttattcccttnggggcangtttcaagcaagccaagccccaccgaaattccaatttnccaaggcttttaancaatttaagttcnagcnantttgttannccaaaatttnttnttttgctttaccttggnccctgggaaaatnccttaaaagggnaaatnctcnaaatnaaanaanacttgnctnt

SEQ ID NO: 7500 - DNA, 779 bp, Homo sapiens
  misc_feature 528, 583, 601, 647, 661, 706, 723, 738, 740, 742, 743, 754,755, 779: n = A,T,C or G
cagcgcgcaattaaccctcactaaagggaacaaaagctgggtaccgggccccccctcgaggtcgacggtatcgataagcttgatatcgaattcctgcagcccgggggatccactagttctagagcggccgcccgggcaggtacctggaggtctggacagttatactgtaacctcttaagttttaatgtgctaaatatatcttgtatgattttttattttttaataacattggaaatatattcaagagattatgattctgtaaagctgtggaatgaagctgcagatttagagaacattggcttctgaaaaaaaaagagtgaagatagtacgcgggggactctcagcagctcaactgcccagcgtgaccagtggccacctctgcagtgtcttccacaacctgggatgaaattgattctgcagtaaagatgttggtgtcattaaaaatgagctacaaagctgccgcgggggaggattacaaggctgactgtcctccagggaacccagcacctaccagtaatcatggcccanatgccacaaaagctgaagaggattttgtggacccatggacaagtacctcgcccgncaccgcggtggagctccnattcgccctatagtgagtcgtattaccccccgctcactggcccgtngttttacacgtccnggactgggaaaaccctgcgttcccccacttaatcgccttggcaanaacattcccctttttgncagcttggggttatnancnnaaaaaggcccnnaccgaatcgccctttcccaaaaan

SEQ ID NO: 7501 - DNA, 803 bp, Homo sapiens
  misc_feature 3, 8, 9, 12, 13, 14, 432, 447, 486, 490, 598, 612, 619, 628,694, 702, 767, 776: n = A,T,C or G
ggnttttnnccnnncgcgcaattaaccctcactaaagggaacaaaagctgggtaccgggccccccctcgaggtcgacggtatcgataagcttgatatcgaattcctgcagcccgggggatccactagttctagagcggccgcccgggcaggtacgcgggggcagaagaggaagatttctgaagagtgcagctgcctgaaccgagccctgccgaacagctgagaattgcactgcaaccatgagtgagaacaataagaattccttggagagcagcctacggcaactaaaatgccatttcacctggaactttgatggagggagaaaactccttggatgattttgaagacaaagtattttaccggactgagtttcagaatcgtgaattcaaaagccacaatgtgcaacctactggcctatctaaaacacctcaaanggcaaaacgaggcanccctgggaatgcttacgtaaagctgaagatttttcaccngaancttcttaaccagccaaaattaaaaattctggtcacctggggaaactatgcctgggtctactattacatgggccgacttttaaactttcagaatttttgtaacaagggnaacatgtctgtganaagtttncagtccctntaaaatgaaaatccaaacttgattgtgaagaagggggacccggttaagtggggaggaacccaaaangaaaaacnaagggtctttgaaaagctctggaaaaaaacccaaaaacccaaattcacctttggactggcaatanaaactacgnttggaaactggcccccattttaaaacc

SEQ ID NO: 7502 - DNA, 810 bp, Homo sapiens
  misc_feature 3, 4, 6, 10, 570, 640, 713, 715, 769, 771, 772, 801: n = A,T,C or G
agnntnttcnccagcgcgcaattaaccctcactaaagggaacaaaagctgggtaccgggccccccctcgaggtcgacggtatcgataagcttgatatcgaattcctgcagcccgggggatccactagttctagagcggccgcccgggcaggtacagtatggcttaaaaggctctgccttagattctagaatccagaacattttctccaaagacaatcagggtatgggggagaagttagttccagagaagagagcgagtccagggtagaagggattcttttctcctgagggtctatggtctcccattttttaaagcagcagtggtatctatcccactcatggcctagaggttgcacagagctgtctggcacccgcttctttggcttttctctcctgacacccagcaatgcttactcagagcgttgaaggcggccagcacctcgaaagagattctctgattttttgtgaacacctggatggtgaacccatcaagggacttctggatctcgaaattgtttttcaaccacttcgtgaacagacagaacttcagcttatccccagttttatcgangatgtcacgttggcttctcttctgatcctggaattggttttaagtcactgaaagaagaggaccaagggtncctcggccgccaccgcggtggaactccaattcgccctatagtgagtcgtattacgcgccgctcactggccgtngnttttacaacgtcgtgactgggaaaaccctggcgttcccaacttaatcgccttgnannacattcccctttgccaggtggcgtattancaaaaaagg

SEQ ID NO: 7503 - DNA, 829 bp, Homo sapiens
  misc_feature 133, 147, 150, 163, 183, 190, 267, 296, 298, 301, 305, 307,331, 333, 344, 347, 349, 361, 367, 368, 373, 375, 382, 466,499, 510, 542, 553, 565, 572, 582, 585, 595, 596, 606, 609,622, 634, 661, 689, 691, 700, 705, 707, 712, 716, 717: n = A,T,C or G
  misc_feature 723, 728, 729, 750, 755, 771, 783, 789, 790, 792, 798, 799,803, 807, 809, 810, 817, 819, 829: n = A,T,C or G
gcgcaattaaccctcactaaagggaacaaaagctgggtaccgggccccccctcgaggtcgacggtatcgataagcttgatatcgaattcctgcagcccgggggatccactagttctagagcggccgaggtacncgggggagatctgngtnagaacgtgcgtgngagcggatacaaaacccganagaggcntgagcagcgctgagtttgcgagcgggagcgaggggcgccggctggggtgtgtgctctctgagctcttcagaaaccangctgctttcaggaacattgctgtggattncnagntttnanacaacacatgactaatacagaatnanaccactctagntgncntatgggaaactngggaanngactncnaaaacancattgtttctccctttggaattctggagttataaatgcagatgtcccccatcttcccgaactggcctattccactagaagcaangatggctgaactcaatactcatgtgaatgttangggaaaagatnttatgcagatacatcatgttggtcccaacaanaagcaataatnaaataagtcctngtgcctncaacaaggtnganttttaaatgnngattaaaagncgngccaaggcctttnttgggatggcantagccaattttaagtttattaaaaagnaatgggaattttgaccaggggattggtngnttttttaanatttnangggantttnntttttncttgnncgggggggggggcggacactncgggngggaccttcaaaattngcccttatttgngagttnntntttacnncccngctnanntggcccntntttttaaaan

SEQ ID NO: 7504 - DNA, 1228 bp, Homo sapiens
  misc_feature 1, 7, 8, 13, 17, 31, 43, 44, 50, 51, 54, 56, 61, 62, 63,65, 66, 67, 73, 77, 78, 85, 88, 110, 117, 149, 190, 203,204, 209, 235, 240, 261, 271, 276, 348, 382, 398, 401, 413,442, 448, 455, 467, 492, 508, 517, 535, 538, 540, 544, 547: n = A,T,C or G
  misc_feature 552, 554, 569, 570, 572, 580, 588, 589, 592, 594, 599, 627,632, 640, 641, 644, 647, 653, 660, 668, 671, 678, 683, 689,694, 701, 702, 710, 727, 738, 741, 742, 744, 754, 755, 756,758, 759, 766, 769, 770, 774, 775, 776, 784, 785, 789: n = A,T,C or G
  misc_feature 791, 798, 802, 805, 808, 819, 824, 829, 832, 836, 847, 853,854, 856, 857, 858, 871, 875, 881, 884, 885, 889, 890, 891,894, 895, 900, 907, 908, 909, 911, 913, 915, 918, 919, 925,926, 927, 928, 931, 936, 940, 953, 954, 955, 956, 957: n = A,T,C or G
  misc_feature 961, 962, 973, 983, 984, 992, 997, 1006, 1009, 1010, 1016,1018, 1019, 1040, 1042, 1044, 1051, 1052, 1056, 1058, 1066,1072, 1073, 1074, 1075, 1077, 1085, 1087, 1097, 1101, 1103,1115, 1116, 1124, 1139, 1140, 1143, 1147, 1150, 1155: n = A,T,C or G
  misc_feature 1156, 1163, 1165, 1166, 1167, 1183, 1185, 1186, 1193, 1198,1208, 1209, 1211, 1217, 1218, 1222, 1227: n = A,T,C or G
ncacttnntatgntgtnttttatttactttnactcttttttgnntgtaanntantnaatgnnntnnnccaatntttnnttttttnatnagaactttagatctcttagttngaattgngccctctagatgcatgctcgagcggccgccantgtgatggatatctgcagaattcgccctttcgagcggccgnccgggcaggaacnnaaaanagccagttttggttgaggctcttcanttatncccaggtttggcagcactganaaccgcaagnaacgngcctgttgttacaaaaaaggagatttgactcagctgccctttggtgcatctgactgactatgactgctgagnagattccaagggacccttaatgccagggctaacnctctcccatgtgcagntgnagacctcctggnagggaaagtgtcatccctctggctttagntgtggntaccttngggccgcagacncacttcctaaaggggccgaaaattnccaaacaacacctggngcgggggcncgttttatctttaagtgngantncccnaangcctncngattaaccccaaaanntnttgggggngttaaaannacnantgggnacaatataggctttgataacccccctgnggagnaaaaaaannttngtntttttnccccccntcaaaaanttntttcccncaacnaatttnttttncgacccnngagagaanaaaataaatataaaagngtgataaaaanccnncngggggggggnnncnnactaatnaanngaannnacctcccnntccncncaatttnattnggnggnggggggggacnttaanctaantcncccnccttttttttntaagannannnaaaaaaaaatacncttntggggnccnncccnnnttnntttanataatannncntncnccnncacccnnnnggngaggnagangagggggagtttnnnnnagtnntagggtattcncctcttcatnnttttttcntgaantgactaaanaanntttcantnnatcattttattttattctttngntnggggagnntgananagtctcanactctnnnntnaagaagangngagtggaaantttntngttttttacctnntaaaatangggggggttctcacnnccnatanaanatatnnatttacntnnnggtttgggttccaacntnntgaatantaaanaatactgatnnantatagnncttncattng

SEQ ID NO: 7505 - DNA, 858 bp, Homo sapiens
  misc_feature 62, 305, 420, 470, 498, 513, 556, 563, 595, 597, 637, 638,648, 675, 677, 692, 708, 710, 723, 727, 736, 740, 743, 792,796, 811, 818, 821, 827, 836, 846, 847, 848, 854, 857: n = A,T,C or G
cctctagatgcatgctcgagcggccgccagtgtgatggatatctgcagaattcgccctttcnagcggccgcccgggcaggtacgcggggagttctctcaggctttccagagctcaggacctctgagaagaatggagccctcctggcttcaggaactcatggctcaccccttcttgctgctgatcctcctctgcatgtctctgctgctgtttcaggtaatcaggttgtacctcggccgcgaccacgctaagggcgaattccagcacactggcggccgttactagtggatccgagctcggtaccaancttggcgtaatcatggtcatagctgtttcctgtgtgaaattgttatcccgctcacaattccacacaacatacgagccggaagcataaagtgtaaagcctggggtgcctaatgagngagctaactcacattaattgcgttgcgctcactggccgcttttccagtcnggaaacctgtccgtgcccagctgcattnatgaatcggccaacnccccgggggaaaagggcggttttgcgtatttgggccgctcttnccctttncttgctcacttgactcgcttgcgctcggtccntncgggttgcgcgaagcggtataaagcttactcaaaagcggnnattaccggtnttccaacaaaattcaaggggataaccncnagggaaaaaacattnttagccaaaaaggccnanccaaaaaggcccngganacccctaanaaanggnccccgtttgccttgggggtttttttcattaaggcttccggccccctttnctancattccaaaaaaatntgacccntcnagttanaaagggggngaaaaccccnnnaggaanttnt

SEQ ID NO: 7506 - DNA, 1059 bp, Homo sapiens
  misc_feature 2, 3, 4, 5, 6, 7, 8, 9, 10, 11, 12, 13, 15, 16, 17, 20, 21,22, 24, 25, 26, 27, 28, 29, 30, 31, 32, 33, 34, 35, 36,37, 38, 39, 41, 42, 44, 51, 52, 53, 55, 56, 59, 60, 61,62, 63, 64, 65, 67, 68, 69, 71, 72, 73, 74, 75, 76, 77,79: n = A,T,C or G
  misc_feature 81, 82, 83, 84, 85, 86, 87, 88, 89, 90, 91, 92, 93, 96, 97,99, 101, 111, 112, 114, 117, 119, 498, 606, 790, 814, 828,836, 851, 855, 890, 916, 919, 921, 933, 953, 957, 971, 975,980, 983, 995, 1001, 1005, 1022, 1027, 1035, 1041, 1042: n = A,T,C or G
  misc_feature 1049, 1055, 1057: n = A,T,C or G
tnnnnnnnnnnnntnnngtnnntnnnnnnnnnnnnnnnngnnanagggggnnngnnttnnnnnnngnnngnnnnnnngngnnnnnnnnnnnnnagnnantnggcgtggagnncnatntngggcgaattgggccctctagatgcatgctcgagcggccgccagtgtgatggatatctgcagaattcgccctttcgagcggccgcccgggcaggtactgcaccacattctccagctatactgcccaggaatcactctacctcccccatccctgttgctgctgcacctcaacctgctacttgaaaccacgggcccagcaaagaaactgtgctccaagtgcccaaaccaattcagttccctgttccgcaggaatcagagcttcagcatagggaagcagccatgaccccagcatcgaagcccatgctgtgccttgcccttaggagaccaggtgctctcatctagtgggaaaagcttgtacctcggccgcgaccacgcttaagnggccgaattccaagcaccactggcggcccgtttactagtgggatcccgagctcgggtacccaaagcttggcgtaatcatggtcatagctgtttcctgtgtgaaattgntatccgctcacaaattccacacaacattacggaagcccggaaagcataaaagtgtaaaagccctgggggtgcctaatggagtgagctaaactcacattaattgcgttgcggctcaactggcccgctttttccaggtccggggaaaacctggtcggtggcccagcctggcattaaatggaaatcngggcccaacgcccccggggggaanaaggccgggttttncgtttttnggggcggcttttttncgcntttccttcggcttcaacttgaccttggcttgcgcntccgggtccgtttcgggcttgccggncgnangcgggttttcancttcacttcaaaaaggggcngggnaataaccggggttntccnccaanaanttaagggggaantaaccnccanggaaaagaaacattggnggaancaaaaaangggccnnccaaaanggcccncnct

SEQ ID NO: 7507 - DNA, 1086 bp, Homo sapiens
  misc_feature 2, 3, 5, 6, 8, 9, 10, 11, 12, 14, 15, 17, 18, 19, 20, 21,22, 23, 25, 27, 28, 29, 30, 32, 35, 36, 37, 38, 39, 40,41, 43, 44, 45, 46, 48, 49, 53, 54, 56, 57, 58, 63, 64,65, 66, 67, 68, 69, 70, 71, 72, 73, 74, 75, 77, 78, 79,80, 81: n = A,T,C or G
  misc_feature 82, 85, 86, 87, 88, 91, 96, 103, 105, 108, 110, 543, 597,628, 637, 651, 700, 704, 709, 736, 765, 778, 793, 795, 814,815, 818, 820, 822, 837, 850, 866, 877, 885, 887, 890, 898,915, 919, 927, 928, 958, 965, 973, 976, 980, 982, 984: n = A,T,C or G
  misc_feature 985, 986, 989, 1005, 1006, 1018, 1031, 1034, 1037, 1063,1075, 1076, 1077, 1079, 1080, 1081, 1082: n = A,T,C or G
cnntnncnnnnntnntnnnnnnntntnnnntntannnnnnntnnnntnntttnntnnngaagnnnnnnnnnnnnngnnnnnnttnnnnttntagtnagggggntnagngntcatataaggcgaattgggccctctagatgcatgctcgagcggccgccagtgtgatggatatctgcagaattcgcccttagcgtggtcgcggccgaggtacctctactggacaggccctttgacgagacgacgtatgaagaaacagaagactgagcctttttggtgctccctcagaggaactctccctcacccaggacagcctgtggcctttgtgagccagttccaggaaccacacttctgtggccatctcacgtgaaagacattgcctcagctactgaaggtggccacctccactctaaatggacattttgtaaaatagtaaaaaaactgcttcttaatccttcctttgctaaaatctcacccttttaaaaaacgaaaggtggactcactttgctttttttcaagtccattaaaaaaacaattttatttttncaaacccattttctacttgtgaaaatcaccgctggacccttagccttgtctctnggctaaaccaccaccaggccaattccccttntccccaagnaaccctttggcaanaactttggggcccccattcaaagaaagcttacctgggcttgggcccctnggcnttccngcaaagccctgggaattacctttaccnttggggccctttccttcccttaaggggangcccaaagggggnccttttccactttancntttccccattcccaaggtnnttnananaagggttttcaaaangggccccaacccntgggggaattcctttnttttaaacccntttccaangntanttcaaacnggggaaggttttttcancccntttttaannttttaaaggtttaaggccctttttaaaagnaaaaaanaccagttnaancccnantnnnttnggctgggaaaagggcnntatttgtgttanttcttccccaagnggnttnggggctttttttcccatttttttttnggggggccaccnnnannnnattt

SEQ ID NO: 7508 - DNA, 1193 bp, Homo sapiens
  misc_feature 1, 4, 6, 7, 8, 11, 12, 13, 14, 16, 19, 20, 24, 25, 29, 32,34, 36, 38, 41, 47, 50, 62, 64, 66, 69, 70, 72, 75, 78,80, 82, 83, 84, 86, 88, 90, 93, 95, 98, 99, 105, 108, 109,111, 118, 124, 219, 220, 235, 364, 369, 370, 378, 433, 443: n = A,T,C or G
  misc_feature 446, 478, 493, 513, 570, 584, 605, 606, 618, 645, 657, 658,662, 666, 668, 670, 680, 685, 688, 690, 693, 694, 720, 723,738, 740, 755, 763, 765, 771, 789, 799, 805, 812, 814, 819,820, 832, 850, 851, 854, 856, 874, 884, 887, 893, 896: n = A,T,C or G
  misc_feature 903, 915, 924, 941, 949, 978, 990, 994, 1008, 1018, 1024,1025, 1042, 1045, 1052, 1053, 1054, 1055, 1063, 1064, 1070,1071, 1073, 1074, 1075, 1088, 1089, 1098, 1103, 1109, 1110,1112, 1113, 1115, 1117, 1120, 1121, 1124, 1126, 1130: n = A,T,C or G
  misc_feature 1146, 1148, 1149, 1151, 1163, 1164, 1166, 1171, 1175, 1178: n = A,T,C or G
nacntnnnttnnnngnttnnatannaatntcntntncnccnctttcntanggagcagttaantnantannanttnttnanannntntntnttntnagnnagggangtnnangactcantatatngcgaattgggccctctagatgcatgctcgagcggccgccagtgtgatggatatctgcagaattcgccctttcgagcggccgcccgggcaggtacnnttttttttttttganacggagtctcactctgtcatcaggctggagtgcagtggcgtgatctcggctcgctgcaatctctagcctcccaggttcaagcgattcccccacctcagccttccaagaagctgggactacaggcatgcnccatnntgcccggntaatttttttgatattttagttagtgacagaggtttcacccatggtttggccagnatggtctccnatnctccttgacccttgtggatccaccccacactntggccctccccaaangtgcttgggggatttaccangccatttaagcccaaccgctggccccaaggccctttaaaaggggccaataataaaanttttccaatttaanaaaatttaattttccaaaaanncttttattattnggggggaaacttttttttaaaaaaaanaattccttcttnntaancaangnanattgaacccnatttngtntnctnngggcttcccttccatttcaaaacctnggnggggttttaattggnanattttttggtggccnttttgggncnattttnaaaacccaattttttttntgggcctggnttattnaaaaaananggggnntgggtattccgngaaatttcaatttaaaannatnancctttattttggcaaaangggaattacnacnaccctnggnttaaaantaaatttttttngtgcccccntcttttacaaaaaaaantatttccncgggagaaattaaaagttttccctcttcnaaaaaaccaaantttnttttttttcaaaanaaccccaacntttttnngggttaaccttcggggnccngaaaacnnnnccctttanngggggnnannnttccaatcacaannttggggggngccgnttactnngnngnantcnngantnctcnggttacccaaaacttngnngntaatacatgggnnanaattnggtnttnctcggggagaaaaaa

SEQ ID NO: 7509 - DNA, 617 bp, Homo sapiens
  misc_feature 2, 41: n = A,T,C or G
gnccagcgtccgaggtcccccagtcgcgaggtcaacccggnacacaagggagagcgcggttaccctggcaatattggtcccgttggtgctgcaggtgcacctggtcctcatggccccgtgggtcctgctggcaaacatggaaaccgtggtgaaactggtccttctggtcctgttggtcctgctggtgctgttggcccaagaggtcctagtggcccacaaggcattcgtggcgataagggagagcccggtgaaaaggggcccagaggtcttcctggcttaaagggacacaatggattgcaaggtctgcctggtatcgctggtcaccatggtgatcaaggtgctcctggctccgtgggtcctgctggtcctaggggccctgctggtccttctggccctgctggaaaagatggtcgcactggacatcctggtacagttggacctgctggcattcgaggccctcagggtcaccaaggccctgctggcccccctggtccccctggccctcctggacctccaggtgtaagcggtggtggttatgactttggttacgatggagacttctacagggctgaccagcctcgctcagcaccttctctcagacccaaggactatgaagt

SEQ ID NO: 7510 - DNA, 1167 bp, Homo sapiens
  misc_feature 1, 3, 5, 6, 7, 8, 11, 12, 13, 14, 15, 16, 18, 20, 21, 23,25, 26, 27, 28, 29, 30, 31, 32, 33, 34, 35, 36, 37, 38,39, 40, 41, 42, 43, 44, 45, 46, 47, 49, 50, 51, 52, 53,54, 55, 57, 58, 59, 62, 63, 65, 66, 68, 70, 71, 72, 73,75, 76: n = A,T,C or G
  misc_feature 77, 78, 79, 82, 83, 84, 85, 86, 87, 88, 90, 91, 92, 93, 94,95, 96, 97, 98, 99, 102, 103, 107, 108, 112, 114, 115, 116,117, 120, 123, 126, 133, 377, 430, 540, 547, 553, 578, 612,640, 655, 663, 665, 718, 755, 758, 783, 785, 794, 816: n = A,T,C or G
  misc_feature 818, 835, 850, 851, 853, 872, 875, 889, 900, 911, 933, 938,952, 961, 971, 980, 987, 1001, 1019, 1047, 1053, 1058, 1064,1068, 1079, 1087, 1094, 1112, 1113, 1118, 1122, 1129, 1134,1138, 1146, 1148, 1150, 1157, 1160, 1162: n = A,T,C or G
ntngnnnnggnnnnnntnanncntnnnnnnnnnnnnnnnnnnnnnnntnnnnnnngnnnggnnanngncnnnntnnnnngtnnnnnnnannnnnnnnnnagnnaggnnggangnnnnggnacnatnactatanggcgaattgggccctctagatgcatgctcgagcggccgccagtgtgatggatatctgcagaattcggccctttcgagcggccgcccgggcaggtactttttttttttttttgctccaagaatgtatttatttacatgaaaacaccattttatacaaattgaagacacatcttaaaagaagggtttgtccaggcatgccttcctcatccccttatattgccacttccattttcatcttcttttgnatcataaatgaaacttcaggactggttaaagaaaaattgaatctggcctcttntccccacccaaaattactttccgattattttaatgtctggtaagtcatcccttcaaaagaaaaaggtcttgcccggggggttattttaattttaatttatttatggtaanaccaggnggtaanaaaggcggatcattgtcaataaagncaatggatttctggtaccctcggcccgcgaaacncaccgccttaaggggccgaaatttccangccacaacctgggcnggcccggntncctaaggtggggaatcccggagcctccgggtacccaaagcctttggggcggtnaatccatggggccaattaagcctggttttcccctggntgntggaaaaattggggttaattccccncntcaccaaantttccccacacccaaacattancngaagccccggggaaagncattaaaaagggtgnntnaaaaggcccctgggggggnggnccctaaatggaggntggaagccttnaacctcaacantttaaattgggcggtttggcgncctcnaacttggccccgcnttttcccangttcgggggnaaaaccctngtttcgnggcccaagcttggnattttaattggaaattcnggccccaaccccccccgggggaaaaaangcccgnttttncctttntttngggggcgcctnttttccgnctttccnttggattcaattgaactnncttgnggcncgggtcntttcnggcntggcgggngnancccgggntcnantttct

SEQ ID NO: 7511 - DNA, 1116 bp, Homo sapiens
  misc_feature 1, 6, 11, 13, 14, 17, 18, 19, 20, 23, 25, 26, 27, 28, 30,32, 33, 34, 36, 37, 38, 39, 40, 41, 42, 45, 47, 48, 49,51, 52, 53, 55, 59, 60, 63, 64, 65, 66, 67, 68, 69, 70,71, 72, 73, 74, 75, 76, 79, 80, 105, 418, 440, 482, 493,546: n = A,T,C or G
  misc_feature 595, 660, 663, 677, 681, 722, 725, 728, 732, 733, 788, 807,814, 817, 818, 830, 831, 841, 846, 858, 876, 888, 907, 908,913, 916, 921, 924, 930, 934, 944, 947, 960, 964, 965, 975,979, 998, 1009, 1018, 1023, 1024, 1033, 1072, 1077: n = A,T,C or G
  misc_feature 1087, 1110, 1112, 1114, 1115: n = A,T,C or G
nttatnggttntnnttnnnntgntnnnntngnnntnnnnnnnggnannntnnngncttnnggnnnnnnnnnnnnnnggnntgggggtgtttgatcctataggcgnattgggccctctagatgcatgctcgagcggccgccagtgtgatggatatctgcagaattcgccctttcgagcggccgcccgggcaggtacagatgggttttggtcacgttggccaggctggtctcgaactcctgacctcaagccatctacccacgtcagcccctcaaagtgctgggattatggcatgagccaccatgcctggccagacaggagaacttaatgattgcaggcatttaaggaagtctctgcacaattatgagctgaccattaaactaaccaagccaagagaccttggtggcccacacacaattanaaaaatatagacttaaaaatanattcagaaatgacaaccacaaaaccagtgaccaacaaataancaaggaataanactctggggggtggcagggaaaattcccgatttacaggaggtttgcttactgnttaagaagaaacccaaaactggggcccgcttgccctgctggcagtaagnaccaggatatcttacacctggagggtttggtaggtggggaagaaaaggaagggtggttttatttntanggggtggccaaagncaanggggaggggatttaaggggtaggtttaaattatttttaaangtnccnttgnnacccttttcccagattgggctttaaccaagggttttaaaggggtttttcttaaanggggccagggaaagggccnagaaaanttnncaagccgggttnnttaaaattcnaattnttttttgggganggggtttttttttccctnggggttttgggnttttaaaaaaaaaggggcnnggggnacnatttntcnaaaatncaangggggccccnccnagggttttttaangggnngggatttttnaaangaattttttgggttttggnaaatttgggtntaaaggganaaaanntttttggtnctaaaaaaattttggggattccagttgaaaaaaaaaatnggttncattcttggnctctttttaaggccccttcaggnancnnt

SEQ ID NO: 7512 - DNA, 1275 bp, Homo sapiens
  misc_feature 5, 8, 13, 16, 23, 31, 32, 38, 40, 41, 42, 46, 48, 50, 53,56, 61, 62, 68, 69, 73, 74, 75, 76, 83, 91, 93, 94, 96,97, 99, 101, 107, 111, 118, 122, 123, 124, 128, 130, 144,172, 182, 189, 206, 219, 230, 247, 251, 394, 398, 406, 425: n = A,T,C or G
  misc_feature 432, 441, 444, 445, 448, 533, 545, 557, 562, 588, 602, 612,625, 628, 630, 633, 641, 643, 646, 649, 652, 664, 699, 701,703, 705, 706, 722, 724, 741, 758, 769, 774, 788, 795, 798,799, 803, 814, 829, 840, 849, 851, 856, 861, 867, 878: n = A,T,C or G
  misc_feature 880, 884, 885, 901, 916, 952, 975, 989, 994, 1001, 1003,1009, 1015, 1028, 1030, 1035, 1041, 1042, 1043, 1045, 1059,1060, 1078, 1089, 1096, 1098, 1099, 1100, 1102, 1111, 1112,1118, 1122, 1133, 1138, 1154, 1176, 1183, 1187, 1188: n = A,T,C or G
  misc_feature 1210, 1212, 1219, 1220, 1225, 1226, 1233, 1247, 1252, 1259,1264, 1266, 1274: n = A,T,C or G
tttcntcnctttnttntctctgncatgtcannacactnannngctncncnacnctngtgtnnttcatnnctcnnnncgactanacacacgnanncnncncncccagncgangtggggnagtnnnacgntntagggcgaattgtntccctctactatgcatgctctgagcggngcgccactgnagatggnatatcttgcagaattcncccttagcgtggnacgcgggccgncgtacaagatctcttanggcnaatccaattccatcaatacctggggaaacacaaaaacctggtgcagctggaaggctgctgcactgaaaagctgccactctatatggtgttggaggattgtggcccaaagggggacctgctcggctttctctggacctgttcgnccgngggatgtnaatgacctattgggatggnctttctntattggatnctnnacnatgaaaaaacatagttatatccacatttcgggaaaaggcatggtccctttattgggccgcctgggaaatatcctggacagtgaancaaagcattttngtttcacaatgnggggnatggtggggccaagcccaagggaaantaatttcttggatngccaaaaagntggaatcttccanctngnctnaaagcctncntgntgnggntttaagggggcncttgggcctttattggaaaagtttttaccaacccncngnanngggggcccaattcttncncttcttaaccttccaanaacccaattaccccttntttcaaaagtngggcntttggccccccaantaaaccnggnntttnttcccttgaanaaacccttggcttangccatttcaantaagccaanantggtnggtancccttngcccccggggncngggnnccggcttcgaaaaaangggccgaaaatttcncaaacaacaacttgggccggggcccggttactttanattgggaatccccgaaaccttcngggttacccaaaanccttnggcccantnaaatcntttggnttcaattaagccntngtttnccttgnnngntgaaaatttggttnnttccccccttcacaaatntcccaccaccnactattncnnnanccccggtanngccatnaaangtggttaaaanccccngggggggtggccctcnaatgggagtggaagccttaacntccaccntttnntttgccttttgccgcctaaacntncccccgnnttttnnaagtccnggggaaaaccctgntccgntgcccanacttncnttaaattng

SEQ ID NO: 7513 - DNA, 1116 bp, Homo sapiens
  misc_feature 1, 2, 3, 5, 6, 8, 9, 12, 14, 16, 18, 20, 24, 26, 28, 29,30, 33, 34, 35, 36, 37, 40, 43, 45, 46, 48, 49, 50, 53,54, 57, 59, 60, 61, 64, 65, 67, 68, 70, 71, 72, 76, 78,82, 84, 86, 87, 88, 89, 92, 94, 95, 100, 102, 104, 106,107, 108: n = A,T,C or G
  misc_feature 111, 112, 119, 121, 127, 163, 217, 407, 435, 494, 543, 571,574, 585, 596, 597, 605, 612, 623, 632, 633, 643, 660, 714,734, 775, 786, 787, 795, 804, 813, 818, 820, 821, 822, 861,877, 887, 898, 924, 939, 941, 943, 954, 956, 959, 964: n = A,T,C or G
  misc_feature 968, 973, 983, 990, 1000, 1011, 1017, 1020, 1043, 1056, 1060,1079, 1080, 1081, 1082, 1085, 1090, 1095, 1096, 1101, 1105,1108: n = A,T,C or G
nnntnncnncantngnanantttntncnnncannnnngcnctnanngnnntgnntgncnnnttnncnntnnnatananagananannnntangnnagggngngncnnngannagcaatntnttttanttgggccctctagatgcatgctcgagcggccgccantgtgatggatatctgcagaattcgccctttcgagcggccgcccgggcaggtacncggggatcttacagtcactcaggatgggaggaagatttatttcaccgattctagcagcaaatggcaaagacgagactacctgcttctggtgatggagggcacagatgacgggcgcctgctggagtatgatactgtgaccagggaagtaaaagttttattggaccagctgcggttcccgaatggagtccangctgtctcctgcagaagactttgtcctnggtggcaagaaaacaaccatggccaggaataccgaaggagtctaccgttttctggcctngatgaaggggccgggggcttgatctgtttgtgggagaaacattgcctgngatttccagacaaacattctcggcccancangcttctggggnggggtaccttnnggccgcgnacccacncctaaggggcngaattccanncacactggcnggcccgttactagtggnatcccgaacctcggttacccaagctttgggccgtaaatcattgggttccattangcttgttttcccctgtggtngaaaaatttggtttaattccccgcttccaccaaattttccnaccaccaaacnnttaccgangccccgggnaaaagccanttaanannngggtaaaaaggcccttgggggggtggcccctaaattganggtggaagcctaaacntccaccaatntaaattttggncgtttgccgccttcaacttgcccccntttttccccaagttntngnggaaaaacctngntcngttgncccncttgnaatttaaatngaaattncgggcccaancccccccgggngaaganggncggttttttccgtttttgggggngccttttttccgntttnctttgcttcaattgaaatnnnntgngcctncggtnntttcngggnttnggggggaa

SEQ ID NO: 7514 - DNA, 1145 bp, Homo sapiens
  misc_feature 2, 3, 4, 6, 7, 8, 9, 11, 14, 15, 18, 19, 20, 22, 25, 27,28, 29, 30, 31, 32, 34, 36, 38, 42, 45, 48, 51, 52, 56,57, 58, 60, 62, 64, 65, 66, 68, 71, 73, 75, 76, 78, 79,80, 83, 88, 89, 90, 92, 93, 94, 97, 98, 106, 108, 110, 112,116: n = A,T,C or G
  misc_feature 137, 146, 167, 188, 227, 276, 327, 342, 348, 351, 370, 375,395, 396, 419, 430, 438, 447, 466, 486, 489, 504, 511, 533,545, 546, 551, 557, 596, 610, 611, 629, 638, 639, 667, 669,685, 691, 693, 694, 696, 729, 734, 736, 746, 751, 755: n = A,T,C or G
  misc_feature 759, 765, 783, 784, 796, 798, 803, 822, 828, 837, 841, 853,857, 873, 881, 886, 887, 892, 894, 898, 900, 905, 906, 908,909, 910, 911, 923, 935, 968, 973, 980, 987, 991, 992, 995,999, 1001, 1007, 1011, 1018, 1019, 1026, 1048, 1057: n = A,T,C or G
  misc_feature 1058, 1066, 1067, 1069, 1070, 1080, 1092, 1094, 1096, 1097,1100, 1101, 1103, 1104, 1110, 1114, 1119, 1120, 1121, 1125,1129, 1130: n = A,T,C or G
tnnntnnnncntanntcnnntntantnnnnnncnantnttanttnctnatnncatnnntntnannncntancntnntnnnttntgctnnntnnnagnnaagggggnancntnggcnactaactatagggcgaattgngccctctanatgcatgctcgagcggcccgncagtgtgatggatatctgcanaattcgccctttcgagcgggcgcccgggcaggtactttntttttttttttttttttttttttttaggctaaaatcatttaattatacncaggccacaattgcaggatggaaaggcagtgggcacttggaagtgactacncatggcaataagcancctatnttntttaccaaccaaaagtttnttggnggcatgtgatggtaggccannaccctttccaaggggaataattncctacactaancctacacntgtactggngagaagtccattggtgggnaacaaggccaacagggcaantgnggaagggaaaatttntatgacnccacttggggtcaaaaaatttnttaaggccccanncatgnattcangggatggtaaggcctccattaaattttttttaaacccancaaatttttttgannaagaaacaaaaaattttnttgcgaaanncacctttaaaggggttttgtttcctttncntttttttttttttttntgaaanannanaaagtttttcaacttttttgtttgcccccaaanccttngnaaatgcaaantgggncacnaaantttttngggggtttaaacatgggnnaaaccttccccncnctttncttgggggggtttcaaaancaaaanttttttttnttgnccccccaaaccntttnttttaaaaataaattntggggaantatannagggncntttntnggccnncnnnnacccccaaaggntaaaattttttnggaattttttttaaataaaaaaaaagggggggnttttnttccctnttttttntaanngcngggncntttttnaaantccccgnnccctcanggggggaatacccccttggccntttggggcnnttccaaanngnncttgggggantaaacagggggngnanngcnnannactggncccnggtgnnnaganaacnncatttttggattttt

SEQ ID NO: 7515 - DNA, 803 bp, Homo sapiens
  misc_feature 664, 685, 712, 721, 723, 732, 735, 761, 764: n = A,T,C or G
gggccctctagatgcatgctcgagcggccgccagtgtgatggatatctgcagaattcgccctttcgagcggccgcccgggcaggtaccagatttattgcctgccaggattggaattcatgcagagaggaaggattcatgaaaaaaataatcaaagtcaggaaagtctttttctgtaatcttgtctcatacagtgagttatttttgtccgggtagtttacggggatgtaactccttcagtcatctaaccgtgatgtagtaaaagtcatttgcaggaaatgaaactccactttgttacttttttcacttaaaggctaatctgattagctttaaaacatttgttcatcttttaattcagtatttgtatgatgcctatggaagacatatggatttaaatagaacttggctaaccatctgccaataagagaaagtgagatgctaaatcagagaggcaggaaagtctatttcagtaaaagctattttgatctgaaatactgtaggcagtctttacagagtattttaattgggaggatattgatgcatgctagtaaaagaagtgtatttgctgatatggttgaagttatgtaatcattaaatttctatataaagtttagagatgtggaactatgtgaaaattttgatccctgttaattataaatttttttnctaaaaaaaaagcccatttgntgggaaaaaaaaattttctggatatantttttttananccagtggcnccnttttatatctcatgccccgaaacctnganccttaaaatttcacctttttcaaattaaattacctaggg

SEQ ID NO: 7516 - DNA, 1196 bp, Homo sapiens
  misc_feature 2, 8, 9, 11, 12, 13, 16, 17, 20, 22, 25, 26, 29, 30, 35,36, 37, 39, 40, 41, 44, 48, 49, 53, 55, 57, 60, 62, 65,66, 69, 71, 72, 75, 76, 77, 82, 83, 89, 91, 92, 93, 96,97, 98, 99, 102, 103, 107, 108, 112, 113, 114, 115, 116,118: n = A,T,C or G
  misc_feature 121, 122, 124, 125, 126, 133, 305, 515, 516, 553, 556, 620,635, 659, 670, 714, 718, 721, 722, 743, 744, 748, 749, 758,781, 792, 806, 843, 851, 855, 867, 880, 883, 888, 893, 909,917, 924, 932, 933, 935, 939, 950, 951, 952, 953, 959: n = A,T,C or G
  misc_feature 979, 995, 997, 1003, 1014, 1015, 1016, 1024, 1029, 1040,1042, 1044, 1087, 1102, 1113, 1123, 1124, 1129, 1132, 1138,1140, 1145, 1158, 1164, 1172, 1175, 1177, 1178, 1180, 1195: n = A,T,C or G
gncacacnntnnnaannatntnaanncgnngttannnannnctnatcnnctanancntgnanttnnatntnnttnnnatttnntattanannnttnnnnttnnagtnnaggnnnnnanagnncnnnattatanggcgaattgggccctctagatgcatgctcgagcggcccgccagtgtgatggatatctgcagaattcgcccttagcgtggtcgcggccgaggtacatggcaattagaagttgtcatggcaaaagaaaaccacagctggcctgccacagccaacacaagaaccagaaaatggtngatgaaatgaaggaataaaggtggggtttattccttattataaaagaaaaaaaataattcttcagcagtcttaacaaagacatcaaggatacaaaaattacaagtgttttgactccagcccttgtccccatctcctccaagaagccggagggtagggaagacaagtttgaaaggcaaacaaagccaatttctggtaaaaaattaccttannaaaacccttaccaaatttggaatttaaaaattcttanaanctttcttattaaatttttgcttttttttaaaaaaaaaattttaaaattattcaaaaaaaggggncctggcttttttaangtggaaccaattgccttatttttnccttaccccangaaaaaaaattaaaaccccccccaaattaaccccccccttcttngtcncannttaaaccaattggcttcaaanntttnngaacccaangcccaaccttcttttttttttcnttaaaaccctnttgtgtgggaaccnaaggtgttgggttctttttttaaaaacccaaaaaagnccccccgnggangaaatccaaaantttgaacctggcnttnatttnaaccngtggttcctgcttggntttaaacnttaaatntccaaggnngncccnacctttttttnnnnaaaaanggggtggggggcccaagggncccaaaaaaaaccccnanaaaaanggggttttttnnngggggccnctaanttccccccaancncnccctttttaataaaccccccttccccctttgggtttttttttntttaaaaaaatgaanaagcccctttntttttttaannccccnccntttttngngctcnaaaatttgggggncccccnggacaccngananngnggttgttcccttttng

SEQ ID NO: 7517 - DNA, 847 bp, Homo sapiens
  misc_feature 443, 481, 640, 670, 677, 698, 718, 728, 733, 754, 779, 790,791, 810, 811, 827, 832, 836, 838, 839, 844, 845, 846: n = A,T,C or G
gaatacgactcactatagggcgaattgggccctctagatgcatgctcgagcggccgccagtgtgatggatatctgcagaattcgccctttcgagcggccgcccgggcaggtaccatggcagtcatgcaaagcatgggacagaagaaataccacggcagtgaactgtgaggataacttccattttttccctcggagagaacagtttacggggcagaggtgatatgttctgccttttgaagattactggcacacgttcagctttttcacctctctaatcgactggaagcagccagccgatcactagtcctccatccccctcgagtcctccgattgtcatgcctaggccttgccacaaagacagcacctttatgtgaaaaaaaacttagaaaaaatgtaggttaaagaaagcaataaactttctttaaaaaagttaaatggagatnttctgggaaaccaagccatgaatgcgagtttgtacctnggccgcgaccacgctaagggcgaattccagcacactggcggccgttactagtggatccgagctcggtaccaagcttggcgtaatcatggtcatagctggtttcctgtgtgaaattggtatccgctcacaattccacacaacatacgaaccggaagcatnaagtgttaaagcctgggggtgcctaatgangtgagcnaacctcacatttaatttgccnttgcgcttcacttggcccgnctttccagtncgggnaaccctgtcctggcccagctncatttaaatgaaattcgggccaacncccccggggannaaggcgggtttgcttattnnggggcctttttttccnttttncttngnntaaannna

SEQ ID NO: 7518 - DNA, 891 bp, Homo sapiens
  misc_feature 2, 358, 397, 403, 447, 460, 466, 473, 483, 495, 529, 535,536, 540, 551, 567, 568, 574, 586, 589, 599, 611, 621, 623,625, 628, 631, 638, 643, 660, 662, 676, 684, 690, 694, 695,700, 704, 720, 723, 727, 728, 729, 730, 733, 735, 749: n = A,T,C or G
  misc_feature 751, 756, 757, 762, 773, 774, 775, 784, 788, 789, 799, 800,806, 809, 810, 812, 814, 822, 828, 834, 835, 836, 837, 840,841, 842, 845, 851, 853, 856, 857, 860, 862, 867, 870, 871,872, 877, 878, 880, 882, 885, 887, 889, 890, 891: n = A,T,C or G
gnctactatagggcgaattgggccctctagatgcatgctcgagcggccgccagtgtgatggatatctgcagaattcgccctttcgagcggccgcccgggcaggtactttaatttttgtttattttttttttttgagagaggaggtctcactatgttgccgagtctagtctcaaactcctgggctcaagcgcttctccggccttggcctcccaagtgctggtgagctctcacaccggtgcattgttttcgtgtttcatgttttcgttacatgttactttcttaggcttttccaattttctgttgtttttctgtgtaaagaccgtaggatagaactttctgagagactgatcttggtttnactaagcaagaacatttgtaagaatcagtgctgtcccanatgtangtaaatccgctattgagaaaaataatgaagttccccctttactngaagtactcaggnaagaanttgaatnaacttaaacntgccttatgaanggagatttctgatatggggaggggaaattctggngatgannaaanttactgggaantagaaaaatatcttgnngagccngtttttaaatcnttnacaaacagcnactgttaaaacnaagggtagangnanggnttngtaaggnaatanttggtttaaaattccananaatcttggaagtcntattttanaatatnaccnnataanttanaattttcgaatttttngtncctnnnnaancntattaaaaacaatngnatatnntattnttacatctatnnnacttcatancaanntaccataacnngttttntanntngngttaactnggtaantattannnntgnnncancccctntngtnntantnacttnatnnntttannanantananannn

SEQ ID NO: 7519 - DNA, 845 bp, Homo sapiens
  misc_feature 541, 564, 621, 662, 680, 707, 708, 712, 715, 723, 733, 735,747, 754, 763, 773, 775, 779, 799, 802, 807, 809, 810, 812,820, 827, 829, 836, 841, 843, 845: n = A,T,C or G
gactcactatagggcgaattgggccctctagatgcatgctcgagcggccgccagtgtgatggatatctgcagaattcgccctttcgagcggccgcccgggcaggtacatgtgctgacgaagaaaagggaagatggagcctccatgttgaacatgcctggccctcaggtaacccttttctgttggcacaactgctggcattcacctgtgcaagcttccagcttgcttatcggtgtttgcagctcgatatttcaggctgctctttgttagaaaataaatgatttgggggctgctttttgttaaaagggaaattctgccgaggactctgttctccttactatctgcctaaataatttctttctagctcctgtatcaaaagcattttttaatattgtaaatttggaatattatattacctgattttaagactgctttaaagctagagtaaattaaatgtgtgagatgaacataagaacaaacatatggataagtgaaacaaaacggagttcagaaataaaccccacgtatatagaaaaattaatnttggatctaggggccgaagtaantaaatttaggaaggtttttttcatttaatgataccagaaccaagtgactattcctgngccaaaaaaaaaaccctggcttctttccctcatatattatnaaaaataaattggaatgnccaaattggggaaccccaccctaaaanngccntcnacctgggngaaatgggantnaaccaaaaattngggggtncaatttttnacaatggggncncctnggttccgccatttcccaagnaancaaantnncntgggtagnaacaccntngttgggnaaaanancn

SEQ ID NO: 7520 - DNA, 911 bp, Homo sapiens
  misc_feature 101, 109, 113, 117, 145, 154, 157, 165, 177, 180, 187, 206,250, 257, 274, 294, 298, 301, 314, 322, 330, 349, 350, 363,375, 406, 411, 413, 416, 420, 451, 474, 475, 478, 485, 497,542, 552, 563, 576, 581, 583, 592, 614, 616, 621, 624: n = A,T,C or G
  misc_feature 630, 644, 657, 662, 666, 676, 689, 690, 708, 711, 714, 721,722, 723, 727, 730, 739, 747, 751, 752, 756, 766, 768, 776,777, 778, 779, 780, 784, 787, 790, 795, 799, 802, 805, 806,807, 809, 812, 820, 821, 826, 829, 835, 837, 838, 853: n = A,T,C or G
  misc_feature 859, 860, 861, 863, 870, 871, 874, 878, 879, 883, 893, 898,902, 904, 907, 909: n = A,T,C or G
tatagggcgaattgggccctctagatgcatgctcgagcggccgccagtgtgatggatatctgcagaattcgccctttcgagcggccgcccgggcaggtacncgggtcantcantggntcattgctgacaaagtcacttttaagtnatgttttanaanaactaccnagtgtggcaggncangcatgtngcaggactgtttctgagcncagatgaatggatgagcacctggccccactgtgcccagttggtntagcttnccacttggccacctacnggctgctgtgtggaccttgnctgncantctcctttaattnattttatnattatttntttctttttagagatgganncttgctttgatgnccaggctagagngcattaggcatgcatctacggctcactgcancctcnanttnccanggttccagcagattctcctgcctcaagcctncccaggttagctggggatcacanngcnagtgctntccacgcccagntaattttttgtatttttaaatagaacacattgggattgtacccantgtttggccnaaggccttggncttggaaactccnttgancnctcaagggngacacccaccccattcttaagncntcccnaanaatggnttggaaattaacanggggtggagcccncccgncacncttgggcccntattttttttttnnaagcaaaaatgtgttttnggncantttaaannnctgnttnccaaaagtncaggggtnaccnnctcngaaacattantnggatgacnnnnnaatntgnganatgtntganccnaannntncanataaaatnngggangcncaaacncnngaaggggggaaagcnccaacnnnanttttgcnnatntttnnaagntttgtaaaanaaaancctntnaancntc

SEQ ID NO: 7521 - DNA, 837 bp, Homo sapiens
  misc_feature 196, 213, 237, 267, 279, 334, 354, 399, 420, 595, 601, 633,645, 655, 658, 665, 668, 669, 670, 674, 682, 687, 693, 695,712, 714, 717, 718, 725, 728, 729, 734, 735, 737, 739, 740,741, 745, 754, 764, 765, 780, 786, 788, 789, 795, 798: n = A,T,C or G
  misc_feature 803, 804, 810, 813, 817, 819, 822, 826, 828, 830, 831, 832: n = A,T,C or G
gtaatacgactcactatagggcgaattgggccctctagatgcatgctcgagcggccgccagtgtgatggatatctgcagaattcgccctttcgagcggccgcccgggcaggtacacatgtccaaggtcaggtcctgggtggtaaaggtaaatacaaattggaagggcactgtgtgagccaaaatgagtcagattantcatgattcatttccantttgggttttgggtggtcttgganaatgttgtaagcactgcttcattgataggntgattgagccanactttactcagcagcctggaaaaggagagatgggctctgggttctacctttgctnactggtaagttgctaagatntcagctttgccctcaaaccctgaagtagtccttcattcacacagngggatcactccaaaatgtcanatggggaagtccataggttgttactttaaagaaaatagaaaaaatgctggaaaaggtttcttcaattttaatacccatgaaggcccatgttttagctttccttcgatgggcaaaccatacactaactagggcctttgtaatcaacaaagcaaggctaaaagctctctaagtgctngctgtntaaactattttgtgttggaagaagaagttggnaaaaagaggcanttgtggaggngangggagangannncctncccccccntttantggcantngcaattggaaatcctcnancannaattggntgnnttttnncncnnnccanaaagaatantatttttttnngggcccctttgggtncctagngnncgtccnccncgctnngggggnaantttnanttncaantngnnnggccc

SEQ ID NO: 7522 - DNA, 823 bp, Homo sapiens
  misc_feature 663, 710, 714, 746, 748, 752, 767, 799, 823: n = A,T,C or G
taatacgactcactatagggcgaattgggccctctagatgcatgctcgagcggccgccagtgtgatggatatctgcagaattcgcccttagcgtggtcgcggccgaggtacccagagagccagaaggctgttggtgagatggagcagtcactgagcgggtcaccaggagaacttactttatgagatctgctgctaatttctgactttgggcaagtcacctcaccagtctggggctaagattcactcctcatcagtaaaatgaatactttggatgagacgggaggttttcccattctgatgctaggatcttgttcatgagttaatgaagacagttgaggaaggtaaggagctatttctacttgattagtgaggcttcagtctatttcaacatttcaaagtttttcatgataatttgttcatgaaaaaaaaagaaaacagaggagttgctccagctctaaaaaaaatttgaaaaccacaccctgtgctaattgcaagtctagtctactctggtgctgctctgtggtattgcagacatagagtctgctctgtggtacctgcccgggcggccgctcgaaagggcgaattccagcacactggcggccggtactagtggatcccgagctcggtaccaagcctttggcgtaaatcatggtcatagcttgnttccttgtgtgaaattgtttatccgctcacaatttccacacaacatnccanccggaagcataaagtggaaagccctggggtgncntaangaggggagccttacntcacaattaattgcgtttgcgctcactggccngctttccaagtccgggaaaacctn

SEQ ID NO: 7523 - DNA, 883 bp, Homo sapiens
  misc_feature 473, 497, 555, 581, 616, 618, 623, 624, 628, 634, 650, 651,660, 662, 673, 674, 675, 679, 686, 696, 705, 709, 716, 726,727, 735, 739, 740, 753, 754, 755, 756, 761, 764, 768, 774,777, 778, 790, 796, 798, 802, 807, 817, 823, 831, 836: n = A,T,C or G
  misc_feature 843, 848, 849, 854, 857, 862, 867, 868, 869, 871, 872, 876: n = A,T,C or G
tactactatagggcgaattgggccctctagatgcatgctcgagcggccgccagtgtgatggatatctgcagaattcgccctttcgagcggccgcccgggcaggtacgcgggtggctggttgtttttacctatacaaatcaaaaggctattttgattgtcttcattttccccttataaattaggttggtgtctttagtcatttaggctaagttttactatctgattcttaacttttctattgtagaatggtgctgtcatgtggactgtcctcccgagtgtcccactggatgttcagagaatttatgtgaaggtcacgtcatttagcattgagatgctgtggttaccttcttccatttcttccataatatgcagccacatctatgtgtgaagaaatgtaataagataaaaatttctctggacgcataataatgtgagaaaagattgtcacatgtcccagcaaatttgttattaanataaaatttgttacttggcaagcntgagatttttgcaaggaatgttactcaaaaatttcacaaatgaaaggggaaccagggnaggtccattcttaatccctgggggtntcctttttttttagaatttcaaaaacaacctttangnaaacnnttgnaattanaacctaaaagaatganngcctttaancnatattcaaccnnnttcnttttttnaaagttgttnaatttaggngaantttaaangcttgacatnnctttattntaannttttaattaactnnnnaattntcnaaanatttgntanngtatttttcaantttttncnaaanaatcnttggcaaaantgtatnataattcnatttncttatanaaatnnaaatnccnccgtnatatnnnannaccngtccctc

SEQ ID NO: 7524 - DNA, 862 bp, Homo sapiens
  misc_feature 142, 219, 256, 325, 436, 444, 459, 463, 516, 521, 530, 535,548, 564, 566, 567, 579, 589, 616, 618, 623, 641, 642, 653,662, 680, 683, 693, 708, 726, 729, 732, 735, 742, 743, 751,754, 756, 769, 770, 772, 779, 789, 790, 792, 795, 798: n = A,T,C or G
  misc_feature 801, 802, 803, 805, 806, 810, 812, 814, 819, 828, 829, 835,836, 845, 846, 847, 848, 849, 850, 851, 854, 857, 861: n = A,T,C or G
gtaatacgactcactatagggcgaattgggccctctagatgcatgctcgagcggccgccagtgtgatggatatctgcagaattcgccctttcgagcggccgcccgggcaggtactttttttttttttttttttttttttttnctttccttagtcttgagcatatgtgaaaaaaagaaaaactaaaataaaatatttttttaaaatctccgtctcagtanaagtctcttctcattaattttcgcttttaatcttaanacttaatttttcaactcaagaacacttttttctcttcagttgtatcttcttctccagcactttggtttnttccctgggaatatttacatactcacagacttggtctctttgtttagagctactaagttttagggcgatttttttctgtagcaatagagaatcagatgacctattgccaanatttcctnaaactacaaggctgnatanaaccgccctttgacaatgaaatgggggcccacgttaaaagtgcttgagccctnccctnaagggtaanatagnaagcccctggcanttctttttttaacagncnnccttggcagttnaaaaaaagcnaagggccaggtttaagtcaaaaaaatnanggccngctccagggttggaggcnngggtggggggntcttatccnttttttttccccatttgnggntatcatttcnagtttcttttttttnttttttttttggaaacanaanatnttnctttttnncgccccanggntntgaggggggcccnnangggcccngggggggggnnanttnggntannntnnaaangntnccccntcccggggnntaaaannatttttttnnnnnnnaanccncctng

SEQ ID NO: 7525 - DNA, 829 bp, Homo sapiens
  misc_feature 295, 592, 596, 597, 598, 599, 600, 604, 605, 606, 609, 612,614, 615, 616, 617, 618, 620, 621, 622, 624, 628, 629, 630,631, 634, 636, 637, 638, 641, 642, 644, 649, 650, 652, 654,655, 657, 658, 659, 660, 661, 662, 663, 664, 665, 668: n = A,T,C or G
  misc_feature 669, 670, 671, 672, 673, 674, 675, 676, 677, 682, 683, 684,685, 686, 687, 688, 689, 690, 691, 692, 693, 694, 695, 696,697, 698, 699, 700, 702, 703, 704, 705, 707, 708, 710, 711,713, 714, 716, 717, 718, 719, 721, 722, 723, 724, 725: n = A,T,C or G
  misc_feature 726, 727, 728, 729, 730, 731, 732, 733, 734, 735, 736, 737,738, 739, 740, 741, 742, 743, 744, 746, 747, 748, 749, 750,751, 753, 754, 755, 756, 757, 758, 759, 760, 761, 763, 764,766, 767, 768, 769, 770, 771, 772, 773, 774, 775, 776: n = A,T,C or G
  misc_feature 777, 778, 779, 780, 781, 782, 783, 784, 785, 786, 787, 788,790, 791, 792, 793, 794, 795, 796, 797, 800, 801, 802, 803,804, 806, 807, 808, 809, 810, 811, 812, 813, 815, 816, 817,818, 819, 821, 822, 823, 824, 825, 826, 827, 828, 829: n = A,T,C or G
tgtaatacgactcactatagggcgaattgggccctctagatgcatgctcgagcggccgccagtgtgatggatatctgcagaattcgcccttagcgtggtcgcggccgaggtactgctataaagaactgcccaagactgggtaatttataatgggaagaggtttaattgattcacagttcagcatggctgtggaggcctcaggaaactcgtaattatggcggagtgtgaagaggaagcaaggcaccttcttcacaaggcagcaggaaggaaaagtgccgagcgaaggggaaagaanagctccttataaaaccatcaagatctgatgagaactcagtcactatcacaagaacagcatgggggaaaccgcctccgtgattcaaatacctccacatggtcttgatcccttgacatgtggggattatggggattatgggcttacaattcaagatgagatttgggtagggacacaaagccgaaccttatcggttattccagctttcttttggttagtgttaatgtaagtatatctttttctataccttaacttttattttattttatcttattttattttattttaattttttgaganggannnnncccnnnatnggngnnnnncnnntnaatnnnntantnnnttnnanaattnngncnntnnnnnnnnnctnnnnnnnnnnatttnnnnnnnnnnnnnnnnnnntnnnntnntnnanntnnnntnnnnnnnnnnnnnnnnnnnnnnnntnnnnnnannnnnnnnntnncnnnnnnnnnnnnnnnnnnnnnnngnnnnnnnnttnnnnntnnnnnnnntnnnnntnnnnnnnnn

SEQ ID NO: 7526 - DNA, 501 bp, Homo sapiens
  misc_feature 365, 403, 405, 491, 498, 501: n = A,T,C or G
actactatagggcgaattgggccctctagatgcatgctcgagcggccgccagtgtgatggatatctgcagaattcgccctttcgagcggccgcccgggcaggtaccaatcttcatcaaagcttttgaacccaagtctcagattgcctttgatcagaagcctggtttgtcccccagtgcagaaatgtaggaactgtgtgagagaaagagaaagagggagagaaggagggaagaaagaggagagagagaaaaagaaagggaggaggagcaggagagagaagcctgtctcgcctactatagaattttcttctctcctctcaaaacaagttccttacacatttggctgaccgcatggtacctcggccgngaccacgctaagggcgaattccagcacactgcggccgntnctagtggatccgagctcggtaccaagcttggcgtaatcatggtcatagctgtttcctgtgtgaaattgttatccgctcacaaattncacacancan

SEQ ID NO: 7527 - DNA, 510 bp, Homo sapiens
  misc_feature 164, 186, 233, 248, 254, 260, 280, 291, 310, 315, 317, 325,331, 340, 341, 345, 346, 347, 354, 356, 357, 358, 360, 364,366, 376, 378, 382, 388, 390, 394, 401, 405, 409, 410, 414,417, 422, 440, 442, 444, 445, 446, 450, 451, 472, 476: n = A,T,C or G
  misc_feature 479, 490, 498, 502, 505, 507: n = A,T,C or G
gactactatagggcgaattgggccctctagatgcatgctcgagcggccgccagtgtgatggatatctgcagaattcgccctttcgagcggccgcccgggcaggtactttttttttttttttttttttttcacatctgttttgtgacttcttcaaattgaatatntttaggaattggggaaaatgancttttagtataaattgcctataattttcatttctgtgtctaaaagantccacaatatatcancctganattatnataagctttgaattacaacnaacttttcttntctgactgggaataggacntgttncntatgggtnaattgnaacatggtnncagnnntgcaaantnnntnttcncnattaattatntnctantatggnanaaanaataaantatnattnncaanatnacccnttatttttcgaaatttancntnnnaatnnaatttataaaatctttaattnttanttntatattttacnatctatgntaanaantnaag

SEQ ID NO: 7528 - DNA, 481 bp, Homo sapiens
  misc_feature 404, 424: n = A,T,C or G
cgactactatagggcgaattgggccctctagatgcatgctcgagcggccgccagtgtgatggatatctgcagaattcgccctttcgagcggccgcccgggcaggtacatatcacgctgacgaactatggaatcaacaagctgcatttgatgctgtcgtgatttgcggagttgttctagttcagtaagggcactctcaagtttgagctgaagctcagtgattctgtagaaaaagtcggcctaattcacaggactgaactgagagttaactgattgtaatttctactgtaattaaccaagcatctttgcctaccattcatcataccatttttgtctctctcattattttttttcatgctgagtattttatgaactactttttaaatccccaccacacaggactcangtaccttggccgcgaccacnctaaggggcgaattccagcacacttggcggccgttactagtgggatccgagctcggt

SEQ ID NO: 7529 - DNA, 605 bp, Homo sapiens
  misc_feature 1, 19, 46, 49, 605: n = A,T,C or G
nccccgcgtccgggccggncccttgggtgaaattgttaggcgtggnagnagggagtgatgtcttccagactcggtgctgtacccgcctagcaggacccagtgctccataaaggataatagtttccagtacactatccctcatgatgactccttaagtggttcatcgtctgcatcttcgtgtgaaccagtgagtgattttccagcatctttccgaaaatctacctactggatgaagatgagaagaatcaagccagctgctacttctcatgtcgaagggtcaggtggagtatcagccaaggggaaaaggaaacccaggcaggaagaagatgaagactatcgagaatttcctcagaagaagcataagctttatgggaggaagcaacggcctaaaactcagcccaatcccaaatcccaggcccgtcgtattcggaaggaaccaccagtttatgcagcaggcagtttggaggagcaatggtacttagaaatcgttgataaaggcagtgtctcctgccctacctgccaggcagtggggaggaagaccatagagggtttaaagaaacacatggaaaactgcaagcaggaaatgtttacttgtcattcattgn

SEQ ID NO: 7530 - DNA, 525 bp, Homo sapiens
  misc_feature 3, 4, 25, 35, 433: n = A,T,C or G
agnncccataaacgacttactatanggctaattgnagctccccgcggtggcggcccgcccgggcaggtactgaaaggatgaaaaggtggtgtcatgttttggggagaatcttacttctcaaatggaaattgcactttttgctgaatcctttgcatttttttggtagtaagcagttcattgagtatcaggtcctcaaaggaatgagttggcccggctagggtgggccctcttgacctaacttcagagggggccttggctcagtaggtgtgaatcagggaagccacattgtcctcagggtgctgtatgaagctgggtgtgggcggattcctcccacaccttcacactggcctgcctccaactcatacagatctcggagcggtcggtacctcggcccgctctagaactagtggatcccccgggctgcaggaattcnatatcaagcttatcgataccgtcgacctcgagggggggcccggtacccagcttttgttccctttagtgagggttaattgcgcgcttggcgta

SEQ ID NO: 7531 - DNA, 659 bp, Homo sapiens
  misc_feature 2, 9, 517, 552, 581, 587, 610, 633, 636, 639, 644, 648, 656,659: n = A,T,C or G
tntcgggcnaattggagctccccgcggtggcggccgcccgggcaggtaccttcactggagcacttggaaaacagaagaaatcaaagggcagtcaggactctcccagcaggcagggaccaggtcagagtcaggatgaagacaaagcaccctgagcaagaagcaatggaagagatgcttgtgacccgagctgatggggaaggttgagggcaacgcagagaccccactgccgacttgccaagaaaacgtgcaggaaatgagggaaggctccattttcctgagaaaagggatggaggaacataagcagcatcaagctccagctactggctctttgagaatgtagtcgggacttgccccagtcacccttgccctgagaactcagtgactggggctaatgtcaccctggctgtccttgacctgtgcagaaagcactgccaaccctggacagtggggggaagggccttatgtgcccaggccccagcaggagacacctaccaggaatctagtgggacaaggtttnagggatcctggaatcctgcccacacccaacagctnggaacagttccctcactggcgagtggacnggtggnctgatgagctcatatgttattgntgatgatgttaaagaccatgttnccntanaaatnattnccaaagcnttn

SEQ ID NO: 7532 - DNA, 646 bp, Homo sapiens
  misc_feature 2, 5, 603: n = A,T,C or G
tnctntcgggccaattggagctccaccgcggtggcggccgaggtacatgtatttgtcacttaaaggttctttctgtaaactgcttcagattcttttactattcaatttttaattcttaatatctgtaaagaacgttaatattcctctttataatcaatctttcccagttagccttaaaaatgtattccctacttttgcttcaggagatcattatttgcaaatgcaaagattttttacttagacttttgaaatcactcttagtaactttaacattgtttttaggtatgaaattgaaggctgtgaagtgatttgggccattaaagataaagctatagggaatactttcttcgatgcaggagcagctgaattcttgacttcaaagctcattgctgaaaaatcagaggctaaaattgcacataaaagaaccagatatacaactgaaggaaggaaaaaggaagctagaagcaaatctaaagcagataatgtaggaagtgcattgggaccagattggcatgaaggcttgaatcttaaaggaacaaaagagttttctcataagattcacccttgaaacctatgtgtgaagtaaagaaaatctaccttcanggatgagtttagaattttgaagaaaaagtccttcactttttcc

SEQ ID NO: 7533 - DNA, 825 bp, Homo sapiens
  misc_feature 519, 548, 599, 628, 630, 640, 653, 674, 693, 699, 700, 703,743, 762, 772, 776, 781, 787, 788, 792, 793, 802: n = A,T,C or G
cgaattgggtccgggccccccctcgaggtcgacggtatcgataagcttgatatcgaattcctgcagcccgggggatccactagttctagagcggccgaggtacatttttgaaaagcacaataacttgtattaattgcacttaacacaatgaacctttagtttccaaccagttttcattctctgcagacccgggctttctttttataaaaactgctttcaaagggcatagagacaccacacatggtccacagtaaattcaaatagagaggtgcaatagttgcagtggtaaacacacaaaaaaatacatttttttggactaaaaatctggtcacggataaaagcatgtgccttttcattcttctctgggatgttacaacagcaacacgctctaaaacaattaagttacatgcataatgctaaaagaatgtgagcaatcctataaccagctttaagccatctgcttgatttctttttttttttgtaaggaacatatataggaaaagagaattccccttttgnccatacatatagaaaccttttgaagcttncaaaaagcttgggtttggtaaaattcccatctttttattactttgacatgnagtcatcctaaactattccgcatgggttntncaaaaatctncacatgaattatntggaaggacaattggaaaccncttacccatttaccaaggnaccggnnaanttaaaaatccaaacttcccattgggcataagcccctttcnagggttgttttttaaaacnggggaaaaantccnaaatncccccnngccnngaaaatttntcccccccccccgggggggggcc

SEQ ID NO: 7534 - DNA, 637 bp, Homo sapiens
  misc_feature 21, 29: n = A,T,C or G
gcattaaccctcactaagggnaacaaagnctgggtaccgggccccccctcgggtcgacggtatcgataagcttgatatcgaattcctgcagcccgggggatccactagttctagagcggccgcccgggcaggtactcgctcaaattaagtttttttaaaaggtctgtaatttgaaaggaaaacaatttttcactaaaaatatccttattacatgaaagccataatttaaaagacagagaaaaaagctttttaattaacaaataaacagcatctctcagagacacttgggaatgtttgtttttaatcagtgggtcctaaaaatcactgcttccacctgcaaacgaacacgaatccactgtggatggcgtcctctgacccaccctgaagggttctgtttctctccacacacttccttttctgcaactttcagcaaagcaggtttggaagaaagaggattacaaagaactacgactggctccctagtgaataacttaacacggtaaaacccggttttccatttacattacacattcacaatcgctcactgctacttacttcactgacgtatttcagactctctccacacccagcatgatttgtctgaacttaacacagtccccctaagacaaaaaaatat

SEQ ID NO: 7535 - DNA, 577 bp, Homo sapiens
  misc_feature 2, 5, 14, 425, 485: n = A,T,C or G
gntgntgatgggcnaattggagctccaccgcggtggcggccgaggtacctgacagtagtctaagatgagagagtttagggactactctgttttagcaagagatattttgggggtttttttgttttaactattgtcaggagattgggctaaagagaagacgacgagagtaaggaaataaagggaattgcctctggctagagagtagttaggtgttaatacctggtagagatgtaagggatatgacctccctttctttatgtgctcactgaagatctgaggggaccctgttaggagagcatagcatcatgatgtattagctgttcatctgctactggttggatggacataactattgtaactattcagtatttactggtaggcactgtcctctgattaaacttggcctactggcaatggctacttangattgatctaagggccaaagtgcagggtgggtgaactttattgtacctgcccgggccggnccgctctaaaactaagtgggatcccccgggctgcaggaattcgatatcaagcttatcgatcccgccacctcgaggggggggcccggtcccat

SEQ ID NO: 7536 - DNA, 874 bp, Homo sapiens
  misc_feature 657, 677, 679, 700, 715, 749, 759, 768, 770, 777, 778, 797,814, 816, 817, 841, 848, 850: n = A,T,C or G
gtgtatacgactactatagggcgaattgggccctctagatgcatgctcgagcggccgccagtgtgatggatatctgcagaattcgccctttcgagcggccgcccgggcaggtacaagctaagaaatgtaacagtatcaaccctcccagttgcttaattatacccataggtaatacaaaaagctctgaagacccaaagatgacattactaatgatgtgatttcaggagccacagaagaaccttaccagcttccctcaaatcagtccttatcctctttctatcttcacttccatcatcatctattttcacactatccagctaagcaaagattcctggaggctgacttgtatcttcagactcacagagtgaattcagctcttctgaatcaagacccacccagtctctttcattcagacctgttgctaacaaatttatatttgccaaggatattaggcaaaagaggctacttgattggtggccaacctcgtgcccacatggaaggtatctttaataggggtcttttcaaaccttagtggaggagggtcagctcaatttgggcaatgcatttgttcccagtttcattttcttcctgggaattaactcgtcatttcattcctttcaatcattcttctgtgtagggtgaccggaacactgagangcagctcttgatgcactatngngtgtcaagcaagctcaaaggncctaaaacactgaanggtctgcatttgaaggttttaattggtttgccancaaaatttgnaaagaagangnggggcanntcttctaaaccctatttangggaagcttttccaagncnncaatttttaacttcctaccccaanggattgncnttccccccagatttgtggccacct

SEQ ID NO: 7537 - DNA, 658 bp, Homo sapiens
  misc_feature 2, 10, 28, 41, 135, 527, 528, 578, 587, 606, 616, 646, 647: n = A,T,C or G
tntcgggccntattggagcctccaccgnggtggccggccgnggttacaagctattatatattttcataatatagaactttaaagtatagtaatcaacagtggcaaaatatttctgtctctgacattattatttgngagatccaacctgtaattgagatcagagaaaacagtatgggaaaacaaatccatgagaacaggataaaaatatcatgaacagcaaaatatgtctgagtatttaaaactgtatagaaaaaataaattagatgaacaattgtgtaaatataaattaaaaaagatgacattcttaataaataaagtttactatttacatttttatatattgccaaaagatttaacttagatccataaaaacacataaacagaaaaaaaaataggagcagcaaatttatgcgcgtgagggtacctgcccggggcggccgctctagaactagtggatcccccggggctgcagggaattcgatatcaagctttatcgataccgtcgaccctcgaggggggggcccggnncccagcttttggtccctttagtggggggttaattggcgccgcttgggcgnatcattggncatagctggttccctgggngaaaattggntttccgctccccaattccccacaacatacnnagcccgggggg

SEQ ID NO: 7538 - DNA, 901 bp, Homo sapiens
  misc_feature 335, 495, 520, 543, 586, 587, 589, 637, 660, 670, 677, 687,692, 704, 707, 710, 711, 722, 734, 736, 744, 745, 756, 759,766, 776, 777, 791, 792, 794, 805, 807, 821, 824, 828, 830,842, 846, 852, 853, 861, 866, 870, 876, 883, 886, 887: n = A,T,C or G
  misc_feature 888, 891: n = A,T,C or G
gtaaacgactcactatagggcgaattggagctccacccgcggtggcggccgaggtaccagtgccccttttcagacagtttttgattcgctctagactttttttttaatagggaaaaaatttgataattttcttttttctacatgcacttaagactaaaacacaggtttggattaattttatttgcttcctttttccgcttttcttcccgcagagcctgatgggagaatgtccagggcagggaaaccacattttttgtaggtgataactcaatgaaaattggtgcttattttttacacttctctcttgtggctctcttgtggtgctatctatctgntttaaggtctccttgaaggcgcactggggaccctggccatgcctcgttctccctgctttctttatcctgttattgcctccacagtctgttgccaaggactctaagatcaatgcacgtcactttcctttccactgggcaggatagccaagcacactccctnctgcgctctcccgccccggtgcgtncactcccgaagggctgttatgangactgggttgtgcctactttgatttgaaaacacacacaagccnntnaaagcctcttcttgcataaaaaaaaaaaaaaggacctgcccggcgggncgctttagaactagtggaacccncgggctggangaattcnaatttcaagnttatnaaatacgtccanctnganngggggcccganacccaacatttngntcctttanngaggtgaaatngcnccttggngtaaaaaagnnaaaaagtgtgatcnngngggaaaatatnantctcgtcacatttnacnccananatcaaactaggnggcnaaatgnnaagagacntgggngtgntatganggacgtnacnnngcntaattgcgcc

SEQ ID NO: 7539 - DNA, 796 bp, Homo sapiens
  misc_feature 496, 696, 720, 727, 772, 780, 795: n = A,T,C or G
cgactactatagggcgaattgggccctctagatgcatgctcgagcggcccgccagtgtgatggatatctgcagaattcgccctttcgagcggccgcccgggcaggtacacatgcatgcatacacacccatacaaacatctgtgtgagggcagttctggagatgagcagagagagaccggaataaactcaatcttttctttcccaagctcctagccaacactatccttgggagaaagaaatttgcagaaactgctaagaccaagtgtggagatgtcaagctagttcacactctgaggctcagaatatgtaggacatgcacaattgtgcagtcctttgggattggaagtgaaacagtctgtgatcccctaccttctagggaactaggacctaggaagaggtaaagattatcaggtatgcaaagcgccccaattcttctgctgccatgggggattttaccccaactccagggttcgaggccaatctgagaatggcttangattgcaatgtcaaagtattatatcagccccttgcttgaggcttgaggtcataatatccctctaggacttacctgttcccccagatcttgccttgggaccacatttgctgctacttttcctgctgctctatcctatacattgaataatccaagaagggagaactaggttaggaaaaatttcacacaacccaacagtctgncttaaaagtgacccacattttttncatactnctcactttttaacccttttgcaagaaaaaaaacccttattgggtncacatggngagaagttaagtttnt

SEQ ID NO: 7540 - DNA, 522 bp, Homo sapiens
  misc_feature 30, 490, 509: n = A,T,C or G
tatcactactatagggcgaattggagctcnccgcggtggcggccgaggtacgcggggaggggcgggcgtcggggacattaccggacaggccttgtccggcaataccaagtttcatgcaggctcttgggaaagctggtgctgctgctgcctgattcccgccgacagaccttgggaccggggccaacactggcagctggagatggcggacaccgagatccgtgcacgagactaggtttgaggcggccgctctagaactagtggatcccccgggctgcaggaattcgatatcaagcttatcgatacccgtcgacctcgagggggggcccggtacccagcttttgttccctttagtgagggttaattgcgcgcttggcgtaatcatggtcatagctgtttcctgtgtgaaaattgttatccgctcacaattccacacaacatacgagccgggagcataaagtgtaaaagcctggggtgcctaatgagtgagctnacttcacattaatttgcgntgccgccttactt

SEQ ID NO: 7541 - DNA, 830 bp, Homo sapiens
  misc_feature 4, 7, 436, 508, 595, 647, 664, 731, 741, 742, 761, 769, 780,783, 795, 798, 813, 819, 821, 822, 823: n = A,T,C or G
cttnggngctatcgggtcgccccgcgtccgaaacaagggacctaacaaaactcagcagtgttactgtattttttaaaaatatttttatagactcattttcaggttattaaatgtaagagaaacagatacccctcttttttaaagtaggtaaatcattgatgatttatattaccaatttttagaagtaattttctagtaagcttgtggcatcagaaaatactagaagatttttttagttaaattagttagaacatttatgaatgaatataataaatattttttcagaataaaatatggaccctttgtgtttactaatagataaagccagatataattttttgtttttaaggccacaaaatatggcctttgttaaagaacactaaagttagaaatctaaagttagagcaactttttaatggctatttcctattattgnaagtgttaaaacccctgcagaattcttgataaggggctatttatactatatttcttattataagataactgnctttaggcttcttaggactagtctttttagtactaaatcaatcagcaaacatcatcatttcaccccaaaattttggccccagaaaangcgttcaaatgaaaaataatttcagagatctttctttcaaggatattttttnctggtaaaaaacattgncttggagtaaatacattggccaaacctaattgcaattctggtaaaatttaagtaatttttagaccgnggttcaccgnnttattttaggaggggaaangccctttnttttcccgggnttncccccctttttnccncgggggaaaaacccngggggntnnnaaaaaaa

SEQ ID NO: 7542 - DNA, 848 bp, Homo sapiens
  misc_feature 4, 733, 768, 769, 802, 814, 820, 821, 822: n = A,T,C or G
gccncgcgtccgcccacgcgtccgaaatccttcaaaataaaaagtaatgacttagaaactgccttcctgggtgatttgcatgtgtcttagtcttagtcaccttattatcctgacacaaaaacacatgagcatacatgtctacacatgactacacaaatgcaaacctttgcaaacacattattatgcttttgcacacacacacctgtacacacacaccggcatgtttatacacagggagtgtatggttcctgtaagcactaagttagctgttttcatttaatgacctgtggtttaacccttttgatcactaccaccattatcagcaccagactgagcagctatatccttttattaatcatggtcattcattcattcattcattcacaaaatatttatgatgtatttactctgcaccaggtcccatgccaagcactggggacacagttatggcaaagtagacaaagcatttgttcatttggagcttagagtccaggaggaatacattagataatgacacaatcaaatataaattgcaagatgtcacaggtgtgatgaagggagagtaggagagaccatgagtatgtgtaacaggaggacacagcattattctagtgctgtactgttccgtacggcagccactacccacatgtaactttttaagatttaaatttaaattagttaacattcaaaacgcagctccccaatcacactagcaacatttcaagtgcttganagccatgcatgattagtgggtaccctattggaatnngtcagaagtagaatcttttctatcattcacatnaaagttctattnggacannngctcttctagatcatcataaagactg

SEQ ID NO: 7543 - DNA, 667 bp, Homo sapiens
  misc_feature 2, 591: n = A,T,C or G
tnctatagggcgaattgggccctctagatgcatgctcgagcggccgccagtgtgatggatatctgcagaattcgccctttcgagcggccgcccgggcaggtacaaaataacatcataaataacataaatgagaagttttcaagtatttcaatgtgccttgaaaagtttcaaacagtaattctcacaattggttagacaatcatttttttttcttttcttttcctctcatttagtctcagagcctaaaaagaaatgcctccagtctctgttagccccgatgtttggaatgaaattaacaagattctaccttaaaagagaaaacttatgtgggcttttcaaattgtgaaaatttgttccctcttataaaatataatctttcccctgctgctggtttataaatatgggcatatagcccagagccattataaagaaaaaacaaccaaccacaataaactaaggagcctcatctgatggctaagggttctcaggaaaaaatgagaagagcaccttgatcaggaagggaaaaaaggatagaggataaaaacagtaacctttaacttctatgccctcactcagccagtaacttacggnaggtgttgctggcaaggccttagctggattttcttcatttaaggttggaacatcctgtctgccaactccataccac

SEQ ID NO: 7544 - DNA, 714 bp, Homo sapiens
  misc_feature 3, 6, 9, 29, 497, 569, 615, 625, 626, 690, 700, 713: n = A,T,C or G
gcntgnagnagccagccccgaattgggcnctctagatgcatgctcgagcggccgccagtgtgatggatatctgcagaattcggcttagcgtggtcggcggccgaggtacaagagaacaaattaaaattgaaaaattgatttcacttagaaaaacttctaggaacagggtgaaccactgattttaatttgcctaattatcttatgacaagtatcaaattaagatgacacttaaagatccttagcattaacttaatgatggagaagagtgctcaatagacagttcccagtaaggtaatgagatgccattttcagagacattctaagaagatattttgattcattaaaacattaaataaaaagccctcctcagattggaacccccaaatcgatggagccacattaataatacttttcatgcctcactttgacatgacagcattcgatttttttaaagatctttaatactttccatgagtacctgcccgggcggccgctcnaaagccgaattccagcacactggcggccgttactagtggatcccagctcggtccaagctttggcgtatcatngtcatagctggtttctgtgtgaaattggtattcggtcacaattccncacaacatcnnaccggaagcataaagtgtaaagcctggggtgctaatgagtgacctactcacattattggcgtgngctcctgccntttcatccggaant

SEQ ID NO: 7545 - DNA, 498 bp, Homo sapiens
  misc_feature 2, 3, 4, 5, 6, 7, 8, 9, 10, 11, 12, 13, 15, 16, 17, 18, 23,36, 44, 47, 72, 75: n = A,T,C or G
gnnnnnnnnnnnnannnncatanctgtttcctgtgngaaaaggnccntctagatgcatgctcgagcggccgncantgtgatggatatctgcagaattcggcttagcgtggtcgcggccgaggtaccccgttctgcctgagcattttttcctaaagggaagaatcaatagtttctgactgttttaacagctgaaagctccaactggaggcagaagatgggatggcttttcacacacgtgcgtgcaagtttagccacctccaaaggccttgttcttaaagcaacagtgctgtttgcattatgaaatgtctctggagttcccctttggaaaggctgctggtgggccacatggtcacgatactttcaagtcacaccctactttgtgaccttatcctcagagtaaaggctttagaggaaaagggaccccacagtctcacccattacctggctgtcagcatctccatatgctcctggctgagttttattgagcatcagctgggg

SEQ ID NO: 7546 - DNA, 388 bp, Homo sapiens
  misc_feature 1, 4, 368: n = A,T,C or G
nctnctatagggcgaattggagctccccgcggtggcggccgaggtactgggaaaatttatagaaatcatctagtcttacccttcatcttacatataagaaaaatggtcttttcttctaatcacatttacaaaatatgatataaaccttgaccatgaatgtatgagcctaattagagaaacagaaaatcagcatgtcagttttccttcattcaaaataacatagtctttctaagcagtcattctggagttaacatgcctagttcagagccgctgtggatgctcaaatcatttctggaattgccttcaggacacaattatgagaaagtcagacttccaatattttgatcatgccttgtgtcttcctaagngtccttatcccactggattg

SEQ ID NO: 7547 - DNA, 416 bp, Homo sapiens
  misc_feature 5, 17: n = A,T,C or G
gagcnctccgtaatacngactcactatagggcgaattggagctccaccgcggtggcggccgaggtaccttctaaggtagttaacaccacacaggctgataactcagggcaagagagaggcctggagagttgacaagagtgtgaagatactggagaggggttcaaaataggatcaattcttctaatactattcttatttcttgctaataatttgtccttgtaattatagtgaagtaatggtctggatataaatgagatatggttttgtgaggaagaaacatagaggattattcttaacaactgtggcagccttgccaatatggaacccaatttcagagtttgtgaaatggtacctgcccgggcggccgctctagaactagtggatcccccgggctgcaggaattcgatatcaagctt

SEQ ID NO: 7548 - DNA, 648 bp, Homo sapiens
  misc_feature 521, 531, 546, 563, 565, 584, 595, 632, 637: n = A,T,C or G
tatcgactactatagggcgaattggagctccaccgcggtggcggccgcatcctgaagacctcctttttgggcaccggacgccaggtgttctacaagtatgggaaactctccaagttatcagagattgtctacgacagtaccgccgtcaccttcgggtatgacgagaccactggtgtcttgaagatggtcaacctccaaagtgggggcttctcctgcaccatcaggtaccggaagattggccccctggtggacaagcagatctacaggttctccgaggaaggcatggtcaatgccaggtttgactacacctatcatgacaacagcttccgcatcgcaagcatcaagcccgtcataagtgagactcccctccccgttgacctctaccgctatgatgagatttctggcaaggtggaacactttggtaagtttggagtcatctattatgacatcaaccagattatcaccactgccgtgatgaccctcagcaaacacttcgacacccatgggcggatcaaggaggnccagtatganatgttcccgtccctnatgtactggatgaccgngncattttaacaccttggccngggggatcaanagggagctaaaactggggcccctatgccaataccacnaagtncacctatgact

SEQ ID NO: 7549 - DNA, 500 bp, Homo sapiens
  misc_feature 2, 3, 467, 496: n = A,T,C or G
gnnatcgaccgagctcggatccctagtaaccggccgccagtgtgctggaatttcgagcggccgcccgggcaggtacatgaggtgtggtgcctataagccagggtcggaaactttccagacaaacctagatagctctactaggagggagtcaacgacctattgtatcaattagatcccagcctggacaagggcatgactattgctgtttggggacacgtggctctgtgttgaaggcaatgactgtgtggctgttgccatgtggcctgttctcccctaagccctgaaccaaaggttccaggcccagatgagaaggccactgggaatgcatgccataggggttgatgctggacattccccagccttccattaaatgaaaacattttctataaacttactgctttaaaaaaatgttttaaccaacaaacctaagaactgcaaatgagttttggtattagtataaatattgncaaatattaaattcccagaaacccatttnagac

SEQ ID NO: 7550 - DNA, 831 bp, Homo sapiens
  misc_feature 3, 17, 30, 36, 291, 554, 604, 647, 662, 667, 712, 726, 750,772, 778, 781, 787, 792, 802, 819, 820, 829, 830: n = A,T,C or G
ggngctaattggagctncaccgcggtggcngcccgnccgggcaggtacgtggagtcgcagctgcagcgcacagagactggagcgacggagaccgtcacgccctcagaggccccggtgctggcagctgagcccgaggctgacaagggcactgtgttggcactcactgaaaataacttcgatgacaccattgcagaaggaataaccttcatcaagttttatgctccatggtgtggtcattgtaagactctggctcctacttgggaggaactctctaaaaaggaattccctggnctggcgggggtcaagatcgccgaagtagactgcactgctgaacggaatatctgcagcaagtattcggtacctcggccgctctagaactagtggatcccccgggctgcaggaattcgatatcaagcttatcgatccgtcgacctcgagggggggcccggtacccagcttttgttcccttttagtgagggttaattgcgcgccttggcgtaatcatgggtcatagctgtttcctggtgtgaaattgttatcccgctcacaaattncacacaacataccgagccgggagccataaagtgttaaagcctggggtgcntaatgagtgaggctaactcacaattaattgcgttggcgctcantgcccggttttccantcggnaaacctgtcgtgcccactggcattaatgaaattgggccaaccccncggggagaggcggntttgcgtattggggccccctttcngcttccttggttaactgaactngcttgngcntcggcngttcngctgcgcganccgggattaacttactnnaaaggcggnnt

SEQ ID NO: 7551 - DNA, 650 bp, Homo sapiens
  misc_feature 630, 636, 640, 641: n = A,T,C or G
actactatagggcgaattggagctccccgcggtggcggccgcccgggcaggtacaaaaataccagtgcttgttatactagttactaaaagaagaagaaactcaaaattcctatctgcgtgctaatttgaaaagaacaacgtagatagatttgttggcacatatatatggcatattcacatatggcatatatacatatggggagaaaacatgaaccaaaggccaattcagttatgggagctcatctccttccatctctcctaatcaagagcaaagggaacagcaggcctaacagcagggttgggaaggcaaaaggactggcactgaactaagtgaaagggcgtctggtctattcagaggaagaggctggaatggcttaacaatagcaggcatttataagtgcccaccctcaccaatgcatcgggggtggtccctagatatgaaaggtgaggaagtctctgcatactgtgatggtacctcggccgaggtcccaggtctcagcctgccctaccttcccaggctccagtccctgttcctcagcatcccccaccacatcctgagtaagctttgtccccagataacctcttcagcatgatccttaaatctccctaagcctcagtttctcccctggngggggnaaannggggggggg

SEQ ID NO: 7552 - DNA, 597 bp, Homo sapiens
  misc_feature 12, 16, 21, 22, 27, 29, 35, 43, 45, 46, 69, 79, 92, 428,466, 480, 487, 490, 502, 511, 514, 544, 551, 556, 565, 568,575, 581, 594: n = A,T,C or G
gcctgttctgtncctnctcannttttntnccacanacttctgnannctccgtgtccagctgcaccaagnaaggacaagnaacacacccgggnagctgtcttgggcagtgtagaacagcagggtgaggacggaatggccgaggagagggaagaagccaggggaagcctgttcctgaagtgtaaggaaagatcgggcttggagcctgggccagccgaggcaagggggtggcaggcagccagtgtcaattaaagataaaatttctcctccggtagtggagggcaaacagtggctgtggcccccctagacaggagaaagccatttgcagccaggctggccttggaaaagcttggccaggcgataatgggacgggatgcgctgctgactccataatgatattacgcgtcagggcccacggccaaagtggctgntttttctgtagatcgatgtggaaccattttatggtcangggctgagaaccanccagcancanggggtaccttgncccggccgncgntctaaaactagtggattcccccggctgcangaattcnatatnaagcttatngancccgtcnaccttnaggggggccccgntcc

SEQ ID NO: 7553 - DNA, 388 bp, Homo sapiens
  misc_feature 129, 246, 273, 274: n = A,T,C or G
gcgcgcgtaataccgacctcactatagggcgaattggagctccaccgcggtggcggccgcccgggcaggtacatagatcctgatctactggcagagctcagcgaagaacagaaacagatcctgttcttnaagatgagagaggaacagatccgacgatggaaagaaagagaagcagctatggaaagaaaggagtccctgccagtgaaacccagaccaaagaaagagaatggcaaatcggttcattgnaaacttggagctgataaggaagtctgnntatgggtgatgggcgaacaccatctagataaaccctatgatgtgctctgtaatgaaattattgctgagagggcccggctgaaagcagaacaggaggcagaagagcccagaaaaa

SEQ ID NO: 7554 - DNA, 500 bp, Homo sapiens
  misc_feature 304, 419, 431, 452, 477, 489: n = A,T,C or G
ggagctccccgcggtggcggccgcccgggcaggtacagcgtggtcaaggtaacaagaagaaaaaaatgtgagtggcatcctgggatgagcagggggacagacctggacagacacgttgtcatttgctgctgtgggtaggaaaatgggcgtaaaggaggagaaacagatacaaaatctccaactcagtattaaggtattctcatgcctagaatattggtagaaacaagaatacattcatatggcaaataactaaccatggtggaacaaaattctgggatttaagttggataccaaggaaattgtnttaaaagagctgttcatggaataagaataaaactgttcattaagaacttttcaaaagtgaattagtgaggattcagcttaatacctgtatcaaatgaggaagtggtttattacantatttttataancagggttttatgtgtaccctnggcccgctctagaactaggtggatncccccgggctgnaggaattccaa

SEQ ID NO: 7555 - DNA, 601 bp, Homo sapiens
  misc_feature 2, 3, 8, 9, 12, 275, 294, 295, 298, 303, 309, 314, 320, 323,330, 345, 351, 356, 362, 363, 364, 385, 416, 417, 418, 419,426, 427, 442, 453, 454, 456, 457, 460, 461, 466, 496, 499,500, 501, 505, 511, 513, 514, 522, 531, 532, 533: n = A,T,C or G
  misc_feature 535, 537, 545, 559, 568, 572, 576, 578, 582, 584, 586, 592,594: n = A,T,C or G
gnngagcnntcnctactatagggcgaattggagctccccgcggtggcggccgaggtactttttagttatcagttaatacactgattcgtatcaaaacacattatttttaaaacaaaatatctccttaccaggaattcagtattttcatgcaatctgctaaagattaactctcagtgccaggaaaattttaatgaattgcatttcttctagaatccgaatattgggaatgtttataagtgtgactatcctatgagatttcaaagagaaaaaaagtncctgcccggccggccgttnnaanacctngggganccccnggctgnagngattccnattaaggttttatgnaccccngggancccctnnnggggggggcccggggcccccnatttttttttcctttttggggggggggaaannnnccccccnnggggggaaaaaaaanggggaaaaaanngnnttnntctgngggaaaaatttttttttccccccaaaattnccnnncaanattttncnngggggggnaaaaaaaannngnanaaaccccngggggccccaaaanggggggccncccncccncntatngngngggggngnccccccc

SEQ ID NO: 7556 - DNA, 653 bp, Homo sapiens
  misc_feature 4, 180, 595, 620: n = A,T,C or G
actnctatagggcgaattggagctccccgcggtggcggccgaggtttttttttttttttgaaaaggaaggaaaatattttattaaaagttttttaaagtttatgaattgaagtctatgaaaacaaactacttgatacaaaaacattcagatattagatgtcaaaataaatcagcacattngaaaatactataaattatatttcaaacaaatatatacacattatgttaaccttcaacaggatccattatcactacttagaacactgatatgtttatcttttaagtatgtaaaaattacatagctgttaactttgtatggcaattcacctataacacatttaagaaagcattacaaaattcattatataataattctacaaaagttttctcacatttaccaaagcctactaaagtccagagggcacaaatattggccaaatagttcttttatcttagacataaagatgtttttgctgttttttagaaccattaagatggctaagagaaccaactttacggagcttagctgttctcaggcatctgaatgggggtgtggagaaagtcctcaagttacaagaatcacagttactttttnaggatgaaaaaataaaaacattgcntttgatgacattacagtcaaaatgagctctaat

SEQ ID NO: 7557 - DNA, 659 bp, Homo sapiens
  misc_feature 1, 4, 6, 629: n = A,T,C or G
ntancnactcctatagggcgaattggagctccaccgcggtggcggccgaggtactttaacttttgaaggtggtttctggttcccccaatcggtgagcccaaagacctcaaataacattttattcacacagacttcttagagatgaaaagtttctagagagcagagcctttagggaactagtgatgatgcattcactgaataaatcacagtattatactcaagagcaaatacgttttctttcttattggtgtcatctttccttgtgaaatacggcaactgatgaagaagtctcctattgagaataaccagacgaaatcacaaggctagacaagcagctactaacaccatccccttccccctgcccatggtaaaccctgctggcaaatgtatttctccctcctaaacctgggaggactcacgtttctgcacccagagccccaggtggaagtaaacaatgggagtgagccgatgaggtgggattgctgttccttgactcttagtgcttctcatgctagtctcctggggatgcagttaaaatgcagattctctctctagatctggggcggggcttgttcagcaggctcccaggggagaccaacgctgctgacttgtgggtcatactttgagtngcaaggttgcgtacctgcccgggcggccgt

SEQ ID NO: 7558 - DNA, 735 bp, Homo sapiens
  misc_feature 2, 5, 6, 8, 723: n = A,T,C or G
gncgnntntgcctccgtaatacgactcactatagggcgaattggagctccaccgcggtggcggccgcccgggcaggtactgttcttataaaagattctttctcccagaattatatctcctcagagcaacagcaaggttctcaggatcgaagcctactctagcctgaagggctaggaagattaggataaggataaggataataatccaaaagtctcgacaattccagtagtctctggatggctccaacatcatagaaatttaacactgttccacttgtttacaaaatctaacactggcttagacattctggactttcagtgagggttccagcatctgatgtccctcaactcctttccagggtgagaggcccacttacaggaaacttaacttctcaccatgtggacccatgagggtttttctcttgcagaagggctaaaaagtgaggagctatggaaaaatgtgggtcacttttaaggcagactgtttggttgtgtggaatttttcctaacctagttctaccatcttggattattcaatgtataggatagagcagcaggaaaagtagcagcaaatgtggtcccaaggcaagatctgggggaacaggtaagtcctagagggatattatgacctcaagcctcaagcaaggggctgatataataccttgacattgcaatcctaagccattctcagattggcctcgaaccctggagttggggtaaaatnccccatggcagc

SEQ ID NO: 7559 - DNA, 631 bp, Homo sapiens
  misc_feature 1, 2, 5, 528, 555, 583, 600, 622, 626, 630: n = A,T,C or G
nnctnctatagggccgaattggagctccaccgcggtggcggccgcccgggcaggtacctaacctacctttaagactgggataactattggaaacaatagctaataccggatatagttatttatccgcatgatgagtaatagaaaggagcttcacagcttcacttaaaaatgggggtgccggaacattagttagttggtagggtaatggcctaccaagacgatgatgtttagccgggccgagaggctgtacctcggccgctctagaactagtggatcccccgggctgcaggaattcgatatcaagcttatcgataccgtcgacctcgagggggggcccggtacccagcttttgttccctttagtgagggttaattgcgcgcttggcgtaatcatggtcatagctgtttcctgtgtgaaattgttatccgctcacaattccacacaacatacgagccgggagcataaagtgtaaagcctggggtgcctaatgagtgagctaactcacattaattgcgttgcgctcactgnccgctttccagtcgggaaacctgtcgngccagctgcattaatgaatcggcccacncccggggagagggcggnttgcgtattgggcgctcttccncttnctcnt

SEQ ID NO: 7560 - DNA, 682 bp, Homo sapiens
  misc_feature 6, 7, 9, 582: n = A,T,C or G
gatagnnantacgactcactatagggcgaattgggccctctagatgcatgctcgagcggccgccagtgtgatggatatctgcagaattcggcttagcgtggtcgcggccgaggtacctttaactcaatttaatataacaagaaatcgtaaaatacttataacctatcttagagaaatgagtgctggttttgagagttgttttttaactgaaagattatttctagatgggtagtgctttgtgctggtttctgcttccatatatttcccagtcattttaattagagaagatactctatggtagaactaaggcctttcctttcttggccaaagtctttaccctatttaaccctttgtatatttctgactgctcactgttcatattataggggaccagatttgtaatatagaattctccataacatgaatgaaattaattctgtccaagccagcatggtggcttcatattaagtagtaacagaagtctgaacaattggataaatttgacttccaagacagctaaacttttcaactgcaattttaaaaactacactacactgttatagttaatctgacaaaaatgtnctcaaagagtacctgcccggccggccgctcgaagccgaattccagcacactggcggccgttactagtggatcccgagctcggtaccaagcttggcgtaat

SEQ ID NO: 7561 - DNA, 412 bp, Homo sapiens
  misc_feature 1, 6: n = A,T,C or G
nattgnatacgactcactatagggcgaattgggccctctagatgcatgctcgagcggccgccagtgtgatggatatctgcagaattcggctttcgagcggccgcccgggcaggtacaccagccagctcccaccactcacggccttcatcctgccttcgggaggcaagatcagctcggcgctgcatttctgccgggccgtgtgccgccgggccgagagacgtgtggtgcctcttgtccagatgggagagaccgatgcgaacgtggccaagttcttaaacagactcagtgactatctcttcacgctagccagatatgcagccatgaaggaggggaatcaagagaaaatatacatgaaaaatgacccatcggccgggtctgagggactctgaaatcacagaaagtgggagcttgg

SEQ ID NO: 7562 - DNA, 398 bp, Homo sapiens
gcgcgcgtaataccgactcactatagggcgaattggagctccaccgcggtggcggccgcccgggcaggacagaaaaaggattggaattgtgtttagtttttggtgtttagattattttctttgtgtctttcttctttttcttttttttttcttttttacaataggccagtagaattcttatgagaacagcttttaagcacttcaatggagtgtcatttttttggtagcttccagaaggtgccaaacaggtttcaacatcatattaattagaaatacccataataattataacaataataaaaaggtataatatggtacctcggccgctctagaactagtggatcccccgggctgcaggaattcgatatcaagcttatcgataccgtcgacctcgaggg

SEQ ID NO: 7563 - DNA, 847 bp, Homo sapiens
  misc_feature 627, 638, 666, 691, 741, 751, 752, 771, 799, 834, 835, 839: n = A,T,C or G
cgactcactataggggcgaattgggccctctagatgcatgctcgagcggcccgccagtgtgatggatatctgcagaattcgccctttcgagcggccgcccgggcaggtacataacatttcaaatataagtggaaggatcatcagtagtgttatcaaaatgcataatacagaaactttttaagaaaggataaaaaattacactcaggacccataactcttcctcattataagcatatgtagtgattcattcatgcaggtttttatatgtagataggatttttttttccttttcaagaattccattgtagccatgagatgaaaaatgtattatggtaatggtatagctttcttctattttgcttttagtgttaggtttgctaaaagcttatttaaaattcccaactgacataatgtgttttcaataaggaggacgctgccgtgtccaatacccttcccctgtcattgttcggtacctcggccgcgaccacgctaagggcgaattccagcacactggcggccgttactagtggatccgagctcggtaccaagcttggcgtaatcatggtcatagctgtttcctgtgtgaaattgttatcccgttcacaatttccacaccaacattacgancccggaagcantaaaagtggtaaaaccctggggtgcctnatggagtgaacctaactcaccattnattgcggttgcgctcactggcccgttttccaatccgggaaaccctgtcgnggcaacctgnnttaatgaaatcggccaccnccccggggagaaggcggtttgcgtattnggggcctttttccctttccttggtttaattacttnnttgncctcgggg

SEQ ID NO: 7564 - DNA, 610 bp, Homo sapiens
  misc_feature 10, 15, 16, 17, 28, 58, 88: n = A,T,C or G
gcatatagcnccagnnnccttataaagnaaaaaacaaccaaccacaataaactaaggnagcctcatctgatggctaaggttctcaggnaaaaaatgagaagagcaccttgatcaggaaaggaaaaaaggatagaggataaaaacagtaacctttaacttctatgccctcactcagccagtaacttacggcaggtgttgctggcaaggccttagctgtatttcttcattaagttgaacatcctgtctgccaactccataccaacccagctgctaataagcatgccctgagcacccaggaaaagaagggaaggctggcagcttaggagctcaaaagtgccatcagagaaaaccagctcaagggagctaaggtatttgctccttagaatagtgctcaaggtggaggctgtcagtggtcaaatcaagcatgaagttccttggatgcttctccagcaagatccatggaattttacaaaaccaactttccacaggttagcatttctttcttagcctacatggcagttagttcattttgccctgttcaaatgtagtatgaaagaacagagatcaaaacacccatgtaagtacctgcccgggcggccgctctagaact

SEQ ID NO: 7565 - DNA, 595 bp, Homo sapiens
  misc_feature 2, 5, 6, 19, 60, 69, 101, 122, 183, 571: n = A,T,C or G
gncgnnagtcgcccgggcngatggtgtccatggggctttcatcaggcagaggagatggtntctataaancgtactggatggaccgatactggctacagcgngaaagcaacctttgcctcagngacatatcctcggggctatccctacaacgggacaaactatgtgaatgtcaccatgcacctncgaagtcccatcaccagggcagcttacctcttcatagggccatctatagatgttcagagcttcactgtccacggagactctcagcaactggatgtgttcatagccaccagcaaacatgcctacgccacatacctgtggacaggtgaggccacaggacagtctgcctttgcacaggtcattgctgatcgtcacaaaattctgtttgaccggaattcagccatcaagagcagcattgtccctgaggtgaaggactatgctgctattgtggaacagaacttgcagcattttaaaccagtgtttcagctgctggagaagcagatactgtcccgagtccggaacacagctagctttaggaagactgctgaacgcctgctgagattttcagatnagagacagactgaggaggccattg

SEQ ID NO: 7566 - DNA, 659 bp, Homo sapiens
  misc_feature 4, 5, 11, 496, 497, 506, 509, 521, 534, 539, 565, 573, 608,609, 629, 630, 635, 640, 649, 652, 654, 656: n = A,T,C or G
ggtnntcggcnccccgcgtccgagacaccagagaaaacacagtctctgctagagagcacttcctattttgtaaacctatctgctttaatggggatgtaccagaaacccacctcaccccggctcacatctaaaggggcggggccgtggtctggttctgactttgtgtttttgtgccctcctggggaccagaatctcctttcggaatgaatgttcatggaagaggctcctctgagggcaagagacctgttttagtgctgcattcgacatggaaaagtccttttaacctgtgcttgcatcctcctttcctcctcctcctcacaatccatctcttcttaagttgacagtgactatgtcagtctaatctcttgtttgccagggttcctaaattaattcacttaaccatgatgcaaatgtttttcattttgtgaagaccctccagactctgggagaggcttggtgtgggcaaggacaagcaggatagtggagtgagaaaggnnggtggaggntgnaaggccaatcangtccagcaaaagncaagnggggacattgcagaagcttgaaaggncaatccanaacacagctggtgcttttgagaaagttttttctanntttaacagaacccagtgacnnagganaatgngattgcccnaangntncct

SEQ ID NO: 7567 - DNA, 451 bp, Homo sapiens
  misc_feature 22, 89, 101, 113, 115, 166: n = A,T,C or G
tacgactcctatagggcgaatngggccctctagatgcatgctcgagcggccgccagtgtgatggatatctgcagaattcgcccttagcngggtcgcggccnaagtacaacatntnacactgtgactccaacctcacaacctgtgcgaaagtctacctttgatgcanccagtttcattggaggaattgtcctggtcttgggtgtgcaggctgtaattttctttctttataaattctgcaaatctaaagaacgaaattaccacactctgtaaacagacccattgaattaataaggactggtgattcatttgtgtaactcactgaagccaaaatactatcttttaagatgtcccacatggaagacgctattccaggatctttaaatttccatggatgcatataggatgtttgggagcataatccgtgaagaaaaaatcaattaaatcattgtgt

SEQ ID NO: 7568 - DNA, 628 bp, Homo sapiens
  misc_feature 8, 527, 546, 628: n = A,T,C or G
ggagttanccgatccctataccgcttttgggccctctagatgcatgctcgagcggccgccagtgtgatggatatctgcagaattcggctttcgagcggccgcccgggcaggtacttttaccaaagaatctactagaactctctgctattcaaaacaaagagctcatacttgttggagtagggaaaaaattagaaatttgaccaaaagatagattcaatcaactacaaagtcaattccaagatgctgataacatcgaaactcttgaaaaagaactattagaatctggagttgaactttaatggatcatatacctgttttgcttgatcaagtgattgatcagcttaatattaaagaagatggtatctatttagatcttactttaggacgtggtggtcattcgagtcaaattttaaaaaaacttactagtggcaagcttatagtctttgataaagacaaacaagcaattgaacaaacaaaagaaaaactcttaaaaatttcttcaaatattgaatttatttgatctgatnttaagattttgatcaaganctaaaaaaacttcaaatcaacaaagtagatggtgtattaccttgatttaggaagtatcttcacctcagttagatcaagcccn

SEQ ID NO: 7569 - DNA, 873 bp, Homo sapiens
  misc_feature 528, 562, 570, 584, 620, 622, 625, 644, 647, 657, 661, 665,668, 689, 705, 709, 731, 763, 769, 783, 800, 816, 820, 824,842, 843, 846, 847, 863, 872: n = A,T,C or G
tactatagggcgaattgggccctctagatgcatgctcgagcggcccgccagtgtgatggatatctgcagaattcgccctttcgagcggccgcccgggcaggtacatccaggtgaccagccacctggttctaagtcatatcccaccagaatccctggagtccttgccagagccatcagagacaagcaggcgaaagcaggctcactgaatccatattgtgtttcctctctcggttctcctgggttccactgtcaagttctccaaacgtggaaaaaaactactccatttctttctgtaagcatgtcatttcttttctcggcatcttcttttgctcgctcggcatttcgcatttttatttctatcattgtgaactttttcctctcctgatccagttcatcatggaggctcatcatttctgtttcaaagtcaagtttcgctggtctaagctctttatcctggactcatactctatctttctgtttggtcatttcctgtttcaggctggaaaactaaactgtgcagtgcactgngggttgctgctgctgttgcccacaaaatgtcttnacttgtgncactgctactgggngggcaccgaactacttcgacctccccacaactcctngnggncactttttggctttcatangtncctggggggngggnaaanggntcgtccttgcggggggccccntccaaaaacaaggggncctnaaaggttcccccaaaaaaagtntttgttcttgggcagggtggggggtgaaaaancgacanggggttggagtttnaagggaggggagatttncaggagggaagtgggncagnttcnactggaatgctttgcttnnatnnagggttaataatgggngaactggtng

SEQ ID NO: 7570 - DNA, 632 bp, Homo sapiens
  misc_feature 11, 403, 406, 418, 419, 439, 452, 454, 456, 461, 463, 464,469, 471, 472, 477, 478, 479, 480, 484, 488, 489, 495, 496,497, 500, 505, 509, 510, 514, 516, 517, 518, 520, 524, 525,527, 529, 531, 532, 533, 535, 536, 538, 539, 540, 541: n = A,T,C or G
  misc_feature 542, 543, 544, 546, 549, 550, 554, 559, 560, 561, 562, 566,567, 568, 569, 570, 571, 572, 573, 575, 576, 577, 578, 580,582, 583, 584, 585, 587, 588, 589, 590, 592, 593, 594, 595,596, 597, 598, 599, 601, 602, 603, 604, 605, 606, 607: n = A,T,C or G
  misc_feature 608, 609, 610, 611, 612, 613, 614, 615, 616, 617, 618, 619,620, 621, 622, 623, 624, 625, 626, 627, 628, 629, 630, 631,632: n = A,T,C or G
agcgcgcaatnaccctcactaaagggaacaaaagctgggtaccgggccccccctcgaggtcgacggtatcgataagcttgatatcgaattcctgcagcccgggggatccactagttctagagcggccgaggtacagcctctcggcccggctaaacatcatcgtcttggtaggccattaccctaccaactaactaatgttccgcacccccatttttaagtgaagctgtgaagctcctttctattactcatcatgcgataaataactatatccggtattagctattgtttccaatagttatcccagtcttaaaggtaggttaggtacctgcccgggcggccgccaccgcggtggagctccaattcgccctatagtgagtcgtattacgcgcgctcactggcccgncgntttacaacgtcnngactgggaaaaccctggcgntacccaacttaantngncttgnannacatncnnctttnnnncagntggnntaatannnaanaaggncccnnaccnannngncttnncnanannngnncnnnnnnnanggnnaaangggannnncccnnnnnnnngnnnntnannnncnnnngnnnnnnnngnnnnnnnnnnnnnnnnnnnnnnnnnnnnnnnn

SEQ ID NO: 7571 - DNA, 853 bp, Homo sapiens
  misc_feature 2, 6, 11, 30, 83, 610, 674, 697, 741, 752, 754, 759, 782,785, 786, 787, 788, 789, 790, 791, 795, 796, 797, 798, 799,800, 801, 802, 803, 804, 805, 806, 807, 808, 809, 810, 811,812, 813, 814, 815, 816, 817, 818, 819, 820, 821, 822: n = A,T,C or G
  misc_feature 823, 824, 825, 826, 827, 828, 829, 830, 831, 832, 833, 834,835, 836, 837, 839, 840, 841, 842, 843, 844, 845, 846, 847,853: n = A,T,C or G
gnttgnatacnactcactatagggcgaatngggccctctagatgcatgctcgagcggcccgccagtgtgatggatatctgcanaattcgccctttcgagcggccgcccgggcaggtaccaacttccttatttcacaaatttaagtttggtttatatattttattgacatggttactcaatgtccacatcattccatctgcatcgtcttcctacaaacagtttttcttctactattcggttatttctcctttttttgtttcctatttcagaatcaaatttattttacttgcaaagtcagtggaatatggtttggaaccagtagggcctctaacttaagcccagaacctgtcaaagagaagtgcagtatcattgctaaggcttgaacagtttatctctcagaatcttcagttcctttgaatttctcagctcttagtgtaatctgttttatgtgtttgttgtagacttccattatggatagatttccaaaataatttgggtaatcaactggtattttagcattctggtaactaacatgtttaaaaatctaaggctctttttcatgcaaaggagactgatttttgctttcaaaagcataggcaggaaaccttangttcaaaggtagtaaataatgatgagcaaattgctagtgatgatacagctgcagcttccgttgngtatttgtttggctaaggacctnggccgcgaccaccctaaggcgaatccacacactggcggccgttntagtggatccnanctcgnaccagcttggcgtaacatggcanaannnnnnncccnnnnnnnnnnnnnnnnnnnnnnnnnnnnnnnnnnnnnnnnnnncnnnnnnnnncccccn

SEQ ID NO: 7572 - DNA, 626 bp, Homo sapiens
  misc_feature 2: n = A,T,C or G
tncttagggcgaattggagctccccgcggtggcggccgaggtctagtttagtttatttctagttcaaaaataatctgtaattgctgtaagaaatgtcaaccacttacctaggatgtttgacaattgggatgaagtctacatatactaagtaatggcaagacaattattttattgctcaaaagaaagtcaaaaaaattccatattccctttggggaaaattggcaggatttcaagtatgacctttaagaatcaggaaaagactaacttatgctttaggattaaaacaatcaaataattaaattagttcaattttctaacatagtctctatcttcagttaaagtgcatcattgcatgttatacattactaaaattacacagtgcataattgttaccatgtgactatttaattcagggtcaactgtctaaaggtctcaggtgtcacattaaggttataatctagatgaattgaacaagaaagaaaagatttcttcattagccaatttgtttatgattcaattcctactcttgctaatgatttctttaccttcctatggaaaatataagattctagatctctgtataagatgggttgctttagcttgagatccatcagtgagaattatcc

SEQ ID NO: 7573 - DNA, 568 bp, Homo sapiens
  misc_feature 1, 7, 8, 12, 15, 23, 43: n = A,T,C or G
ntatgtnnaccnatntcggaccnagctcggatccctagtaacnggccgccagtgtgctggaattcggcttagcgtggtcgcggccgaggtacttgaatcagaaggtccctgcaagccagtatgcttcatttgccagtggccagaaattctcccttgcctccttgattgaggtgtcccagatgtagtattcccacaggggtctggcaggcccctcctgtaaccactccagtcacattttctgctcttgaggcagaggtgacatcaggacgtttacagcctccacatgaattgagtgttcatttacctcagtattaccgtgttcatttttgtcctcgtgctacagttagctccctgccgcctcttgcaggtcttacttcagctcttgcctgtgacccacacagcttctgggctctgcctctgctctaagaagtgctgtgggggtagagaaccaggaaggacatgctgttgggaatgtacctgcccgggcggccgctcgaaagccgaattctgcagatatccatcacactggcggccgctcgagcatgcatctagagggcccaattcgccc

SEQ ID NO: 7574 - DNA, 650 bp, Homo sapiens
  misc_feature 6: n = A,T,C or G
gcaatnaccctcactaaagggaacaaaagctgggtaccgggccccccctcgaggtcgacggtatcgataagcttgatatcgaattcctgcagcccgggggatccactagttctagagcggccgcccgggcaggtcaagctttttttttttttttttttttttttgggcagtgtttttttaattttaaaattctgcatctgaaaacacagtatgacagaaagcatctatatacacctgcagtgtttttggtatgatacagtatttaatacatccactgttttctgcaaaaaatgttgctttgtcagacagaaacaaactcccctagacaaaaaaatacagctaaggcacaattttgttgttgttgttgttctgcaaaataaaaagacagaaaaggtgcaaaaaagggcaggtaatgcagtcatttctgagactcacattctacctcaaggaaaagcattcagatgattggaactttgattactggtcaatttcagatagttcaatatctcttaaaatactcctttaaataaatagcaaaatatctacatatttcagcgtgtgccatttgaattctttttttaaaactttatttacagatttttttttaaaatcaacacattacaaaatatttctgtacctcggccgccacc

SEQ ID NO: 7575 - DNA, 442 bp, Homo sapiens
  misc_feature 2: n = A,T,C or G
tnctatagggagtcgccccgcgtccgtgtatatatttattattttcatataatttgccagacagagatcagaattgaaccgtcaatgtgaaataaagagttctccttgtacttgaataataaccacgattccaacccaggtctgctttggggcttatcagaactcctttctaaggagcactagaatgagaaatcatgttgttcgatcgtttcacatctgtatatcagctctaaagcagagatgtattatggtgatactccaaggtggcatagccattcatttacaacttccagatttgagctgcctggagggaatccatatcagctctgcataagattatatacaaagctgtcactcacaaaaggctggatgtgctttcatccaactggaaggctttattcttccaagttcattcatactcaaagaggccagtactttgcca

SEQ ID NO: 7576 - DNA, 595 bp, Homo sapiens
  misc_feature 2, 3, 6, 479, 519, 522, 526, 536, 580: n = A,T,C or G
gnngcngctactatagggcgaattggagctccccgcggtggcggccgcccgggcaggtaccgctatatccgccagttgatgactgtccatctctagcccctctaaccatgctatgcacccagtgagtgcagaatgattactagtaattgatgttgactttacaattctatgacatgtaatacaggatgccgaggcacttttaaaattccacctaacatgttctggcactggaaaatcttacttgagattttaatactggttaatataggaaaaattatgcttaagcaccactaacttaaaagtgtaatttcattttcttgaatttaggtaaaagcaaaattctcaaaattctattatggcacatggtttcacagtttcaaatgaaatcacagctgtctcattacgcagcacaagccttgggtttgcagaaaggatatttttcctttgttcaccaacccctcaaggatgtaatactatgngcctttggttaattagaccatattctcaaaaccacacacnatngggngactggtttnctggataccccaggatgaagggtccctggggtctaaaaaaaatnaaaaattttaacatt

SEQ ID NO: 7577 - DNA, 720 bp, Homo sapiens
  misc_feature 2, 6, 11, 569, 573, 597, 609, 620, 674, 679, 698, 706, 720: n = A,T,C or G
gnaganttagngagtcgaccccgcgtccggtctccccaccccagccctggccaagaacgtgcaataaattggaagtttgccccggggcagcaagaatttatgctgccattgaaaagcaggtaccagtgccccttttcagacagtttttgattcgctctagactttttttttttttaatagggagggaaaaaatttgataattttcttttttctacatgcacttaagactaaaacacaggtttggattaattttatttgcttcctttttccgcttttcttcccgcagagcctgatgggagaatgtccagggcagggaaaccacattttttgtaggtgataactcaatgaaaattggtgcttattttttacacttctctcttgtggctctcttgtggtgctatctgttttaaggtctccttgaaggcgcactggggtccctggccatgcctcgttctccctgctttctttatcctgttattgcctccacagtctgttgccaaggactctaagatcaatgcacgtcactttcctttccactgggcaggatagccaagcacacttccttctgngctntcccgcccgtgcgtccactccganggctgttatgangactgggttgngcctacttgatttgaaaccacacaacataaaaagcctttcctgaatggctgggngggancatacaaaatttattggtnctgaatgntgggggctaaattn

SEQ ID NO: 7578 - DNA, 836 bp, Homo sapiens
  misc_feature 620, 622, 660, 673, 743, 755, 759, 797, 822, 836: n = A,T,C or G
gactcactataggggcgaattgggccctctagatgcatgctcgagcggccgccagtgtgatggatatctgcagaattcgccctttcgagcggccgcccgggcaggtaccctgagaagcatggggcagtagaaagagcatgtgggctttagagttcaaaccaagtcaggctcaaacatagttctgtgataagccctgagcaagttacccgggtcttccatttcccccttctggagaagtcctttggaggatgagtccttctggaggatgagtccttctggaggatgaagtccttctggaggatgagttcgttgtaagaataaaatgagaatgtaagacacctagaggatgcccgagtaaaaaatgacagttgctagtagtagtaatttgtagggctcattatctagaataattttgtttgacgttactaattaaaatgaactcttaaagaaaagcagtgtatttagactcttgtagttaagaaaaattacaccacagagccctttttactttttaaattcatttttacattttaaattcattgcatgtattcattatgattcccgttgctactattttttagacttgacaactacattttatttcttttcttccataaaangngttttacagctttcaccacagctgcatcagcttatagntactatcattatnggccggaaagactggtcaggtgataaaagactgatgaaagtcattccttcctgttagtaaaggagcagtntcattaatgggnacangggccatggaaatgtaccttcggccgggaacacgcttnagggcgaattcaacccactggcggncgttactaatggan

SEQ ID NO: 7579 - DNA, 726 bp, Homo sapiens
  misc_feature 3, 4, 5, 7, 8, 10, 11, 12, 15, 17, 22, 23, 24, 27, 35, 36,44, 45, 559, 589, 593, 601, 619, 642, 643, 652, 677, 678,683, 692, 695, 701, 704, 709, 710, 717, 725: n = A,T,C or G
ttnnntnntnnnttntnttttnnntantttggganntcgcgtannccactcactctagggcgaattggagctccaccgcggtggcggccgcccgggcaggtactatattaagtggttctataaaagctattcacaagttctactgtgatggacatcctcatcatagacaaacctcccctgttttatcctcaatttctagttacagaaatttggtgatgcttatttttgccaattttatgtcaaaataagttaaaacttccctcctgttcacctcttgggtctctatcctgtgtaacctctggtgtagtatttgcccataggcaaccagagccacttcctctgaacccaacatctcctggggaccttcgcagcaagaggaaagcactgagacaatagcttgctaagcaggggcccagtggtgtctcagagaaaccatgggtgtcctcgccacttcccagggagggtgaggtgagctcgggaacataaacgatgttttgacttacaataggcatgaaatcgcaactagaaaaattagggcagtttttaaaaatgtcatagnttatcctattgcattgaactggagtaaatncacnctggtggngaaaggattgttatcttnacacatgaaaaaaggatccaggnntactaaaantgatttttttctggcattttgaaanntcctntgaccgctntanaactangtngattnncccaggncttggagng

SEQ ID NO: 7580 - DNA, 425 bp, Homo sapiens
  misc_feature 384: n = A,T,C or G
actactatagggcgaattgggccctctagatgcatgctcgagcggccgccagtgtgatggatatctgcagaattcggcttagcgtggtcgcggccgaggtacttaatatggtgtcttgttcactatacttaaaaatgcaccactcataaatatttaattcagcaagccacaaccaagacttgattttatcaacaaaaacccctaaatataaacggcaaaaaagatagatataattattccagtttttttaaaacttaaaagatattccattgccgaattaagaagaagataagtgttatatggaaagaagggcattcaagcacactaaagaaacctgaggtaagcataatctgtacctgcccggggcggcccgctcgaaatttncagcacactggcggcccgttactaggtggatcccgagcctc

SEQ ID NO: 7581 - DNA, 650 bp, Homo sapiens
  misc_feature 3, 8, 628, 649, 650: n = A,T,C or G
ttngggcnaattggagctccccgcggtggcggccgaggtctgtatctcatgtttgctgatggcagtttgtgggagagggaaccatttcagcaatgatttcagttagcaaatagctttgcagctttaacagaactctctctgcttgcttttttatttcctgggttttctggccaggcgcggtggctcacgcctgtaatcccagcactttgggagtctgaggtggacagatcacttgaaaccaggaagccaggagttcgagaccagcctggccaacatggtgaaaccctgtctccacttaaaaaaaaaaaaaaaaaattagcctgtaattccaactactcgagaggctgaggcacaggaatcgcttgaacttgagaagcagaggttgcagtgagccaagatcgcaccactgtgctccagcctgggcaacagagcaagactccatctcaaaaaataaaaataaataaaaaataaaaaaataaaagagcaaactatttccaaataccatagaataacttacataaaagtaatataactgtattggaagtagaagctagcactggttttattaatttagtgactattcatttttatctaaatcagtgaagatttactggcattggttattagnctggatatattaaaatatgann

SEQ ID NO: 7582 - DNA, 657 bp, Homo sapiens
  misc_feature 2, 583, 646: n = A,T,C or G
tnctatagggcgaattggagctccccgcggtggcggccgaggtacactaagtttgcaacatttattgagatctaagtctgtcttgccttcatttctctttttatctcccccttgccctcattcttgaacagctggaggaatacattttattctgtccatgaagcatacactatgaaattcaagtgcttaaaaatacttctatgactctctgctatcccactgtatagatccacagggagcaaacacttagaaatgatagagaactgaaggagatcaatggtttaacagttatccatgccaagtcccattgtcagaaatattcttattactcagtcaaacactctttgagcttcccttcctaaaggtaaccattccagtgaatagatgtgcccttttataaggaaacttctgatgtttattaaaaaaaactggccttttgatagaggtaacttaatttgggaatttgttgtgttgaaatggcatttaatttcaacctaaatactgactgctggacataaatcacagaaaatttaacttaagaaaatttacaaaatttattctcaggtaatcattttaataaagntctgcaaaatacacgtttatcttacattcagaaatgtggcaaaaaaggcatagctaaaggctnaacatatggct

SEQ ID NO: 7583 - DNA, 668 bp, Homo sapiens
cgtaatacgactcactatagggcgaattggagctccaccgcggtggcggccgaggtacagaagttagaatttttgactccaggcagcagtttgctcagtgatcttgaacaagttatccaattgcctctacatttgcatcagtttctctagctgcaaaatggggataatactatatacctacctcacagtgggagggcaggagattttgaggccctgaggttttaggtgggctgtgagggccaacgcttgacacaaagtccatgggttattattcaagaatgcacaggcccatcggccttttagaaagacaagacagggagtgcttgtttgatatttcaaggaataaagccggagctcctgaattgtagtccaccttaaaagagagacctgtattggagaatattttatttttttggcaaatttgatcttaccctttaccagttctataatttggttaaaagctgattatgtcctacaatgtcaaagtcagctaactgtcgtctacttaagacttctggtcatttccaacttatagaggaagggagtctctaaaatctcttcttcagaaggcacctcacttctcagacttaaaattccacatcaagtgttccattaaaagaagataaggcattctgagtgcaaacaaatgggggcttcttaaactacac

SEQ ID NO: 7584 - DNA, 546 bp, Homo sapiens
  misc_feature 2, 9, 10, 11, 456, 467, 474, 498, 512, 513, 520: n = A,T,C or G
gnatatttnnntcgaatacgactcactatagggcgaattggagctccccgcggtggcggccgcccgggcaggtgggggtttgaacgtgaaccgtatctttcttgggagatgcgattcaagccacaagagcatttacttctactgtaagaagaaaacaaatcgagtttaaatcctatgtatcttttgtttccaaaccatgctgcagaaactaaaactaaactgcactatatatatttctaggtgtctgaagttttgaaagagcttcccaaaactttaaggtagatccctagtttcatcataaatgtaactaaaagaattggcctaaatgatttcaaagatctccaccagctcctggttaaaaactgcaaagctatgatgttgtgggcttgtaaaaaaaacaaaatacacacacacacacacacacacacacaaacaaaactgcaaagcacaagtggngtgcacctgtnatcccancttcttgggaagcttaggtgaaanggtcactttggctnnaggaatnaaggcccccacttaaaaattcgcttg

SEQ ID NO: 7585 - DNA, 610 bp, Homo sapiens
  misc_feature 3, 19, 26, 29, 36, 37: n = A,T,C or G
ccngcgcgcattaaccctncactaanggnaacaaannctgggtaccgggccccccctcgggtcgacggtatcgataagcttgatatcgaattcctgcagcccgggggatccactagttctagagcggccgcccgggcaggtaccacggttgtaaagcaataagatttgagatgaacactattgaaacttcgctttttgctaaaaaatagcaagttgaatagtaatcaaaaaacatagaaagattttagttcaaaatgattgctcctttctctacctggacttttaaaaaatcaattgtcatctaatatgagtttatttgtctatagacacaagtatcaatgtctaaaaaaaatcatgactttaaacttccaccgatgaggcaggtaggagataaagatgaattctgaactgttactaaaagtacgaaccagctcgttattagatgcattgtagacaacatcgatgatccttgttttacgagtacctcggccgccaccgcggtggagctccaattcgccctatagtgagtcgtattacgcgcgctcactggccgtcgttttacaacgtcgtgactgggaaaaccctggcgttacccaacttaatcgccttc

SEQ ID NO: 7586 - DNA, 868 bp, Homo sapiens
  misc_feature 2, 20, 734, 736, 743, 778, 781, 793, 800, 806, 812, 832,838, 844, 865, 868: n = A,T,C or G
tnttaacccagcgcgcaatnaaccctactaaagggaacaaaagctgggtaccgggccccccctcgaggtcgacggtatcgataagcttgatatcgaattcctgcagcccgggggatccactagttctagagcggccgcccgggcaggtacacggcgctgaagcggggcctgacggcctacttggaagtgcaccagcaggagcaagagaaactccaggggcagataagggagtccaagaggaattcccgcttgggcttcctgtatgatctggacaagcaagtcaagtccattgaacgcttcctgcgacgactggagttccatgccagcaagatcgatgagctgtatgaggcatactgtgtccagcggcgtctccgggatggtgcctacaacatggtccgtgcctacaccactgggtccccgggaagccgagaggcccgggacagcctggcagaggccactcgggggcatcgcgagtacctcggccgccaccgcggtggagctccaattcgccctatagtgagtcgtattacgcgcgctcactggccgtcgttttacaacgtcgtgactgggaaaaccctggcgttacccaacttaatcgccttgcagcacatccccctttcgccagctggcgtaatagcgaagaggcccgcaccgatcgccttccaacaagttgcgcaacctgaatggcgaatgggacgcgccctgtaagcggcgcattaaaccccgcgggtgtngngggtacncccaacgtgacccggttcacttgcaagggccctancgnccgttcttttgnttttttnccttcntttttnggcacgttcggccgggtttncccgtnaagctntaaatgggggcttccctttanggn

SEQ ID NO: 7587 - DNA, 225 bp, Homo sapiens
  misc_feature 9, 14, 45, 191: n = A,T,C or G
aagctatgnaatgnattacgaatttaatacgactcactatagggnaatttggccctcgagccaagaattcggcacgaggggggacgggccgaggcgatggcggagaagtttgaccacctagaggagcacctggagaagttcgtggagaacattcggcagctcggcatcatcgtcagtgacttccagcccancagccaggccgggctcaaccaaaagctgaatttt

SEQ ID NO: 7588 - DNA, 640 bp, Homo sapiens
  misc_feature 485, 507, 511, 582, 630, 639: n = A,T,C or G
taagggacaaaagctgggtaccgggccccccctcgaggtcgacggtatcgataagcttgatatcgaattcctgcagcccgggggatccactagttctagagcggccgaggtactttgtcacagaatgtgaaaagaaacttggcatagtggcctttataatgaggcatccacttactcctctgaagtgaagtctgtagcttagcttgtgtatagtttttgaaagaaatctcatgatcttcgttcattctcttgccttctcttttatctcatatggcacaagtagagggggaagccaggaggaaattcatcacctcgctatgcttttatttgatttttaattcctgagtgcctaaatgtggtgaccggcacctcacataactttttgagattcttgatgtcatttttatccttcctgtcaaccagcaatgtatttttatgttactaaaaccagtaacgtcataattgttgagggcaagcttcattgntgatagtgcaaagtgtcgctgnttgngatgtgtgtttattttattcaagtttgaatattgacaaggtgtaacttaagctggtgactgacacctattnatctgctgtgtgcaaaatgatagtacctgcccgggcggccgcaccgcngtggagctnc

SEQ ID NO: 7589 - DNA, 638 bp, Homo sapiens
  misc_feature 626, 631: n = A,T,C or G
gtaacgactactatagggcgaattggagctccaccgcggtggcggccgaggtacatacatttcttagggacacagtatactgaccacatcaccaccctcttcttccagtgctgcgtggaccatctggctgcctttttttctccaaaagatgcaatattcagactgactgaccccctgccttatttcaccaaagacacgatgcatagtcaccccggccttgtttctccaatggccgtgatacactagtgatcatgttcagccctgcttccacctgcatagaatcttttcttctcagacagggacagtgcggcctcaacatctcctggagtctagaagctgtttcctttcccctccttcctcctcttgctctagccttaatactggccttttccctccctgccccaagtgaagacagggcactctgcgcccaccacatgcacagctgtgcatggagacctgcaggtgcacgtgctggaacacgtgtggttcccccctggcccagcctcctctgcagtgcccctctcccctgcccatcctccccacggaagcatgtgctggtcacactggttctccaggggtctgtgatggggcccctggggggtcagcttctgtccctctgccttctnacctntttggtc

SEQ ID NO: 7590 - DNA, 640 bp, Homo sapiens
  misc_feature 2, 4, 5, 6, 9, 10, 11, 14, 15, 22, 31, 32, 33, 54, 69, 86,116, 631: n = A,T,C or G
tntnnnggnnntcnncccacgncgtccgggnnnattgggcagctcatgcttganacccaatctccatgnatgacctacaagctagnagtatttaaaggcagtggtaaatttcaggnaaagcagaagttaaaggcaaaattgtaaatcagtcgagatcgggtgccttcagggtggtatggctgtataccaaaattgtaaatcactacatgaagcttatatattggtttggcctgaaaggtgaagtggggtaggcagggggcgggcttacaggttatggtggattcaaagactccctgatttgtgattggttaaggaagcaaagctttgtctaaaaacttggggtccgcagaaaggaacattaaggtctggccaggcccctcaggaagaaactgagagcaaagaatggaggtcagagtttagtccctggtgttcccccttatctgacgtctgtgtgaatccatttggtgggggtctgggtttctgaaaagtagctcaggggcacgtgttaaggatgtctctaggtgactctaacttccctggctattgtttgaaactgttatgaccttcttgcttatcagcttgctggtttccttctcggggcgagctgggtgcctggagtttttcggtgaangaactcaat

SEQ ID NO: 7591 - DNA, 549 bp, Homo sapiens
  misc_feature 2, 3, 4, 8, 9, 114, 494, 502, 506, 511, 512, 525, 527, 530: n = A,T,C or G
gnnncgtnnctacttagggcgaattggagctccccgcggtggcggccgaggtacatatatgtgtgtatatatatacttaaatgtaatatttacaaaataaaactgtgatctcgnctagagaaaatgtattcatattacaaactgctcttccatatttatgtacctgcccgggcggccgctctagaactagtggatcccccgggctgcaggaattcgatatcaagcttatcgataccgtcgacctcgagggggggcccggtacccagcttttgttccctttagtgagggttaattgcgcgcttggcgtaatcatggtcatagctgtttcctgtgtgaaattgttatccgctcacaattccacacaacatacgagccgggagcataaagtgtaaagcctggggtgcctaatgagtgagctaactcacattaattgcgttgcgctcactgcccgctttccagtcgggaaaccctgtcgtgccagctgcattaatgantcggccancccncgggnngagggcggttggntnttnggcgctttttccgtttctc

SEQ ID NO: 7592 - DNA, 651 bp, Homo sapiens
  misc_feature 3, 5, 389, 391, 427, 436, 445, 451, 469, 477, 478, 482, 484,485, 495, 504, 510, 520, 522, 523, 532, 539, 558, 560, 565,568, 581, 582, 583, 601, 612, 617, 622, 638, 639, 643, 646,647, 651: n = A,T,C or G
cantnaccctcactaaagggaacaaaagctgggtaccgggccccccctcgaggtcgacggtatcgataagcttgatatcgaattcctgcagcccgggggatccactagttctagagcggccgaggtacttttcctatatgctaacaagttttaagatgtttctgaacaagttttaaaatatttctgaaaatgaaatagtctcaaaggagttttgattttgcaagatcacttagcaaatgatccaaggataactgacaggattctatattgtgttggttgaaaattaagaatcctgagccatattccagacctgaataatcaatttctggggtgaggtggagcaggtaagttccctgggtgcttatttagcataccaaactttaagaacngnttatctttcctttcatatattttgagcaaaaactgnacctggccnggcgggccncacccngggggagcttcaattcgncctattanngagncnnattacccccnctcactggncggcgntttacaaccncnnggcctgggnaaacccnggcgttacccaacttaatngncttgnaanacattcccctttnnnccagttggcgtaataacnaaaaaggcccnacccnatcgncctttccaacagttgnncaanccnnatgn

SEQ ID NO: 7593 - DNA, 635 bp, Homo sapiens
  misc_feature 410, 466, 478, 481, 503, 517, 518, 525, 528, 529, 531, 561,566, 589, 596, 600, 601, 604, 608, 612, 615, 625, 628, 634: n = A,T,C or G
tactaagggaacaaaagctgggtaccgggccccccctcgaggtcgacggtatcgataagcttgatatcgaattcctgcagcccgggggatccactagttctagagcggccgaggtacctatcgctcactgcatgctcgcctccctcttgctggcatcccggcctgtttcaatgactaccgctctgctacttaggcacagggactccgccgcacgctgacggaccacgagggctgaccccttccagcctgacttggttcatggaggctcctactctgccctctccaagctcccctggcggctccccacctggttgcccagttcctattgatgagctctggacagaaagatgcccgtttggccaggctggtggcttgatgggtggacctgcccgggcgggcgccaccgcggnggagctccaattcgccctatagtgagtcgtattaacgcgcgctcactggccgtcgntttaacaaccgncgnggactgggaaaaccctgggcgntacccaacttaatnngccttgnaannanatcccccttttcgccagctggcgtaataancgaanaggcccgcaccgatcggcccttnccaacanttgnncancctngatnggnaaatgggacnccncccttna

SEQ ID NO: 7594 - DNA, 904 bp, Homo sapiens
  misc_feature 2, 5, 8, 628, 669, 699, 708, 718, 722, 724, 732, 760, 786,807, 809, 813, 820, 842, 849, 861, 874, 894, 896, 904: n = A,T,C or G
tnacncgnggcgcgcgtatacgactcactatagggcgaattggagctccccgcggtggcggcccgcccgggcaggtacattaaataataacagaaaccaagagtttgtttctagtagtagaagtataagtggagagagtgctacatcagagagtgaatttaccttagggggtgacgacagtggtgtgtcaatgaacccagctaggagtgcacttgcactgttggccatggcccaatctggggatgcagtcagtgtcaagattgaagaagaaaaccaagatttaatgcattttaaccttcaaaagaaaagagctaaaggaaaagggcaagttaaagaggaagacaacagtaatcagaaacagctgaaaagacctgcccaaggcaaacgccagaatccaaggggaacagatatttacttaccgtatactcctccttcctcagaaagctgccatgatggttatcagcatcaagaaaaaatgagacagaagatcaaagaggtggaggaaaaacaaccggaagtcaaaacaggatttattgcttctttcttagattttctgaaatccgggcccaagcagcagttttccactcttgctggacctcggcccgctctagaactagtggatcccccnggctgcagggaattccatatcaagcttattcgattcccgcnaccctcgaagggggggcccgggacccaacnttttggttnctttagtgangggntnattgcccncttggccgtaatcatgggcatagcttgntttctggggggaaaattggtatcccntcacaattccaaacacatacnangccnggagccntaaagtgttaaagcctggggtngcctatnggtgagctactncattaattgcgtnggcttactgcccctttccancngggaaccn

SEQ ID NO: 7595 - DNA, 648 bp, Homo sapiens
  misc_feature 5, 9, 10, 26, 32, 538, 618, 639: n = A,T,C or G
attgnccanncatgtctcaccactgnataggnacgttttgttccctttgctgccgtagctgctgctaattgcattaatattccattaatgaggcaaagggaactcaaagttggcattcccgtcacggatgagaatgggaaccgcttgggggagtcggcgaatgctgcgaaacaagccatcacgcaagttgtcgtgtccaggattctcatggcagcccctggcatggccatccctccattcattatgaacactttggaaaagaaagcctttttgaagaggttcccatggatgagtgcacccattcaagttgggttagttggcttctgtttggtgtttgctacacccctgtgttgtgccctgtttcctcagaaaagttccatgtctgtgacaagcttggaggccgagttgcaagctaagatccaagagagccatcctgaattgcgacgcgtgtacctgcccgggcggccgctctagaactagtggatcccccgggctgcaggaattcgatatcaagcttatcgataccgtcgacctcganggggggcccggtacccagcttttgttccctttagtgagggttaattgcgcgcttggcgtaatcatggtcatagctggttnctgtgtgaaaattgtatccgntcacaattc

SEQ ID NO: 7596 - DNA, 410 bp, Homo sapiens
gagcgcgcgtaataccgactcactatagggcgaattggagctccaccgcggtggcggccgaggtacagaagttagaatttttgactccaggcagcagtttgctcagtgatcttgaacaagttatccaattgcctctacatttgcatcagtttctctagctgcaaaatggggataatactatatacctacctcacagtgggagggcaggagattttgaggccctgaggttttaggtgggctgtgagggccaacgcttgacacaaagtccatgggttattattcaagaatgcacaggcccatcggccttttagaaagacaagacagggagtgcttgtttgatatttcaaggaataaagccggagctcctgaattgtagtccaccttaaaagagagacctgtattggagaata

SEQ ID NO: 7597 - DNA, 506 bp, Homo sapiens
  misc_feature 3, 5, 6, 9, 13, 49, 381: n = A,T,C or G
cgncnnccnaacnctacttagggcgattgggtaccgggccccccctcgnggtcgcggtatcgataagcttgatatcgaattcctgcagcccgggggatccactagttctagagcggccgcccgggcaggtactcatggaaagtattaaagatctttaaaaaaatcgaatgctgtcatgtcaaagtgaggcatgaaaagtattattaatgtggctccatcgatttgggggttccaatctgaggagggctttttatttaatgttttaatgaatcaaaatatcttcttagaatgtctctgaaaatggcatctcattaccttactgggaactggctgttgagcactcttctccatcattaagttaatgctaaggatctttaaggngtcatcttaatttggatacttgtcataagataattagggccaaattaaaatcagggggttcaccctgtcctaggaaggtttttctaaggggaaatcaaattttttcaattttaaatttggtccct

SEQ ID NO: 7598 - DNA, 823 bp, Homo sapiens
  misc_feature 2, 3, 4, 5, 10, 29, 37, 599, 643, 660, 722, 737, 803, 808: n = A,T,C or G
gnnnngaatngtaatacgactcactatanggcgaatngggccctctagatgcatgctcgagcggccgccagtgtgatggatatctgcagaattcgccctttcgagcggccgcccgggcaggtacttacatgggtgttttgatctctgttctttcatactacatttgaacagggcaaaatgaactaactgccatgtaggctaagaaagaaatgctaacctgtggaaagttggttttgtaaaattccatggatcttgctggagaagcatccaaggaacttcatgcttgatttgaccactgacagcctccaccttgagcactattctaaggagcaaataccttagctcccttgagctggttttctctgatggcacttttgagctcctaagctgccagccttcccttcttttcctgggtgctcagggcatgcttattagcagctgggttggtatggagttggcagacaggatgttcaacttaatgaagaaatacagctaaggccttgccagcaacacctgccgtaagttactggctgagtgagggcatagaagttaaaggttactgtttttatcctctatccttttttcctttcctgatcaangtgctcttctcattttttcctgagaaccttagccatcaaatgangctccttaatttattgnggttggttggtttttctttataatggctctgggctatatgcccatatttattaaccacagtngggggaaagattatnttttataagaaggaacaaaattttcacaatttggaaaaagcccacattaagttttctctttttaanggaanaatcttgcttaattt

SEQ ID NO: 7599 - DNA, 490 bp, Homo sapiens
gtaatacgactcactatagggcgaattgggccctctagatgcatgctcgagcggccgccagtgtgatggatatctgcagaattcggcttagcgtggtcgcggccgaggtacatttctaaataaatatctttgatctataacccttgaaaatattacagtttatggtgacatgatagagacaagtcaaacagtattataagtgaaaatgaaacatcaatttaaaatgaacaagtgtaaaaacacgcggaactgaaattatagaaaatcaaaacactaaatacacagtaattaaatatctagcactggaatcaccaaatgcatgcgcagtaacacactttcaactgatataaaaagccctttaagattcacataatctaaataaataagcagaaacacaaagggaggtacctgcccgggcggccgctcgaaagccgaattccagcacactggcggccgttactagtggatccgagctcggtccaagcttggg

SEQ ID NO: 7600 - DNA, 656 bp, Homo sapiens
  misc_feature 2, 5, 433, 554, 561, 588, 593, 632, 655: n = A,T,C or G
tnctntcgggccgaattggagctccccgcggtggcggccgaggtacttccataagcttggattttaaacactgatagtatctcatgagtaatgtgtgttttgggagagggagggatgctgattgatatttcacattgtatgaaataccatgtttgaaactcatagcaataatgctatgctgttgtgatccctctcaagttctgcatttaaaatatattttttctttataggaattgatgtataccatgaagtcattgtcagttgtagtagctctgatgttgaatgagatatcatgttttagcattccattttactgactagggtagaagaacacttttcttggctacatttggaggatacccagggagtcttgggtgttccttatctggggaagcaaacatttcactagtctctttttttcatcctttaaatngtaaattaaggattactcaagctcaccattattcaagattgggactcgcttcccagtcgacactctgccctgcctgtcattgctgcaaagagctgctgctttgccaacctaagcaaagaanatacggnttctcttgcattattttcccttttggntgggntgttttctagaaggacctgcccgggcggccgctctaganctagtggatcccccgggctgcang

SEQ ID NO: 7601 - DNA, 635 bp, Homo sapiens
  misc_feature 2, 12, 334, 580, 617: n = A,T,C or G
tnctatagggcnaattggagctccaccgcggtggcggccggtggaccgtgaaagctgtagtttgcaaccctgcgagtatgtctggatcacaggagaatggtcagagtgctcagtgacctgtggaaaaggctacaaacaaaggcttgtctcgtgcagcgagatttacaccgggaaggagaattatgaatacagctaccaaaccaccatcaactgcccaggcacgcagccccccagtgttcacccctgttacctgagggactgccctgtctcggccacctggagagttggcaactgggggagctgctcagtgtcttgtggtgttggagtgatgcanagatctgtgcaatgtttaaccaatgaggaccaacccagccacttatgccacactgatctgaagccagaagaacgaaaaacctgccgtaatgtctataactgtgagttaccccagaattgcaaggaggtaaaaagacttaaaggtgccagtgaagatggtgaatatttcctgatgattagaggaaagcttctgaagatattctgtgcggggatgcactctgaccaccccaaagagtacctcggccgntctagaactagtggatcccccgggctggaggaattcnatatcaagcttatcgata

SEQ ID NO: 7602 - DNA, 619 bp, Homo sapiens
  misc_feature 2, 5, 14, 15, 19, 21, 22, 26, 30, 51, 80, 236, 237, 239,240, 598: n = A,T,C or G
tnctncgttgcaanncagnannaaangggnaactggcgaacaattcctatnctcataagtagctggaagttcaaacagcnccatttcttggtttcctgcaggggtagattcaggaagcagttgtttgggaggacgaaccactgtgggcataattcgattatgaagtgctgtttcttcttcagttgcttcttccagaatccatccaatagcctcaaacattttcagatcaagtgganngnnagagagcactccttcaatttttgtaagtgaatgacaagtagccatacaagcaacaaactgggattttaccaacatctcattgcacacattttcttctggtgaaagaaatcgtgcattttccactcgttgaatcccccaaagatctaaaccatcttcagttagagttccagtcttgtcaaagcaaacaagattgagctgtccacaaatatttattctttgaggactgatacagaaaataccgatttttttcagtcttctctgagcatacacaataccagcagtcattgcagcaggaagtgcagggggcacagtaattgggataatatcaagagactcgataattatgaccccaacttgnacctacaattaacacaaaaac

SEQ ID NO: 7603 - DNA, 501 bp, Homo sapiens
  misc_feature 8, 22: n = A,T,C or G
tgccctancactacttagggcnattggagctccccgcggtggcggccgaggtacacggaaatctggacagtgctgcacagattgatacattagcctttgctttttctctttccggataaccttgtaacatattgaaaccttttaaggatgccaagaatgcattattccacaaaaaaacagcagaccaacatatagagtgtttaaaatagcatttctgggcaaattcaaactcttgtggttctaggactcacatctgtttcagtttttcctcagttgtatattgaccagtgttctttattgcaaaaacatatacccgatttagcagtgtcagcgtattttttcttctcatcctggagcgtattcaagatcttcccaatacaagaaaattaataaaaaatttatatataggcagcagcaaaagagccatgttcaaaataagtcattatgggctcaaatagaaagaagacttttaagttttaatccagtttatctggtgagttc

SEQ ID NO: 7604 - DNA, 658 bp, Homo sapiens
  misc_feature 2, 5, 515, 528, 572, 611, 617, 632, 647: n = A,T,C or G
tnctntcgggccgaattggagctccaccgcggtggcggccgaggtacaaattgttctactgttttaaaaagttttccgcagaacagtgcatttatggcaatgctatgtttaatgagttagggacatcaaatatatagtagttccttattttcagttgtgaaaatgaaatggctaaagcagaagagacgtctattttagtcttttaaaaatgtgtgtgggtggtcttttttcctcagaagcccaaagcacatgtatattttgttatttctccttgctatattcctgagactatactaaaaactttaagaaaaggaacaagaaaaaggtaaattcatgtgttccccactgctgtgtctagaaccaagatcacattatatcattgttaaaattgtgttatctagaaagtgcaatatagggaaaacactctaagaatcttttaaaaacctagtgtttcccttatttgtcagaatatgtggtagtggcatccataagtatcttttaacttgcatttagcnggacaaatagggngatacttatactgatgacaatcatccccatttaatgaccagcantcactgagcgctgtgaaaattcactcagtgataccccgngttggncttgaaggaaaccgnacctgcccgggcggncgctctagaac

SEQ ID NO: 7605 - DNA, 645 bp, Homo sapiens
  misc_feature 470, 481, 484, 488, 492, 502, 516, 527, 534, 555, 558, 559,563, 565, 572, 574, 581, 588, 589, 590, 591, 595, 611, 612,625, 631, 633, 639, 640, 642, 643, 644, 645: n = A,T,C or G
ggagctccaccgcggtggcggccgcccgggcaggtactgatgaacaccaacatgttccagaagacccaagagaaaaatcacaagatgaagtcttgagagatgaccctccaaaaaaagaacatctacgggatacaaagtctacatttgctggcagtccagagcgtgagtccattcacatcctgagtgttgatgagaagaacaagttgggagccaagattatcaaagcagagatgatggggaatatggaattagctgaacaacttaaagttcaacttgaaaaggcaaataaattcaaagaaactataacacagataccaaaaaaatctggggtagagaatgaagaccagcaagaagtaatccttgtcagaacagatcagtctggaagagtatggcctgtgaacacacccggaaaatctctggaatcacaaggaggaagaagaaagagacagatggtttcaacccatgagganagagaaagggntcngatncttncatgatgatnattatctaagcctnaatgattttantcaaaantgaacggatggggaccagctnaannttcntnacagctntntcatgancatggcnnnntagnttttgggaaaaaacgnnggggacttttgcnccctgntnaacttnntnnnn

SEQ ID NO: 7606 - DNA, 431 bp, Homo sapiens
  misc_feature 6, 8: n = A,T,C or G
ggagcncngcgtaatacgactcactatagggcgaattggagctccaccgcggtggcggccgaggtacagcctctcggcccggctaaacatcatcgtcttggtaggccattaccctaccaactaactaatgttccgcacccccatttttaagtgaagctgtgaagctcctttctattactcatcatgcgataaataactatatccggtattagctattgtttccaatagttatcccagtcttaaaggtaggttaggtacctgcccgggcggccgctctagaactagtggatcccccgggctgcaggaattcgatatcaagcttatcgataccgtcgacctcgagggggggcccggtacccagcttttgttccctttagtgagggttaattgcgcgcttggcgtaatcatggtcatagctgtttcctgtgtga

SEQ ID NO: 7607 - DNA, 628 bp, Homo sapiens
  misc_feature 457, 459, 467, 487, 496, 517, 525, 526, 529, 538, 539, 544,552, 570, 571, 579, 581, 582, 586, 587, 591, 593, 594, 595,596, 598, 599, 604, 605, 607, 609, 614, 615, 619, 620, 623,625, 628: n = A,T,C or G
ggagctccaccgcggtggcggccgcccgggcaggtacaagggcaggatggcagcacagagccgccagctctttccccgcccactctcggtgaagcagtgcagcttgcccgccaagtagaacgtcgtgaagccaaggcccgaaaaggcaaaggaggaatggatgctggggaagcttttgcggccctcggacaccagatcggggtcacctgtgcaatgcatttccgagttcatcactccatcttcccactattaatttaatagtgtttgtgcagactccattcaaagcaagagccaaggacaccgctaagaaggcttccttaatttcagtcttgtctgttcgccggataattttcaccacacaaataacagccaggggtgtgaggaaagaaattgcaaacatgaggcgggtaggtatgttatctgattgcaccaaaggatttttatagagccagatctntnctggctgnatgactctttggaacggatncaaaaactntgtgaaaacgaagactgcatngagcaggnnctngcaccaccnntctcnaatgccancttccgaatggttgcagnnaccttttncnntctnnaacncnnnnannccccnngntnttggnnatannaantngan

SEQ ID NO: 7608 - DNA, 545 bp, Homo sapiens
  misc_feature 2, 3, 4, 7, 9, 10, 11, 12, 13, 15, 30, 520: n = A,T,C or G
gnnncgngnnnnngngccgcgaatcgactnctatagggcgaattggagctccccgcggtggcggccgaggtacctctttgccttaaattgctttttagttctaagattgtagaatgatcctttcaaattgtaatcttttctaacagagatattttaatatacttgctttcttaaaaaacaaaaaaactactgtcagtattaatactgagccagactggcatctacagatttcagatctatcattttattgattcttaagcttgtattaaaaactaggcaatatcatcatggatacataggagaagacacatttacaatcattcattgggccttttatctgtctatccatccatcatcatttgaaggcctaatatatgccaagtacctgcccgggcggccgctctagaactaggtggatcccccgggctgcagggaattcgatatcaagcttatcgataccgtcgacctcgagggggggcccggtacccagctttttggtcctttagtgaggggttaaatncggcgcttggcgtaaatcatggcaa

SEQ ID NO: 7609 - DNA, 653 bp, Homo sapiens
  misc_feature 586: n = A,T,C or G
tgtcacagggcgaggtccaccccgcccgccggtcacgctcatagaacttgacttggctggccggggcaggctgcggtactggatgttagaacgggctccaggagccaggaatcctggctctgcactgttggaaacatctaagctagtcttgcgcccatttactggcttgacagggatgcctgaggacttctggatcttgctgagagtggctgaaccaccagtttgcatgacagtggctgtgcctgtggcaggaggaggcttcttgtagccaaaggatcccgaagtggaggggcgagcaatgcccgaggggggcttcttagcatcactcaggcggtcccgaccagcatcagaggaggagcgttggagcccagtattcttcactgcaagcttacccttgtctgtagctttgccctcaggtttgcctgcgactttgagggcactctgggctgtgtgagtgatgggggaagttacagccacaggtggggtcttgcccttcttcagggaaccagggtggcccaggctgatgggctttttcagttctccacccttggatgaatcatcacagctctcaggccgctccctccgncacttagaagtcccaggttccatcttcaggctaccactgtcgtactccagttttttaggggctttct

SEQ ID NO: 7610 - DNA, 601 bp, Homo sapiens
  misc_feature 3, 4, 19, 26, 29, 37, 60, 577, 581: n = A,T,C or G
canncgcgcattaaccctncactaanggnaacaaaanctgggtaccgggccccccctcgngtcgacggtatcgataagcttgatatcgaattcctgcagcccgggggatccactagttctagagcggccgcccgggcaggtacaagtctcataaactatctcagcactgcatccgtatttgtgggcacctgtgccaaaagcaccttgatatgtttcttagtgtaattggccagagatggccaatagatgtcttctcaagtgtttttgatcaccaggtcagtgctattgggagtgatataatatggtggttcctaaagttatttttggtctcttttttttttttttaagtgctatgatagattaacaacacctgccttggatgcaggaattaggtggggctgcacacgtgcatggtattttctatccctatgctaggttttgtttctgttggctgtcttcactagacttgagatgacttgatttacagtaatccctatgtgatgtaactagtctagaccttcccttctccgcaattcccagctccaggtttcagaaagtatgccacactcaacccttntctncagttcatcctgtattaatt

SEQ ID NO: 7611 - DNA, 610 bp, Homo sapiens
  misc_feature 4, 20, 40, 394, 425, 460, 468, 469, 475, 476, 482, 484, 491,498, 499, 501, 502, 508, 510, 514, 516, 517, 518, 519, 523,524, 526, 528, 529, 531, 533, 535, 537, 541, 544, 545, 546,547, 549, 550, 551, 552, 553, 554, 555, 556, 557: n = A,T,C or G
  misc_feature 559, 560, 561, 562, 563, 564, 565, 566, 568, 570, 571, 572,573, 574, 576, 577, 578, 581, 582, 583, 585, 586, 588, 589,591, 592, 593, 594, 595, 596, 597, 598, 599, 600, 602, 603,604, 606, 610: n = A,T,C or G
tttngggtacactcacctgnttaccccacccgggtggcanaatcgtagggcccgcggccgcttttttttttttttccatttatttgtgtctttctttcatcagtgtttcatagttttcagtgtacatacagatcttttactgccttggtgttaaatttattcctaagtaagtattttttttatgctatcataaatggcatcttaatttttcagttaggtcattattttcattatttatgtataaaaatgctaatgctttttgtatgttgattttgtattctgcaactttactgaattcacttgagttctaacaaacagattttttttgtgtgtgtatctttggggtttttacatagagcccagttttagttttaatagaaatgtttataatagnggatggaataaagactttgtatgattactgngaaccactatctctctctatatatatagatagatntgaatgannatgtgnntaaatncntaaagcnaaggctnngnnaaacantnctcntnnnngctnncngnncntncngnggcnctnnnngnnnnnnnnntnnnnnnnngncnnnnntnnnccnnngnngnngnnnnnnnnnnannnanaaan

SEQ ID NO: 7612 - DNA, 642 bp, Homo sapiens
  misc_feature 3, 8, 561, 575, 589: n = A,T,C or G
ttngggcnattggagctccccgcggtggcggccgaggtattcttgtttctatgaaggaaaagtttggctactaacagtagcattgtgatggccagtatatccagtccatggataaagaaaatgcatctgcatctcctgcccctcttccttctaagcaaaaggaaataaacatcctgtgccaaaggtattggtcatttagaatgtcggtagccatccatcagtgcttttagctattatgagtgtaggaaactgagccatccgtgggtcaggatgcaattatttataaaagtccccaggtgaacatggctgaagatttttctagtatattaataattgactaggaagatgaactttttttcagatctttgggcagctgataatttaaatctggatgggcagcttgcactcaccaatagaccaaaagacatcttttgatattcttataaatggaacttacacagaagaaatagggatatgataaccactaaagttttggtttcaaaatcaaactaattcttacagcttttttattagttaggcttgggactagtggtaagtatntggcagagaacagntaatcccctaaggncttggacaaaacagaagaaaaaccaagcctcctcggcctagtctttttctagc

SEQ ID NO: 7613 - DNA, 737 bp, Homo sapiens
  misc_feature 2, 3, 5, 7, 8, 729: n = A,T,C or G
gnngntnntgccgtcgtaatacgactcactatagggcgaattggagctccaccgcggtggcggccgcccgggcaggtactgccagatctgtatcactccggagcaacgacctgtctctctgaatgatctctggcatggtaaaagagttaactgtatttcaaaaggtgaaacaaaactttttttgctttgttatgcatgtttcaaattgatcaatggttcaggcctggagtatgcatcagaattatctgtgaagcttagtgaaagtgctgatgccagagcccacccaaagcttactgcttcagaaccactggggacctggcagttctgatgtgcacgactagtcaagaatcctttaaaggctgataaagcaatcttgaaatcactgtcaatgcaaaagtggatgttccttattaataagaactcaaaaaataaagtacctcggccgctctagaactagtggatcccccgggctgcaggaattcgatatcaagcttatcgataccgtcgacctcgagggggggcccggtacccagcttttgttccctttagtgagggttaattgcgcgcttggcgtaatcatggtcatagctgtttcctgtgtgaaattgttatccgctcacaattccacacaacatacgagccgggagcataaagtgtaaagcctggggtgcctaatgagtgagctaactcacattaattgcgttgcgctcactgcccgctttccagtcngggaaacc

SEQ ID NO: 7614 - DNA, 420 bp, Homo sapiens
  misc_feature 5: n = A,T,C or G
gagcnccccgtaataccgactcactatagggcgaattggagctccaccgcggtggcggccgcccgggcaggtacgcgtttcttgtaaacacgaggcaccccaagataagaagacagatagagcaagggatggacatggtcatctcctcagtgattggagaaagttaccggcttcagtttgattttcaagaggcagtgaagaatttcttccccccaggaaatgaagtggttaatggagaaaatttaagctttgcatatgaattcaaagctgatgcattatttgatttcttctattggtttgggctcagtaattccgttgtaaaagtaaatggaaaagttctgaatttgtcaagtacctcggccgctctagaactagtggatcccccgggctgcaggaattcgatatcaagcttatcgatac

SEQ ID NO: 7615 - DNA, 622 bp, Homo sapiens
  misc_feature 213, 229, 361, 495, 507, 537, 546, 590, 615: n = A,T,C or G
ccgtaacgaaattggtgcttattttttacacttctctcttgtggctctcttgtggtgctatctatctgttttaaggtctccttgaaggcgcactggggaccctggccatgcctcgttctccctgctttctttatcctgttattgcctccacagtctgttgccaaggactctaagatcaatgcacgtcactttcctttccactgggcaggatanccaagcacactccctnctgcgctctcccgccccggtgcgtccactcccgagggctgttatgaggactgggttgtgcctacttgatttgaaaacacacacaagcaataaaaagcctcttcctgcattgtctgtggtgtgaccatagcanattatatttggttcctgaatgtttgtggtgctaatttctgtgtttgttccaagccgttcagtcatgccatgcgctgcctcggtagatggagtaatgtcaatgaactccatgaagtctctccaagggctggctgnacacgtcttttncaagtacctattggattccatttaaatgtnctggatgcnaacgtaacggttcagactcgggccgggaagtccctttggggaancctttctggccatcaagtcgggggnttccgct

SEQ ID NO: 7616 - DNA, 637 bp, Homo sapiens
  misc_feature 518, 523, 564, 589, 593, 595, 596, 603, 605, 611, 618, 619,620, 621, 622, 631, 632, 633, 634, 635: n = A,T,C or G
gcgcaataaccctcactaaagggaacaaaagctgggtaccgggccccccctcgaggtcgacggtatcgataagcttgatatcgaattcctgcagcccgggggatccactagttctagagcggccgaggtactttacattgataattgcaatattgaattttgtaaaactttaaatattttccttaaaaaaggttagtgatttttttattatttttgggaaatgtggcgatccaacgattatagcattaatgcaaccattccaggtccctaaggttgagttaacattaatatgtaagtaagtgttcgcatttcatgtctacaataaggtagattgtgaacttcccgtatctctgaattttagcaaaaattccatgagataatttacagtaatgtcaaatttttggagtgcaaactcatactctacatttggatcacttttttgctttgagttacctgacttgagaatacaaggcaatttttctttcctaaatccttggaaaaatatttttgcagtaagncttgngtctccttttttttttttacctgcccgggcggccgcaccgngggggggctccaattcccctatagngagncnnatttacncncgctcnctggccnnnnntttacaacnnnnnga

SEQ ID NO: 7617 - DNA, 657 bp, Homo sapiens
  misc_feature 1, 548, 549, 552, 562, 563, 566, 567, 569, 575, 588, 595,596, 597, 602, 604, 609, 610, 611, 612, 616, 619, 624, 629,631, 632, 633, 637, 639, 640, 641, 642, 646, 650, 654, 655,657: n = A,T,C or G
nagcgcgcaattaaccctcactaaagggaacaaaagctgggtaccgggccccccctcgaggtcgacggtatcgataagcttgatatcgaattcctgcagcccgggggatccactagttctagagcggccgaggtacagtcaccatctaaacagaggagaaaaacatacttgtctccatttggaaagataaagctgatcttatacacttctgaagttggccgagaggtgttagagagatcttccaaactctgcgactccccctgggcggccagctctgcggccacctgcccgggcggccgccaccgcggtggagctccaattcgccctatagtgagtcgtattacgcgcgctcactggccgtcgttttacaacgtcgtgactgggaaaaccctggcgttacccaacttaatcgccttgcagcacatccccctttcgccagctggcgtaatagcgaagaggcccgcaccgatcgcccttcccaacagttgcgcagcctgaatggcgaatgggacgcgcccctgtagcggcgcattaagcgcggcgggtgnnggngggttacccnncanngngaccgntacacttgccagngccctannncccgntnctttnnnntttnttnccttnctttntnnncacntnnnncggntttncccnnan

SEQ ID NO: 7618 - DNA, 443 bp, Homo sapiens
  misc_feature 5, 218, 280: n = A,T,C or G
tcagncccagtgtccgagctcggatccctagtaacggccgccagtgtgctggaattcggcttagcgtggtcgcggccgaggtacaaaataacatcataaataacataaatgagaagttttcaagtatttcaatgtgccttgaaaagtttcaaacagtaattctcacaattggttagacaatcatttttttttcttttcttttcctctcatttagtctnagagcctaaaaagaaatgcctccagtctctgttagccccgatgtttggaatgaaattaacancgattctaccttaaaagagaaaacttatgtgggcttttcaaatttgtgaaaatttgttccctcttataaaaatataattctttcccctgctgctggtttataaatatgggcatatagcccagagccattataaagaaaaaacaaccaaccacaatgaactaag

SEQ ID NO: 7619 - DNA, 666 bp, Homo sapiens
  misc_feature 666: n = A,T,C or G
gattgaatacgactcctatagggcgaattgggccctctagatgcatgctcgagcggccgccagtgtgatggatatctgcagaattcgccctttcgagcggccgcccgggcaggtacaaaataacatcataaataacataaatgagaagttttcaagtatttcaatgtgccttgaaaagtttcaaacagtaattctcacaattggttagacaatcatttttttttcttttcttttcctctcatttagtctcagagcctaaaaagaaatgcctccagtctctgttagccccgatgtttggaatgaaattaacaagattctaccttaaaagagaaaacttatgtgggcttttcaaattgtgaaaatttgttccctcttataaaatataatctttcccctgctgctggtttataaatatgggcatatagcccagagccattataaagaaaaaacaaccaaccacaataaactaaggagcctcatctgatggctaaggttctcaggaaaaaatgagaagagcaccttgatcaggaagggaaaaaaggatagaggataaaaacagtaacctttaacttctatgccctcactcagccagtaacttaccggcaggtgttgctggcaaggccttaagctgtattttcttcattaagttgaacatcctgtctgccn

SEQ ID NO: 7620 - DNA, 654 bp, Homo sapiens
  misc_feature 556, 557, 559, 560, 565, 571, 578, 579, 580, 586, 603, 611,620, 623, 630, 636, 639, 643, 645, 646, 648, 649, 652: n = A,T,C or G
actactatagggcgaattggagctccccgcggtggcggccgcccgggcaggtacttggagctgaccaaacgggaggtcgaatacattgccctgtcaagggacaccactgaaactgatctcaaacagcgacgagagatccgtgcaggcacagccttttacattgatcagtgtgcagttcgtgcagccacagaaggcagaactctcattttggaaggtttggaaaaggcagagaggaatgttttgcctgttttgaacaacttgctggaaaacagagagatgcagcttgaagatggacgcttcctgatgtctgctgagcgttacgacaaacttctccgagatcataccaaaaaagagttggattcttggaaaattgtccgagttagtgaaaatttccgagtgattgccttgggcttgccagtgccaaggtatttctgggaatccattagacccccctcttcgttctcgattttcaagccagggatatttattatttacccttcaaggaccaacttaagttgttatattcaattggagccaatgtttctgctgagaaagnntnntcaantcttgnactttgnnncaactnttgtgtttccaagaatnttatactnttggacttncanactttanctttanatngttnannanntgngg

SEQ ID NO: 7621 - DNA, 818 bp, Homo sapiens
  misc_feature 2, 3, 16, 529, 689, 691, 709, 713, 720, 726, 739, 741, 742,746, 749, 755, 759, 760, 761, 767, 768, 774, 775, 777, 783,790, 791, 797, 798, 799, 800, 801, 802, 803, 804, 805, 806,811, 814, 815, 816, 817: n = A,T,C or G
anncctatagggcgantggggccctctagatgcatgctcgagcggccgccagtgtgatggatatctgcagaattcgcccttagcgtggtcgcggccgaggtactttgcattaactgataatacctcagctgcggggttaaagttttcccagtatagagagactgtcactaggaacattgtattgatttattcaggtcattgagatcttctagatgtattttaaaaagaatgctttttggttatgtgttgctaccacagttaacactccataatgttcatgtcagccaaagaggactaaccaaagctgaaatctcagagaacaatttgctttactaagctgagtcaacttgagagcgaacttctaacaatgccgcactgtagtgtggctggttctaccactatgactttaaaacatgtttatatcatttttaatttttatgatacggtagtgtcagggagaaatgtaatgttctatatgaaattcctttttcaagtttgttcattaataacagttattaatttaaatcancgttagagtttgtgctgctgcaactgctgtgaaaatttctctgagtaattctgatttgtgaatgatcccagaccaaccctgagattttgtcaacctgattaagtcaatatgaatgattaaaaagatgtgagaacccaaaaaaaaaaaaaaaaaaaaaatncncccccgggggggcccttnaaangggaaanttcccncccccgggggggncnngttnttngggganccannncttggnnccaaanntngggggnaaaaaanngggaannnnnnnnnnttttnggnnnna

SEQ ID NO: 7622 - DNA, 597 bp, Homo sapiens
  misc_feature 2, 9, 14, 15, 138, 141, 145, 146, 148, 149, 151, 152, 162,163, 172, 184, 185, 200, 201, 202, 203, 204, 218, 222, 236,244, 245, 248, 250, 253, 254, 256, 259, 262, 267, 269, 274,275, 279, 285, 286, 290, 294, 296, 297, 300, 306, 309: n = A,T,C or G
  misc_feature 310, 312, 313, 317, 322, 323, 335, 339, 340, 349, 351, 354,355, 359, 360, 361, 362, 364, 367, 370, 374, 376, 377, 381,389, 393, 403, 404, 405, 406, 409, 421, 434, 450, 451, 452,454, 455, 456, 459, 462, 463, 467, 468, 469, 472, 474: n = A,T,C or G
  misc_feature 475, 481, 485, 487, 493, 496, 504, 519, 523, 524, 525, 526,527, 528, 529, 535, 536, 540, 544, 545, 546, 555, 556, 560,565, 575, 576, 579, 580, 582, 583, 590, 591: n = A,T,C or G
anacctacntactnngagggtcgacattgggccctctatagcatgctcgaccggccgccagtgtgatggatatctgcagaattcgcccttagcgtggtcgcggccgaggtactttttttttttttttttttttttttnggnaaannanncnntttttttttnnttttttttnttttttttgggnnaaaaatttttttttnnnnnttttttcccaaaantttngggggaaaaccccnaggggggnnaantnccnnanccnttnggggnanccccnncccngggggnngggncccntnnggnaaaaanccnntnngggnaaaanncccccccttttnaaannccccccccngnaanntttnnnntnaanccntttncnncccntttttttngggnaaaaaaaaannnnttngggggggaaaangggggggggcttnccccccaaaaaaaaannngnnnccnttnnaaannnccntnntttttnaaancnattttnccntttttttnaaaaaaatttttttngggnnnnnnnggcccnnaaancccnnngggggaaanncaanttggnaaaaccccannaannannggggggnngggggg

SEQ ID NO: 7623 - DNA, 729 bp, Homo sapiens
  misc_feature 10, 11, 648, 713: n = A,T,C or G
gattgttcannacagtaatacgactcactatagggcgaattgggccctctagatgcatgctcgagcggccgccagtgtgatggatatctgcagaattcggctttggagcggccgcccgggcaggtctttaactcaatttaatataacaagaaatcgtaaaatacttataacctatcttagagaaatgagtgctggttttgagagttgttttttaactgaaagattatttctagatgggtagtgctttgtgctggtttctgcttccatatatttcccagtcattttaattagagaagatactctatggtagaactaaggcctttcctttcttggccaaagtctttaccctatttaaccctttgtatatttctgactgctcactgttcatattataggggaccagatttgtaatatagaattctccataacatgaatgaaattaattctgtccaagccagcatggtggcttcatattaagtagtaacagaagtctgaacaattggataaatttgacttccaagacagctaaacttttcaactgcaattttaaaaactacactacactgttatagttaatctgacaaaaatgtcctcaaagagtacctcggcccgcgaccacgctaagccgaattccagcacactggcggncgttactagtggatccgagctcggaccaagcttggcgtaaatcatggcatagctggtttcctggngtgaaattggtaatcc

SEQ ID NO: 7624 - DNA, 534 bp, Homo sapiens
  misc_feature 3, 4, 5, 10, 52, 117, 120, 330, 363, 385, 475, 516: n = A,T,C or G
ggnnncgtgnccctattcgactactatagggcgaattggagctccccgcggnggcggccgcccgggcaggtactgctagctggaaaaaccatatagaaaacatgatgaccatgttgngtnggtggtgctgaggctgtgaactctttggcttccttctgatggccctcttgagaacaatctgtacctcggccgctctagaactagtggatcccccgggctgcaggaattcgatatcaagcttatcgataccgtcgacctcgagggggggcccggtacccagcttttgttccctttagtgagggttaattgcgcgcttggcgtaatcatggncatagctgtttcctgtgtgaaattgttatccgntcacaattccacacaacatacnagccgggagcataaagtgtaaagcctggggtgcctaatgagtgagctaactcacattaattgcgttgcgctcactgcccgcttttcagtngggaaacctgtcgtgccagctgattaatgaatcggccaacncgcggggagaggcggttt

SEQ ID NO: 7625 - DNA, 640 bp, Homo sapiens
  misc_feature 8, 591, 600, 617, 632, 633: n = A,T,C or G
gcgcaatnaccctcactaaagggaacaaaagctgggtaccgggccccccctcgaggtcgacggtatcgataagcttgatatcgaattcctgcagcccgggggatccactagttctagagcggccgaggtactccaggtctcactcactgtttctgatatgtccctatcatctgttaatcccatcatgtcacgaatttcaaacttccttagcttatcatcaaggttatcctgtgttgtagcttgctcatgttctaacagctgtagagcttcaactccattactgccagaaggtcctgctccaagttctgacacagactctccttctaggtctagggaggacactgaattggagcgatttgaaggaccttcagatattccttccagattatcactgcagagggaaaagcgcaaggttttatcaggtttaccatggagtttgttttcatcaacagggacatctccttgtcctccatccgaaagctgcatgtttaggacctcattttctgacatcatccctggagtaagctggggacctgtacctgcccgggcggccgccaccgcggtggagctccaattcgccctatagtgagncgtattacncgcgctcactggcccgncgttttacaacgtcnngactgga

SEQ ID NO: 7626 - DNA, 603 bp, Homo sapiens
  misc_feature 25, 29, 45: n = A,T,C or G
ccacgcgtccggcaagccagggggnaagnagatccctttgccgantgtaccctctagccaacttttgggagcgcttctgtttgcaaagcgctggggatgtgcctgtctctgtgtgacccacgaacgggaagggagagcactggagtaatgacacttctgctgctgctttgattctcaaggctgatctttaaaaccctcgccttgctgacaggtgctttaaaggcagtctgcatcttttcttcccttggtgtgggagaggtaaacactttgatttgctgaaagctgtatggagtatatttgaacagctagtagttagctttgaaagtggaagtgtgaacagacactacttgtgtcgctttgggtccttcactttacccccacagaagtctagaggcgtctgttataaagcgttacggggcgcctgcatgcaggaggaaggacctgtattagctggaaatcatcaggaacccagcttgcctccatctctctgagatgtgctgggtacagcctgcccctcctagttctgtccaccgggaagagccggctggcggcagatccccaggggcagagcccctgctggatcctgggagctcatctttacct

SEQ ID NO: 7627 - DNA, 653 bp, Homo sapiens
  misc_feature 3: n = A,T,C or G
gantgaatacgactcactatagggcgaattgggccctctagatgcatgctcgagcggccgccagtgtgatggatatctgcagaattcggctttcgagcggccgcccgggcaggtacccctttttgcacactgtcagcaaaacacgtccctttgagtatctccggctcaccagccttggagttattggggccctggtgaaaacagatgaacaagaagtaatcaactttttattaacaacagaaattatccctttatgtttgcgaattatggaatctggaagtgaactttctaaaacagttgccacattcatcctccagaagatcttgttagatgacactggtttggcttatatatgtcagacgtatgagcgtttctcccatgttgccatgatcttgggtaagatggtcctgcagctatccaaagagccttctgcccgtctgctgaagcatgtagtgagatgttaccttcgactttcagataaccccaggttttcagatttgactttctgctggtcatcttttcaaagaaaatgaaacgtttaaaagttcatctgataatactgctaccatagttttgttttcactgctcatctcttattaagggttttaaccataaaactgaagcaatttctgtaaagacacaaattgataact

SEQ ID NO: 7628 - DNA, 553 bp, Homo sapiens
  misc_feature 2, 6, 9: n = A,T,C or G
gncgcngcngagggcgaattggagctccccgcggtggcggccgcccgggcaggtacctttaactcaatttaatataacaagaaatcgtaaaatacttataacctatcttagagaaatgagtgctggttttgagagttgttttttaactgaaagattatttctagatgggtagtgctttgtgctggtttctgcttccatatatttcccagtcattttaattagagaagatactctatggtagaactaaggcctttcctttcttggccaaagtctttaccctatttaaccctttgtatatttctgactgctcactgttcatattataggggaccagatttgtaatatagaattctccataacatgaatgaaattaattctgtccaagccagcatggtggcttcatattaagtagtaacagaagtctgaacaattggataaatttgacttccaagacagctaaacttttcaactgcaattttaaaaactacactacactgttatagttaatctgacaaaaatgtcctcaaagagtacctcggccgctctagaacta

SEQ ID NO: 7629 - DNA, 711 bp, Homo sapiens
  misc_feature 5, 7, 10, 12, 648, 656, 662, 664, 669, 680: n = A,T,C or G
ggggncntancngtccggattctttgaatttagtataaaacgtactgagaattaagtttgtacttccataagcttggattttaaacactgatagtatctcatgagtaatgtgtgttttgggagagggagggatgctgattgatatttcacattgtatgaaataccatgtttgaaactcatagcaataatgctatgctgttgtgatccctctcaagttctgcatttaaaatatattttttctttataggaattgatgtataccatgaagtcattgtcagttgtagtagctctgatgttgaatgagatatcatgttttagcattccattttactgactagggtagaagaacacttttcttggctacatttggaggatacccagggagtcttgggtgttccttatctggggaagcaaacatttcactagtctctttttttcatcctttaaattgtaaattaaggattactcaagctcaccattattcaagattgggactcgcttcccagtcgacactctgccctgcctgtcattgctgcaaagagctgctgctttgccaacctaagcaaagaaaatccgcttctcttgcataatttcccttttggttggttggtttctaaaagaccttcagaagctttggggaatgcatgnatgattgntagctntntaccnttaactactgngaggaaaaatgcatgctttggaatactgggc

SEQ ID NO: 7630 - DNA, 751 bp, Homo sapiens
  misc_feature 1, 6, 18, 26, 39, 589, 594, 624, 630, 631, 638, 640, 678,714, 743, 751: n = A,T,C or G
ntattnggatcgacccancccgtccnctccgatatgccnagctgatggagtggctaaagagtacagattatggaaaatatgaaggactaacaaagaattacatggattatttatcccgactatatgaaagagaaatcaaagatttctttgaagttgcaaagatcaagatgactggcacaactaaagaaagcaagaagtttggtcttcatggaagttcggggaaattaactggatctacttctagtctaaataagctcagtgttcagagttcagggaatcgcagatctcagtcatcttccctgttggatatgggaaacatgtctgcctctgatctcgatgttgctgacaggaccaaatttgataagatctttgaacaggtactaagtgaactggagcccctatgtctggcagaacaggacttcataagtaaatttttcaaactacagcaacatcaaagtatgcctggaactatggctgaagcagaggactggatggaggacattatcacggcaacataattgtggccaccactgcctgtttctctgagaaagatagatccgccaatgatgataaatattcgccgcatganccgancgacacctattgccttaggaacaaatgatncttacnncttattntntcaatatcacagttgacgccaatgtgaccgctctccantcacttggaagttggtacgtcaagactgacatcctntacattagcatgaaattaatcaaaaatantgatctcn

SEQ ID NO: 7631 - DNA, 621 bp, Homo sapiens
  misc_feature 153, 546, 603, 616: n = A,T,C or G
tcctatagggcgaattggagctccaccgcggtggcggccgcccgggcaggttttttttttttttttttttatacaaaaagcaacaaggagtttaattctctttttacatggccacaggctctcttcagtcaggggaacttcagctggtgcctntctcttgcagctatgaggcgacagtgtggtgacatgcctcatacagactgtcccagtaagccaggacaagtcaccattaaaatcttgcatgaacagccctgggcacgtgggaatgttaagaaagagccaccgcctccttagtcagcttaaccacagctccaaacgcagtttgtcccagctggcaaacgcctcaaacaccaatcatgcgtcgtgctcctattctgggtttttataaaacacttttatatagagatatagatagcacagtaaatgtgcttctgatgcactctaacatagaggacaggaatacacactgtggggcgccgccccagccatctccacagtggagaaagtgcgagggttaaatacacgtggcggggtggcagacggcangaagttacagagcgccacgctccacgttctttcacgcgactgactcatccaacactnagaactcgccttntttat

SEQ ID NO: 7632 - DNA, 617 bp, Homo sapiens
tatagggcgaattggagctccaccgcggtggcggccgcccgggcaggtacagatttctatttatccatagataggtatctatacatacacatctcaagtgcatctattcccactctcattaatccatcatgttcctaaatttttgtaatcttactgtaaaaaaaagtgcactgaacttcaaaacaaaacaaaaaacaacaacaacaaaaaacaagtccaaactgatatatcctatattctgttaaaattcaaaagtgaacgaaagcatttaactggccagttttgattgcaaatgctgtaaagatatagaatgaagtcctgtgaggccttcctatctccaagtctatgtattttctggagaccaaaccagataccagataatcacaaagaaagcttttttaataaggcttaaaccaagaccttgtctagatatttttagtttgttgccaaggtagcactgtgagaaatctcacttggatgttatgtaaggggtgagacgcaacagtctgactatgagtgaggaaaatatctgggtcttttcgtcagtttggtgcatttgctgctgctgttgctactgtttgcctcaaacgctgggtttaaacaacgttaaactctta

SEQ ID NO: 7633 - DNA, 572 bp, Homo sapiens
  misc_feature 2, 3, 7, 10, 19, 27, 41, 418, 480, 487, 499, 502, 522, 537,544, 545, 557: n = A,T,C or G
gnncganttnaatccactnctataggncgaattggagctcnccgcggtggcggccgtccagggaacagcttggccaagacagtcacaaagtccttgagcgtcttcagctctgctccggccagggacttgtgggctgccagctccacccgcaggaggtagtgtagccctgactccaggtccaccgtgtacctgcccgggcggccgctctagaactagtggatcccccgggctgcaggaattcgatatcaagcttatcgataccgtcgacctcgagggggggcccggtacccagcttttgttccctttagtgagggttaattgcgcgcttggcgtaatcatggtcatagctgtttcctgtgtgaaattgttatccgctcacaattccacacaacataccgagccgggagcataaagtgtnaagcctggggtgcctaatgagtgagctaacttaaattaatttgcgttgcgctcactgcccgnttcaagncgggaaaccttntcntgccattttgctttaaaagnaatcgcccaaccccncgggganngggcggtttggntttttgggccccttt

SEQ ID NO: 7634 - DNA, 899 bp, Homo sapiens
  misc_feature 9, 35, 62, 594, 596, 663, 682, 687, 746, 748, 770, 777, 783,787, 796, 802, 811, 824, 827, 851, 859, 863, 871, 874, 898: n = A,T,C or G
cagacggcnttacgactcactatagggcgaattgngccctctagatgcatgctcgagcggcncgccagtgtgatggatatctgcagaattcggcttcgagcggccgcccgggcaggtacagttgagttttgcttctttataaactgtctgttaaaatcaggggttgctgttagactgtcaagcagaagtgatggatgttcaaggagcaggttgccccaaagtgttttctaactttcaagtagagaactttatgctctaataagaaaaatacaactcattcttaaccacccccccaaaacagagaaaacacatacatttatgcattttaaagataaaaagtagtttctcaaaaaaatctgaagttctctgaaaaccagcttattaaaagtgctgttttgtggtgaaaattgaaaccaaatccactcacatttcctatcgggtcttgaaattcttggtggtgtgtcaccattccactagatggcagtgttgcttactgagtgtcaatggcttttttccccgtaaatggaatcatgtttttctcccccaaagtacctcggccgcgaccacgctaagccgaattccagcacactggcngncgttactagtggatccgagctcggtacccaagctttggcgtaatcatgggcatagctgtttctgtgngaaatgttattccgctcanaattncccacaacataccaagccggaagcattaaaggggaaaagcctgggggggcctaatgagngngctactcacattaatggggttngctcacngccccntttncagtcgggnaacctntgtgccacntgcattaatgaantcngccaccccccgggggagaggcggntttgcggntatngggccctnttncctttcttggttaatggactgggng

SEQ ID NO: 7635 - DNA, 528 bp, Homo sapiens
  misc_feature 2, 4, 14, 17, 19: n = A,T,C or G
gncnttgtcgatcncancnactactatagggcgaattggagctccccgcggtggcggccgaggtttcatggtcaagctctaagacacaacgagctctgttattcaagaaatcaattccagtggatttccagttccaattcctgagaactagggtaagggggagagctaatggttgcttcctaaggccttctgggtttattagttccatttcaggacatgacaagaaaatgtacctgcccgggcggccgctctagaactagtggatcccccgggctgcaggaattcgatatcaagcttatcgataccgtcgacctcgagggggggcccggtacccagcttttgttccctttagtgagggttaattgcgcgcttggcgtaatcatggtcatagctgtttcctgtgtgaaattgttatccgctcacaattccacacaacatacgagccgggagcataaagtgtaaagcctggggtgcctaatgagtgagctaactcacattattgcgttgcgctcactggccgcttttcaa

SEQ ID NO: 7636 - DNA, 609 bp, Homo sapiens
  misc_feature 2, 3, 6, 15, 18, 608: n = A,T,C or G
gnnatntgccagctnccncgcgtccgtatgagacatgaagcattggctcagaagtagagggagaagaggaacccagttcccttgacttcccttttgagagcacacgttctgctgggtagctcaattgccagcctctgtcatgagaaggtatagccccatcttgatagaagagttactccgagctttatcatggaccagaggaaaaccagaaaactgaaaacattcctctgtcttgtggccagtttggcctttcactgcactattctgatggtgcctgactgaatccaaatatcctagctggctcttactatttttcacaaatgagtattcacatataagagatgaacatccatgtgagatcatcccaatcagaatataagactcaaggagtttgacttggtggccaatacctgccttccaaagagatcctacctttgcagatttgctcctttcccattgccttgaaggtctggcaatccctgttctttcatttgacaaggacttactgaggtactcactatatacaaatattagggtaaaacaggacacacacacacacacacacacacacacacacacacacacacacaaggacctgggccccttang

SEQ ID NO: 7637 - DNA, 418 bp, Homo sapiens
  misc_feature 5, 7: n = A,T,C or G
gagcncnccgtaataccgactcactatagggcgaattggagctccaccgcggtggcggccgaggtacacacgaaagtgtgtatttttacttccaaagtgtgataggtatattggccttttctaaaagaaataaaaacaaaaagttaaaatattgaaagtttaaatacttctttcacagaaataaactattcaattttaaaaggtagagagagagaaacattttattctttctatcatgaacatcagtcaaccaagcttcacattttgggcaggattttttaagtataaattttttaagaacttattttattttaaaaaaaggaagaacaggtttattttggcagaaaagtaaaatagagaatatgcaaaatttgtctttaagattggcatacaaaatttaaaaacacagtacctgccc

SEQ ID NO: 7638 - DNA, 632 bp, Homo sapiens
  misc_feature 509, 570: n = A,T,C or G
tatagggcgaattggagctccaccgcggtggcggccgcccgggcaggtacaactatatatacatgtgcatatatatgtaaatttatatttatatataatatctttatatagatagatatctgcagacaggttattgattatagagacccaagaaagcaactcaataattgttcaaagttttcctcactgactgctggtgtgtagtttaagaagcccccatttgtttgcactcagaatgccttatcttcttttaatggaacacttgatgtggaattttaagtctgagaagtgaggtgccttctgaagaagagattttagagactcccttcctctataagttggaaatgaccagaagtcttaagtagacgacagttagctgactttgacattgtaggacgtaatcagcttttaaccaaattatagaactggtaaagggtaagatcaaatttgccaaaaaaataaaatattctccaatacaggtctctcttttaaggtggattacaattcangagctccggctttattccttgaaatatcaaacaagcactccctgtcttgtctttctaaaangccgatgggcctgtgcattcttgaataataacccatggactttgtgtcaagcgttggccctc

SEQ ID NO: 7639 - DNA, 691 bp, Homo sapiens
  misc_feature 30, 32, 36, 42, 47, 48, 49, 76, 146, 418, 520, 530, 540,543, 548, 565, 570, 582, 584, 585, 590, 591, 592, 593, 599,600, 601, 608, 617, 618, 621, 622, 627, 629, 630, 631, 633,634, 636, 644, 647, 648, 649, 650, 654, 655, 658, 660: n = A,T,C or G
  misc_feature 661, 663, 664, 670: n = A,T,C or G
aaagagcttttcgtgatacgaactacactntnatgntcgatnttggnnnctccaccgcggtggcggccgcaccggnacaggtttttttttttttaagtttaaaattttaatatttataaatttaaaaaattttacacgtgctgagnggtagcagtgctaacatttttgtgaccattaaaccacaaactcactgcatagagcttctttctttgtacctcggccgctctagaactagtggattttttgggctgcaggaattcgatatcaagcttatcgataccgtcgacctcgagggggggcccggtacccagcttttgttccctttagtgagggttaattgcgcgcttggcgtaatcatggtcatagctgtttcctgtgtgaaattgttatccgctcacaattccacacaacatacganccgggagcataaagtgtaaagcctggggtgcctaatgagtgagctaactcacattaattgcgttgcgctcactgcccgctttccagtcgggaaacctgtcgngccagctgcnttaatgaatnggncaacncgcggggagaggcggantgcanattggtacgctntnncactnnnnagagtnnnctgactngttaaactnngtnntttcntnnncnncntcctggtngtnnnnactnntantnncnntaattnaaaaaaaaaaaaaaaaaaaat

SEQ ID NO: 7640 - DNA, 689 bp, Homo sapiens
  misc_feature 534, 580, 605, 656, 665, 672, 681, 683, 689: n = A,T,C or G
gcgattggagctccccgcggtggcggccgaggtactttacctcatttcctaccaatcattttaagagaatttggttgtatttcaaagaacaaaacaacacaatttctgtcctgctgtttattttagcggtggtcgcggccgaggtacggatacaattccgctgagttagattccaaattctaacctctccatcacacgccccagaaaggacagtagccagcttctctggatgctttgccaagcaattgactccatcacggtgaccatccagcgaagcaaggaatggttttgcaaatactcgttccagtttggtagcatttaaagctcttatatattctcgtgggacctcaaaaggatgtaaagcaggatcatagtttcttggaactctctgtaagtccaacttggtttcgcggacataattgtccggattccggctcagcatcttcaccttcatctcggttgctcttccggccgctctagaactagtggatcccccgggctgcaggaattcgatatcaagcttatcgataccgncgacctcgagggggggcccggtaccccagcttttgttccctttagngggggtaattgcgcgcttggcgtancatgggcatagctggttcctgggggaaattggtatccgttacaattccacncaacatacnagccggngcataaagngnaagccn

SEQ ID NO: 7641 - DNA, 556 bp, Homo sapiens
  misc_feature 2, 3, 8, 9, 500, 527, 528, 529: n = A,T,C or G
gnngccgnnactatagggcgaattggagctccccgcggtggcggccgcccgggcaggtacttacatgggtgttttgatctctgttctttcatactacatttgaacagggcaaaatgaactaactgccatgtaggctaagaaagaaatgctaacctgtggaaagttggttttgtaaaattccatggatcttgctggagaagcatccaaggaacttcatgcttgatttgaccactgacagcctccaccttgagcactattctaaggagcaaataccttagctcccttgagctggttttctctgatggcacttttgagctcctaagctgccagccttcccttcttttcctgggtgctcagggcatgcttattagcagctgggttggtatggagttggcagacaggatgttcaacttaatgaagaaatacagctaaggccttgccagcaacacctgccgtaagttactggctgagtgagggcatagaaagttaaagggtactgnttttatcctctatccttttttgctttnnngacaaggggctcttctcattttttcct

SEQ ID NO: 7642 - DNA, 554 bp, Homo sapiens
  misc_feature 2, 3, 5, 493, 513, 535, 545: n = A,T,C or G
gnngngccgaacactactatagggcgaattggagctccccgcggtggcggccgaggtacttacatgggtgttttgatctctgttctttcatactacatttgaacagggcaaaatgaactaactgccatgtaggctaagaaagaaatgctaacctgtggaaagttggttttgtaaaattccatggatcttgctggagaagcatccaaggaacttcatgcttgatttgaccactgacagcctccaccttgagcactattctaaggagcaaataccttagctcccttgagctggttttctctgatggcacttttgagctcctaagctgccagccttcccttcttttcctgggtgctcagggcatgcttattagcagctgggttggtatggagttggcagacagggatgttcaacttaatgaagaaatacagctaaggccttgccagcaacacctgccgtaagttactggctgagtgagggcataaaaagtaaaggntactggttttaatcctcatncttttttccttccctgaacaangggctctttnttatttttt

SEQ ID NO: 7643 - DNA, 625 bp, Homo sapiens
  misc_feature 23, 31, 36, 625: n = A,T,C or G
gcgcattacccctcactaagggnaacaaagnctggngctccaccgcggtggcggccgaggtacagtaaacattattcagtgagagatcagaaggaaacaaatggcatcttttcagaacgctgtcaactgttcccacaacccaagtctgtttttccaagttgcacaagtgcttggaataactctgaaacaattctcttcagagtttaaaggcttcagagtataggtgatgcttcctaaaacaagaagcctgtattaacatcacaaattggaactcattccaaagcctcttcttagagaaaaaaaaaataaagaaataaaaaataaaaaatgtaaagaaggtcatgaaaaattcacatgcagctaattatcgtaaaaaatatcaaacacacacgcaaaaatctcaaaaagcaatttcatatatttctaagcctgagacgttccttatcagaaagaaagattctacaccatagaaaagacagcattacaacatactagtatgaaaatctgctgatgtattttacttcttattctatttcatacctatcatttatacagtttgcctcctataaattaaaagacgctattaggaggcttagacaaaaaagtggctccaaagctggtttan

SEQ ID NO: 7644 - DNA, 601 bp, Homo sapiens
  misc_feature 1, 434, 593, 595: n = A,T,C or G
ntaagggcgaattgggccctctagatgcatgctcgagcggccgccagtgtgatggatatctgcagaattcggctttcgagcggccgcccgggcaggtacagcattgatgaacactttcagccgaagcagattgtcaagtctcttatcccttcgtggaacaaactggttttctttgaagtatctcctgtgtcctttcaccaggtgtctgaagtgctgtctgaagaaaagtcacgtttgtctataagtggctggtttcatggtccatcattgactcggcctcccaactactttgaaccccccatacctcggagccctcacatcccacaagatcatgagattttgtatgattggatcaaccctacttatctggacatggattaccaagttcaaattcaagaagagtttgaagaaagttctgaaattctcctgaaggngtttcttaagcctgagaaattcacgaaagtctgtgaggcttggagcatggacatgtggaatggagcagccgaggtcccctaacaaaaggtttatgagaaagctgaggagagtaagcttcctgagatattgaaggagtgcatgaagtaattcgctctgangnactatc

SEQ ID NO: 7645 - DNA, 656 bp, Homo sapiens
  misc_feature 3, 4, 7, 9, 163, 210, 213, 220, 230, 239, 243, 250, 253,256, 258, 260, 263, 286, 287, 294, 299, 301, 307, 308, 323,328, 332, 336, 340, 344, 348, 353, 360, 361, 363, 370, 392,401, 418, 420, 430, 438, 443, 447, 457, 458, 461, 463: n = A,T,C or G
  misc_feature 469, 477, 485, 490, 494, 500, 511, 521, 529, 531, 536, 541,542, 545, 556, 561, 562, 566, 578, 580, 583, 588, 600, 602,604, 605, 607, 613, 617, 626, 637, 647, 648, 649, 653: n = A,T,C or G
gtnngantngccgcgaatacgactactatagggcgaattggagctccccgcggtggcggccgcccgggcaggtacattgtggtaggtccaggaaatatgacattttcccccttgatgtgttattgttgttgggtggggtgggcattttgtttatttgtttggnggcaatcagtggtagtagggagtgggagggcttatataggtttttcnagntattaangggacatatngtgacgttntacnttttacnttntanancnttnatatttaccagtttcatacttcnntctaaanctagnangatccnnactacatgaatgaancctantatnaacnttantganaccnctatncctttanngncagaccngtacccacattttttttatccnttttagctnaagggtttaaattcttncnttttggaaanaatcatgnaacanatcntattactctnngtnanaaattnttaattcnttttcacnaattntcanttcaantttacttaccngttaaacagnaatctttncnccacnggtannggnattaaatgatntttgnncacncaacataaattngnttntttgnataactgcaccntncnncnaatagnaaantttattgtnccataatgatntaaatgaatnnntatnacc

SEQ ID NO: 7646 - DNA, 407 bp, Homo sapiens
gagcgcgcgtaataccgactcactatagggcgaattggagctccaccgcggtggcggccgcccgggcaggtacaataaagttcacccaccctgcactttggcccttagatcaatcctaagtagccattgccagtaggccaagtttaatcagaggacagtgcctaccagtaaatactgaatagttacaatagttatgtccatccaaccagtagcagatgaacagctaatacatcatgatgctatgctctcctaacagggtcccctcagatcctcagtgagcacataaagaaagggaggtcatatcccttacatctctaccaggtattaacacctaactactctctagccagaggcaattccctttatttccttactctcgtcgtcttctctttagcccaatctcctga

SEQ ID NO: 7647 - DNA, 558 bp, Homo sapiens
  misc_feature 2, 8, 9, 12, 441, 448, 464, 480, 487, 493, 500, 507, 515,532, 543, 546, 554: n = A,T,C or G
gntgagtnnacnctacttagggcgaattggagctccccgcggtggcggccgcccgggcaggtacataacatttcaaatataagtggaaggatcatcagtagtgttatcaaaatgcataatacagaaactttttaagaaaggataaaaaattacactcaggacccataactcttcctcattataagcatatgtagtgattcattcatgcaggtttttatatgtagataggatttttttttccttttcaagaattccattgtagccatgagatgaaaaatgtattatggtaatggtatagctttcttctattttgcttttagtgttaggtttgctaaaagcttatttaaaattcccaactgacataatgtgttttcaataaggaggacgctgcctactccgggagcggggcccgggtccctggagcaacctcggccggtttanaactagngggatcccccggctgnaaggaatttcaatttnaagcttntcgtanccgccanccttgangggggggncccggacccactttttnttccctttagnggngggttaanttgc

SEQ ID NO: 7648 - DNA, 506 bp, Homo sapiens
  misc_feature 3, 4, 5, 6, 7, 8, 9, 10, 11, 12, 13, 15, 18, 34, 45, 70: n = A,T,C or G
ggnnnnnnnnnnnanggnctagctgtctcctggngaaaagggccntctagatgcatgctcgagcggccgncagtgtgatggatatctgcagaattcgcccttagcgtggtcgcggccgaggtacaaacagtagaacaatactgacaaatgcaaacttagtcacatgtgctttaataactgacaatacattcaagcaggtttttctaattcaagtgtatagcacatattcaaataataggaaacaaatctcatgcaaagtaaataaatcttgatgtctaaaaactgattagaactagaaaagaagtggacatgttttattatctttgcattacgttctaacaaaagcagattatcaggggctcttactcacttgccattcctgacatgagcactataagtgaatactatgagttctacaaacagaacatttttccacatgaatttgacttgcaaaaagtgcaaaagggaatggtagaaccagaattactaagtacctgcccgggcgg

SEQ ID NO: 7649 - DNA, 635 bp, Homo sapiens
  misc_feature 7, 335, 389, 459, 567, 586, 605, 610, 623, 629: n = A,T,C or G
gcgcatnaccctcactaaagggaacaaaagctgggtaccgggccccccctcgaggtcgacggtatcgataagcttgatatcgaattcctgcagcccgggggatccactagttctagagcggccgcccgggcaggtacttctgttgctgtgttctgtcatgagttgcctcatgaattaggtgactttgctgttctactaaaggctggcatgaccgttaagcaggctgtcctttataatgcattggcagccatgctggcgtatcttggaatggcaacaggaattttcattggtcattatgctgaaaatgtttctatgtggatatttgcacttactgntggcttattcatgtgtgctgctctggttgatatgggacctcggccgccacccgnggtggagctccaattcgccctatagtgagtcgtattacgcgcgctcactggccgtcgttttacaacgtcntgactgggaaaaccctggcgttacccaacttaatcgccttgcaacacattcccctttcgccagctggcgtaatagcgaaaaggcccgcaccgatcgcccttccaacanttgcgcaacctgaatggcnaatgggaccccccctgtancggcncattaagccccgngggtgngggggt

SEQ ID NO: 7650 - DNA, 613 bp, Homo sapiens
  misc_feature 183, 200, 220, 223, 225, 241, 243, 250, 262, 265, 266, 272,293, 300, 304, 310, 327, 351, 370, 374, 384, 404, 405, 411,414, 417, 420, 438, 440, 446, 481, 483, 486, 499, 510, 514,522, 525, 529, 546, 554, 561, 566, 572, 575, 579, 583: n = A,T,C or G
  misc_feature 584, 589, 596, 599, 603, 612: n = A,T,C or G
ctactatagggcgaattggagctccccgcggtggcggccgaggtacttttagtagagatggggtttcaccatgttggccaggctggtcttgaactcctgacctcaggtgatccactcgcctcggcctcccaaagtgctgggattataggcatgcgccaccatgcccggccgctctagaactantggattccccccggccntgcagggaatttcgaatatnaancntatctatacccgctcnancctttanggggggggcccnggnncccaancttttttgtttccccttttanttggagngggntaattngcgccgcttgggccgtnaattcattgggtcaataagcctgntttcctgttggtgaaaaanttgntaattcccgnttcaccaaattttccccacnnaaccantanccnaangcccggggagcattaaanantgggtnaaaagccctgggggggtggcccttaaattgaaagntngangcctaaaccttcnacaattttaantttngccgtttnggnggcnttaacttggcccccgcntttttctnaagttcnggggnaaaaanccnggtncggnngcccnaaccttncantttnaatggaaant

SEQ ID NO: 7651 - DNA, 620 bp, Homo sapiens
  misc_feature 2, 586, 619: n = A,T,C or G
tncttagggcgaattggagctccccgcggtggcggccgaggtacatttgagatggtctcacgtgagacatcaatacggcttgctggggggcacaggtttagggcagatgaaactcacaggagggcgggtctgggttaactgagctaaagagctttcaagccactagagcaacagagctgcccacagttgagtcagattaacctgggaagcctccaagtaatggctaccagcaccacattcacagatctcaaaatttatgaaactgatgagaggttggatttgataactaagagtctacaaatctacagcattaattacacttgtcattaggtcaaattacagagtctgattttcttctaggaaatatgtgtgagattacacatgctttgaaacataaacccattatttccaaatgacaggttataatgactgtgatgagctcagagatttgttattgaaacgaactaatgattatacttgttaaattaagtatgggaatgattaaagaatttgctaatagatattccctgttgacacacgttggactcagtggagtgtctggttataaagtacctgcccgggcggncgctctagaactagtggatcccccgggctgcang

SEQ ID NO: 7652 - DNA, 627 bp, Homo sapiens
  misc_feature 1, 4, 6, 606, 618, 624: n = A,T,C or G
nctntngggcgaattggagctccaccgcggtggcggccgaggtacccaaacccaaacattgccaagagaaaatgcagtgtgaggtaaaagatgaaaaagatgacatgaaaatggagactgatattaagagaaacaaaaagactcttctagaccagcatggacagtacctgcccgggcggccgctctagaactagtggatcccccgggctgcaggaattcgatatcaagcttatcgataccgtcgacctcgagggggggcccggtacccagcttttgttccctttagtgagggttaattgcgcgcttggcgtaatcatggtcatagctgtttcctgtgtgaaattgttatccgctcacaattccacacaacatacgagccgggagcataaagtgtaaagcctggggtgcctaatgagtgagctaactcacattaattgcgttgcgctcactgcccgctttccagtcgggaaacctgtcgtgccagctgcattaatgaatcggccaacgcgcggggagaggcggtttgcgtattgggcgctcttccgcttcctcgctcactgactcgctgcgctcggtcgttcggctgcggcgagcggtatcagcttnctcaaaggcggnaatacngtt

SEQ ID NO: 7653 - DNA, 607 bp, Homo sapiens
  misc_feature 1, 3, 15, 101, 356, 358, 361, 384, 396, 402, 416, 421, 427,439, 456, 460, 467, 468, 495, 496, 499, 506, 529, 530, 531,548, 556, 565, 574, 575, 583, 584, 586, 588, 589, 590, 599,603, 606, 607: n = A,T,C or G
ntntttttccgccgnatacgactactatagggcgaattggagctccaccgcggtggcggccgcccgggcaggtacctgtaaagaccatgagacagaacttntgtcacagcagaaggttcctgcgcatttcgtagctctgaacgggaacagaatgaacatcaacctcaggacaggacctgagaggacaagctgtatcgaggctgtctcccaaaacaagggcagcttccccggcttgacaaacgtcagtgaggtggtgacagaccagttcctatgtagcgggatggagggagatgacagtccttgcaaaggagaatccgggggagccgttttccttgagcggagggtacctcggccgntntanaactaagtggatcccccggctgnaggatttcaatntaaagntttatccatccccncccancttggngggggggccccnaacccaatttttttttncctntttaagnngggggtttatttgccccccttggggannaanaaagggnaaaataggttttttttcttgggnnnaaaatttttttttcccntaaaaaantccccaaanaaaattttnngggggggnnanannnaaaaaaatnaaancgnn

SEQ ID NO: 7654 - DNA, 621 bp, Homo sapiens
  misc_feature 552: n = A,T,C or G
tcactatagggcgaattggagctccaccgcggtggcggccgagtactgcagttagagcttcaatctccagtgtgatggtattagggttagatcttcaatctccagtgtgatggtatcagggttagagcttcagcctccagtgtgatggtatcagggttagagcttcagcctccagtgtgatggtatcggggttagatcttcaatccccagtggtggtggttagagcttcaatctccagtgtgatggtattggggttagagcttcaatctccagtctgatggtgtttcgggatggggcttttaagatgtaattagggtttaagatcataagggacctggtctgatggggattagtaggcttatatgaagagacacaagagggcttgctctatctctgactctcccacacacaaagtagaggccatgttagcctatggagagaagatggccacctgcaagccaggaagaaagccctcactagaaaccaaaccccgcaaaaccttaatcctggactcccagccttcagaactgtgagaaaatttatttctgttgnttaagccacccagtctatggtattttgttctggcagcccaagcagactaagacaccatgttcagacaga

SEQ ID NO: 7655 - DNA, 622 bp, Homo sapiens
  misc_feature 4, 554, 555, 556, 557, 558, 559, 560, 561, 562, 563, 564,565, 566, 567, 568, 569, 570, 571, 572, 573, 574, 575, 576,577, 578, 579, 580, 581, 582, 583, 584, 585, 586, 587, 588,589, 590, 591, 592, 593, 594, 595, 596, 597, 598, 599: n = A,T,C or G
  misc_feature 600, 601, 602, 603, 604, 605, 606, 607, 608, 609, 610, 611,612, 613, 614, 615, 616, 617, 618, 619, 620, 621, 622: n = A,T,C or G
catnaccctcactaaagggaacaaaagctgggtaccgggccccccctcgaggtcgacggtatcgataagcttgatatcgaattcctgcagcccgggggatccactagttctagagcggccgaggtactactggagatcttggtgatagtggccaaaaggaaagggtatgattatgattgctgggaagcagatggcttttgaatatgttcatccaaatcctaagccagagactgtgtttagtgcttgttcctcctgggaaggcttatggtaaacaaaaatacagtttaacatgtttaatgttttgaaattctgggagaagaatagaaatattcatttgttcctaggtgtccacatgagcatggaggtattctaaagtgtaagaagtgacagcataggcatggttaaaatctcagattctgacctcatcctggctcctccacttactaccttcagcattagctcaataaacctcaatgctttgtctataagattatggtgacaattacatttagttaaaagattataaagtttcggccgccaccgcggtggagctnnnnnnnnnnnnnnnnnnnnnnnnnnnnnnnnnnnnnnnnnnnnnnnnnnnnnnnnnnnnnnnnnnnnn

SEQ ID NO: 7656 - DNA, 671 bp, Homo sapiens
  misc_feature 19, 22, 29, 30, 53, 54, 554, 569, 601, 607, 613, 617, 660: n = A,T,C or G
gcaattaaccctcactaanggnaacaaannctgggtaccgggccccccctcgnngtcgacggtatcgataagcttgatatcgaattcctgcagcccgggggatccactagttctagagcggccgcccgggcaggtacccaccgttcatctgtaacatggctgtaataatggcacctactcgttgctgttagcattgaaggagccaacgtatgcaagccaatcacttaacaaatgtccattgttctgcttgtcattctttgcttatacttcctgacaacaagcagaaaccttagaagagtggtctgttcactttagggaaggctaagtcagcattaggtatcttccatcttaaagcacacaagacagactgggtagagcagcagcgtcactgatcgccactctaatagctctctggctaagtttctcatgtcctttgcggtgttaactacaaaatgcatcgaccagattctcctcatagtttcttcacagggccagaatgacaccaaaagtagagtaggcccagtgacctgataccagagagccagaacactcancagagtgcacagtanggtccttgcatagggtcacctgaagacctganaccatnttcggnagantcaggagtggaacgtgctgcttcttaaaagatctaggaagtanatttatcttct

SEQ ID NO: 7657 - DNA, 623 bp, Homo sapiens
  misc_feature 573, 604, 609, 614, 622, 623: n = A,T,C or G
cactatagggcgaattggagctccaccgcggtggcggccgcccgggcaggtacttgtagcagtccacaaagcagaacagctcagaacattctctatgccactgcctgcttctgggtgaatcccaggtgtgagtaatgaggctcacatgagtgggtatatcactaacacggcttaggagccccatcctccgcaagtcattattttgcttgacaaccatgagcttccaggatcccgacaaggcacatggcaaattacaggagtcctcacactaagagaagccctaagctatggccagcacaggtatttatagttcctcccagtcctttcgcagtttaccagtgggtcatttttaccataagcagtgttgcctagtaacatagctgacattctgcctgtatggtttccacgggaacagagctgatagctgggttaaactgaatccaagcccaatttctcatgctgaaagacaagagttttgctaacacttaagtcacaaatatagccagaggtttccctgcttctgtgcttctctgttagtttcagtagccggagtgattctttcaaatgtatggnggatcacattacctgctctccgccctgcagngggtnccctncttacctnn

SEQ ID NO: 7658 - DNA, 621 bp, Homo sapiens
  misc_feature 8, 580, 621: n = A,T,C or G
gcgcaatnaccctcactaaagggaacaaaagctgggtaccgggccccccctcgaggtcgacggtatcgataagcttgatatcgaattcctgcagcccgggggatccactagttctagagcggccgaggtacaaacccttgctctgcccttggaggggaaaccaggctgtggttgaaaagctgtcagttcctgggctgggcctgtgtctgccaccaccttctgcagacctcctacccccatggaagataaaaaatataagctctggactcactggggttagcagcacaaagctttgatttaaaatctttttataagttggtttactaaaaagagaatgataataaccattcgacccagcaatcttattactgggtgtatatccaaaagaaaaagaaagttctattgaaaagacacatgcactcatatgttcactgcaacactattcacaatagtgaagacgtggaatcaacctagatgtccatcaacgttggaatggatgaagaaaatgtggtgcatatacaccatgaaccattacaaggccataaaaaggaacaaaatcatgtcctttccagcaacatanatgcagctggaggccattatcctaagcaaataaacacaaan

SEQ ID NO: 7659 - DNA, 636 bp, Homo sapiens
tatagggcgaattggagctccaccgcggtggcggccgaggtacccctgcgccaatcatcacagcctggttgtatcaagtgtgtgccaaactgcctgcgctaacaaccaaatgcaaatgtcatacgtctctgtcactagcagcatagttgctagagagacacgtgtgagccacacctcaaagacaagccttcatcatcttttcctggagatagctgactagcaatcagatgttcaaataaagctactttcttgtacctgcccgggcggccgctctagaactagtggatcccccgggctgcaggaattcgatatcaagcttatcgataccgtcgacctcgagggggggcccggtacccagcttttgttccctttagtgagggttaattgcgcgcttggcgtaatcatggtcatagctgtttcctgtgtgaaattgttatccgctcacaattccacacaacatacgagccgggagcataaagtgtaaagcctggggtgcctaatgagtgagctaactcacattaattgcgttgcgctcactgcccgctttccagtcgggaaacctgtcgtgccagctgcattaatgaatcggccaacgcgcggggagaggcggtttgcgtattgggcgctctttcgctc

SEQ ID NO: 7660 - DNA, 625 bp, Homo sapiens
  misc_feature 480: n = A,T,C or G
tatagggcgaattggagctccaccgcggtggcggccagtcacttaatggccccattaccgctcctctgtctcccgtgctgctagctcctgcttctaactctcatccctaatcttagtgtctatgccctgttctttgatgtttaatcaattgcttttgtgatttttttttttttttgctatgctaaatgccatatttaagtttctcaagatttttttttaacctcaggagcagaaaggtgaattaatcagactctttagcctgtggcaattttgttgtataaggtccacctgtcttgtcttatttttccctttatgccagattccaccaccatcagtccctggctatcccaacaagcacctacactaatgtgatacagacatgtaatttacataaatgttactgggttttccctttgctttttacactgtctttgttgctgaaatgtccatctagataactgctttctaactgccatatanaattccatggcattcacctacctcagtttacttagccaatcccctaggcctctggagcctggttttaaatttctttgttatagtccacagtgtcagtaaagagctagtgtttagtgatgactcattaggtatttgttacaaaacc

SEQ ID NO: 7661 - DNA, 629 bp, Homo sapiens
  misc_feature 530, 568, 609: n = A,T,C or G
tatagggcgaattggagctccaccgcggtggcggccgcccgggcaggtactcaattaatattttattgaggtgccctgtaatctgacattccagggagctttcaaggaaactttgtcacactaaaaaaaattgaggattgttttgtgggttattccgctcctttgtcttctaacccacagaagttctgtcatggttcttaggggttgtagggtgtgtccacttattttaaaatgtcaaagaccagaagagtggagaatgggaaagtggcaaagtgttagcactggaaagatgtttagagatcacgtagtccaacccttaaattttatagatgaataaactggtatctagaaagcttaagtgacctgcctgaaatcacacaactagtttgtggtaacacttggtccaggaggttgtcagctgaccctcttcagggctcgttcccacaaggtacctcggccgctctagaactagtggatcccccgggctgcaggaattcgatatcaagcttatcgataccgtcgacctcganggggggcccggtacccagcttttgttccctttagtganggttaattgcgcgcttggcgtaatcatggtcatagctgttnctgtgtgaaattgttatccg

SEQ ID NO: 7662 - DNA, 646 bp, Homo sapiens
  misc_feature 1, 477, 537, 567, 609, 612, 643: n = A,T,C or G
ntcctaagggaacaaaagctgggtaccgggccccccctcggggtcgacggtatcgataagcttgatatcgaattcctgcagcccgggggatccactagttctagagcggccgaggtactcaaaaggcatttccgcttacaatttgtagaaacacaaaatgcgttttccatacagcagtgcctatatagtgactgatttttaactttcaatgtccatctttcaaaggaagtaacaccaaggtactgggtagatatacgcaggtgatcacaaatcttttatgtctattcttgatcccttttttctttacttcccaaatttgccacatctttcttctacagctaataggatgggctgcaattaattggtaatggtaaagagattatgcttacaaaagaggtgaatgtatcatataaggagcataggttggaattttaagaaacgtaaccaaacatattggaattaaaaatgtctctgacngtatgactgggctggctaggtgaatatacattcattgccttatgaattttcctctcaatnctgtgccctttacacaatatgatgcccttnctgatgaacatccttctcaccagagtacctgccccgggcggncgncaccgcgggggagctccaattcgccctatantgc

SEQ ID NO: 7663 - DNA, 644 bp, Homo sapiens
  misc_feature 11, 363, 389, 439, 445, 487, 488, 493, 514, 517, 526, 527,532, 533, 538, 549, 576, 579, 586, 587, 589, 592, 595, 601,605, 607, 609, 611, 614, 615, 618, 619, 620, 622, 623, 624,627, 628, 629, 632, 636: n = A,T,C or G
tacttagggcnaattgggtaccgggccccccctcgaggtcgacggtatcgataagcttgatatcgaattcctgcagcccgggggatccactagttctagagcggccgaggtcttgagtcgacccacgcgtccgtgccttacaactggatctcatgagacatttcctcaactgtggcttatagtctctgatgaatctagtttgtgccaagttaatacaaatcagccaatatgcctggattttaaaagtaatctatttagctttacttttgatattttgacctgcccggcggccgccaccgcggtggagctccagcttttgttccctttagtgagggttaattgcccgcttggcgtaatcatggncatagctgtttcctgtgggaaattgntattcgcttacaatttcacacaacattccaagcccggaagcataaaatgntaaagncctgggggggcctaatgagttgagcctacttacattaattgnnttggnctactggccgcttttcaatcnggnaacctggtnngcccnnttgcntttatgaattnggccaacccccgggggaggggggttgngtnttggggnntnttnccntttctnggtnantnanttnnttnnncnnnggnnnttnggtnggggggag

SEQ ID NO: 7664 - DNA, 640 bp, Homo sapiens
  misc_feature 3, 8, 555, 562: n = A,T,C or G
ttngggcnattggagcctccccgcggtggcggccgcccgggcaggtacagtttactacccaaattgatattactacctgagcatttttcattttcttacataatcttccaaaacattcattttatctaccacaaaatattaaattgaataaaacatttttgctgaatttgtggagctgggcttttagaccggttttaacatttcagtgtaatatgtaatgcagctcaaaagctttgtgcaagtggtttctggatttaggatgtagttttctttgaccccatatcaacttgtggtaattgatcttaaggattctgtttgtgtggtttttaaaagaatattctctccagtcaattttggttccacttattatttaataaaatcgtttgtaatattctagcctgactcagctgtgccaaggacaaataaggggaagaggtttcccttccttgggatagacttttacaaatctttggcttttcagatttttttaacatgaaggatgctcatcaaaattattttcgatgcttttaaagcaaactctgatgccgttagagncattggntattttgcaagcattgaggggaatatcacttgcatctatatgtactttaaccgggcccaccctaagggatttaaatac

SEQ ID NO: 7665 - DNA, 815 bp, Homo sapiens
  misc_feature 494, 602, 612, 626, 637, 736, 746, 755, 760, 766, 771, 780,781, 785, 793, 809, 815: n = A,T,C or G
gggccctctagatgcatgctcgagcggccgccagtgtgatggatatctgcagaattcggcttagcgtggtcgcggccgaggtacagagccagccagtgttgggcagcaggctcacagcctcaatagggagaaaagacaaaggcctcaaaatgacaggcagcctgacagaggaaggagtctgacacctcagcttgaggcgtctttggaattcctagctcatctcagaattatatcttagagtgataatatgggtggtagccagtggccaaacagcaagaactaagagtggcccttgcaaaaaaaggttgggaaagctgggcccatattgcctgtaaacccttgagcctgatgctcatacagctgtcccttgttttagccaggtcttgacagaagggttaccagcactgtcactgctctacagaatgctctccccgtgcctctctgttgatttataacagttggggtaaccagatagcaatatagtggcaattgantagccatatagtaatacaggggcaagtttggttaaaaccgttatagcaaattatcacataaatggatatggttttaaatttaaaccctccagtttttttaaacccaanaatggcttcntacccataaaaaanaatttggtgantttcaagttgttaccttggccccgggcggggcccgtttctgaaagccccaaaatttccaaccaccacttgggcgggccgtttcctaagttgggattccngaggcttcgntaccccaanccttngggcgntaaanattggggcnnaagncttgtttnccttgtgtgggaaaantgttan

SEQ ID NO: 7666 - DNA, 618 bp, Homo sapiens
  misc_feature 43, 558, 592, 595, 606, 615, 617: n = A,T,C or G
cctcactaagggaacaaaagctgggtaccgggccccccctcgnggtcgacggtatcgataagcttgatatcgaattcctgcagcccgggggatccactagttctagagcggccgaggtactttttgttgaattcaccgaagttcttccatttatatgctatttttaatggcattccggctttaacattctgtgagtcttacaaatttgactcttgaatggcaaaataatgttagtatgtagaaggttaactttcatttataatataagtggtgcaggggttcaacattttaagtaaaaatatttttacacactacctctctcttttttttttttaaagttttaacatcagaacttttgggggaaaaactacttcagggcttgactttttgtacctcggccgccaccgcggtggagctccaattcgccctatagtgagtcgtattacgcgcgctcactggccgtcgttttacaacgtcgtgactgggaaaaccctggcgttacccaacttaatcgccttgcagcacatccccctttcgccagctggcgtaatagcgaanaggcccgcaccgatcgcccttcccaacagttgcncancctgaatggcnaatgggacncnc

SEQ ID NO: 7667 - DNA, 638 bp, Homo sapiens
  misc_feature 406, 591, 610: n = A,T,C or G
gaattggagctccaccgcggtggcggccgaggtacaaattatagcgacatacacagagaatgcagttaaaaactctacctgtgatacatgaaagcttcagggggctatatatagccaacagtaattgactattacacaagaaccaaagaattggaccttgaaaggaaatattctatctggagattaacacaaactacttagtaacaaaaatgaactataacaaacattaaggataagtagtcttctgtggtaataaaactatcattttgaaaggacaaaaagattattttaaccctgcttaactattatgtgtaactacattccaatttaacagcaatcaattaaagaaaaggaaaaactgaaactcattaagatgggatacatctagacttgggttacagttaangcacaacataatccctccgtaggacaaaataaggtacagatctaaaattattattttctgattgtatgtgtataaataggggcagggaatggtagaatcacattcctatctctctccctactcccctagcaaaaattaaaactgtaaaaaccaaatttttttttttttttgcacaaggggacaangtcttgctctatagcacangctggagtacctgcccggcgggcgctct

SEQ ID NO: 7668 - DNA, 612 bp, Homo sapiens
  misc_feature 600: n = A,T,C or G
cctcactaagggaacaaaagctgggtaccgggccccccctcgggtcgacggtatcgataagcttgatatcgaattcctgcagcccgggggatccactagttctagagcggccgaggtacacagatgcatcaaccaaacgcgtaaaggcagaaaggaagaaagaaaaaagccacaccaaagcctactaatctgccctgcaaacccagaaaatcataagcatgttaattgaaaccagaatctgagaaagccaagcaaacttaaaaggggtacctgcccgggcggccgccaccgcggtggagctccaattcgccctatagtgagtcgtattacgcgcgctcactggccgtcgttttacaacgtcgtgactgggaaaaccctggcgttacccaacttaatcgccttgcagcacatccccctttcgccagctggcgtaatagcgaagaggcccgcaccgatcgcccttcccaacagttgcgcagcctgaatggcgaatgggacgcgccctgtagcggcgcattaagcgcggcgggtgtggtggttacgcgcagcgtgaccgctacacttgccagcgccctagcgcccgctcctttcgctttcttnccttcctttctc

SEQ ID NO: 7669 - DNA, 673 bp, Homo sapiens
  misc_feature 2, 8, 283, 292, 293, 297, 309, 318, 321, 323, 349, 358, 359,361, 367, 377, 381, 386, 406, 407, 410, 428, 430, 434, 448,450, 459, 465, 485, 486, 487, 498, 499, 516, 526, 528, 530,538, 539, 549, 550, 551, 552, 553, 559, 563, 564: n = A,T,C or G
  misc_feature 575, 576, 587, 594, 595, 598, 601, 602, 605, 609, 615, 616,620, 621, 623, 625, 626, 628, 629, 630, 631, 632, 634, 636,639, 640, 641, 642, 643, 644, 645, 646, 647, 648, 649, 650,652, 653, 654, 655, 656, 657, 658, 659, 660, 661, 662: n = A,T,C or G
  misc_feature 663, 664, 668, 671, 673: n = A,T,C or G
cntatacnactcactatagggcgaattggagctccaccgcggtggcggccgaggtacagagctaacacttatcctccagtgctctactaattgcttggtgctatgttgactactgggaatgaaccacaagatacatcactgtaaactgcagggagtgcttcagtgatcatgaggttaaaatctccccatcagcagaaagagaatttctttacttaacttaagtgggtaccctggcccggggcgggccgcttcttagaactaagtggattcccccggcttgganggatttcgnntttnaacctattcgantcccgcganctngnggggggggcccggtcccaacttttgnttcctttanngnggggtnaatgcccccntggncttancattggcataggttgtttcnnggngaaaatggttttcccctnanaaantcccacaaaatacnancccggagcntaaaangtgaaaaccgggggggcccnnnggggggcccanncacaattaattggggtnggcccaactngncncttttaanngggaaaaccnnnnnggcccncttnnttaaaaaaaannccaaccccccnggggaannggnttnnggntttnggggcnntttnncntnntnnnnnananaannnnnnnnnnnngnnnnnnnnnnnnngggnaangn

SEQ ID NO: 7670 - DNA, 761 bp, Homo sapiens
  misc_feature 1, 2, 3, 4, 5, 7, 8, 9, 11, 12, 13, 14, 15, 16, 17, 18, 20,21, 22, 25, 26, 28, 29, 33, 34, 36, 37, 39, 41, 42, 53,55, 399, 400, 472, 500, 503, 524, 527, 528, 538, 543, 544,558, 559, 563, 567, 571, 572, 575, 578, 582, 586, 588, 589: n = A,T,C or G
  misc_feature 591, 593, 601, 603, 605, 606, 609, 614, 618, 622, 626, 629,631, 642, 645, 647, 651, 654, 656, 658, 659, 661, 663, 664,667, 669, 672, 674, 683, 684, 685, 686, 688, 690, 691, 692,694, 697, 698, 699, 700, 704, 706, 711, 712, 716, 717: n = A,T,C or G
  misc_feature 729, 733, 736, 740, 742, 743, 745, 746, 747, 748, 759, 760: n = A,T,C or G
nnnnntnnntnnnnnnnntnnnttnntnnttcnntnntntnnggtcgattggnanctccaccgcggtggcggccgcccgggcaggtactgtgtatcatcgcagtcttgcttttttgagtaatggattcctagattctatgaggataccacaaccacttttaaagaggtttctaaggccaggtgcagtgcttacgcctgggagaccaaggtgggaggatcacttgagctcaggagtttgagaccaacttgtacctcggccgctctagaactagtggatcccccgggctgcaggaattcgatatcaagcttatcgataccgtcgacctcgagggggggcccggtacccagcttttgttccctttagtgagggttaattgcgccgcttggcgtaatcatggnnatagctgtttcctgtgtgaaattgttatccggttcacaattccacacaacatacgagccgggagcataaagngtaaagcctggggtgcctaatgagtganctnacctccctttaattgcgttgngcnncacttggccnctttnnattcgggaaacctnncggngccngctnnttnatnaaangggncnncncncggtggangngnnggnttgcntttnggcnactnttncngattctgtatnaangnatcnctngngnntngnngtntngcngnggaaacggnnnncngnnntncannnnaaangnatgtnnaatnntggtttacattncccnaanaaanannannnnaaaaagtatgnna

SEQ ID NO: 7671 - DNA, 641 bp, Homo sapiens
  misc_feature 4, 255, 522, 529, 568, 612, 615, 618, 623: n = A,T,C or G
actnctatagggcgaattggagctccccgcggtggcggccgcccgggcaggtactctacagtgaaactgtttctactgtggcttaatttgcaaaatccaagcagatattacttttaaaaatccaactatctctttcaaaggatttgtaaagttgcttacagacataaggtgacatcagaaaagcatgttggtataatgcaattagctaaggtttctaggaagctttggaatgttttgtttttaaagaaggcatanataagtgcaagtcctacaagtaatgaactgtcctagaagcaaagaaattcattaaatagatctccttgatttctccttcatggccccatgtccatagagattgggaatgtacctcggccgctctagaactagtggatcccccgggctgcaggaattcgatatcaagcttatcgataccgtcgacctcgagggggggcccggtacccagcttttgttccctttagtgagggttaattgcgcgcttggcgtaatcatggtcatagctgnttcctgngtgaaattggtatccgctcacaattccacacaacatacnagccgggagcataaagtggtaaagcctgggggtgcctaatgagnganccnactcncattaattgcgttgcgct

SEQ ID NO: 7672 - DNA, 609 bp, Homo sapiens
  misc_feature 1, 4, 571, 576, 604: n = A,T,C or G
nctnctatagggcgaattggagctccccgcggtggcggccgcccgggcaggtacaatttaatacattaatgtagtaagttattaaatggtgcccctatgatctgcgagaggtaatacactatcacgtgttccaaattttcacaggaaaagaatcatagaatcctatagctgaagggggctttagcggggatctctacaaatgcctgccaggtgcttggatatcctccatcacatccagccatgagaagttacttgtgtcatggtacctcggccgctctagaactagtggatcccccgggctgcaggaattcgatatcaagcttatcgataccgtcgacctcgagggggggcccggtacccagcttttgttccctttagtgagggttaattgcgcgcttggcgtaatcatggtcatagctgtttcctgtgtgaaattgttatccgctcacaattccacacaacatacgagccgggagcataaagtgtaaagcctggggtgcctaatgagtgagctaactcacattaattgcgttgcgctcactgcccgctttccagtcgggaaacctgtcgngcccncttgcattaaatgaatccggccaacgcncgggg

SEQ ID NO: 7673 - DNA, 880 bp, Homo sapiens
  misc_feature 2, 5, 7, 527, 556, 659, 676, 694, 704, 710, 723, 732, 793,802, 837, 860, 873, 875: n = A,T,C or G
gnatngnttatcctatagggagtcgaccccgcgtccggagaaatacgactcactatagggatctagatcacgagcggccgctagactagtctagagaaaaaacctcccacacctccccctgaacctgaaacataaaatgaatgcaattgttgttgttaacttgtttattgcagcttataatggttacaaataaagcaatagcatcacaaatttcacaaataaagcatttttttcactgcattctagttgtggtttgtccaaactcatcaatgtatcttatcatgtctggatccccgggtaccgagctcgaattaattcctcttccgcttcctcgctcactgactcgctgcgctcggtcgttcggctgcggcgagcggtatcagctcactcaaaggcggtaatacggttatccacagaatcaggggataacgcaggaaagaacatgtgagcaaaaggccagcaaaaggccaggaaccgtaaaaaggccgcgttgctggcgtttttccataggctccgcccccctgacnagcatcacaaaaatcgacgctcaagtcanaggtggcgaaaccccgacaggactataaagataccaggcgtttccccctggaagcttcctcgtgcgctctctgttccgaccctgccgcttacccggatacctntccgcttttttcctttnggaagcgtggcgcttttntcatagcttnacgctntaggtttcttaanttcgggggnagggcgtttcgcttccaagctgggcttgggtggcacccaaacccccccgtttaaccccgancccggttgngcccttattccgggtaaactattcggcttttgagntcccacccccggttaagaacacngaactttattcgncncttgg

SEQ ID NO: 7674 - DNA, 612 bp, Homo sapiens
  misc_feature 7, 8, 12, 15, 24, 30, 31, 47, 48, 127, 495, 500, 501, 512,560, 612: n = A,T,C or G
ggggggnngtgnggncccaccctncggggnnggctgtgtgggcgagnntcagcaggtggggacacagtcctacactggctatttctctactcgagctagtgtgtccctaactctctcatggcaaggnagacaagcctagttaccatcagagtaactgccttgaccggccaggtctcattaacgctgtgagtgccttgcatggccagctagccatggccacctttatcctttcttctgcagtgacacagtgggcatgcattgtgtggtctaaggatgcgggaatgcctattcctgggtcagaaggctcctagcctgtgattgcctggcctctgctgcttagtgactggtgggaaggagtccttccagggcaccacaccgctcaccctcacagagactgcaccctctccagcgttctgtaccagttgttcataggaactttgacagatgcattttagcctcaggctcttgttccaaaataatataaattatttgcanattannaaaaaaaaaanaaaaaaaaaaaaaaaaaaaaaaaaggggcggccgctagactagtctanagaaaaaacctcccacacctccccctgaacctgaaacataaaatgaatgcan

SEQ ID NO: 7675 - DNA, 658 bp, Homo sapiens
  misc_feature 3, 8, 364, 369, 550, 576, 596, 599, 619, 650: n = A,T,C or G
ttngggcnattgggtaccgggccccccctcgaggtcgacggtatcgataagcttgatatcgaattcctgcagcccgggggatccactagttctagagcggccgaggtacacacacacacacacacactctgcagaaattactcacagttttggcctgtaagcagtattcattcttccattaaatctgctagtattaatataggttttctcccattttatattcctttgactattaaagtaagaattcaggacttggagagaaagtggaaaatttccatttaattcattaagttttaaattattagctataccagaaccctttattattattttatgtgtatggatattttgcctatatgtatgntttgngcaccatatccatgactggtgcttgaggtcagaagtagggcattagatcccaccgaacctggagtcccccacatgaatggctgggaattggaacctaggtccctctggaaagagggatctttttttattctaagatcacgagccggccgccaccggcggggggagctccagcctttttggntcccttttaagtgaggggttaattgncgcgctttggcgtaatcatnggnccataagctggtttccttgnggtgaaaattggtattcccgctcacaaattnccacacaa

SEQ ID NO: 7676 - DNA, 1057 bp, Homo sapiens
  misc_feature 2, 4, 6, 8, 9, 11, 13, 14, 17, 18, 20, 21, 22, 28, 29, 30,36, 40, 41, 42, 43, 50, 53, 57, 62, 68, 71, 72, 76, 78,81, 82, 83, 86, 90, 92, 93, 94, 97, 100, 101, 106, 111,121, 127, 134, 390, 412, 421, 564, 639, 663, 698, 701, 702: n = A,T,C or G
  misc_feature 721, 735, 741, 742, 756, 771, 787, 794, 800, 813, 817, 818,827, 831, 835, 837, 841, 852, 858, 862, 863, 873, 876, 881,891, 893, 899, 902, 908, 928, 945, 965, 966, 974, 979, 991,995, 1008, 1011, 1019, 1032, 1048: n = A,T,C or G
tntntntnntntnntgnntnnntatttnnnttattntttnnnnttgagtnttngtgnatgtntttatnttnngttntnatnnnatntttntnnnggntcnntattnatgtncattgagggngtacgncgcgtantacgtgttttgcgacccggcaccaccgtagtttttacgcccggtgagcgctccacccgcacctacaagcgcgtgtatgatgaggtgtacggcgacgaggacctgcttgagcaggccaacgagcgcctcggggagtttgcctacggaaagcggcataaggacatgttggcgttgccgctggacgagggcaacccaacacctagcctaaagcccgtgacacttgcagcaggttgctgcccacgcttgcacccgtccgnaagaaaaagccgccggccctanaagccgcgnagtcttggtggactttggcaccccaccgttgcaagcttgattggtaaccccaagcgcccaagccgacttgggaaaggatgtcttgggaaaaaaaatggacccgttgggagccctggggcctgggagccccggagggtcccgcngtgccgggcccaattcaaagcaagggtggccacccggggactggggccggtgccagacccgtgggacgtttccangataccccacccacccagttaagncaacttaggttatttgggcccacttgcccaccaanaannggggcaattgggaaggacnaacaaaaaccgttncccccnnggtttggccctttnggggcggggtggggncaagaattgccccgcncgggttngccaanggcccgggcccgncttnngaaacttangttnttangnaagnaaaaaaaaaancttttnccannaacccttttnccnccttngaaaccctgngnaaaacnttnaaaaantgggaaattggccaatttgnttgggttgggttaaacnttttggtttaattttgggcnnacctttanttaantgggtttttccnaaanttaaaaggcaatnttngcctttcnaccaaaatttttntacaaaattaaaaagncattttttt

SEQ ID NO: 7677 - DNA, 645 bp, Homo sapiens
  misc_feature 2, 476, 478, 503, 519, 553, 566, 568, 572, 577, 603, 606,611, 626, 627, 628, 630, 635, 636, 639, 645: n = A,T,C or G
tncttagggcgaattgggtaccgggccccccctcgaggtcgacggtatcgataagcttgatatcgaattcctgcagcccgggggatccactagttctagagcggccgaggtacctagaatatttatttcagataatatcaagatttacctatatttctaccaaagacaatgataggtttttttttatatagttggagggcagggatagtgtttaaaggtttatgatgtataagcacgcttagacacaccaggagaaagtatcagatctcattacacatggttgtgagccaccatgtggttgctggggatttgaactcgggacctctggaagagccagtcagtgctcttatccactgagccatctctatagcacttttaaaaaaatattaagcatcatacagcttttcttgcctctatggatgcctgcaggcccaggagagggcaccagatctcattacagggtaaccccccaagtngntgctggggattggactcagggactntgggagactaaacagngcttttaacctttgagcccttttttcagcccccnaaaatggtaggtntntggngccanttggatgggctaagttggcatgcctnaanacaantggcagggttttgannntngggtnntanaaaaan

SEQ ID NO: 7678 - DNA, 630 bp, Homo sapiens
  misc_feature 3, 599, 602, 623, 628, 629: n = A,T,C or G
ttngggcgaattgggtaccgggccccccctcgaggtcgacggtatcgataagcttgatatcgaattcctgcagcccgggggatccactagttctagagcggccgcccgggcaggtctttgtctctcaaacttttatactgtcatagttcatttttcttgtacagatgctctttcaactttttttgagagtatatacataacaattgcagttgaaagtagggtggggtttagtctcctggtcacagttcaataagtacggacgcgtgggtcgactcaagctagcttgtacacctcggccgccaccgcggtggagctccagcttttgttccctttagtgagggttaattgcgcgcttggcgtaatcatggtcatagctgtttcctgtgtgaaattgttatccgctcacaattccacacaacatacgagccggaagcataaagtgtaaagcctggggtgcctaatgagtgagctaactcacattaattgcgttgcgctcactgcccgctttccagtcgggaaacctggcgtgccagctgcattaatgaatcggccaacgccccggggagaggcgggttgcgtattgggcgctcttccgcttnctngctcactgactcgctgcgctngggcnnt

SEQ ID NO: 7679 - DNA, 632 bp, Homo sapiens
  misc_feature 3, 8, 469, 472: n = A,T,C or G
ttngggcnattgggtaccgggccccccctcgaggtcgacggtatcgataagcttgatatcgaattcctgcagcccgggggatccactagttctagagcggccgccgggcaggtacttgtcctgatgggtcatccagaagagtttcatggagatcagttcacaacattggacagactatgaaacaaagtctgtaatatcatttatactcagtattggtaggctttttccttaatacccccactccaacaaaacagacctgccttcacttctcttgaaaatattattaccatcagtaactgcttgtctactatgtctccaaggcaagccacaggctataagccaattctgcaaaaggagcagcaaaagaatgcttagtgcaattcctctatttaaagtttgcttgagttttgattattttgttatttggttttccttctattcatttgaagatttgttatttatgtgttgntgntgttttgttcattttgttttctattttgataaggatatagactgtatatattgactacctgcatctggttactatcaagtaaattggatgtattctggtaaataaaggagtaatctcaaactcttcactcttaagaaccttctttattgatcatttagtg

SEQ ID NO: 7680 - DNA, 609 bp, Homo sapiens
  misc_feature 484, 524, 529, 543, 551, 555, 557, 558, 562, 563, 566, 569,571, 572, 573, 575, 578, 579, 581, 585, 587, 590, 591, 592,593, 594, 595, 597, 598, 599, 601, 603, 606, 607, 608: n = A,T,C or G
tcactatagggcgaattgggtaccgggccccccctcgggtcgacggtatcgataagcttgatatcgaattcctgcagcccgggggatccactagttctagagcggccgaggtcacgcgtccgacctagcttgagtcgacccacgcgtccgatttctggtttctttggagactcggttgtgccatgtgatgcttttctggaaactgtcttatgagaggaagcttttgctgaagcagacacatgggagaatgttttgttaagaacagacatgtagtatttttctagaggcagcttgaataaagagcatgtggtattttgctagaggggacacttgagagaacatgtgacatttggaaaggatatatgtataacctaaaagacagtggccaatgctgtgtggtattggtgtgccttaccattctttgctggccatcattgggctttgctgatgctggtcttcattgaggatgctaggtgataatggngcaccctaccatcctttgctggtcatatttgttggacttnatagngagaaacacaccanaaagcttntggnanngttnntgnggncnnngnctnntnggcngnccnnnnnngnnngngnggnnng

SEQ ID NO: 7681 - DNA, 644 bp, Homo sapiens
  misc_feature 3, 9, 18, 21, 32, 35, 47, 48, 52, 57, 61, 78, 79, 93, 95,99, 101, 103, 105, 106, 110, 113, 116, 122, 124, 129, 130,132, 138, 198, 216, 222, 289, 296, 304, 332, 367, 374, 377,391, 394, 398, 409, 413, 420, 426, 437, 439, 441, 445: n = A,T,C or G
  misc_feature 451, 457, 458, 467, 468, 469, 483, 498, 508, 512, 515, 517,520, 525, 526, 547, 559, 572, 573, 578, 589, 592, 594, 601,604, 606, 608, 622, 623, 630: n = A,T,C or G
aantattcngatggtccngcnacctatggcangcncaggagtccaanncccntcagncagnctgccctgctacgaggnncacgtgtgttttangnttgntntngnnttgncgnatncactgntntacannanataganagctgagtgccctgtgtatcctaatcacacaatctaacactaatcaagcatcacatcctnaatatttgttttgtttcnagacangtcttactacattagccaaatcttgtactcctatgtttaagtaattatcctgcctcattctcttgcnctctttnaattacangagatggctactgtctctgactgacaangatttacccatctacaaatggtttacccttcctcnaatgaanaanatatcaacttcacntantcanaaaaagcccanttangcatgcntactcntgacctgcccntncnaccnctctanaactanngtatccccnnntcttcattaattcnatatcaatcttatcnataccttctncctntanantanacccnntacccaattccccctatattnattattattacnctcacttcacttnnccatnctttttcaacnttntntacttantanancncttatccttacccnncgttagngggggggggggggg

SEQ ID NO: 7682 - DNA, 640 bp, Homo sapiens
  misc_feature 3, 8, 528, 552, 574: n = A,T,C or G
ttngggcnattgggtaccgggccccccctcgaggtcgacggtatcgataagcttgatatcgaattcctgcagcccgggggatccactagttctagagcggccgcccgggcaggtacttttctcttaacttacctgactgaaggcatccaatcagaaaggaaagtgaacaagtataatgtttctaagtgagtccagatggtaacaagaattcaaacattattctttttgtatgtttaaataaaacaaattttacattttatttgaccagcagatataacttcctgggcataattttattagcaaagaactgatgatactggtaataaaaaaaaaaaaaaaaatgaaaggaaaaaggagaatgcacctcaaaccagaataccataacatgttttgtggaagctgcattttatttgaaaacggacgcgtgggtcgactcaagacctcggccgccaccgcggtggagctccagcttttgttccctttagtgagggttaattgcgcgcttggcgtaatcatggtcatagctgnttcctgggtgaaattggtatccgntcacaattccacacaacatacnagccggaagcctaaaagtgtaagcctgggggtgcctaatgaggggagctaacctcacattaattgg

SEQ ID NO: 7683 - DNA, 607 bp, Homo sapiens
  misc_feature 4, 601: n = A,T,C or G
actnctatagggcgaattggagctccccgcggtggcggccgaggtaccctaaaacttaaagtataataataaaactaaaaaaaaagttatccatggcctagacaaatcaaaaaagcatgtgacactatatgacatcacatttcaatttcttgtagaaaggaacaagagtagtttaacaccagcagcattcatatgcagagagcatcataagtacctgcccgggcggccgctctagaactagtggatcccccgggctgcaggaattcgatatcaagcttatcgataccgtcgacctcgagggggggcccggtacccagcttttgttccctttagtgagggttaattgcgcgcttggcgtaatcatggtcatagctgtttcctgtgtgaaattgttatccgctcacaattccacacaacatacgagccgggagcataaagtgtaaagcctggggtgcctaatgagtgagctaactcacattaattgcgttgcgctcactgcccgctttccagtcgggaaacctgtcgtgccagctgcattaatgaatcggccaacgcgcggggagaggcggtttgcgtattgggcgctcttccgcttcctcgntcactg

SEQ ID NO: 7684 - DNA, 572 bp, Homo sapiens
  misc_feature 315, 316, 317, 318, 319, 320, 321, 322, 323, 324, 325, 326,329, 330, 331, 333, 335, 336, 337, 338, 339, 340, 342, 343,344, 345, 346, 347, 348, 349, 350, 351, 354, 355, 356, 357,358, 359, 360, 361, 362, 363, 364, 365, 366, 367, 368: n = A,T,C or G
  misc_feature 369, 370, 372, 373, 374, 375, 376, 377, 378, 379, 380, 381,382, 383, 384, 385, 386, 388, 390, 391, 392, 393, 394, 395,396, 397, 398, 399, 400, 401, 402, 403, 404, 405, 406, 408,409, 411, 412, 414, 415, 417, 418, 420, 421, 422, 423: n = A,T,C or G
  misc_feature 424, 426, 427, 428, 429, 430, 431, 432, 434, 436, 439, 440,441, 442, 443, 444, 445, 446, 447, 449, 450, 451, 452, 453,454, 455, 456, 457, 458, 459, 460, 461, 462, 463, 464, 465,466, 467, 468, 469, 470, 471, 472, 473, 474, 475, 476: n = A,T,C or G
  misc_feature 477, 478, 479, 480, 481, 483, 484, 485, 486, 487, 488, 489,490, 491, 492, 493, 494, 495, 496, 497, 499, 500, 501, 502,504, 505, 506, 507, 508, 509, 510, 511, 512, 513, 514, 515,517, 518, 519, 520, 521, 522, 523, 524, 525, 526, 527: n = A,T,C or G
  misc_feature 528, 529, 531, 532, 533, 534, 535, 536, 537, 538, 539, 540,541, 542, 543, 544, 545, 546, 547, 548, 550, 551, 552, 553,554, 555, 556, 558, 559, 561, 562, 563, 564, 566, 567, 568,569, 570, 571, 572: n = A,T,C or G
actactatagggcgaattggagctccccgcggtggcggccgaggtacagaatgagctatagcctgcagtgacagaaatctccaagtaaggagtatacactgaatgtcatgcccttcaataagtttaggcctgtagtttaagttcttttcagtatgtgccatgaacaacaataaacaatgtaccttggtgttacttcctttgaaagatggacattgaaagttaaaaatcagtcactatataggcactgctgtatggaaaacgcattttgtgtttctacaaattgtaagcggaaatgccttttgagtacctgcccgnnnnnnnnnnnnttnnntntnnnnnntnnnnnnnnnnttnnnnnnnnnnnnnnnnntnnnnnnnnnnnnnnntntnnnnnnnnnnnnnnnnntnntnnannanntnnnnntnnnnnnntntnttnnnnnnnnntnnnnnnnnnnnnnnnnnnnnnnnnnnnnnnnnnannnnnnnnnnnnnnnannnnannnnnnnnnnnntnnnnnnnnnnnnntnnnnnnnnnnnnnnnnnnannnnnnntnnannnnannnnnnn

SEQ ID NO: 7685 - DNA, 396 bp, Homo sapiens
  misc_feature 396: n = A,T,C or G
cgcgtaatacgactcactatagggcgaattggagctccaccgcggtggcagcggccgcccgggcaggtaccttgcaagtattagacttagaataaaactgtgttgactgatataactgatgcatggttggaatagtaggttcttgggtaaattaatcctaacatcaatagctcaattccatcatagtccttgaacaggcaaaatgtatgctaatcacaacagccgtacctcggccgctctagaactagtggatcccccgggctgcaggaattcgatatcaagcttatcgataccgtcgacctcgagggggggcccggtacccagcttttgttccctttagtgagggttaattgcgcgcttggcgtaatcatggtcatagctgtttcctgtgtgaan

SEQ ID NO: 7686 - DNA, 668 bp, Homo sapiens
  misc_feature 668: n = A,T,C or G
ctcctaagggaacaaaagctgggtaccgggccccccctcgggtcgacggtatcgataagcttgatatcgaattcctgcagcccgggggatccactagttctagagcggccgaggtactacggcttccaccctgcttttgaaagtcactttcaaatttctcttatctgtgccaccaggtttgatatcaccagaagatttgttgatagcttggcctaaaacagtttttcacatgcagtttttgaaccatcttagggcattcaccaccgagcccaggtgaaggcctcaggtgcagcagcagcagcagcagaatgtgcaagtgaggtattatcttctagtggctaatagcttcggcatgacattccatctgggttagaatcttcactcctttatttaccagctctctctcgctgagtaagctcttaacctttccagtcctacctctttgcttataaaatgggaataagtacctgcccgggcggccgccaccgcggtggagctccaattcgccctatagtgagtcgtattacgcgcgctcactggccgtcgttttacaacgtcgtgactgggaaaaccctggcgttacccaacttaatcgccttgcagcacatccccctttcgccagctggcgtaatagcgaagaggcccgcaccgatcgcccttccaacagn

SEQ ID NO: 7687 - DNA, 681 bp, Homo sapiens
  misc_feature 1, 3, 6, 12, 14, 19, 21, 25, 29, 33, 35, 56, 66, 67, 68,86, 670, 681: n = A,T,C or G
ncnccnaacgcntncactntnaggncgantggnanctccaccgcggtggcggccgnagtacactgnnncgtttctgcagctgcagnattctgctgttcgactctggtctaaaaagggtccagaagtaatgtgccttcagactttagactttggaaatggatttgctttggctctctgcttatcttttttgccaaatactgatgtacctgcccgggcggccgctctagaactagtggatcccccgggctgcaggaattcgatatcaagcttatcgataccgtcgacctcgagggggggcccggtacccagcttttgttccctttagtgagggttaattgcgcgcttggcgtaatcatggtcatagctgtttcctgtgtgaaattgttatccgctcacaattccacacaacatacgagccgggagcataaagtgtaaagcctggggtgcctaatgagtgagctaactcacattaattgcgttgcgctcactgcccgctttccagtcgggaaacctgtcgtgccagctgcattaatgaatcggccaacgcgcggggagaggcggtttgcgtattgggcgctcttccgctttctcgctcactgactcgctgcgctcggtcgttcggctgcggcgagcggtatcagctcactcaaaaggcggtaatacgggtatncacagaatcan

SEQ ID NO: 7688 - DNA, 724 bp, Homo sapiens
  misc_feature 505, 510, 519, 572, 577, 592, 596, 600, 630, 643, 648, 651,654, 673, 691, 697, 698, 707, 714, 718, 721, 722: n = A,T,C or G
ctatagggcgaattggagctccaccgcggtggccggccgcccgggcaggtactggtctgtctgcagaggcaccaagatgatatcttcctccactgtcagagttatttaggaaaaataatctctggcataggccgagtgctcataaatacttcaggatgagacaataaagccgctcccaggtcctggcatggcccaacctcaggacactggcctacacatttgcaggtagaagcaaaggcctgcgtcaggcctgtggccagcttttgcctgtgcgggaggctctaaaatgaagacaatcttactccaggtctccttccactttgttgcctctagaatgtcatctccctcccctcctcttggaaaggagtcactccaccccaaccatccaaaggctgatgggccccgctgcccaactcaatcccacacagtgccttgagcctagttgtgttccactgtatgcacagccctacacatgtgcctggaggtggaggggcactcggcttanctcangcccccaanggaactttgcatggggctggtgggaccaatgttgaaacccatagtcacttctnatggnaaggcaatggcaggngttntctnaacatccctttattcaggtcagccttttcnaggctttcctttntgtanctntgnctattcaaaccatttttcnttgttttaaaaacccttngggacnnccttttganaaagacnttcnaanntt

SEQ ID NO: 7689 - DNA, 616 bp, Homo sapiens
  misc_feature 12, 34, 55, 56, 130, 132, 136, 140, 144, 174, 337, 349, 379,387, 400, 401, 450, 472, 482, 484, 485, 490, 497, 507, 511,512, 518, 523, 527, 528, 549, 552, 563, 564, 570, 584, 585,588, 589, 594, 595, 604, 608, 609: n = A,T,C or G
agcgcgcattantcctcactaagggaaacaaagnctgggtaccgggccccccctnntggtcgacggtatcgataagcttgatatcgaattcctgcagcccgggggatccactagttctagagcggccgangnaccngggncatntactcttctgtattcaagtccttctcttanctccagggcatgactacagatgggaaagctaacagcttctataattaactgtgcacctctaaggggcgtttttcaactccgctagagaatactgagaagcacagataggcttcagagaatctgcaggaaatgagagcagagcgccaccgcggtggagctccanttcgccctatantgagtcgtattacgcgcgctcactggccgngggtttanacgtcgtgactgnnaaaaccctgcgttacccaaatttatcggcttgccggaaatccccctttngcaagttggcgtataagcaaanaggccccacngnnggccnttccaanatttgcccancctnnatggtnaattnaacnncccctttaacggaacattaanggnggggggggggnngggttncgccaaggggaacnnttnntttgnnaagaccctnaagnnggggcct

SEQ ID NO: 7690 - DNA, 653 bp, Homo sapiens
  misc_feature 62, 652: n = A,T,C or G
tcactgtagggcgaattggagctccaccgcggtggcggccgcccgggcaggtactactcagnagaatttcattgctactgcctgttcgttaacctagcaagtgagtaaattgaggctttaattaaaaaaaaaaacggttgttgttctttgatatacattttgacatagctcaagcttcaaccctgcccagttcctatgctcagaccccatcttcaaggatgctcctcctgcctaactcctctctcagaatattgttttttcctttcccgtttaatccccaggctcagctcctgggaccaatcctggttcaggctcctgttgcctgcctcatcccacagccgtccataatttggtggttacgtcatgcacctgaagtggtagtgagcatttatagtaataaaaatcatagtctcacactgccattttcagtcacactgatatacagcaagaacattgagaagcttagttgatgaagattctacatagtatatgtagaaaaactctatgttaattaagcaaatgttcttctacttggaacattattgaatctcaccaaacagactcaccggttctccagtttcaaagcacatcctctgcttcacaaccgatgtctgagctcccaatcgcagctaaatccagatcctcccatcang

SEQ ID NO: 7691 - DNA, 613 bp, Homo sapiens
  misc_feature 1, 2, 15, 21, 22, 41: n = A,T,C or G
nnccccgcgtccggnaaaagnnggattaaaagtctcaaggncatgggctgattggtgagcaaaagtttatttgacattttcttgggtcttcttcctctgtctggtcagattgcagaggaggatcgtaattccattttatgcaattttatctccactcacctttcataggaaatctctagaactctgagtaataattgctttgaattttagagttcaatgactgtcacattttcatctctcttttctttcttaatcatctgtctttggtggtttgatgtttttagttctatagaattcataagctacagggaggtagaacacaggacacattcagatttctttttctttctttcttttttttttttagccctgagatgtatttgacttctgaacacctagaaccctttgttttcttctttcctgtattccctgaccctttattccagttccagcttgctatttttgtttgatacatttgcagattcactgaagaccacccagcccatatatagctagctcttctgtgagatgtgtatttaaccctgaaaaaactaatgcaagaaataggagagatgaccgaagggaagactcatagattcttttccccctggct

SEQ ID NO: 7692 - DNA, 1022 bp, Homo sapiens
  misc_feature 2, 7, 9, 10, 11, 12, 13, 14, 15, 18, 19, 20, 24, 25, 26,28, 29, 30, 32, 34, 35, 36, 37, 40, 41, 43, 44, 46, 48,49, 51, 52, 53, 55, 57, 60, 61, 62, 63, 64, 67, 68, 69,70, 74, 75, 76, 77, 78, 79, 80, 81, 82, 83, 86, 88, 90,92, 94: n = A,T,C or G
  misc_feature 96, 448, 458, 493, 542, 547, 557, 756, 811, 839, 885, 886,907, 909, 914, 916, 926, 934, 935, 936, 955, 967, 972, 1014,1021: n = A,T,C or G
cntctgnannnnnnnaannntaannngnnnantnnnnttnntnntnanntnnntntnatnnnnngcnnnnatannnnnnnnnnatnangngntntnaattagggtcgccccgcgtccgccggggaattgtaatacgactcactatagggatctagatcacgtgcggccgctagactagtctagagaaaaaacctcccacacctccccctgaacctgaaacataaaatgaatgcaattgttgttgttaacttgtttattgcagcttataatggttacaaataaagcaatagcatcacaaatttcacaaataaagcatttttttcactgcattctagttgtggtttgtccaaactcatcaatgtatcttatcatgtctggatccccgggtacccgagctcgaattaattcctcttccgcttcctcgctcactgactcgctgcgctcggtncgtttcggcntgccggcgagccggtatcaagcctcacttcaaagngcggtaaataccggtttatccacaagaatcaggggggataaccgcaggnaaagnaacatggtgnagcaaaaaggcccagcaaaaaggcccagggaacccgtaaaaaaggcccgcgttgcttgggcgtttttccatagggctccggcccccctgaccgagcatcaccaaaaaatcggaccgcttcaagttcaagaagggtggcggaaaccccggacaggactataaagataccagggcgtttccccctggaaagcttcccttcngtgccgcctcttcctggtttccggacccttgccggctttacccgggataccctgntccggcctttctccctttctggggaaangcggggggcgcctttctcaataagctcacggcctggtaaggtaatnnttagtttccgggtgtaagggncngttcncnttccaaagcntggggctnnnggtggcaccgaaacccccnccggtttaaggncctgnaccgggttggggcctttaattccgggtgaaactaaatcggtntttggang

SEQ ID NO: 7693 - DNA, 647 bp, Homo sapiens
  misc_feature 51: n = A,T,C or G
ggagctccaccgcggtggcggccgaggtacaaagggaatagataacagggnacattgatctaaagggaggttagggaggacttcttggaggaagtggtatttgtgtctgagttatatgggatgtgtgggatttcttaggtgaaagagggcagagcaatacggtggtaggctagatctgtgcagcggcttagagacaagactgtacctgcccgggcggccgctctagaactagtggatcccccgggctgcaggaattcgatatcaagcttatcgataccgtcgacctcgagggggggcccggtacccagcttttgttccctttagtgagggttaattgcgcgcttggcgtaatcatggtcatagctgtttcctgtgtgaaattgttatccgctcacaattccacacaacatacgagccgggagcataaagtgtaaagcctggggtgcctaatgagtgagctaactcacattaattgcgttgcgctcactgcccgctttccagtcgggaaacctgtcgtgccagctgcattaatgaatcggccaacgcgcggggagaggcggtttgcgtattgggcgctcttccgcttcctcgctcactgactcgctgcgctcggtcgttcggctgcggcgagcggtatcagctcactc

SEQ ID NO: 7694 - DNA, 905 bp, Homo sapiens
  misc_feature 2, 3, 4, 5, 9, 10, 13, 15, 21, 26, 32, 33, 50, 70, 138, 145,276, 311, 388, 412, 449, 464, 531, 543, 612, 662, 751, 774,780, 791, 793, 841, 843, 845, 896, 904, 905: n = A,T,C or G
gnnnnaggnngtntnctattncctcntttagnnccacaaattgtaatacnactcactatagggatctagntcgcgggcggcccgctagactagtctagagaaaaaaccttccacacctcccctgaacctgaaaacatngaaacgnatgcaattgttgttgttaacttgtttattgcacttataatgggtaccaaataaagcaatagcatcacaaatttcacaaataaagcatttttttcactggcattctagttgtggtttgtccaaactcatcantgtatcttatcatgtctggatccccgggtaccganttcgaattaattcctcttccgcttcctcgctcactgactcgctgcgctcggtcgttcggctgcggcgagcgggttcngctcactcaaaggcgggtaatacngttattccacagaatcaggggataacgcaggaaaaanacatgtgagcaaaangcccagcaaaaatgcccaggaacccgtaaaaaagggcccgcgtttgcttggcgtttttttccataangtttccgccccncccttgaccgaggcattcacaaaaaaatcgaccgcctcaaagtcaagaaggtggcgaaaaccccgacanggacttattaaaggataccaggcgttttccccgtgggaagctcccttggngcgctcttctggttccgacccttgccgctttacccgggataccctggcccgccttttctccctttcgggaaggcggtgggggctttttnataagctcacgctggaaggtatnttaaanttcggtgtaangnccgttccgcttccaagcttgggcttgggttgcacgaaaccccccgttnangncccgaccgggtgggccttaatccgggaacttttgtcttgggtcccaccccngtaaggann

SEQ ID NO: 7695 - DNA, 796 bp, Homo sapiens
  misc_feature 11, 12, 13, 14, 17, 18, 19, 20, 22, 24, 25, 26, 30, 34, 35,36, 37, 40, 43, 44, 49, 51, 53, 56, 57, 59, 60, 66, 69,70, 72, 73, 75, 79, 85, 88, 89, 90, 92, 95, 96, 110, 111,119, 124, 125, 129, 134, 138, 141, 142, 149, 150, 156, 160: n = A,T,C or G
  misc_feature 162, 202, 291, 345, 350, 372, 378, 384, 405, 407, 411, 425,441, 447, 455, 467, 470, 495, 507, 514, 530, 538, 539, 542,548, 560, 566, 573, 575, 582, 588, 589, 592, 604, 609, 619,621, 628, 632, 639, 642, 649, 654, 665, 670, 675, 689: n = A,T,C or G
  misc_feature 691, 693, 699, 700, 707, 713, 723, 725, 727, 728, 739, 742,749, 756, 758, 759, 765, 768, 785, 788, 791, 796: n = A,T,C or G
acacactactnnnnaannnncnannntcanactnnnntantcnntctcntntnccnntnntatctntcnnanncngatnccttcnacnnntnatnntacttctatatcannattctctncatanntctntaagntggntcnnatctaannctactnactntngggcgaattggagctccactcgcggtggcggccgctctanaactagtggatcccccgggctgcaggaattcgatatcaagcttatcgataccgtcgacctctagggggggcccggtacccagcttttgntccctttagtgagggttaattgcgcgcttggcgtaatcatggtcatagcatgtntcctngtgtgaaaattgtatataacgnttcacnaatttntcacaacaacaataacaaaancncggnaagccataaaaagntgttaaaaaagccctngggggntggccctnaattgtagatgnagncttacaccttcactattttatattntgccggtttggncgcatcnaacttgccccggcttntttcccannatncggggnaaaaacacctgnttcgtngaccaancntggcacntttaanntgnaaattccgtgancaaancgtcccccgngntggtagnaagngccgggnttntggccgntaatntggggggccgncttcntttcnccgccttttccctncncnttccannatggaancttcangcatagtcancntnnggcggtaacgntantccgggntcttagncnnaggccntangcccgggtaaattcatngcnttnacttn

SEQ ID NO: 7696 - DNA, 644 bp, Homo sapiens
  misc_feature 27, 30, 36, 55, 115, 173, 192, 198, 200, 224, 230, 251, 256,262, 268, 270, 275, 276, 286, 289, 298, 306, 313, 314, 337,341, 344, 345, 350, 352, 354, 359, 361, 365, 390, 392, 396,400, 401, 403, 404, 407, 416, 423, 424, 454, 458: n = A,T,C or G
  misc_feature 467, 468, 479, 480, 491, 494, 499, 504, 506, 508, 514, 523,524, 528, 534, 535, 541, 544, 547, 548, 550, 555, 568, 571,577, 581, 582, 585, 596, 597, 601, 602, 603, 604, 605, 610,613, 621, 622, 624, 634, 636, 639, 640: n = A,T,C or G
caggtacttattgtctctcatcttgtncgngggggntgtttctcctttttaggcntatatatatctatggaagaaaaaagtttaaatagaaacactcatttgatgaggaattctntgtaaagaaggtaaaaatggaaatgatagaaaaaaagttttcttaccttgaagtagcnaataaatataaaacaaagnggggcngnatactgcagcaccaagaggagagnggtatnagacaacctatgaggagtccnatggnaattgntcaaancncaccnnatttgggctntgnacctgcccnggcgggcnctctggnnctaggggggtgcccctagcttgngggnatnnggtgncncngcttntncgtncccgggaggcctcgggggggggggncngggncccnngnnggnggggggcgncgggagnnggggggggtggggggccgcgcgcggggcgntgtngggcctctnncgcgtgcggcnncgcagggaggncgnggggngcggngngngggganggcgtggcnngggngggganngcgcgncgnggnngngccgnagcggcggcgggncgngggcgnacanngcncgtgaggggcnngggnnnnngggcnggnggggtggnngngggctgggangnggnngtgc

SEQ ID NO: 7697 - DNA, 448 bp, Homo sapiens
  misc_feature 255, 402, 411, 426, 433, 448: n = A,T,C or G
ggagctccccgcggtggcggccgaggtacctgcaggcctcctacacctacctctctctgggcttctatttcgaccgcgatgatgtggctctggaaggcgtgagccacttcttccgcgaactggccgaggagaagcgcgagggctacgagcgtctcctgaagatgcaaaaccagcgtggcggccgctctagaaactagtgggatcccccgggccttgcagggaatttcgatatcaaggcttatccgataccgtctnacctcgagggggggggcccggtacccaagctttttgttccctttagtgaggggttaattgccgcgcttggcgtaatcattggtcatagctgtttcctgtgtgaaattgttatccgcttcacaattccacacaacatacgagccgggnagcattaanagtgtaaagcctggnggtgccnaatgagtgagctaan

SEQ ID NO: 7698 - DNA, 444 bp, Homo sapiens
atacgactactatagggcgaattggagctccaccgcggtggcggccgcccgggcaggtacgcggggatccagaatacatttccaacaagagcactggccaagtcagcttcttctgagagagtctctagaagacatgatgctacactcagctttgggtctctgcctcttactcgtcacagtttcttccaaccttgccattgcaataaaaaaggaaaagaggcctcctcagacactctcaagaggatggggagatgacatcacttgggtacctcggccgctctagaactagtggatcccccgggctgcaggaattcgatatcaagcttatcgataccgtcgacctcgagggggggcccggtacccagcttttgttccctttagtgagggttaattgcgcgcttggcgtaatcatggtcatagctgtttcctgtgtgaaattgttat

SEQ ID NO: 7699 - DNA, 614 bp, Homo sapiens
  misc_feature 2, 3, 30, 41, 570: n = A,T,C or G
gnntcgcccacgcgtccgcttgcccatggncgaattgtggntgactgtggtggggcctttacgatgggtaccattggtggtggtatctttcaagcaatcaaaggttttcgcaattctccagtgggagtaaaccacagactacgagggagtttgacagctattaaaaccagggctccacagttaggaggtagctttgcagtttggggagggctgttttccatgattgactgtagtatggttcaagtcagaggaaaggaagatccctggaactccatcacaagtggtgccttaacgggagccatactggcagcaagaaatggaccagtggccatggttgggtcagccgcaatgggtggcattctcctagctttaattgaaggagctggtatcttgttgacaagatttgcctctgcacagtttcccaatggtcctcagtttgcagaagacccctcccagttgccttcaactcagttaccttcctcaccttttggagactatcgacaatatcagtaggacttctttcctaggatttctttaacagaacgagttgtggttcgagaaggatttcanaagatcaagttacagtctgtttttaaaaccataggtgggacagc

SEQ ID NO: 7700 - DNA, 471 bp, Homo sapiens
  misc_feature 2, 3, 4, 5, 6, 8, 430, 463, 469: n = A,T,C or G
gnnnnngngctatcactactatagggcgaattggagctccccgcggtggcggccgcccgggcaggtacaggtccgaaagtagaagaacacagaaggcaggccaggggcactgtgagatggtaaaagagatctgaagggatccagaattcaagccaggaagaagcagcaatctgtcttctggattaaaactgaagatcaacctactttcaacttactaagaaaggggatcatggacattgaagcatatcttgaaagaattggctataagaagtctaggaacaaattggacttggaaacattaactgacattcttcaacaccagatccgagctgttccctttgagaaccttaacatccattgtggggatgccatggacttaggcttagaggccattttttgatcaagttgtgagaagaaatcggggtggatngtgtctccgggtcaatcatcttctgtacccttnggccgntc

SEQ ID NO: 7701 - DNA, 638 bp, Homo sapiens
  misc_feature 4, 624: n = A,T,C or G
gtancgactactatagggcgaattggagctccaccgcggtggcggccgcccgggcaggtacgacagcatttggtgtaatatgaagagtaattaactttacccaaggcgtttggctcagagggctacagactatggccagaactcatctgttgattgctagaaaccacttttctttcttgtgttgtctttttatgtggaaactgctagacaactgttgaaacctcaaattcatttccatttcaataaactaactgcaaatcaccaaaaaaaaaaaaaaaaaaaaaggtccctcggccgctctagaactagtggatcccccgggctgcaggaattcgatatcaagcttatcgataccgtcgacctcgagggggggcccggtacccagcttttgttccctttagtgagggttaattgcgcgcttggcgtaatcatggtcatagctgtttcctgtgtgaaattgttatccgctcacaattccacacaacatacgagccgggagcataaagtgtaaagcctggggtgcctaatgagtgagctaactcacattaattgcgttgcgctcactgcccgctttccagtcgggaaacctgtcgtgccagctgcattaatgaatcggccaacgcncggggagaggcggt

SEQ ID NO: 7702 - DNA, 621 bp, Homo sapiens
  misc_feature 5, 11, 12, 46, 111, 112, 114, 115, 117, 120, 122, 123, 128,129, 131, 133, 136, 149, 161, 169, 175, 176, 182, 187, 191,208, 235, 479, 554, 563, 582, 588, 590, 593, 595, 599, 600,619: n = A,T,C or G
ttttngggccnnattgggtaccgggccccccctcgagtcgacggtntcgataagcttgatatcgaattcctgcagcccgggggaatccactagttctagagcggccgacgnngnngnacnanngaagnncngntcntgtttaccctganacgagacccagncaatgacngctganntcaccnatatnttcnctggtgagcagtctganagatataagactttttttctcaccacnaatgtcaccccataaggtcaagagtcgtgggatgaagtttgctgaggagcagctgctaaagcatggatggactcaaggcaaaggcctcggccggaaggagaatggtatcactcaggctctcagggtgacactgaagcaagacactcatggggtaggacatgaccctgccaaggagttcacaaaccactggtggaatgagctcttcaacaagactgcagccaacttggtagtggaaactgggcangatggagtacctgccgggcggccgccaccgcgaaggagctccagcttttgttccctttagtgagggttaatcgcncgcttgggnctaatcatggtcatagctntaaccngnacnanaaannttttttaaaaaacaaaaanag

SEQ ID NO: 7703 - DNA, 641 bp, Homo sapiens
  misc_feature 461, 507, 555, 569, 572, 601, 605, 613, 616, 619, 622, 624,633: n = A,T,C or G
tccccgcggtggcggccgagtactccatcctgcccagtttccactaccaagttggccgcagtcttgttgaagagctcattccaccagtggtttgtgaactccttggcagggtcatgtcctaccccatgagtgtcttgcttcagtgtcaccctgagagcctgagtgataccattctccttccggccgaggcctttgccttgagtccatccatgctttagcagctgctcctcagcaaacttcatcccacgactcttgacctctggggtgacattcatggtgagaaaaaagtctctatcctcagactctcaccagagaagaagaggtgatatcatccgtcattgctgggtccgctccgcggaaacatgtgccggaccctgacttgtgcgccgccatcttccccgcgtaccttgccccgggcgggcgctctaaaactagtggatccccccggctgcaggaattcnatatcaagcttatcgatacccggcgacctcgagggggggccccggnacccaacttttgttccctttaatggaggggttaattgcgcccccttgnggtaaaaatggggnaanccggtttcccgtgggaaaattgttattcnctcncaatttcncanaanatncnagcccgggngcataaag

SEQ ID NO: 7704 - DNA, 627 bp, Homo sapiens
  misc_feature 4, 6, 32: n = A,T,C or G
tgtncncactacttagggcgaattggagctcnccgcggtggcggccgaggtacgcggggacagaaggaggaaggacagcagggccaacagtcacagcagccctgaccagagcattcctggagctcaagctcctctacaaagaggtggacagagaagacagcagagaccatgggacccccctcagcccctccctgcagattgcatgtcccctggaaggaggtcctgctcacagcctcacttctaaccttctggaacccacccaccactgccaagctcactattgaatccacgccattcaatgtcgcagaggggaaggaggttcttctactcgcccacaacctgccccagaatcgtattggttacagctggtacctgcccgggcggccgctctagaactagtggatcccccgggctgcaggaattcgatatcaagcttatcgataccgtcgacctcgagggggggcccggtacccagcttttgttccctttagtgagggttaattgcgcgcttggcgtaatcatggtcatagctgtttcctgtgtgaaattgttatccgcttacaattccacacaacatacgagccgggagcataaaagtgtaaaagcctggggtgcctaatgagtgag

SEQ ID NO: 7705 - DNA, 630 bp, Homo sapiens
  misc_feature 72, 600: n = A,T,C or G
tcactatagggcgaattggagctccaccgcggtggcggccgagtacttttttttttttttttttttttttgngtggagcatgggacctttattcgttaagacatcaggctccagatatgaactttcagcagaagcgcttgccgggagcaaagggacagaaaagctgagatgaacagtgcctggcagcaatcacagccgggcaagggtgctccgagcctcgcatcccccggccgctctagaactagtggatcccccgggctgcaggaattcgatatcaagcttatcgataccgtcgacctcgagggggggcccggtacccagcttttgttccctttagtgagggttaattgcgcgcttggcgtaatcatggtcatagctgtttcctgtgtgaaattgttatccgctcacaattccacacaacatacgagccgggagcataaagtgtaaagcctggggtgcctaatgagtgagctaactcacattaattgcgttgcgctcactgcccgctttccagtcgggaaacctgtcgtgccagctgcattaatgaatcggccaacgcgcggggagaggcggtttgcgtattgggcgctcttccgcttnctcgctcactgactcgctgcgctcggtcgt

SEQ ID NO: 7706 - DNA, 418 bp, Homo sapiens
  misc_feature 3, 5: n = A,T,C or G
gcncnccgtaatacgactcactatagggcgaattggagctccaccgcggtggcggccgcccgggcaggtaccagcagaaacctggccaggctcccaggctcctcatctatggtgcatccaccagggccactggtatcccagccaggttcagtggcagtgggtctgggacagaattcactctcaccgtcagcagcctgcagtctgaagattttggagtttattactgtcagcagtataataactggcccccgtacctcggccgctctagaactagtggatcccccgggctgcaggaattcgatatcaagcttatcgataccgtcgacctcgagggggggcccggtacccagcttttgttccctttagtgagggttaattgcgcgcttggcgtaatcatggtcatagctgtttcctgtgt

SEQ ID NO: 7707 - DNA, 499 bp, Homo sapiens
  misc_feature 2, 7, 12, 378, 379, 380, 381, 382, 383, 384, 385, 386, 387,388, 389, 390, 391, 392, 393, 394, 395, 396, 397, 398, 400,401, 402, 403, 404, 405, 406, 407, 409, 411, 412, 413, 414,415, 416, 417, 420, 422, 424, 425, 426, 427, 428, 429: n = A,T,C or G
  misc_feature 431, 432, 433, 434, 436, 438, 439, 440, 441, 442, 443, 446,447, 448, 449, 450, 451, 452, 453, 454, 455, 456, 457, 458,460, 461, 462, 463, 464, 465, 466, 468, 470, 471, 472, 473,474, 475, 476, 477, 478, 479, 481, 482, 483, 484, 485: n = A,T,C or G
  misc_feature 486, 487, 488, 489, 490, 491, 492, 493, 494, 495, 496, 497,498, 499: n = A,T,C or G
gngatgnatacnactactatagggcgaattgggccctctagatgcatgctcgagcggccgccagtgtgatggatatctgcagaattcgcccttagcgtggtcgcggccgaggtactttggcctctctgggatagaagttattcagcaggcacacaacagaggcagttccagatttcaactgctcatcagatggcgggaagatgaagacagatggtgcagccacagttcgtctgatctccagcttggtcccctggccaaaagtgtacctgcccgggcggccgctcgaaagggcgaattccagcacactggcggccgttactagtggatccgagctcggtaccaagcttggcgtaatcatggtcatagctgtttcctggnnnnnnnnnnnnnnnnnnnnntnnnnnnnntnannnnnnnttnantnnnnnntnnnntntnnnnnntgnnnnnnnnnnnnnannnnnnntntnnnnnnnnnngnnnnnnnnnnnnnnnnnnn

SEQ ID NO: 7708 - DNA, 676 bp, Homo sapiens
  misc_feature 586, 615, 618, 674: n = A,T,C or G
cctcactaaagggaacaaaagctgggtaccgggccccccctcgggtcgacggtatcgataagcttgatatcgaattcctgcagcccgggggatccactagttctagagcggccgaggtacaactaaatattagctaatggtagcacaagtagaacctgtttaaaatttttaaaaaacaacctgttcactgtaagaatgagatacccaagggaaagaacaggaaagaggtgtatttttaatcctgccttttgtatttagtgtgccccatgactagctgttcatctaacatgcttcttggttctcggcaggtgaatggctatgtggtgaaccttttctgggcatttgacacccacaagcaagagaggagaactttgaacttccgaggaagcatattgtcacacaaaggtaacactttggtgctggtcagtgtgtgtgcaggaaggggtaaggctggaccaatgctttcccgccgtagagcttgactgggggtgccagggaaggggaggtattctctggaagctgttctgtgttgacaggttcttgtgcattgaggatcctataagtgtgctgctgattctaggcaganggattcactcagtggcccctcgagccctnctncaacctcatgacccttagtggaagttgggggccataaggaggaaaattggacagangc

SEQ ID NO: 7709 - DNA, 638 bp, Homo sapiens
  misc_feature 244, 251, 252, 263, 264, 265, 268, 272, 275, 279, 280, 283,286, 289, 294, 297, 301, 302, 304, 306, 307, 308, 309, 311,313, 314, 316, 317, 319, 320, 322, 324, 325, 329, 331, 332,336, 337, 342, 346, 347, 348, 350, 351, 353, 356, 359: n = A,T,C or G
  misc_feature 360, 363, 366, 367, 370, 371, 372, 374, 375, 380, 382, 383,388, 389, 392, 393, 394, 396, 397, 399, 401, 406, 408, 409,412, 415, 418, 419, 420, 423, 424, 425, 426, 430, 432, 433,434, 436, 438, 442, 444, 446, 448, 449, 455, 456, 459: n = A,T,C or G
  misc_feature 462, 468, 471, 473, 474, 476, 478, 480, 481, 486, 487, 488,489, 490, 494, 495, 496, 501, 504, 505, 507, 513, 517, 519,522, 524, 527, 528, 529, 530, 532, 534, 535, 542, 543, 545,547, 550, 553, 554, 557, 561, 563, 564, 566, 567, 568: n = A,T,C or G
  misc_feature 569, 574, 575, 576, 577, 580, 581, 582, 584, 585, 586, 587,589, 591, 597, 600, 601, 603, 604, 605, 611, 612, 613, 614,615, 617, 618, 620, 624, 627, 632, 633, 635, 636, 637, 638: n = A,T,C or G
gactcactatagggcgaattggaactccaccgcggtggcggccgagtacgggggccagttattatactgctgacagtaataaactgcaaaatcttcagactgcaggctgctgatggtgagagtgaactctgtcccagacccactgccactgaacctggctgggataccagtggccctggtggatgcaccatagatgaggagcctgggagcctggccaggtttctgctggtacctgcccgggcgnagaattnntctgaggaaannncanttantanaaannaanaanctncctgnccncgcnngncnnnncnannannanngnanncccngnnagcnngattnccgnnncnnantcnctnnatnccnnatnnntnntttgnanngtccnntgnnntnntntngatgngnnggnggngtnnnaannnnattnannnananattncntntnntaggcnntanaanataatngtntnngntntnnacaannnnnaggnnntcttngtnnanaataanaaananaanangtnnnntncnnataagtnngnantgngtnnatnaatntnntnnnnattannnngtnnngnnnnananaaatanttnnannnaaatannnnnannantttnaanaaaanntnnnn

SEQ ID NO: 7710 - DNA, 535 bp, Homo sapiens
  misc_feature 2, 3, 6, 371, 380, 505, 535: n = A,T,C or G
gnngancgatgaacactactatagggcgaattgggccctctagatgcatgctcgagcggccgccagtgtgatggatatctgcagaattcggctttcgagcggccgcccgggcaggtacaagagttacagcccttatgacatgttggaaagcatcaggaaagaggttaaaggagacctggaaaatgctttcctgaacctggttcagtgcattcagaacaagcccctgtattttgctgatcggctgtatgactccatgaagggcaaggggacgcgagataaggtcctgatcagaatcatggtctcccgcagtgaagtggacatgttgaaaattaggtctgaattcaagagaaagtaccttggccgcgaccacnctaagcccnaattccagcacactggcgggccgttactaggtgggatccgagctcggtaccaagctttgggcgtaatcatgggtcataagctgtttccctggggtgaaaaattgtttattccgctcaccaaattncacacaacataccgaagcccgggaagcatn

SEQ ID NO: 7711 - DNA, 451 bp, Homo sapiens
  misc_feature 4, 6, 169, 173, 230, 245, 301, 399, 443, 445, 448: n = A,T,C or G
ggcnanttggagctccaccgcggtggcggccgccaccatgtccgcctcggctgtcttcattctggacgttaagggcaagccattgatcagccgcaactacaagggcgatgtggccatgagcaagattgagcacttcatgcctttgctggtacctcggccgctctagaanctangtgggatcccccgggctgcaggaattcgatatcaagcttatcgataccgtcgacctngagggggggcccggnacccagcttttgttccctttagtgagggttaattgcgcgcttggcgtaatcatggncatagctgtttcctgtgtgaaattgttatccgctcacaattccacacaacatacgagccgggagcataaagtgtaaagcctggggtgcctaatgagtngagctaactcacattaattgccgttgcgctcactgccccgcttntncanatc

SEQ ID NO: 7712 - DNA, 847 bp, Homo sapiens
  misc_feature 2, 499, 500, 501, 502, 503, 504, 505, 506, 507, 508, 509,510, 511, 512, 513, 514, 515, 516, 517, 518, 519, 520, 521,522, 523, 524, 525, 526, 527, 528, 529, 530, 531, 532, 533,534, 535, 536, 537, 538, 539, 540, 541, 542, 543, 544: n = A,T,C or G
  misc_feature 545, 546, 547, 548, 549, 550, 552, 553, 554, 555, 556, 557,558, 559, 560, 561, 562, 563, 564, 565, 566, 567, 568, 569,570, 571, 572, 573, 574, 575, 576, 577, 578, 579, 580, 581,582, 583, 584, 585, 586, 587, 588, 589, 590, 591, 592: n = A,T,C or G
  misc_feature 593, 594, 595, 596, 597, 598, 599, 600, 601, 602, 603, 604,605, 606, 607, 608, 609, 610, 611, 612, 613, 614, 615, 616,617, 618, 619, 620, 621, 622, 623, 624, 625, 626, 627, 628,629, 630, 631, 632, 633, 634, 635, 636, 637, 638, 639: n = A,T,C or G
  misc_feature 640, 641, 642, 643, 644, 645, 646, 647, 648, 649, 650, 651,652, 653, 654, 655, 656, 657, 658, 659, 660, 661, 662, 663,664, 665, 666, 667, 668, 669, 670, 671, 672, 673, 674, 675,676, 677, 678, 681, 682, 683, 684, 685, 686, 687, 688: n = A,T,C or G
  misc_feature 689, 690, 691, 692, 693, 694, 695, 696, 697, 698, 699, 700,701, 702, 703, 704, 705, 706, 707, 708, 709, 710, 711, 712,713, 714, 715, 716, 717, 718, 719, 720, 721, 722, 723, 724,725, 727, 728, 731, 732, 734, 735, 736, 737, 738, 739: n = A,T,C or G
  misc_feature 740, 741, 742, 743, 744, 745, 746, 747, 748, 749, 750, 751,752, 753, 754, 755, 756, 757, 758, 759, 760, 761, 762, 763,764, 765, 766, 767, 768, 769, 770, 771, 772, 773, 774, 775,776, 777, 778, 779, 780, 781, 782, 783, 784, 785, 786-847: n = A,T,C or G
gngacgccgtatacgactcactatagggcgaattggagctccaccgcggtggcggccgaggtacaggaggccgacaatttggtgaccagtgatggcaggccactcagctttgagtagccatgtccgccacaggccctgcggcacatctcagctccctgggtgcagaattctgacatcatggccttatgcccgtgctcagtgcgtggagctgtgagaacatggaggggggttgggcggtgttagggggcctccaccatagggaccaaccctgtgcaccacttactgagcatctactcatgcccagctcagctctgaggtccccgcgtacctgcccgggcggccgctctagaactagtggatcccccgggctgcaagaattcgatatcaagcttatcgataccgtcgacctcgagggggggcccggtacccagcttttgttccctttagtgaggggttaattgcgcgcttggcgtaatcatggtcatagctggttcctgannnnnnnnnnnnnnnnnnnnnnnnnnnnnnnnnnnnnnnnnnnnnnnnnnnnannnnnnnnnnnnnnnnnnnnnnnnnnnnnnnnnnnnnnnnnnnnnnnnnnnnnnnnnnnnnnnnnnnnnnnnnnnnnnnnnnnnnnnnnnnnnnnnnnnnnnnnnnnnnnnnnnnnnnnnnnnnnnngannnnnnnnnnnnnnnnnnnnnnnnnnnnnnnnnnnnnnnnnnnnnannaannannnnnnnnnnnnnnnnnnnnnnnnnnnnnnnnnnnnnnnnnnnnnnnnnnnnnnnnnnnnnnnnnnnnnnnnnnnnnnnnnnnnnnnnnnnnnnnnnnnnnnnnnnnnnnnnnn

SEQ ID NO: 7713 - DNA, 633 bp, Homo sapiens
  misc_feature 562, 569, 576, 610, 620, 628: n = A,T,C or G
gcattaaccctcactaagggaacaaagctgggtaccgggccccccctcgggtcgacggtatcgataagcttgatatcgaattcctgcagcccgggggatccactagttctagagcggccgcccgggcaggtacgtgccaattttctggaagaaacaaaaatgtaattgatggccctagccttcaaagagttcccagttgagccaaggaggttaaatatgcgaagatgacgcaaaagacatacagcagcaggaaagcaaagctttggaatgaaacttgggtttgaatgtaggctgtggatgctcaccagctatggcaactctgagcctcaacaaatttctatttgtaaagtgctgttgttaataatgcttactgtgtgaggttgtgaacattaagatagtgcatggagagagcttagcacgggtctggcatgcagtaagcactcagttaccattactgatgttgctgtattgcatttgtgcttaggatacaagcagagcactttctctccctccctgggtctttaagggaagtaaggccccagtacctcggccgccccggggnggagctncaattcncctatagtgagtcgtattacgcgcgctcactggncgtcgtttanaacgtcgngactg

SEQ ID NO: 7714 - DNA, 630 bp, Homo sapiens
  misc_feature 532, 547, 561, 594, 621: n = A,T,C or G
ttggagctccaccgcggtggcggccgaggtacaattgatataacagctttgttgccaccccaggcttttctgtgatgatgccatgggccacattctgatcaaactgcacacccagaaggtgaagtgttggctccaagcgagaaaaattattaagtttggcacttgaaaccctgctgtccaaaaattctgaaaaatcatcctgaagttcaaacttgtgtagaacttctccaagtagatagccactggaaaatgcctttgcaaatgacttgggactcacggtccgggacaccttcaactccttgttgagccactggcacaggatctccgacatggttcagccggtgcctcagaccgcaggcgggggcttagaaactcgccgggaaccaagcctgccagcccgcgtcctcctgtagccaagggcaaccctttgctatggaccccgcgtacctgcccgggcggccgctctagaactagtggatcccccgggctgcaggaattcgatatcaagcttatcgataccgtcgacctcgangggggggccccggtncccagcttttggtncctttagtgagggttaattgcgcgcttggcgtnaatcatgggcatagctggttcctgggngaaattggt

SEQ ID NO: 7715 - DNA, 667 bp, Homo sapiens
  misc_feature 22, 30, 53, 471, 488, 508, 520, 524, 544, 545, 546, 547,550, 574, 583, 589, 597, 621, 649, 651, 654, 655, 665: n = A,T,C or G
gcaattaaccctcactaagggnaacaaagnctgggtaccgggccccccctcgnggtcgacggtatcgataagcttgatatcgaattcctgcagcccgggggatccactagttctagagcggccgcccgggcaggtacagttacaactgacttgcataacactaaagaaaacattgtaattcctacgccagtagtgggggtaaactgagaaccaacctaattttcaccacagggccctctggaaatagaggaactaaaatgatgactgtttgaaagtgaagaggcagattcctagaacatcactcctactgcattccttacctccactccataccctttccttcttcactcaggtaggactgtctctggaatgcatgacagcatgcacagttcagagcttggatgtgatcctggaaatgggcttagatgaccttatgaacactgaatgctgattgcagacactctcaacctncttcctctagttgactnctatggctgtgccagccagncctagacccttntagnagaacactagatgatacatnnnntgnggtatttttattacttagaaaagnaaaaagctncacctnataacatnatgtttctttttttaaaaaagctnatgttttgactggccagaaaactcccantnatnnaccttgttgntt

SEQ ID NO: 7716 - DNA, 638 bp, Homo sapiens
  misc_feature 20, 23, 30, 53, 516, 524, 547, 560, 596, 598, 608, 621, 631,633: n = A,T,C or G
gcgcattaaccctcactaanggnaacaaanctgggtaccgggccccccctcgngtcgacggtatcgataagcttgatatcgaattcctgcagcccgggggatccactagttctagagcggccgacaagcaagactggatgacctggctggcggccaatggtgcgcggtcgctggacgactaccggcatatcccgttcaacctcgacgaactggcactggatgccgccgcccgcgggcttggggtggcgatgacggacctgaccctggcggccgccaccgcggtggagctccaattcgccctatagtgagtcgtattacgcgcgctcactggccgtcgttttacaacgtcgtgactgggaaaaccctggcgttacccaacttaatcgccttgcagcacatccccctttcgccagctggcgtaatagcgaaaaggcccgcaccgatcgccctttccaacagttgcgcagcctgaatggcgaatgggacgcgcccctgtagcggcgcattaagcgcgcnggtgtggngggtacccccagcgtgaccggtncacttgccagcgncctaacgcccgttcttttgcttttttcctttctttntngccagtttgncggttttccccgnaagctttaantnggggc

SEQ ID NO: 7717 - DNA, 654 bp, Homo sapiens
  misc_feature 16, 50, 621, 628, 649: n = A,T,C or G
tatagggcgaattggngctccaccgcggtggcggccgaggtacgcggggnattatcttagtgtaaatgattttttgtaaaataatttagttgttagatacatgaacagatttttgcaaagaaaacaaattgcatggcactgtatcctctcaggacattttgagataagatgtgaaaatgatactcattgtaacaaaaaagattgaaaataatttttgtagaaaatataattaatttattctactatggtgtgtatggtgtgtgtgtgtgtatatatatatatatatatatactgaaataaaattatgagtaattaactttatgacaggtaacactaataaagtgcagtggcatgttcctgaaatcccagcattttgggggattgaggtgggaggattacttgaggccaggagtttgggactagcctgggcaacatggcaagactcccatctctgcaataaattaataagtaaaaaataaacaaaatattaattatgtgaaatagttttcattatgtttgatttccacccaaaaatgtatatatgggcattaattaatctactttttaatataattgaccatgttcctggaatacttaattttttattattataccttaagntctgggnacctgcccggcggccgtctanactag

SEQ ID NO: 7718 - DNA, 830 bp, Homo sapiens
  misc_feature 400, 495, 543, 569, 581, 615, 627, 628, 635, 638, 651, 658,660, 689, 702, 704, 714, 717, 721, 728, 752, 757, 764, 770,773, 775, 776, 777, 781, 785, 786, 787, 789, 790, 792, 793,796, 797, 798, 801, 811, 812, 821, 822, 826, 827, 829: n = A,T,C or G
ggcgaattgggccctctagatgcatgctcgagcggccgccagtgtgatggatatctgcagaattaattccagcacactggcggccgttactagtggatccgagctcggtaccaagcttggcgtaatcatggtcatagctgtttcctgtgtgaaattgttatccgctcacaattccacacaacatacgagccggaagcataaagtgtaaagcctggggtgcctaatgagtgagctaactcacattaattgcgttgcgctcactgcccgctttccagtcgggaaacctgtcgtgccagctgcattaatgaatcggccaacgcgcggggagaggcggtttgcgtattgggcgctcttccgcttcctcgctcactgactcgctgcgctcggtcgttcggctgcngcgagcggtatcagctcactcaaaggcggtaatacggttatccacaggaatcaggggataacgcaggaaagaacatgtgagcaaaaggccagcanaaggccaggaaccgtaaaaaggccgcgtttgctggcgttttttcatangctccgcccccctgacgaagcattcncaaaaatcgacngctcaagtcagaggtgggcgaaaacccccgacanggacttttaaannataccanggncgttttccccctnggaaagntncccttgttgccgcttcttccttgtttccngaacccttggccngntttaccggantancctngtcccgncctttttttcccttttggggaaangcggngggcgcntttttnaantnnntcancgcnnntnngnnttnnnaanttccgggggnnagggcgctnncccnncnt

SEQ ID NO: 7719 - DNA, 886 bp, Homo sapiens
  misc_feature 6, 18, 25, 29, 30, 569, 617, 648, 684, 685, 708, 710, 721,735, 754, 761, 780, 781, 795, 810, 862, 886: n = A,T,C or G
cggacncgttatcgactnactatanggcnnattggagctccccgcggtggcggccgaggtacgcgggggtagatggaaggaagaacttgtgtgcttagacctgacgctgggaggagatgctgccacctaggttacttgtaggaccctatacggcaacctcctttgccaggaactatttataaacatcctgcaggaaaatgagtctatatgtcagaatacacatttcccaccttgcccaacagtagaaaaacataagaagagaaaaacattaaaaaatgacaaggaagttaatggaagtcagcaatgtgatggtgtttggaggtggagccttcagaaggtaattaatgcccttgtaagaagaggccagagagcttgcgcaccttcttcctgccatgtgaggagccaagaagccggctgtctgcaacctgcaagaggaccctcactagaagctagccatactggcatcctcatcttggctttccaacttccagaactgtgagaagtatatgtttgtggtttagtcaatgggtctatggtaatttttttatagcagtcccagccaagacagngcctcatttactacataccatttatattattatataggctcctttcanaaacccttgttcaaaattagaagattagatncttgaaacccattacacccttccttagtttttagtnncaaaatattgagaaatagttggntnttactattttnatccaaaaatgcanaatcatggtgggttctaanttttatntttaatggacaaaattgannaactttaccccctnctaaattttacttgnccaagaaatgaaaaaatgggaaaaaaaattttttgaaaaccccccagggaangggttttatttttggtaaaaagan

SEQ ID NO: 7720 - DNA, 658 bp, Homo sapiens
  misc_feature 469, 478, 485, 496, 499, 513, 530, 570, 584, 588, 589, 595,600, 607, 609, 613, 614, 629, 638, 651, 658: n = A,T,C or G
tcctatagggcgaattggagctccaccgcggtggcggccgggtacaaaatatttatagatatgaggcttcactttgttgaattcatcatacacacacacttctttttagcagaaattaatagaaagccaattctaaattaatgtaggtaatacataatctactcaactggatgaataccttggttgcaagtcttgtcctgagcgagctaagtgacaacactctcaatctactgagcttccagcatctaggcagagctcccaggacaagcagaagtcacagggaacaggaagcaggaaagagcaggaaaagatcctttagttcccatgtgtagaaacaaatgctcagctgcctctgtattgaaccatactgatgcctgccactatattgttcattgtagatagaaatcattataagttgcagtcgattagaaattgcaccaccctcttttcaaaaagtgattacccaaantttggaaanggagagnaattccgatgntantttttggctttccngccaaagaaatttaatntttaaaaattttttaaggatgccttttgcaagccttgggnaccttaaaggtttngccnncaaaanccggntttaatntngaannacggtttttccaaantttggtttnaacaccccctttnacctgan

SEQ ID NO: 7721 - DNA, 647 bp, Homo sapiens
  misc_feature 20, 43, 53, 573, 632: n = A,T,C or G
tcactatagggcgaattggnagctccaccgcggtggcggccgngtacgcgggnacattgatgggagagatgtggaggaagagggaagaggtcattttccgtgaatacagcttttctttttaccctttaaacatttttgctccctttgttcttttcccagattacttctgtttgcttgggttcatctggctctccatgaatgtcctgcttttctggaaaaccttcttgctgtataaccaagggccagagtatcactacctccaccagatgttggggctaggattgtgtctaagcagagcctcagcatctgttcttaacctcaactgcagccttatccttttacccatgtgccgaacactcttggcttacctccgaggatcacagaaggttccaagcaggagaaccaggagattgttggataaaagcagaacattccatattacctgtggtgttactatctgtattttctcaggcgtgcatgtggctgcccatctggtgaatgccctcaacttctcagtgaattacagtgaagactttgttgaactgaatgcagcaagataccgagatgaggatnctagaaaacttctcttcacaactgttcctggcctgacaggggtctgcatgggggggggngctattcctcatgaa

SEQ ID NO: 7722 - DNA, 660 bp, Homo sapiens
tatagggcgaattggagctccaccgcggtggcggccgaggtacagcaatggcacactctatcctaataatgacatcctgtataatttagtatgctctgtatctcactttaaatgtagcattaaggatgaagcagtagaaaatgaacgccgggccttttaataatgaggctcaggtttgctatcttaatttcaggaattaggaatgggagggatgctaaggagactgtttaaatttttaaaaagttctctctatgcctgatacagatgcaaattgcttgctcattacattctttcagcctttttaaacaagtttgctaaaacaatcattctctggcattaagacagcttacctgccaagcttgacatttctataaccaaatcaatatttcaatagtctccaactataaatctgatgttgatttgaattctagggagtaatgaatgatccaattagaaaacaaacaaaaaagtaaaaaaaaatataattagagtgtttattcttccttgatgataaggagcccttgacaagacagaatgctgttgccagcaagcctccttctttacgtgtaatcgatcttggaagttaaaggtttgtttgcatttttaacattgagagttaaatatattcctttgattgagctgttaagtggcagctcaact

SEQ ID NO: 7723 - DNA, 652 bp, Homo sapiens
cactatagggcgaattggagctccaccgcggtggcggccgaggtacagtgattttaagagaataaatgtccaggattcccaactcctatatgcactttttactaaaatgattctgcttgagaatgtgcctgcagtgtgagggaatgccgtctcttttctcttttcccattttccattcaccctttaaaaaggcaaagcacacctcttcctcatcctgagtctattctggcatatcaccttgtggtgtaaaaacctccaggcaccaaacaaagggacactttgaaaatattagtgtcataaacttgtgatagggctccaaatctttccttgctgttatatatgtatttctgttaaggaagaagtgggatagaaatacaaagttgaggagaaaaaggaaggatgtaagctttctgattgtcttagcactttgggaggcagaggcagggggattgcttaagcccaggatttcgggaccatcctgggcaacgtggggagacaccatctctacaaaaaaaaaaaaaaaaaaaaaaaaagtacctgcccgggcggccgctctagaactagtggatcccccgggctgcaggaattcgatatcaagcttatcgataccgtcgacctcgagggggggcccggtacccagcttttgttccct

SEQ ID NO: 7724 - DNA, 631 bp, Homo sapiens
  misc_feature 570, 606, 611, 614, 616, 623: n = A,T,C or G
cctcctaagggaacaaagctgggtaccgggccccccctcgggtcgacggtatcgataagcttgatatcgaattcctgcagcccgggggatccactagttctagagctcgagcggccgcccgggcaggtacgcagatgaagaggcaagaaaattatgccaaattaccctgtttccctttgtcacactgcctcctcgctgacaccttcattctcctgcaaccttacactttgatgatgacttgctctgcttccatggaactacttcacttggcctatggcacaaggcacttccttccggcaacattcgcaccttgggagggggctatttttgcatgcacctagtccattgcaatccatttgttcttgaagggcaagatagaaactttgttttattatctacactcacgaaaaacaaattttgtgcaccattcccaacactattcttttttctttttttatttttagtaaaggtggagaaagcttttagtgaaagtcatccacatctcaactctcgtaacattaacattatggcctggttacttttcagcatcaccatgatagaaaaaaagcnccctccatttaataactaattaattttttctccctncccanagngngcaattnttaaactc

SEQ ID NO: 7725 - DNA, 677 bp, Homo sapiens
  misc_feature 3, 4, 7, 16, 17, 20, 417, 454, 529, 541, 588, 606, 607, 620,623, 636, 640, 662, 669, 671, 677: n = A,T,C or G
atnnccntgcaccacnnctncgcggttttgccccgtattatggagatgaaccaatggatttcaaaatcaacaccgatgagattatgacttcactcaagtctgttaatggacaaatagaaagcctcattagtcctgatggttctcgtaaaaaccccgctagaaactgcagagacctgaaattctgccatcctgaactcaagagtggagaatactgggttgaccctaaccaaggatgcaaattggatgctatcaaggtattctgtaatatggaaactggggaaacatgcataagtgccaatcctttgaatgttccacggaaacactggtggacagattctagtgctgagaagaaacacgtttggtttggagagtccatggatggtggttttcagtttagctacggcaatcctgaacttnctgaagatgtccttgatgtgcagctggcattccttcnacttctcttccagccgagcttcccagaacatcacatatactgcaaaaaatagcattgcatacatggatcaggccngttggaaatgtnaagaaaggccctgaaactgatggggtcaaatgaagggtgaatttcangctgaagggaaatatgcnnattcaccttacanagntctggaggatggnttgnccgaaaccacacttggggatanggatcananaagtcn

SEQ ID NO: 7726 - DNA, 644 bp, Homo sapiens
  misc_feature 21, 44, 63, 94, 510: n = A,T,C or G
tcactatagggcgaattgganctccaccgcggtggcaaagcagnactttttattttaacaagnaaagtcataaagtgaattttttcatgaaagnaaatagtcttcatttaagaaagtgttgccgttaaagggttatcttggcactaatgattggctttgggtgattttaattctgagatgtctgtcataaaggaaattatgagaccataaaattgagcttctaattttctgtaagaatacagaggagaaggaaggtaaaactgttaagggtgagcttaagtaatacacagatcctagataatcagttgcattttgtgctaatgtagatcacaatgcttgtgtttgaattaatgtttttttactgataagaaagatttgaaatggacagtggaatcaatcaacaatatttcttgggggtgcatttccactgatgccagccacaaggacaaatcttaaaccccaaattgttcagtgcctgtaggcttttctcattattatctgccacatggnaaataaaatggggattttctttctgagaagatacttttcaagatgataaccattttgcacatgttgccttggtgtctgtattttgggacagtttacccattctcacttacaggactgttcatcacaatccagag

SEQ ID NO: 7727 - DNA, 652 bp, Homo sapiens
  misc_feature 1, 2, 7, 14, 21, 29, 31, 45, 49, 60, 77, 83, 518, 603, 631,650: n = A,T,C or G
nnagctngtgttantttcttncttttgtncnttatatataaaaantagnaaacaacatgnaatctgcatttcttggnatgagnatagttaataacaaactatttctcaatatttgtatactaaaaactagtgaaggtgttatgtgtttcagtatcttatctcttatttgaacatgggtttctgaaaggagcctatataataatataaatggtatgtagtaaatgaggcactgtcttggctgggactgctataaaaaaattaccatagaccattgactaaaccacaaacatatacttctcacagttctggaagttggaaagccaagatgaggatgccagtatggctagcttctagtgagggtcctcttgcaggttgcagacagccggcttcttggctcctcacatgacaggaagaaggtgcgcaagctctctggcctcttcttacaagggcattaattaccttctgaaggctccacctccaaacaccatcacattgctgacttccattaacttccttgncattttttaatgtttttctcttcttatgtttttctactgttgggcaaggtgggaaatgtgtattctgacatatagactcattttnctgcaggatgtttataaatagttcctgncaaggaggttgccgtatangg

SEQ ID NO: 7728 - DNA, 659 bp, Homo sapiens
  misc_feature 20, 54, 76, 94, 505, 513, 582, 594, 602, 610, 630, 638, 651,653, 656: n = A,T,C or G
tcactatagggcgaattggnactccaccgcggtggcggccgggtacagcatggnataatttagatgtgactctggnacagagggatggatcagnatgacttcttaagttatcttccagtttaggagttcgtaaactatactttctcctttccagactatcctagtaagaaaattctcttttaagacagagtagaactctggaattcatcagttttgatgtttcttaaagtgtaatctaagatagtgctcctgtattaagttctgatgtctgaccattgttcaaataaagagtaaaatgcaaatgacaggaaattggctgtgttctgaatcctatttttatttgggataacaataagcctgtatggtcactgtgacctttgatttgctgtttctgcaacctcacacttgcctcaggattcttcttccacttctgcactttatattgggtttcttccaggcatcatattaaactttaagccaggtatgtgtatatgcatggggctgngggcctgnaaaaaattagcccgagagagaaaaaaatttaaggagtggggctagaagtaagcatgctctagaaacagnattttgggaacncagctctnggcccaanaaagcgacccggccacttgntaccggtnacatccataaccntnggnagg

SEQ ID NO: 7729 - DNA, 1040 bp, Homo sapiens
  misc_feature 3, 4, 5, 7, 14, 16, 18, 21, 22, 24, 29, 30, 33, 45, 47, 51,52, 53, 54, 60, 62, 72, 78, 87, 90, 91, 92, 94, 97, 104,108, 115, 118, 120, 126, 130, 141, 145, 160, 161, 179, 181,182, 199, 221, 231, 233, 285, 303, 310, 328, 338, 383: n = A,T,C or G
  misc_feature 388, 391, 394, 407, 445, 471, 479, 502, 527, 528, 547, 556,560, 562, 590, 593, 598, 599, 648, 650, 667, 673, 679, 684,704, 708, 713, 717, 719, 726, 737, 747, 767, 776, 777, 780,782, 794, 795, 800, 805, 806, 814, 819, 826, 829, 833: n = A,T,C or G
  misc_feature 839, 863, 866, 912, 922, 926, 937, 941, 942, 945, 950, 952,953, 954, 955, 957, 958, 985, 986, 993, 1000, 1013, 1022,1032, 1039: n = A,T,C or G
cannnantttaaangntnttnnanggatnnagnattattattatntncttnnnnagtttnangtacatgttntattantatcttatnttnnntncanagatggngaanattgtanttntnataagntgtngcccacgcgtncgcntcaacacataaatannaaaaaaaaaaaaaataanannaaaaaaaaaaaaaaaanaaaaaaaaggggcggccgctanactagtctananaaaaaacctcccacacctccccctgaacctgaaacataaaatgaatgcaatngttgttgttaacttgttnattgcancttataatggttacaaanaaagcaatancatcacaaatttcacaaataaagcatttttttcactgcattctanttggnggnttngtccaaacttcantcaatggtatctttatcatggtctgggatccccgggtncccgaagctcggaattaatttccctnttcccgcnttcctcggttcacattgaccttngcttgcgcttcggatcggtttcggnntgcaggccaaagccggatnttcagcttnaacntnaaaaagggcgggtaataccgggttaatnccnacaannaattcaagggggtattaaaccgccaggggaaaaaggaaaccattgttgnanccaaaaaagggcccaancaaaanagggcncaggnaaacccggttaaaaaaaagngccncgctntttngnttgggcngttttttttcncattaaggcnttcccggcccccccccttgnaccgaagcnnttnancaaaaaaaaatnnggacngcttnnaaaagttncaagnaggggtnggncggnaaaaancccccgccccagggggcctttttnaanagtaattaccccaggggccgttttttccccccccttggggaaaagncttccccttngggnggcccgccttntttnnttnttttncnnnnanncccttggccgggttttatccccgggannaaccctngttcccnccccttttttttncccttttcngggaaaaggngtgtggng

SEQ ID NO: 7730 - DNA, 622 bp, Homo sapiens
  misc_feature 2, 3, 10, 19, 25, 26, 37, 39, 49, 78, 93, 101, 196, 586: n = A,T,C or G
gnnttggccncccaaatgnctgggnntacaggtgtgngnccaccatggnccagccggttgtttacttttgataaaggnatagccaatgtaggnattaaagnggattccaatcgcagtccccaggttgggagtttatccatcaataaagcaaattacgataactcatagtgataaatattaaacccaagcaacaggnaaaatattttattttccagtgtttcattgggcttctgaatcattctggacacatgtatatttccctgtctatattagtagtatgttattttctcactttaaaattatcccgttaatttttggatttatttgttattttggaatatttctaaaaattatactgcaacatttgttattaaaataaataaagactagttgacaattactactttatctcaaatttcttcttaatgtgttataaggaaacataaccagaatagtcagtccaagagtcctgcacatcaattgatttctatgtgccaatttcctcactgcacaatgaaaaccttgcctcaaacacgcctctgaatctatggtaagaaaaaacctttcacaaattcgtgtaaatctntggcatcataaaatgatgaataacacatctcccgcg

SEQ ID NO: 7731 - DNA, 635 bp, Homo sapiens
  misc_feature 21: n = A,T,C or G
gcctccttagggcgaattggnactccaccgcggtggcggccgtagcttgcaggggtgctatgtgaagatggcggaattcccaacgtgcttctgcaaaattttatgtattcatccccctctgctctcagtagggtgttaccacctgcggatcctttgctttccccgctggatactaacagcctttttcataattgctagcacctatggaattgagtgttgaactgaacaaacaatagtctttctctgtaatgtcagagttatttataagacgaggcagtgttagacataagaaagagcactgggcaaagaatcagacaaccaggatttggttccattcttttattatcaaagaataaaaaaaaaacaatattattttaagatgcagtcccaagtcttataaggaatttgaaggcttctgggatctaatctaggtcatgcccattctgccttcccttgctgtgtgcccctgacacaagcatggaaacatgtattcacttacctttgcccttgggaacactttggtggggaaaaatgttgatataggttagcatttttataaactgtcaagttgtacctcggccgctctagaactagtggatcccccgggctgcaggaattcgatatcaagcttatcc

SEQ ID NO: 7732 - DNA, 647 bp, Homo sapiens
  misc_feature 21, 390, 395, 396, 398, 399, 401, 402, 404, 408, 412, 464,568, 589, 620: n = A,T,C or G
gcattaaccctcactaagggnaacaaagctgggtaccgggccccccctcgggtcgacggtatcgataagcttgatatcgaattcctgcagcccgggggatccactagttctagagcggccgaggtacgcgggaagccggggaccatctgtgttcaactttctgatgactttcacaagctctgcattttatctcccagctctgttgtaaggtattgtcagtgccttgcagaaaagaatcagattccttccaagtgacatagacagcaagttttggagagctaaggacaaacagggccgcagctcagctcagttggcttgcttctcccacaccagcattccctgcgcagcccaagttctcagatacttctgagatcttagtcaacaaagaanaaaannannannanaaanaaangtacctgcccgggcggccgccaccgcggtggagctccaattcgccctatagngagtcgtattacgcgcgctcactggccgtcgttttacaacgtcgtgactgggaaaaccctggcgttacccaacttaatcgccttgcagcacattccccttttgncagctggcgtaatagccaaangggccgcaccgatcgcctttccacagttgcncaacctgaatggcaatgggacccccct

SEQ ID NO: 7733 - DNA, 704 bp, Homo sapiens
  misc_feature 11, 13, 33, 50, 51, 66, 88, 93, 217, 219, 414, 426, 433,474, 491, 504, 514, 541, 544, 546, 547, 554, 556, 557, 559,564, 568, 572, 575, 579, 584, 585, 587, 588, 611, 625, 629,630, 634, 650, 651, 653, 659, 672, 673, 675, 678, 692: n = A,T,C or G
  misc_feature 704: n = A,T,C or G
tttttaggagncnaaaaccgcttttttggcctncactaaaaggcccaaannctgggtaccgggccntttctcggggtcgacggtatcnataancttgatatcgaattcctgcagcccgggggtatccactagttctagagcggccgaggtactgaattttctttcacccggttgattttatcatttgctctattaggtctgtttcaattttgtccantntcaaagggttaagttcttacattagaatgtggtccttactcctacagtatgccctttctgaggtctaaactgaatgtccaatgagctctgtggaatatctctactctgcctaggtcaaaaggttagcatctcacggcactaaaagaactctgatatattcattcaattctcagcactagtgcagctgctctctgnttttcaatgttnttttggnttattatttgcttaaacaatcctaagtatttaaggcatttncacttttttaaggctancactaaccagggngctctctaanattgtcctcaatgaccaaaactcaagnctntnnacttttnanntnaaatncttnaaanccnatgncatcnngnngggactaattttccaaatctccnagggacccgaaacnaccnnggangaaaaaaacaatttgnntncaaaanggggcctaggggnntnaanaaaacaaattccanaaaaaaaaaaan

SEQ ID NO: 7734 - DNA, 644 bp, Homo sapiens
  misc_feature 11, 15, 32, 40, 53, 510, 635: n = A,T,C or G
gctttctttancatnggtttcagttattctgnaacctttnccgccaaaacatncattaatacattgccagtgcatttctgaaaattttactttcatatatttaactatgtgattatcttagtgtaaatgattttttgtaaaataatttagttgttagatacatgaacagatttttgcaaagaaaacaaattgcatggcactgtatcctctcaggacattttgagataagatgtgaaaatgatactcattgtaacaaaaaagattgaaaataatttttgtagaaaatataattaatttattctactatggtgtgtatggtgtgtgtgtgtatatatatatactgaaataaaattatgagtaattaactttatgacaggtaacactaataaagtgcagtggcatgttcctgaaatcccagcattttgggggattgaggtggggaaggattactttgaggccaggagtttgagactagccctgggcaccatagcaagactcccatctctgcantaaattaataagtaaaaaataacaaaatattaattatgtgaaatagtttcattatgtttgatttccaccaaaaatgttatatggacattaattaatctacttttaatataatgaccatgttctgnaatacttat

SEQ ID NO: 7735 - DNA, 666 bp, Homo sapiens
  misc_feature 82, 443, 464, 468, 470, 484, 500, 502, 514, 523, 526, 535,549, 560, 562, 563, 568, 595, 599, 610, 623, 624, 626, 642,644, 656, 659, 660, 661: n = A,T,C or G
tatagggcgaattggagctccaccgcggtggcggtgctggcggtcattctcggctcattgctgcaggtgctgatcccccganactggctgttgcgcctgtttggtcgcgccggcctgggttccaccctgcgtggcgggctattcgccttgccggggatgatgtgcagttgctgcgccgctccggtggcggccggtatgcgtcggcagaaggtctcggtgggcgcggcgttggcgttctggattgccaacccggtactgaacccggcgacactggtgttcatgggctttgtgctgggctggggctttaccgcgctgcggttggtggccgggatcgtgctggtagtgggtgtttcgctagtggcgcaacgcatcgcgcggccgctctagaactagtggatcccccggcctgcaggaattcgatatcaaccttatcgataccgtcnacctcgagggggggcccgganccancntttggttcctttantgaagggttaattgcncncttggggtaatnatggcaaanctntttcctggngaaattgttttccnttaaaattccnannaaaanaacaacccgggagccttaaagtaaaancccngggggccctangagggaggccaanncnaattattgggttggcntncttggccctttnaannnggaaa

SEQ ID NO: 7736 - DNA, 659 bp, Homo sapiens
  misc_feature 19, 653, 656: n = A,T,C or G
ctccttagggcgaattggnactccaccgcggtggcggccgcccgggcaggtacgcgggagatatttgctgaactcataagtttatttgggtaacaagagtcaaaatgatattggttagcaaataaaaattcaggatacatattccaaaaatgctgtttatgtaattaatttggtgaagtctgtcaaaaaaaccagctagttgctgtggccgtgttgactgctgtggtaaattaagtgatgccctagcaaactaaagacagtgtcatgccttccaaaaggcccagagagagcttcaggagagaataggtccatcctcatgtagccgggagaattgcagaatgaaattgctcccagtattactagtaaaccttcaaatttcatttactggggcagagatagttccggttttaaggaaataatagaaaatcatggtctgaaaattctcaaacctgaaaggtgatattccatttcaggcagaagaagaatttgctcctcaaaatagaaatgttgaaagagaaggaagttgacgtttaaaaaaagtagttgtgaaatagcagctgtttcttttagctctgatattcaataaaaataaaatttatttttgcctttaattgtattttattttgcccatcatacataaaagtacaatgttnaangat

SEQ ID NO: 7737 - DNA, 654 bp, Homo sapiens
  misc_feature 480, 499, 516, 530, 531, 543, 545, 563, 572, 597, 612, 625,628, 633, 634, 644, 649, 650, 654: n = A,T,C or G
tcactatagggcgaattggagctccaccgcggtggccgagcggccgcccgggcaggtacctctcccctgacctcctttggctaaagtgcctttcagattttattactattgttaacatttccaacagccattttaacattatttttacaaatttgatgtgaatattccatattagaaatatgatttcagaagacaagaatttgttgtgaaaatgctaagactgaagctgacagaataacattcctgcttacaatgaacttttgcacgtatagtagaaaaccaggagcgtcctcaatgtgctccttcaccctattggctgcatctccatgagcccctgagaagggaaattaacactacctgcagaggagacaagaggcactgaggacccaggaggacccacaataagttgctaaaatgaaacatctggtacatttggggtttaattagtaatatgtctttacacaccaatgggttttgctntattgcaacacaagttgtnaatgatcccaacattgnggttacagacaaannttttcagttttntngggcatggagggctatgncctggcctntctaatttaagacaaacccccaggncaaattttttttttngggttttggaggnaantcaannaaattttggnagggnngatn

SEQ ID NO: 7738 - DNA, 622 bp, Homo sapiens
  misc_feature 581, 614: n = A,T,C or G
cctcctaagggaacaaagctgggtaccgggccccccctcgggtcgacggtatcgataagcttgatatcgaattcctgcagcccgggggatccactagttctagagcggccgcccgggcaggtaccatgattagttaaatataagactccgtaatttttacaattttaacaataattttatttcttcaagcttgttagtttgggattgtattaaaactacagtgtgtgacttagaaaatgataatgctgctttatggaaaatggattataggtgggtaagacttcattgcaaaaattgtgtaataccatcagtgttaggaacccagttgaagtctagaagacagatgatagtatcttagactaggttggtatttgaatagatattggtaatatcagtagaatttaataatacattagaaagaaagaaatcagagaagattcttttattttcacttgatacttgtgttgttactttcaatgagataagaaagacaggcaaaggagaacgttcaggggcaggggatgagaagaaaacaagaattttatgttggacatgctaagttaaacagctgcttaactcanattggcttctgtggaagcagaggctgacatgangttgctat

SEQ ID NO: 7739 - DNA, 639 bp, Homo sapiens
  misc_feature 427, 471, 505, 512, 519, 521, 529, 542, 547, 564, 614, 623,624, 626, 628, 635, 636: n = A,T,C or G
tatagggcgaattggagctccaccgcggtggcggccgtcagccattcggcgaactgcgcttcggtctcttgcgaaatggcatcgtagcgcacgcactggaaatacgtgccgtcggccggcagcaggctgaagcggctgcccgccaggccgtcgcggaacaggtcgcgcttgcgctggtaaaacgcgggcaagtccaggtagggctgcggcttggccatgtagccggcaatgccgtgctgcatcggcgtgttgacggtaaacacgttgtactggtgcaccttgcgaaattccgccgtcagggctgcgggcgccgctacatagccaaccttccagcccgtctttgcgcaatggtgagtagttgacccatggacgtatgctagaagccgcatggatgcaggctttcagatgtttgatcaatgtccatggnaagttcccgatttgacgctcttgaaggggatatgtccataccgncaagtgcatttaaatatatcataatataattggngatgacnaactaananactgactntgagcttgtgccnaaacncccaccttaaaaacatngacgggcgcccggcaggacttttttttttttttttttttttttgaaaaanatttccccnntngnccagctnnact

SEQ ID NO: 7740 - DNA, 673 bp, Homo sapiens
  misc_feature 23, 46, 494, 499, 501, 512, 532, 545, 548, 558, 565, 566,600, 609, 613, 638, 647, 650, 655, 659: n = A,T,C or G
gactcactatagggcgaattggnagctccaccgcggtggcggccgngtacgcgggggatttttagtaaagttttgccatgttggccaggctgatcttgaactcctgccctcaagtgatctgcccaccttgacctcccaaagtgctgggattacaggtgtgagctactgtgctcagctcagccatggaacaatcttgatgtataatttatctgcaggtatctccatctctatttgccactcttagtaaatgttttagtttgacagtaaacgagttgagacattaatgattgagagagcacctaagcagctcgaagtgctgggagtctctcctaaagaattagatgcacacagcatttttcccttacagacacttcactgagcagtcatgttggacttgggtggcgtctgctattagacacactatttcaccaattaaacccctgaaaaattgcattgcacaggactgattaaaattagatgactttagaaacgtnttttngnttttttccccngaaaagaatggaagtttggngggggactggccnttnggaaggaaangtatgannaggttggatttccctttttgggaaaccggatttnaatttttangcangcaaattttttttttacaacaaaantcttttttnaanaaaanaatnggggggttttttcc

SEQ ID NO: 7741 - DNA, 629 bp, Homo sapiens
  misc_feature 2, 4, 26, 28, 100: n = A,T,C or G
tncnactcactatagggcgaattggnanctccaccgcggtggcggccgcccgggcaggtactattaaatttaatgagaggtaacccatgcaccggcaggnaagttcaaggggacagaaggggcttgctccactctggagccctatctcctctcacctccttccttctagtttgacatgcgatcttgtctctctcttttataaagtgcttccaggcccttttgattaggatgctgtcctaaatccttcctaaagagaggttttggagccaccaacactgcttcactgtggaataaactttccttattaagattcttcattcactcataatcatctcctttttcctcactgctcattcatttatggagatagcacccatatcatagctacttggtcaaatcatggtgatactccccacttaggagaggaagatgactaggttatagctcttgcctttaggaaattaaaaaccctgtggtgtaatctacattacacagtggaatatggcatatatcatgaaaaaatcctatgcagtttctgagaggacttcttaaagatgaaaaagtgaggaatgtacctcggccgctctagaactagtggatcccccgggctgcaggaattcgatatcaag

SEQ ID NO: 7742 - DNA, 664 bp, Homo sapiens
  misc_feature 447, 552, 573, 577, 579, 592, 594, 610, 617, 634, 644, 656,660, 662, 664: n = A,T,C or G
tcactatagggcgaattggagctccaccgcggtggcggccgcccgggcaggtactgtttctttaaaaagatttgtatcttgctaggtaattaaacaatgtttacaattaatatatttatatttaaatagagacagggtcttgctgtatagcccaggcattcttgaactcctggcctcaagcaatcttcttgccttggccttccaaagtgctaggattacaggtgtgagccagtgtgcccggcccaattaataccatctaagtcattgtctaaggaacttttcgtttctgtttgttgtggggccagactttgggaagaaagtatgtttgataagaatttatcagataacccttttttttttttgtaatatctctttgggatagcattgtcttcctctgctttgggaagtcttttggttactcattactcaaaatttgccaaaatttanggtggtggtgattttggcccaattagaatttcaaacaccactttctgtctcccctaccgtatagctggaaaacttcttcaaggaaaaactttaacccctgatttntgggcaggaatcatggccccnatcnantaaacccccctantnggggagggcctggatntcctggnggcaggcctgccccagncccaaggacntttttggaaccnttgnancn

SEQ ID NO: 7743 - DNA, 798 bp, Homo sapiens
  misc_feature 345, 513, 520, 544, 590, 630, 664, 699, 704, 712, 725, 765,794: n = A,T,C or G
agcctatcgactacttagggcgaattggagctccccgcggtggcggccgaggacagttttgagcacctgccttgtgcctcaatgaatacttgttgggtgatgaatgatataaaattcatcttgacattcagcttaggtttggaagacagtgtatgatttctttaccatggccttgactcatcttctgaatggtcaggctaagtgctgcctccttctctgtgtagcctattcaggcacctgctcacctaccacaacctgccaggcccctccagctctggaagcatgctatgtgagaaataatcctaatatccaagtcacagacagtgggtgggcttggaagtgcanggcctgtgatccctttgtggagtagctgaatttagaagtgacagcaattgtgttctataatgagaatggtcctgatcatcatgagaataataactgccttttattgagaaactgtcaggtacctgcccgggcggccgctctaaaactagtggatcccccgggctgcangaattcnatatcaagcttatcgataccgtcnacctcgagggggggcccgggacccaacttttggtccctttagtganggttaattgcgcccttggccgtaatcatgggcatagctgnttcctgtggtgaaattggtatccctcaccaattncccacaacatacgagcccgggaacataaaagtgtnaaagncctggggnggcctaatgaggngaacctaccttcacattaaattgcgttggcgctcactggnccccttttcaagtccgggaaaacctgtcntgct

SEQ ID NO: 7744 - DNA, 663 bp, Homo sapiens
  misc_feature 419, 514, 532, 533, 543, 550, 565, 573, 576, 579, 583, 594,603, 604, 610, 611, 612, 620, 626, 639, 646, 655, 657, 661: n = A,T,C or G
tcactatagggcgaattggagctccaccgcggtggcggccgagtacgcgggatcaaacatcttgttatactttgtaaacattttctttttttaaaccccagttccagccggacgcccccagacctctgaggttcgaggaggtggtggttttcatttggggctttgcatatttggttgttaggttttgcgagagccttcttattttgccagacgtctcatgcggggtgaagtccactcggccccctcccctgagtcttcgtgtgcgcggaattcgaggagatccggttactaaggatatagaggaaaaaaaaaaaaaaaaaaaaaaaaaaaaaaagtacctgcccgggcggccgctcgactgcccgctttccagtcgggaaacctgtcgtgccagctgcattaatgaatcggccaacgcncgggggagaggcgggtttgcgtattgggcgctcttccgcttcctcgctcactgactcgcttgcgctcggtcgtttcggctgcggcgagcgggatnagcttcactcaaaggggnnataccggttntcccaanaataaggggataacncaggaaanaanatntgancaaaaggccancaaagggcnngaaccnnnaaaggccnggttgntggggtttttccnaggttcncccccttanangganta

SEQ ID NO: 7745 - DNA, 658 bp, Homo sapiens
  misc_feature 20, 63, 400, 497, 506, 543, 547, 560, 579, 580, 581, 586,587, 591, 599, 601, 602, 604, 615, 618, 625, 628, 632, 638,640, 648, 654, 658: n = A,T,C or G
tcactatagggcgaattggnagctccaccgcggtggcggccggctttgctccaggcctcaggnagtgtaagtttaagggcgcgaacctgggtgggacggggcagtttttccagcgggccatacgggaaaatttttggttcgaggaagacaaccaccctttttaaggagaaaactgcatcttgccctgcgttattcctacgcggtgcccaggtggggtgtgtgtggaccagtcaatgaccgcccaagctctccgagtagaaaacccaaacatggttttgtggggtgtgtgcctttgaccccggacttaagcaaaaagcgtggtcttgggcgtagctacgaggtggttggtgggctccagggcctgcgtgcccctcgacgtgagcgatgattggcggtgcangataacagatcgccctcttggccactcagtggcaggggacttgctactttccggtcggcggcgtttggcgtggaaagtttgggatctacagcagccnaaggcttgncctgacttttattggtgcccctggcagcgattaatcntccngaggaaaaaaagncaaggtttttccaaaatcnnntaaannatgncctttggncnnanttttgggggtnttnggtttanggnaccntggggnanggttcaancccttnaaan

SEQ ID NO: 7746 - DNA, 650 bp, Homo sapiens
  misc_feature 492, 496, 501, 510, 547, 566, 569, 580, 598, 599, 629, 637,650: n = A,T,C or G
tcactatagggcgaattggagctccaccgcggtggcggccgcccgggcaggtacgcgggtgagattctgctgggtgaagcctaagggcatagatgaaaagttaggatttggaagggagccagaagccaaaagcagttcccagaggccaggcaaaaacagaagctgagtgtgggactgaagccaaaaagcggaagatgatgaattccacagcgaaccgtgggagccgtcctggaacaatgcctgagatgcgcgctggctttctgggagcagttagggcccctttaggtatgtgaacccgcctcactaaatggccatgagcagaactgaactgcctacctgtttctccacctgtgcaagacacagtttctcagagcacagacgaagctccttgaaatatacgtgcattgctggcccttgcctaagcctacagttaggacttggccctggtaaattgaagttcatgaaataatgagaccttttattaaagacagnggcntaatnccaaatttnccccggaacatttcctttaaaaatgtttacagagtancattttggggtattccccntanactgttcagcnttttattcaaactgtttnnaggattcaaggtatttaaggtttaaattgnggccaaantggaaaaaaaaan

SEQ ID NO: 7747 - DNA, 613 bp, Homo sapiens
  misc_feature 48, 87: n = A,T,C or G
tcactcattatcctactgcaattttcctcttccctttgtcaaatgggnaatgatctttacgatcatgatcctttattgcaaccaggnacagaaatcatgaagtcatctatggccccttcctctcactccgcctccaattagttgtcctatctgccccttccgttctccttccatctccataatgcccaagctagtctatcacctctccattcatctttcactcaacctccagaattatcttcctaaaacccagactgattctgattttccctcctcaagaaacgctctctaacactaagcactttgcttctacctctatcgagcccaagggtattcatccttgtaatctctctaaatgagttcccagctgtccaccccacgagactaggagtttgttaaggacagaatcactcatttcatccttgtacctcggccgctctagaactagtggatcccccgggctgcaggaattcgatatcaagcttatcgataccgtcgacctcgagggggggcccggtacccagcttttgttccctttagtgagggttaattgcgcgcttggcgtaatcatggtcatagctgtttcctgtgtgaaattgttatccgctcacat

SEQ ID NO: 7748 - DNA, 642 bp, Homo sapiens
  misc_feature 21, 28, 31, 39, 438, 455, 474, 480, 481, 483, 484, 493, 495,496, 497, 500, 501, 510, 512, 513, 514, 515, 516, 517, 518,519, 520, 521, 522, 523, 524, 525, 526, 527, 528, 529, 530,531, 532, 533, 534, 535, 536, 537, 538, 539, 540: n = A,T,C or G
  misc_feature 541, 542, 543, 544, 545, 546, 547, 548, 549, 550, 551, 552,553, 554, 555, 556, 557, 558, 559, 560, 561, 562, 563, 564,565, 566, 567, 568, 569, 570, 571, 572, 573, 574, 575, 576,577, 578, 579, 580, 581, 582, 583, 584, 585, 586, 587: n = A,T,C or G
  misc_feature 588, 589, 590, 591, 592, 593, 594, 595, 596, 597, 598, 599,600, 601, 602, 603, 604, 605, 606, 607, 608, 609, 610, 611,612, 613, 614, 615, 616, 617, 618, 619, 620, 621, 622, 623,624, 625, 626, 627, 628, 629, 630, 631, 632, 633, 634: n = A,T,C or G
  misc_feature 635, 636, 637, 638, 639, 640, 641, 642: n = A,T,C or G
gccagacgcgcattaaccctncactaanggnaacaaaanctgggtaccgggccccccctcgagtcgacggtatcgataagcttgatatcgaattcctgcagcccgggggatccactagttctagagcggccgaactggtgggttaccgctcgcacgccgcctttacacgcgccttcaagcgggtcacgggcgagcaaccaggggcctaccggcgcgaccagaaattgcgccagctggccagctaagagcctgccggaatcaaggatcgcacaatcacagacgaacgagcacaaaaggacgacgctgacgtctgttgcgtgcgcgatatggccgatataatggccgggtgacttaccaacttagcaaggtaccccatgtcccgtctgacgctgcacactctcgataccgccccggccgccaccgcggtggagctcaatncgccctatagtgagtcngattacacgcgctcactgngccggnngnngacaacggnannnctnnggaaagccntnnnnnnnnnnnnnnnnnnnnnnnnnnnnnnnnnnnnnnnnnnnnnnnnnnnnnnnnnnnnnnnnnnnnnnnnnnnnnnnnnnnnnnnnnnnnnnnnnnnnnnnnnnnnnnnnnnnnnnnnnnnnnnnnnnn

SEQ ID NO: 7749 - DNA, 650 bp, Homo sapiens
  misc_feature 18, 21, 28, 29, 286, 357, 545, 546, 590, 602, 618, 628, 633,646: n = A,T,C or G
gcattaaccctcactaanggnaacaaannctgggtaccgggccccccctcggggtcgacggtatcgataagcttgatatcgaattcctgcagcccgggggatccactagttctagagcggccgcccgggcaggtacttttttttttttttttttttttgctcagaggttttgcctttaatgtcttcacgttccttgtcaagccccccactttcctttcccaatgcagccaggtctaatctggttgaagtaacatacgttaacaagggtattaatgtccactaaggngttagctgaaaaagaagacattagctgataaccaaagcattgagaagtatgatgtttagctgaagacaaanatggtaattgctaattaaagcattagctaaaaaacaaggagttaaccgatcaccaagcgttgagtccgtcgatctgggctgaaagtgagggctggctgatgattgaagtttggttgaaaaactaagcagttaacacatggctaactggggatagtttttaatatattaatccaaaagtaagatttctnnactcaataatcaaatgactacctaaaattgaaaacaggaattantctgggcatggnggctcatgcctgcaantctatacctnggccnccccccggggggngctc

SEQ ID NO: 7750 - DNA, 648 bp, Homo sapiens
  misc_feature 3, 19, 40, 610: n = A,T,C or G
ctnttttagggcgaatggnctccaccgcggtggcggccgngtaccgcggtttttaaatctgtcactgttcttcccccacttcaaagctgacttgacaactgcatttatttcacattgcaattgctgcaggttaataatattgttttatcaggaaacatttatcttgaggaagaaagttatcctaatacagcagataacttatccaaggacaaatagaaaggggactgtgtctagagggtaatgctaatgcctggcatgctataaaaataaatgaaatctgattaacactattggagggaagaataagtcatcgtttctatgaaatattattttcctgattggaaccatttccattttcgtcagcttaaaacattgcattaaagatgagatgactttaaaacggtgacagctatctcaagccctgtgattataaatggtgttataggcttgtaatcctatgggtttagactaaagtattttcttcataaattgaaagagaaacacactaggaattcagaagattttaattaaagttgttcaaaaaatttaatgggaattttaaaggctggctcactaagtagttttgataatgaaatttaatttatagaanaaagttcttggcaaatttggtaatgcccaaaagagcct

SEQ ID NO: 7751 - DNA, 887 bp, Homo sapiens
  misc_feature 1, 22, 34, 405, 418, 490, 495, 522, 545, 548, 561, 581, 595,608, 620, 630, 637, 638, 641, 678, 686, 728, 730, 735, 736,737, 761, 766, 770, 777, 778, 781, 791, 806, 808, 809, 810,811, 815, 816, 836, 852, 858, 860, 862, 869, 875: n = A,T,C or G
  misc_feature 877, 886: n = A,T,C or G
ngccccattaacttggtttccngggccaaattcnttatagtgagtcgtattaaattcgtaatcatgtcatagctgtttcctgtgtgaaattgttatccgctcacaattccacacaacatacgagccggaagcataaagtgtaaagcctggggtgcctaatgagtgagctaactcacattaattgcgttgcgctcactgcccgctttccagtcgggaaacctgtcgtgccagctgcattaatgaatcggccaacgcgcggggagaggcggtttgcgtattgggcgctcttccgcttcctcgctcactgactcgctgcgctcggtcgttcggctgcggcgaagcggtatcaagcttcactcaaaggcggtaatacgggtatccacagaaatcagggggataaccgcngggaaaagaacantgtgagccaaaagggcccagccaaaaaagggcccaggaaccccgttaaaaaaaggggcccgccgtttgcttnggccngtttttttccaataaggggcttcccgnccccccccctgggccgaagccanttnacaaaaaaaattnggaccgctttcaaagttcangaagggtgggcggnaaaaccccccgancaggggactttntttaaaagantaccccnnggncggtttttccccccttgggaaggccttccctttgggnggcgcttnttccttgttttccgaccccttggcccgcttttaccccggaananccctnnnccccccctttttttttcccttttnggggnaagncggtggnnccntttttttcantaaaggttccccccntnnnngggnntttttcaattttcggggggnaagggtccgtttcccnttcccnancnttgggcntttggngncccccaaant

SEQ ID NO: 7752 - DNA, 631 bp, Homo sapiens
  misc_feature 8, 12, 574, 579, 614, 619, 624: n = A,T,C or G
ttcctggntaanggtaagtttttaatatttaaaaatatgtaccattgactacttcatactgctacaaaatgcatttgaaattttttttctggccaaggaacctattcatccactctctccaaattaaatacttactagagaaatgttggcacttattaaccttgtaatatgaattagaaacaaacttgaccttcatatattcttttacacttatgaatctatttaactgcatgatttatctgcatgattcagaattttcttgataccatgtaactgaagtaagatttagaaatatattttcttgataccctgtaactgaagtaagatttagaaagctgaggtgacagttgtcacccataatgctgataaatataggaatgagtcgattataaatttaaaccttttgtggcattatgctaccaaaatatctcttttttaaaaaaaatttgtgggtgctgcatagagctttattaaaattacggctcagctgttcaaatacttgatgagaagacagaaaccagcagaggacatgcagggagtttgagcaagagctgctgagggccagaaccagggngcagngtggggagagagaaaaaagggaccctgggcttaanagttnacagncatcgca

SEQ ID NO: 7753 - DNA, 643 bp, Homo sapiens
  misc_feature 4, 22, 23, 44, 81, 88, 643: n = A,T,C or G
actntttttagggcgaattggnnctccaccgcggtggcggccgnggtacgcgggggactccttgagaagaaacggcggagnacctganaccgggaggctgaggctgtaggtgggctccgctgggtaaaagttgccgcagcagctgtcccttggccccatcgcgatttatttttcccccttgctttccgggtcccgggatcccaagtttgtaactaacgggagcgaatccacacccgagcaaaatgtttgcgagtttcaggcgcccttaattgaaaggctgtaattaacaagtccgctgtttgccagccaggcgccgttgcaggcgctttctgtggattgtcatttatttctcacagcaaccctaggaggctgttatccttgacatctgcagcagcccttccaagctgtggagaccaggtcatctggaatgcccatttatgtcaatggaagaaagaaaaaggggtctcctcccatcctcaccactgcattctcccaccaaccctgctcctgtcccacttcccacaactcagttgttgacaatttaacagtgggtttctggaaacagtgctgcctccttgatggtctaactaactaccagagttattctaacagcaggaatttcaagccaggtttgtaaaacaan

SEQ ID NO: 7754 - DNA, 675 bp, Homo sapiens
  misc_feature 467, 475, 505, 515, 519, 531, 537, 570, 572, 592, 604, 620,631, 632, 640, 643, 649, 650, 653, 664: n = A,T,C or G
tatagggcgaattggagctccaccgcggtggcggccgcccgggcaggtacatgccaggcacaaactggagtcacagatgccacactgactatcacattgtcatcatactcagagagagaaaggtgtatacacccagtattttcttatgttttctctatacttccatatccccacccccattatcccccgagacattcccagttggaagtcagttgcttatgggaaactggctgcagggggatcagcccacctgtaacacacggaaaggcagagaaacaatgagtcatggatttgagtgcaaacaagcccagtcctgctacagagagttacggaaaaaatctcactgttgaagagagacatctataagagaggtgaggaaaatgactgatagatccttttacaatatttctagggtagtctgtctgtgggagggggcaggagtctatgggaactctctgtccctcggncgctctanaactaggggatcccccggctgcagaattcnatttcaagcntatngataccggcgancttganggggggcccggacccaacttttgttcctttagngngggtaattggcccctggggnaaacatgggcanagctggttcccggggnaaatgtatccnntaaaattnccnaaaaannaancccggggcctnaagggtaaagc

SEQ ID NO: 7755 - DNA, 646 bp, Homo sapiens
  misc_feature 1, 20, 31, 342, 415, 502, 548, 602, 606: n = A,T,C or G
nactataggcgaattggaanctccaccgcgntggcggccgaacatttcgacatacgccagcatgtgatggccgaagtgatcggctgggccacctgcatgtgggtaaagcccggcatgatggtgtcggcatgctgttcggccaggtccgtcagcgcgctgcggaacgtcgccagcagggcggtgatgtcgtcgatggcggaacgcacgtacaggcggatgtcggtggccacctggtcgttgcgcgaacggccggtgtgcaatcgcttgcccgcatcgcctaccagttcggtcaggcgtttttcgatattcaggtggacatcttccagatccagcagccattcnaactggccggcggcgatttcctgcgagatttgcgccatgccgcgcacgatttccgcgtagtcggccgctctanaactagtggatcccccgggctgcaggaattcgatatcaagcttatcgataccgtcgacctcgagggggggcccggtacccagctttngttcccctttagtgagggttaattgcgcgcttggcgtaatcatggncatagctgtttcctgtgtgaaattgttatccgctcacaatttccacacaacatncaancccggagcataaagtgtaaagcctgggggtgcctaatgag

SEQ ID NO: 7756 - DNA, 647 bp, Homo sapiens
  misc_feature 1, 608: n = A,T,C or G
ntagggcgaattggagctccaccgcggtggcggccgcccgggcaggtactcacagatctgtttccagaaaccactacaagtgtcatgaaccttgggttgctctctgattgaattctgggatccaagctgggtaaggagagagatgagtccaggctgctacagaagattattttccataatttcaatatgagcagttttaaaacacagaggatttatagtcatgttagctaggccagccttaacacttcctctacctcatttcttagaaaccaacaagggcctttccagagagggccaaggacggtggcatccagaagggatgaaaacactgagtacctcggccgctctagaactagtggatcccccgggctgcaggaattcgatatcaagcttatcgataccgtcgacctcgagggggggcccggtacccagcttttgttccctttagtgagggttaattgcgcgcttggcgtaatcatggtcatagctgtttcctgtgtgaaattgttatccgctcacaattccacacaacatacgagccgggagcataaagtgtaaagcctgggtgcctaatgagtgagctaactcacattaatttgcgttgcgcntactgcccgcttttcagtcgggaaacctgtcgtgcccac

SEQ ID NO: 7757 - DNA, 717 bp, Homo sapiens
  misc_feature 2, 3, 4, 5, 7, 115, 134, 140, 150, 191, 213, 230, 275, 280,328, 332, 349, 365, 427, 430, 438, 476, 499, 516, 517, 526,538, 549, 570, 577, 581, 587, 592, 610, 614, 622, 633, 640,658, 665, 670, 674, 689, 702, 704: n = A,T,C or G
gnnnnantgttgaatacgactactatataggcgaattgggccctctagatgcatgctcgagcggccgccagtgtgatggatatctgcaagaattccaacacaatgggcggccgtnctaagtgggatccgagctnggtccnaagcttggcngtaatcattggtcatagctgttttccctgtggtgaaaattngtttatcccgcttcacaatttncaccacaaacataaccnagccccggaaagccattaaaaggttgttaaaagccttggggggtngcctnaaattgaagttgaagccttaaacttcaacaatttaatttggcgttttngcgncttcaaccttgcccccngcttttttccaagttncggggaaaaaccttgttccgtggcccaggccttggcaatttaaaatggaaaatttcgggacncanaacgtccnccgggggggaaggaaggggccggggtttttgccggttnttttggggggccgccttcctttncccggcctttttccttnngcttcaacntggaacttccgnccttgccggcnttccgggttccgtttttccgnggccttngccnggttcnaaagnccggggttatttaaaagntttnaacttttnaaaaaaggggncggggtnaaattaacccgggtttantttccancaagnaaanttccagggggggaantaaaaccgccagngnaaaaagtaaaact

SEQ ID NO: 7758 - DNA, 647 bp, Homo sapiens
  misc_feature 20, 23, 31: n = A,T,C or G
gcgcattaaccctcactaanggnaacaaagnctgggtaccgggccccccctcgggtcgacggtatcgataagcttgatatcgaattcctgcagcccgggggatccactagttctagagcggccgaggtacatacatacttgttattcttgttacatcttccttattgaataaattgtcatcacttaaaatgtccctcttcatctctaataagtttttgtcttacagactattttatctagtattagtatagctgccccaactctgtatgattgctgttttcatggtatatctttttctatccttttacttttcttttaaaataattttaaaaattaatttacatacactaaaatgcagagattttaagtgctcagttcaatgactgttgacaattatacacagctatatatccacccccaaacaagatataaaccatatataatatttcatacagttttctcatgcccctttccagtcaatccccatctccttcctgtaacaggcaagtgctttctgatcataatgatctttttaaaatcatagtatattcatttgtctgttctaggttttatggtaatgaaaccaaacaggaggtattcttttgtgtctggctgctttctttccatattatgtttttaagattcat

SEQ ID NO: 7759 - DNA, 662 bp, Homo sapiens
  misc_feature 6, 27, 56, 61, 82, 198, 210, 211, 212, 520, 632, 643: n = A,T,C or G
tttggngaaaaacccttttttgggggncgaaaaaacctccccgcggtggcggccgnttttncgggtactacaaatacaaaanccaaatggatgattggaagtgccctaaatgtcttataagaaaatacattatggtagatatatatactaaaatttatatttcagaagaatattaaaagaggaaaatgctagtggttnaatgttaagttnnnttaaacatatattatcctcaacaaaatattatcaaaccaaattcagcaacatctaaaaagaattatacaccatgactaagtgagatttatccctggaataagcttagtttaacatctgaaaattcatcagtgaaatacaccatagtaagaataaaggacaaaaaccacaggatcatctcaacagaaacagagaaggcatttgacaaactccaacaccctttcatgataaaaatactcaacaaactaggaatagatgagaatttcctcaacctaataaagggcttctgtgaaaatctcaaggctaattncgtattaatgggtgaaaggctaggctgggtgtggtagttcatgcctgcaacccagcgctttgggagaccaaggggggggggattgctgggcctcaggagttcagaccagccngggcacatggngaaacttctctacaaaaaa

SEQ ID NO: 7760 - DNA, 647 bp, Homo sapiens
  misc_feature 22, 44, 548, 570, 575, 576, 583, 599, 618, 631, 646: n = A,T,C or G
gactcttttagggcgaattggngctccaccgcggtggcggccgngtactttttttttttttttttttttgcaaggatggaatttcatcattccatcggttttgcccagaactggtggcaaactcctgggctcaggatatccgccagcctcagcctcccaaagtgctgggaatacaggtatgagccactgcactcgaccatttatgcatttcttcatatacttttactgacaaccgtaaattaacctctgtgtttctgtcaatcactggattttaagtcactaagtagcagaactatatctaatttattaacattcatcatccccctttgccagcattgaacatgatgttttgcatatagtaggcattaaatttgctaaatggaactaaataatgtttgataaataacatcatggcacatgaccatattaggcctaactaattatttattcttccatttagtgagtgcaaaactttagtcaaaaacattaaacatactattttctaattaccttattttgcattatttaattgaaagaaagtgtaattnaaaaggaggcctctaatgggcnaacannccattgncaataacagcagctgnggacactttacttattcanattaaggtcggtntttgtcaacttggana

SEQ ID NO: 7761 - DNA, 396 bp, Homo sapiens
  misc_feature 238: n = A,T,C or G
tacgactactatagggccgaattgggccctctagatgcatgctcgagcggccgccagtgtgatggatatctgcagaattcgccctttcgagcggccgcccgggcaggtaccgggaagcagtggtaacaacgcagagtcccgggaagcagtggtaacaacgcagagtacgcgggaagcagtggtaacaacgcagagtcccgggaagcagtggtaacaacgcagagtcccgggaagcagnggtaacaacgcagagtcccgggaagcagtggtaacaacgcagagtcccgggaagcagtggtaacaacgcagagtcccgggaagcagtggtaacaacgcagagtcccgggaagcagtggtaacaacgcagagtcccgggaagcagtggtaacaacgcag

SEQ ID NO: 7762 - DNA, 630 bp, Homo sapiens
  misc_feature 10, 43: n = A,T,C or G
cctcactaanggaacaaaagctgggtaccgggccccccctcgngtcgacggtatcgataagcttgatatcgaattcctgcagcccgggggatccactagttctagagcggccgcctttttcgccagcgcctcgcggatttcccgcgcgcgctgttcggccaggcggctcgcttcgagcaggcggcggcgctccgtgccgctgatggcagacaatctgtccgtggcctgcgctacgctttcgtcgctgggccgaaagcccaggcgcgccagcacgatgcgcgccagttcctcgcgccgctccgggtcttgcgtgaactggtgggccggcgtactggcggccagttcgcgcgccgcctcgcccagcacctgcagcagatcctgctgcggcaagcgctggccgatgaaccagtcgtcggccagcagccagcacaagatcatggccagcgccaggcggttgcggtccgccttcacctgcgcgccgataaaaccctgcaaggacgcggccgccaccgcggtggagctccaattcgccctatagtgagtcgtattacgcgcgctcactggccgtcgttttacaacgtcgtgactgggaaaaccctggcgttacccaacttaatcgccttgcagcat

SEQ ID NO: 7763 - DNA, 674 bp, Homo sapiens
  misc_feature 23, 31, 641, 670: n = A,T,C or G
gcgcattaaccctcactaagggnaacaaagnctgggtaccgggccccccctcggggtcgacggtatcgataagcttgatatcgaattcctgcagcccgggggatccactagttctagagcggccgaggtacgcgggagatgtgttatttatcattttatgatgccagagatttacacgaatttgtgaaaggttttttcttaccatagattcagaggcgtgtttgaggcaaggttttcattgtgcagtgaggaaattggcacatagaaatcaattgatgtgcaggactcttggactgactattctggttatgtttccttataacacattaagaagaaatttgagataaagtagtaattgtcaactagtctttatttattttaataacaaatgttgcagtataatttttagaaatattccaaaataacaaataaatccaaaaattaacggggataattttaaagtgagaaaataacatactactaatatagacagggaaatatacatgtgtccagaatgattcagaagcccaatgaaacactggaaaataaaaatttttcctgttgcttggggttaatatttatcactatgagttatcgtaattttgctttattgatggataaactcccaacctggggactgngattggaatcctcttaatcctacattggncttt

SEQ ID NO: 7764 - DNA, 689 bp, Homo sapiens
  misc_feature 649, 652, 663, 680, 681, 682, 683, 684, 685, 686, 687, 688: n = A,T,C or G
gcaattaaccctcactaagggaacaaagctgggtaccgggccccccctcgggtcgacggtatcgataagcttgatatcgaattcctgcagcccgggggatccactagttctagagcggccgcccgggcaggtacgcgggggcttagacctgacgctgggaggagatgctgccacctaggttacttgtaggaccctatacggcaacctcctttgccaggaactatttataaacatcctgcaggaaaatgagtctatatgtcagaatacacatttcccaccttgcccaacagtagaaaaacataagaagagaaaaacattaaaaaatgacaaggaagttaatggaagtcagcaatgtgatggtgtttggaggtggagccttcagaaggtaattaatgcccttgtaagaagaggccagagagcttgcgcaccttcttcctgccatgtgaggagccaagaagccggctgcctgcaacctgcaagaggaccctcactagaagctagccatactggcatcctcatcttggctttccaacttccagaactgtgagaagtatatgtttgtggtttagtcaatggtctatggtaatttttttatagcagcccagccaagacagtgcctcatttactacataccatttatattattatntangctcctttcanaaacccatgttcaaatnnnnnnnnnc

SEQ ID NO: 7765 - DNA, 663 bp, Homo sapiens
  misc_feature 16, 298, 390, 396, 402, 408, 430, 436, 441, 442, 494, 502,526, 533, 537, 547, 549, 554, 555, 558, 572, 577, 582, 583,590, 593, 597, 601, 602, 605, 612, 613, 617, 620, 621, 631,639, 644, 654, 656, 657, 663: n = A,T,C or G
tatagggcgaattggnagctccaccgcggtggcggccgcccgggcaggtacgcggggagtgactaaatttgtaggaatgatattttcatgggattactcaatctcacccaccattagttgcaggtgacaagaaagctaagttggcagatgtttgtgctagaagctgtgggtttacgtctcctttgtgcatgtgttccagacataccagtggcttggtatttaaacatcatgctcaggtgtgcagggtagtttttgagttataataggtatgcaggcgctgtgggattacttggttgtntatgtaaaaattattttgcactcacttctgaaatgagtgttagtagaatcatctttagaggaggttccaaggcattgaactgagatacctgnactgantgctgnaaattnaagcttaaaattgaaaccaggntatcancattnnatgccaggagagagtgggcatgaatgatttcaggaaatgaagagctagattncaaccttnaatttgcttacaccctttctgtgncaaattngtgngggctcactnancactnnatntgcccgtggaaatngattntaccnnacagganganactntgannaancaagctnnaaanccnnaaccgctctnaactaaanggatnccccggcctnanngaatan

SEQ ID NO: 7766 - DNA, 666 bp, Homo sapiens
  misc_feature 55, 552, 608, 641, 649, 655: n = A,T,C or G
tatagggcgaattggagctccaccgcggtggcggccgcccgggcaggtactgggnattacaggaatgagccactgtgcctggcctgattgcggattttattggaataacctataaatattgaacaatgcacctgcgaaagagtatgtcttaatcttctcttggaatactgtcaacaaagatctctgagtttgaagggtagaagtaactcactacttggctgctgactgtgaaatttagtcatgtttttattgtgggagtggactgattaaacagacaagtgttataaggttcaaattacaacatttctcctaatatgcagtgcttttaactatgataaacactgcaccccccttcacaaaaaaaaagaacccacccaccaatttttaactttcttctacaaacacctcttatctcttctctatcaaagcatgactggcctttttgaaatattcaggacaaaaagttaggaagagggcaggctcgctagttcaatgtcactacatataggggaaaatggaacacttcccatagaaagctctgatttctctcancgtgagtctctgtctgaggcattccccctctctctctgctaaccagacaccatacncagcatgttcctttccaatctgagtccttaaanggcatccngaaagngtccaggtttt

SEQ ID NO: 7767 - DNA, 637 bp, Homo sapiens
  misc_feature 614, 634: n = A,T,C or G
cctcactaagggaacaaaagctgggtaccgggccccccctcgggtcgacggtatcgataagcttgatatcgaattcctgcagcccgggggatccactagttctagagcggccgaggtacagctaactgtgctaggcagggcagccctgtgagttctactgctgtcttggttttacagagggggaagtgaggcacagagaagttaattaacctctgaagtgttgcagtctaaggcacagaggcacagttccaggcaaggttcatctgaatcttaagtcctcactctttgccaccatcctccactgctgagaccatccctgtgagtcctgccgctctcctcccctggtccatattcactgctactcaatgaggccaaggaagccaatggtcgtgtccccaagaggatatctctcccctcctgagaatctttctcatacatctcaattctgagatacagattgagaagcacctcagcaaatccactgcatggaaggcaaaacaaccttgatccacagcaatgaccaccaagcaagggaagcctggctatgagcacagtcataatgtcgttcaagttttggagattcaagcatagcatgtctcctgaacatcctcaanatcctgctgacatcaccagnggg

SEQ ID NO: 7768 - DNA, 640 bp, Homo sapiens
  misc_feature 34, 309, 345, 353, 377, 381, 397, 415, 424, 437, 450, 457,463, 468, 475, 487, 488, 505, 508, 509, 524, 536, 537, 556,558, 581, 585, 588, 589, 593, 595, 599, 601, 603, 604, 606,610, 613, 622, 623, 625, 640: n = A,T,C or G
gaattggagctccaccgcggtggcggccgatggnagtcagctgcgatagcggcctgacgtccgccgtggtcgatatcgcgcgcgcgcaggagcaatttacggttgccctgaatggccgcttcaagggcggccatatcacgcgccattacggcctgccggacaagcgcgtgcatgcgatccagctggagatgtgccagtgcgtgtacatggatgaagcggcgccgttcggctaccggcctgacctggccgcgcaagtgcagccgctgctgcgccagatgatggacgccgccgctctagaactagtggatncccccgggctgcaggaaattcgatattaagcttatngataccgncgaccttgaagggggggcccggtnccancttttgtttccttttntgaagggtaattgcgccncttggcgtnaatatgggcatanctgttttctgtgngaaaatnttttcngttanaatttcnacaaaataacannccggaacataaaatgtnaannctgggggccccattngggggcttactnncatttattggttgggcttntngcccctttttaaaaggggaaaangttntgnncctngntttntnannangccnacncgccggggnngngggtttttttttttn

SEQ ID NO: 7769 - DNA, 625 bp, Homo sapiens
  misc_feature 446, 449, 451, 452, 453, 457, 458, 459, 462, 463, 465, 466,467, 468, 473, 477, 490, 494, 509, 517, 519, 530, 534, 564,589, 591, 597, 604, 611, 620: n = A,T,C or G
aaagctgggtaccgggccccccctcgggtcgacggtatcgataagcttgatatcgaattcctgcagcccgggggatccactagttctagagcggccgggttaaacgagctgttcttggggaagtcctccagtgagtcatgcacttttttgcactttttggatttgctagacatttttcggtttctggtctggatgccttccttcttcatagtcaggggtctgttaatattgtgaagcttgtagtagagcccacaggcattgcagacagggtccccattggcattcctcctccagaagcgtgctgtggtgtggactgggtgctacttatagacccaatcagaatacggtggttgagaaggaaccagtgtttacaagtaatatcagaaagttgaaggaaccagtgtttacaagtaataccagaaagttgccaaaaaaaaaaaaaaagnagncnnnaggnnnaanngnnnngggtncctngggccgccccccngggnggagctccaattccncctatagngngtcggattacncccncctcactggccggcgttttaaacgtcgggnactgggaaaaccctggcggtacccnanttatcngcttggnaaaaatnccccttttncaaga

SEQ ID NO: 7770 - DNA, 662 bp, Homo sapiens
  misc_feature 296, 367, 383, 393, 394, 395, 417, 423, 435, 437, 438, 452,463, 477, 491, 492, 493, 499, 500, 507, 510, 512, 520, 522,524, 536, 538, 541, 545, 556, 559, 561, 562, 563, 569, 579,580, 582, 583, 584, 585, 588, 593, 595, 596, 598, 600: n = A,T,C or G
  misc_feature 607, 610, 612, 614, 617, 621, 626, 628, 629, 630, 639, 640,642, 643, 646, 653, 654, 655, 660, 662: n = A,T,C or G
ggcgaattggagctccaccgcggtggcggccgcccgggcaggtaccatggttggaatgataaatgatattgtcatttttgttagcagtgaagtgagtggcatctatgtattttttaaggtatataatgaaattgtgcctaggggagttataatttactctatgtatttttatatatacttaaatcaatacattcttacagactagcttctttagtggtaacatacaggccgattttctcactccatgaatgattacggacatgtatccaggagcggaggtccctcagccaccagtncacccaggtgtcttgctcttatctttcagaagggaaaattggctaggggtttctctccaccatgtgctgtnctccaggactttgggngaatccaggnnngggaaagaaggtagcatcagcngggaanattcaatgatgncnnttgtacagcataanacagaactggngaactttgaaaccntgtttgaaactccnnnggcttnngcaggangcngngaactttntngnaaatcgcggagngnggngganctagggacttnaangnnnggaaangtggagggcnngnnnnagngcttntnngngnggagccnccngntntanttcnccatntnnncgaaagggnntnnaantggtggnnnctggncn

SEQ ID NO: 7771 - DNA, 633 bp, Homo sapiens
  misc_feature 521, 524, 613, 620, 623, 626, 633: n = A,T,C or G
cctcctaagggaacaaagctgggtaccgggccccccctcgggtcgacggtatcgataagcttgatatcgaattcctgcagcccgggggatccactagttctagagcggccgaggtacttttctataagttaacttgctttcagcatcttaatatttttgcagatatttaacaattaagtttaaaatcaaaagcaagagatatgatacttgcagctcagaaagcagcaggacttcggtgggttggaacgcaactcttcttgctgttgtcccaggtgatttttcatcaaccaagtcttagatcaatcaattacacaaatatgacactattacatctttcttctggagttatctttctgttggtctaatactcagatgcttctgagccacgcaaagtaaaagccccaggtagaatatccatgagatgggactgattgtgcttccatggtttacctatctcagtggcctgccctcctggccctgtgaaatcagtttggaaacttgcccttcttcttcttcctggnggncttattaaacttttccaagttttgatgggtctacaaaccagaatttcatttgacattttcacctacttttacttttttttcaatggggnttatcanggnttnctttttn

SEQ ID NO: 7772 - DNA, 662 bp, Homo sapiens
  misc_feature 580, 593: n = A,T,C or G
cctcactaaagggaacaaaagctgggtaccgggccccccctcgggtcgacggtatcgataagcttgatatcgaattcctgcagcccgggggatccactagttctagagcggccgcccgggcaggtacaaccaccccccgggtatccataacctaacaataacaattgttaagcattcggccacacgtgtttcttcagctcccccacctcctccctatcctcccaggttcccactgaattatatatcatttcattcataaataattctgtatatttagttacagctcaatgaatttccacaaagtgaacatgctcatgcaaaccacacctgcactgggaaatagaaattacaaacacccggagccccctctgcaatactctctcagtcctttcctcactccttcccaaaagagtagctactatcacctattgtgaaccttgcatatatggattcatagaacatgtgtattttttggtttggctacatttgtctaacatttccgcgtacctcggccgccaccgcggtggagctccaattcgccctatagtgagtcgtattacgcgcgctcactggccgtcgntttacaacgtcgngactgggaaaaccctggcggtacccaacttatcgccttgaacacattccctttcgcagctggcgtatac

SEQ ID NO: 7773 - DNA, 641 bp, Homo sapiens
  misc_feature 1, 543, 600, 604, 618, 629, 639: n = A,T,C or G
nccacgcgtccgcggacgcgtgggttttttttttttttttgagatggagtctcgctctgtcactgaggctggagtgcggtggcatgatctcggctcactgcaagctccgcctcccgggttcacgccattctcctgcctcagcctcccaagtagctgggactgcaggcatccaccaccacacccagctaattttttgtatttttagtagagacgggtttcaccgtgttagccaggatggtctcgatctcctgacctcatgatcaaccctcctcagcctctcaaagtgccgggattacaggcgtgagccaccgcacccggccatacccagttactctttataaactaaggtctctgtggttttgcatgtaattttcttcctctatggaatgtctttttacccttctctatttggaaaatcatacagtctctactaacttgttctaaatataagctatctctattcccctaaccttaacatgctcccccaaattcgatctgtattttcatccccacccttaccatcaagacaagcagaattaatgncttccattggttctccatagcctaagtacctactggactataccgtatgtacattgnttangcctgggtaggggngagaatactgngcattttgtnat

SEQ ID NO: 7774 - DNA, 658 bp, Homo sapiens
  misc_feature 43, 324, 350, 352, 359, 364, 367, 390, 401, 406, 417, 431,447, 452, 455, 469, 475, 479, 490, 491, 492, 494, 497, 499,503, 505, 507, 512, 515, 525, 535, 536, 545, 550, 551, 554,555, 556, 564, 571, 580, 581, 582, 583, 585, 586, 589: n = A,T,C or G
  misc_feature 592, 594, 598, 600, 603, 607, 610, 623, 630, 634, 635, 645,646, 647, 648, 650, 651, 652, 653, 654, 655: n = A,T,C or G
cctcactaaaggaacaaaagctgggtaccgggccccccctcgngtcgacggtatcgataagcttgatatcgaattcctgcagcccgggggtatccactagttctagagcggccgcccgggcaggtacttatctgggtgggatgtggcacatttggtggttgcagtgggcatggaaaggagaggccagagtggaaatatacttaggcaaaataaccttaaaggaatcaggacccagttcatgagagtcagagtgggctcactttctggcttgggtaccctcggccgccacccgcggtggagctccaatttcgcccctatagtgangtcgtattaccccccctacttgccancntttttanaacgntcntgaacttgggaaaaacccttgcngttacccaacnttaantcgcccttggnaaaaaaattccccnttttgccaagttggcnttaanaancaaaaaagcccccnaccgantccnccttttcccannnanttngnccancncntaatnggngaaaagggancccccctctnnaccgggccnttaannccnnnggggggtnggggggntacccccannnngnnccnttnantttncnggncccntanccccccccttttnttttttncccnncttttttccnnnntnnnnnngtt

SEQ ID NO: 7775 - DNA, 635 bp, Homo sapiens
  misc_feature 11, 23, 27, 28, 39, 391, 402, 510, 525, 539, 570, 578, 594,604, 619, 628: n = A,T,C or G
taaaaaagttnagccgtttgganttgnnctccacgactnctatagggcgaattggagctccccgcggtggcggccgcccgggcaggtactctgtggtatttcacataatattaaccagctgttagcaatgactgatatatacttcccattgaaaatgatgtaaggtctgaaaggattcattttgacaattttatatcacatatttatatttaccttaggtggttctttttaatgttttaatttgggaccacactaatttctaacttggtaactcatctcttaccaaaattaataccaagccaagaaaaatggtttcatgaatagaatctactagtcttttatatcttataatggtagatcactgatgaggtagaactccataagagcttcnctctcacagtnaaaggttttggttgtgcatggattacacctggtgaaagttggttagtatttgtctaagtggcttaagacaaatttattttgatttgtattgtgaatgactttgcgaancacccagaatttttnccgcttcgtgtgtngtgtgtgtgtgtgtttttgagtccaagtctnacaccgtnccccagcccatagttncaatgagccnagatccgcaccactncacttcaantctgggt

SEQ ID NO: 7776 - DNA, 661 bp, Homo sapiens
  misc_feature 2, 3, 11, 17, 21, 33, 42, 539, 550, 564, 582, 605, 622, 633,641: n = A,T,C or G
gnncgcgcgtnatacgnactncactcttagggncgaattggnatctccaccgcggtggccggccgcgccgggcaggtacttttaaactggtggtcctaggattcattttaaccatttcttgcctcactctcactctgtcactatgtggagtgctctaatccattagggaatatagctcctatatcactggctacccaaatggacctcaaaaaggcagacagagcccatccccagaatatccttggttcttgctggtcacaaggaccaataacatcattaacattgatgtttcagagtcaatacaggtataagaaccttaggtttaggactgtgaataggggagcggtgaaatgaaaatacggccttgaattagtttcactgtcaacatatctcatatttatctagctagggtattttaattctagggtatgttatgtccagaagagaggaatgattttcacccttgccaacatctcagataattttagacaacagccatcgttacacatactatcaactaaggaactctgaaaccgtanctgcattttgntttgttatcattgnttttaattaaaaggcacnttttactatgtccatcatgacancttgtccactgtacttnaattactttcnaactaaanactagagatctaaccttcct

SEQ ID NO: 7777 - DNA, 623 bp, Homo sapiens
  misc_feature 2, 3, 4, 9, 22, 31, 37, 43, 45, 46, 74, 92, 476, 484, 497,507, 518, 533, 536, 544, 545, 546, 548, 550, 557, 558, 561,562, 565, 570, 572, 575, 576, 579, 583, 584, 588, 594, 600,609, 610, 611, 612, 619, 623: n = A,T,C or G
tnnnctgtnccaatactccttncaaagtgtncaggtncctggnannacaaatattactgaggaaccatcacagnagtgggagaggacatagnagtgataaaaactaactgtgatgtggaatcctacattggatcatggaccagaaagacagcactgatgggaagactgatgaaatctgaataagtctgtagtttggtttaaagaagaagaataataacaataatggtttagctgctggttccttaataaaattcccctagttactgtaatgtctgaaaatgaaccccctatggtgggctactgtgactgttcactgcatttgagaataaagaataattaaggaaaaaaatactctgtcagcctaggcaatatagtgagactctatctgtacctcggccgccaccgcggtggagctccaattcgccctatagtgagtcgtattacgcgcgctcactggccgtcgttttacaacgtcntgactggnaaaccctggcgtnccccacttantcgccttgcancacattcccctttcncanctgcgtannncnanaggcccnnccnntcnccttncnacnnttncccnncctnatggcnattggnccccccctnnnncggcccntaan

SEQ ID NO: 7778 - DNA, 644 bp, Homo sapiens
  misc_feature 383, 404, 479, 505, 508, 521, 538, 553, 556, 575, 580, 595,607, 609, 615, 620, 623, 624, 627, 635, 640, 643: n = A,T,C or G
cctcctaagggaacaaagctgggtaccgggccccccctcggggtcgacggtatcgataagcttgatatcgaattcctgcagcccgggggatccactagttctagagcggccgaggtacattgttattaatttggattataagttttctttggaacagttcaaggggctttgtctttagaaacaagatgatgtgttaccaggaccttacctcctttttcattcttcttgcctccctctttctttcactcatcctcttgaaaaggttatagtcatttatcactgtgagaataggcactgcaaatactattatgaatatgagaccattatccttcccttcctcctcccatccccagagatatggtgagagatcttgtaaaacttantttttggcaatgtcaaaaggngtaaataagttaagatcataggccagggtgtgggtggctcacacctataaatcccagccatcttgagagggccangcaggagggatctcttgagcccccanaangttcgagaacagnccgggcaacacaagatngaccctcattttttnctnaaaaattaaatttaaaaanaattncccgggggccggganccctgcccctgnanttaccngcccnggnnggncgcccccncgggnggng

SEQ ID NO: 7779 - DNA, 670 bp, Homo sapiens
  misc_feature 16, 53, 122, 277, 336, 445, 471, 473, 482, 499, 502, 509,513, 514, 540, 545, 552, 578, 579, 592, 593, 595, 596, 603,610, 611, 612, 620, 627, 639, 640, 642, 652, 654, 661: n = A,T,C or G
tatagggcgaattggnagctccaccgcggtggcggccgagtactttttgttgntgttgttttagagagacagggccttgctcttttgcccatgctggtctcaaactcctgagctcaagcagncctctgcctcagcatcccaagtagctgggactacaggcctaatactttttgtgcctgctcctctcttcctgtttctaccccatcatatctgctcagatcttcttatcaactactgcagcaacctgctaaaatgtctctcaatcttctggataagncaatcaactgctaaatgaatcttccctaaattttacttttattgagttcttctgctcanaaacctatttttacttctttctagtcctcagcatggtatttctttcttctatgttaattgacagtctgtccttaaatatgactgtctattcctgctcttcctttccctnaaaccccaaactcaccctttctaatntntcctttttncccaaaactggtttttnatntaccggngcannccaagtacctggcccgggccggccgnttctnaaactangggaaccccccgggctggcagaaatnngattcaaagcttnntnnaacccgncaacccnnnaggggggncccgggnccccaccttttnntnccttttaagngngggttantggcccctc

SEQ ID NO: 7780 - DNA, 646 bp, Homo sapiens
  misc_feature 541, 564, 614: n = A,T,C or G
tatagggcgaattggagctccaccgcggtggcggccgaggtactttttttttttttttttttttgctgatattgagccataggagccaagaagattgctaattttgaagtgtgcttggtcgggctttctactgatgatgttgctattgattcaaacagtcacaagtctttaggatcatttttagagcaatggcaagagtagggctgaaatgaaaatcagtctgagataatgaacactcctgctcagagatcattatgggctgagctgtgctgggaaggcactgagccttggggggctaacacttgcctcagtggagttagcactcagtaaccaggcaatcacctcgatccaaggctttcaactctcgtggaatatctgtcagtttgtcagttcagcaaataacaagtgttttgtttgtttcttttttgttttcccccggaacatggacttttaaaacagcttaattaaaaactatggcactttttcctgttgttcagtttggaggcaaagactactgggtagttggtgagaggcttatganagcagcttgctttctcctgaggnggaaggctaacttccatggtgtatggtacctgcccgggcggccgctctanaactagtggatcccccgggctgcaggaattcg

SEQ ID NO: 7781 - DNA, 677 bp, Homo sapiens
  misc_feature 9, 23, 31: n = A,T,C or G
gcgcattanccctcactaagggnaacaaagnctgggtaccgggccccccctcgggtcgacggtatcgataagcttgatatcgaattcctgcagcccgggggatccactagttctagagcggccgaggtacgtggcgtagcattccatgttcagctttgacatttattttctcatatcaaccctttttacacgtgaaacacaatctcgctcttgaagtcttaactgcatgatctgtgaaacctgtatttatattttcttcagtgtattcttgtcgtgtgtgtgtcctaaacaaaccaaaagaaaactttccaaatctaaagtattcattctccaattggagcaagaggagtcagttagatactatcacggcattcatttgtggctggcttgtcatatttacttatgattgataataaatctattttgctttttagagcctcccgagaagccatctgccttcgaggtatttagtttcatgatttcattttgaatgacttattaactatgtattttgtgaagtatacattctttattaatcattttgcttccaaccccatttagcctgccattgaaatgcaaaagtctgttccaaataaagccttggaattgaagaatgaacaaacattgagagcaggtaaattttttaatggaactatgcaaagaccaatatttcaatt

SEQ ID NO: 7782 - DNA, 671 bp, Homo sapiens
  misc_feature 2, 4, 46, 365, 377, 481, 520, 528, 546, 549, 560, 565, 571,588, 598, 607, 608, 609, 614, 629, 635, 636, 641, 645, 666: n = A,T,C or G
tntngggcgaattggagctccaccgcggtggcggccgcccgggctngtacgtctgttgtcttcatcatgagatcagaaaactctatgctgctccctaactatgtgaccttgagcaagtctcttaaaggagaacttcagtttctgtatttggagaagaaagaagatcatggtagatgatcctcttgaattggcttcaggctctaaaattctgtagtttggtaaaaatgcctaatgaccaaatggaggcaagatctcgttaccaagatcatggtggctttggaagtgacagagatggctgagaccaggaggctgaaatgaaattaagtcctatgatgttgctttaagttaatgctatctaagaaaangtgctggtagangagtggggccccaaaccttggcttcatagtgatggagtttccaaatcaatgggatagggaagcacatctcctatgatacagtaaatgattcagttttaaatttngagccttagaaagaaattttattccggtgggtagaatcntttttttntggtgaggggggaacccngcnttaggcctttnttccnagaaanaatgggaaaaccgggangggaattttncttgattcnnncaagnatgggggggcttggngaaccnnccccncccnaaattccctaccggggggggnggggg

SEQ ID NO: 7783 - DNA, 650 bp, Homo sapiens
  misc_feature 4, 5, 17, 608: n = A,T,C or G
tagnncatgcttctagnctcctcctggggtcctgctgaggctcaatgccagctgaaaccatacccttgctcacatactttcccttctctttccttcttcccttgcttccttagagattcctcctgcaatggcttcctcaaaaaagcattttcataagcaacctcatgtcagcctctgcttccacagaagccaatctgagttaagcagctgtttaacttagcatgtccaacataaaattcttgttttcttctcatcccctgcccctgaacgttctcctttgcctgtctttcttatctcattgaaagtaacaacacaagtatcaagtgaaaataaaagaatcttctctgatttctttctttctaatgtattattaaattctactgatattaccaatatctattcaaataccaacctagtctaagatactatcatctgtcttctagacttcaactgggttcctaacactgatggtattacacaatttttgcaatgaagtcttacccacctataatccattttccataaagcagcattatcattttctaagtcacacactgtagttttaatacaatcccaaactaacaagcttgaagaaataaaattattgntaaaattgtaaaaattacggagtcttatatttaactaatcat

SEQ ID NO: 7784 - DNA, 661 bp, Homo sapiens
  misc_feature 318, 333, 398, 400, 404, 429, 439, 470, 478, 482, 498, 509,511, 515, 519, 520, 527, 533, 537, 554, 558, 574, 575, 579,580, 581, 587, 592, 601, 602, 607, 616, 618, 620, 631, 635,636, 645, 646, 650, 651, 652, 658: n = A,T,C or G
agggcgaattggagctccaccgcggtggcggccgagtacttttccatatttccacatactaccaaggattttcaagtgtaggagtaattcaatcagaccctttctttcatatgagaattctcaaaagagtagaataaatggaacacagaaagaaaagactttaagcaaggggcttcttggaagccactgcagcagtccaggcaagtgatgctgaaggtctgcaacagaacaggggcccgagagtggagaagagtgggtaaactatcatattaaagaggccaaactcagactggggggcagtggctcacgcctgtaatnccaacactttgggangcttaggcaggcggatcatgaggtcaggagtttgagaccaacctgaccacatggggaaaaccccntntttnccaaaattccaaaaattagccaggnggggggggcncccctgtattcccaccttcttaggaggctgnggcagggnaatnccttgaacctggaaanaaggttgcatnancttnaatnngcccctngcctcnaccngggggaaaaaaaaaacntttntcaaaaaaaaaaaaannaccnnnccgggnggccnttttaaaanntgggntcccccggntngnggaattttttnttannctttttttnncccnnncccttnggg

SEQ ID NO: 7785 - DNA, 667 bp, Homo sapiens
  misc_feature 21, 387, 393, 396, 429, 434, 448, 451, 452, 454, 474, 488,510, 512, 520, 523, 527, 532, 546, 557, 565, 572, 576, 585,587, 599, 600, 606, 633, 636, 639, 641, 647, 648, 651, 653,654, 661, 664: n = A,T,C or G
tcactttagggcgaattgganctccaccgcggtggcggccgagtacttttttttttttttttttgtttttcactgtggtagggtggagcttaattgggcagacctgtcctcagggaccctggtggtgcatgtcaagcaaggctggctgtggtagtcaatgggccaggtgataaccaggtctctggtggtatgtcagatggggggccacagtggctgtactgtgaccatgttactggaggaggtgaagtagctttcagtggaagcctccataggcaggaagctagggacacaaactttgctaatgctttagccccagaggctacaacccagcacagcagcagctatgagcagtgaaatttaccctttgaggtaccctgcccgggcggncggctntanaactagtggatcccccgggctgcaggaaattcnatttnaaccttatccatanccnncnacttcaaggggggcccggtncccactttttgttncctttaatgggggttaattggncncctggcgnaanaatngggcnaaaacttttttccnggggaaaaatnttttcccntcaaaanttcncacaaaaananaaaccgggaacnnaaaagntaaaacccggggggcccaaaaagaggnccnccncnaattanntgngnngcccccnccnccc

SEQ ID NO: 7786 - DNA, 635 bp, Homo sapiens
  misc_feature 23, 86, 163, 554, 570, 593, 600, 617, 622: n = A,T,C or G
gactcactatagggcgaattggnactccaccgcggtggcggccgcccgggcaggtacttatttttatattaagtcagacttcaggnatttattttagccttcctttttgagaagctttctaagccctcagcattaagcagcatttttcctcatcgcacacggnatctgagcaggtgaccgcggctgggataggtgctgttgtgttgtgtgcaggtgggctggccagccgttgggtgtgtgtttttcctagagtaagaagcactccaggctgagatgagagctgttgaaatgagtaacatttccgtctcctgtgatacgcgctgctgttgcttctttcaaatgatcagatttacattcttttaatgggtcctttaaaaatgtaatcgagtgagaaggacttctaaagatttttctttggcctggatacacacgaggggattggaaattactaattcatgaaaatgaaaatgtgggcttcttttaaggaaaaattccctttgaacatttgacagaagtgggcgtaggggaaggggaaagattttgccctggattcntccacttaactcttgncaccactgggagcatcctgactnccctaanacaagtgagggaagttnttttngtttcactctaac

SEQ ID NO: 7787 - DNA, 1058 bp, Homo sapiens
  misc_feature 9, 12, 16, 18, 25, 26, 28, 34, 38, 47, 50, 54, 55, 57, 58,59, 64, 65, 69, 71, 73, 74, 76, 77, 85, 86, 88, 89, 90,96, 98, 100, 104, 105, 106, 109, 110, 112, 198, 199, 200,270, 416, 471, 512, 536, 559, 667, 674, 676, 748, 757, 764: n = A,T,C or G
  misc_feature 775, 789, 800, 833, 837, 875, 884, 896, 911, 913, 919, 922,923, 936, 940, 955, 963, 973, 1012, 1016, 1024, 1057, 1058: n = A,T,C or G
ccgcaaatntgngggnantcggctnntnaatttngggnaaattcggnggnattnngnnngaatnnttgngnanngnnggtaattnngnnnagaagngngnaatnnnggnntngtttacaatctctccggggggaacaaaacaagggaatcctgattgtgtacagtataaattgtattatattttttgtacttatgtgnnnatgtaaatagtttgtctcattcaattgtatgtgagcattgaaataaatcctaccatttaggggacaaaanaaaaaaaaaaaaaaaagtgcggccgctagactagtctagagaaaaaacctcccacacctccccctgaacctgaaacataaaatgaatgcaattgttgtttgttaacttgtttattgcagccttataatggttacaaaataaagcanataagcatcacaaaatttcacaaataaaagcatttttttcactgcattcttagtntgtgggtttgtcccaaaactcatcaatgtgatcttttatcnatggtcctgggatccccccgggtnacccgaggctccgaaattaattncctctttccggctttccttcgcttcactggacttcgccttgcgctcgggtccgttcgggcttgcggccgaagccgggtattccagctcactccaaaagggcggggtanattaccngntttattccaccaggaatccagggggggatttaaccgcaggggaaaaagaaacaatggtggaagccaaaaaanggcccagcnaaaaaanggcccaggggnaaccccgttaaaanaaaggggcccngccggtttggcttgggccggttttttttcccantaangggcttcccggcccccccccttggacggaggccattcnacaaaaaanaattcggaaccnccttcaaagttcaangnagggtnggnnggaaaaacccccncccngggggaccttattanaaggattncccaagggcngttttccccccctgggaaagccttcccttcggtgggccncctntttccttntttcccggacccccttgcccgttttaccccggnn

SEQ ID NO: 7788 - DNA, 640 bp, Homo sapiens
  misc_feature 16, 339, 371, 394, 399, 434, 443, 457, 472, 484, 492, 505,506, 511, 522, 526, 542, 563, 564, 571, 572, 579, 592, 594,596, 599, 602, 603, 604, 607, 617, 623, 626, 634, 638, 639: n = A,T,C or G
tatagggcgaattggnactccaccgcggtggcggccgcatacacgcgggcgatgacttcgtcgcgccggttctggtcgatggcgcgcgtgacgatggggctgcgtccgggcggcagctcgtcgatcaccgacacttccaggtcggcgtaatacgtcatggccagggtgcgcgggatcggcgtggccgacatcatcagctggtgcggcacggccgctctagaactagtggatcccccgggctgcaggaattcgatatcaagcttatcgataccgtcgacctcgagggggggcccggtacccagcttttgttccctttagtgaggggtaattgcgcgcttngcgtaatcatgggcatagctgttcctgtgtgnaaatggtattccgtcaaaattcncaaanatacaacccgggagcttaaaggtaaagcctggggngcctaatgngggacctaactcanattaatggcgttggnctaactgccccntttccagncgggaaacctgtnngccanctgctttaatnaatnggcaacccccggggangaggcgggttgggtattgggnncttttcnntttcctngttaattaactcntngnctnggnnnttnggttgggganggggtntancttacttnaagnng

SEQ ID NO: 7789 - DNA, 644 bp, Homo sapiens
  misc_feature 16, 51, 58, 61, 614: n = A,T,C or G
tatagggcgaattggnagctccaccgcggtggcggccgaggtactgcaagnggcaagnagnattacatttttcttatttctactactttttgttgcctaacacgtttagctggtgggacaggttctaagtatttgctaaatattgttctcattattttgaacatgtaaaagatgactgcattcttatatatttcccttttaagtttgaaaagtgaactactttctttatataaaaattcatttgcctattgtctcagaatatcacatataactggtgcactggacataagggatacgggttcccattgtggctttgtctataaatagctacaaataaatagctataaatagttttgtctataaatcttagagtgatgagtatcagttcaacatcagtaaagtgagtggcttggagcagtctcaggtctcctccattttttctgtatgactgtttcaatattttctttttgactttcaattgttgagtttttttcactcttattctaggtaaagattcttttcttgtatatcccgatcaggaatcatagcttctcaaagtttaccaattctagaaaattcttggccatcgggcatgggggcttatgcctgtaatnccagcactttggggagggctgaggcaggca

SEQ ID NO: 7790 - DNA, 671 bp, Homo sapiens
  misc_feature 19, 22, 29, 30, 53, 569, 582, 583, 615, 629, 634, 650, 652,663, 666, 667: n = A,T,C or G
gcaattaaccctcactaanggnaacaaannctgggtaccgggccccccctcgngtcgacggtatcgataagcttgatatcgaattcctgcagcccgggggatccactagttctagagcggccgaggtacccggcttggtgaggagtcccagattgtggaacaaagtattcctctgttcaataccatcttccaaaaagaaacaatgacctagtgtgtcaaacccaatggtgtcttttattagcaagccatttgtcccatgcacagtgatgcaccttgagaagctgtgatgaatagacaggccgtccacaaatgttgcatgtctgtatcctcctttataatccacgtcaccacacaggtgaaaatgaacagggtatcgccccatctgctgctgacccatgtgtttcaattccacataagaaagatggactgaagtaaaatttttcattatcataatgtgtcccccaaaggtatcataatcaaaaaattggcactgattttctgcgtagcatgagtcctccacttctccttggatcacaatattccgggtaagaattccaacctcagctctnatgtctacaccgnntttgatctcacccatgtgcaggaactgaaagntttttttgcttttnacctnaaatggctgctttcanancatggaaaaanatnnactc

SEQ ID NO: 7791 - DNA, 594 bp, Homo sapiens
  misc_feature 2, 3, 4, 6, 8, 12, 15, 17, 19, 594: n = A,T,C or G
cnnncntncgtncanananactttaggagcaaagttaatatccgtgtgtgactagcttaaagacagtgtactccacaagccagaagattagtctccttccctgtagcctcatctagcttacttattcagactttctgttcacaaggggtttgttatcttcatgaaattttaatatgtgtaagttagaaatgaaattagaaaaagaggttcttgctgtaaacactgggcagagtagctcagaagaagactgtggttcttggatgccctcatgcctttgttccagtgcaggtgcctagtggagggtgcagtgctcttgcaacatagaaggacccatcttgcaggagctgatggcttagctcctgggaacgggaggagaggaagggcttgtggacccaacctctgttgaattgactggctttttgagagaccactgaaactctcccctccccactccaccccccatctgtgctagcggaagtctatctagaaagaaaaaaggagaaagtgtttaaatacgtgatggacgaatgccccctgcctctggtatactttttcttaacagaaaaggtcattctaactttgcataatcttcan

SEQ ID NO: 7792 - DNA, 654 bp, Homo sapiens
  misc_feature 9, 12, 13, 35, 42, 63, 547, 556, 585, 600, 602, 603, 610,614, 616, 617, 619, 625, 629, 637, 638, 641, 648, 651: n = A,T,C or G
ttatttgcnggnnttttttagtctctatttgaggnttcttgnttattctaagccagccatggnaagtaaatggacctcaaagtaaaaatcttccataaaataatagttgagttagatatgcaacttttgtaggtaaattccctggcatatatgaacaaataaacatttctgtgaacaaaaaaaaactgagctcagagaaggaaaaggacaccgaagtcttggacctactgacttctgtgtccagagggacacaaaaatgggaaagagtttgacatcaagtatacatcaggcaccaaaagctttccataaatgttgggagacaaaggccagccagcttacttcatgaaaacatagtctgggaaaagggtccctcaatcttgaagaaggattgtgaaaactaattactgcctggggtcacagcttacataggatgttgatctgcatagtagaaggaaagacagtctgaaagataggtcttgaaccaagttcacttgatagctcagcttcatctgagatgtacctgccccgggcggccgcccccgcgggnggagcttcnattcgcccttatagggagtcggattaccncgcgctccctggccngnngttttcnaccntnngnactggnaaancccctggnnttnccccaanttnatt

SEQ ID NO: 7793 - DNA, 651 bp, Homo sapiens
  misc_feature 18, 58, 613, 616, 627, 640: n = A,T,C or G
cctatagggcgaattggngctccaccgcggtggcggccgggtactgatctaaccaagnatattttgtttttctcatccaccagtcactttctcagtcctttctgtatcccttgcaatttgaacaaagcttggtgaatagtgtgcacacaaaaagcacactaggtgaaagacaggtacataaaaagggtaaagtcatgatattttaacaaacctatcaagctctaaatataagcctccttggtagttttctctttaaccctctctccactgttggatgaaatttgctgcattcaattccagttcccaccccaacttccttcttaacacaaggtcagggttaagccttcggtgctttaatccagaggaaaattacttattttaaaaagcagtgaaaaacaccgcattcctttggcacaggatgaagaccagctcagctcttcagttgttgatcattgtctattgttctccaaacagtaaaccagtatttcacactgagattgtcggctgcgggtatattccaattccccgtctcctcatgaatatgaagtgaagggctctgaccctggaagtggtaggtaattgcttggcgataggtgattggctcgccgctcanctntaggcgatggnctcaccactcggngataggcaatg

SEQ ID NO: 7794 - DNA, 666 bp, Homo sapiens
  misc_feature 3, 10, 20, 25, 35, 103, 167, 322, 328, 383, 384, 396, 398,408, 416, 422, 424, 429, 431, 432, 434, 436, 438, 440, 441,446, 447, 448, 455, 463, 467, 468, 478, 485, 488, 491, 492,513, 518, 519, 520, 521, 522, 524, 528, 530, 534, 539: n = A,T,C or G
  misc_feature 543, 544, 547, 549, 551, 557, 558, 561, 570, 572, 574, 575,576, 578, 579, 580, 587, 589, 594, 601, 603, 604, 608, 611,613, 614, 615, 616, 617, 620, 625, 626, 631, 632, 633, 634,635, 636, 638, 639, 641, 642, 644, 645, 648, 649, 650: n = A,T,C or G
  misc_feature 652, 653, 654, 656, 657, 658, 664, 666: n = A,T,C or G
gtnatacgcnctccactctnagggncgaattgggntctccactcgcggtggcccgcccgggcaggtacatgacattattgtagctgttgtttacattacaggnaatacttcggatataccaatgcatgtgaagaatgggtttcccctcagtttcacataaacttagnaaatgtctcaactgacatttctttttcttttttttaatttttaattctttttttttttgagacagtttcgctctgtcgcccaggctagagtgcagtggtgtgatctcagctcactgcaagctccgcctccagtgttcaggccattctcctgcctnagcctncccaagtagctgggactacaggtgccccgcccccacgctcagctaattttttggnnttttaagagagncnggggttttanccttggtnacccangnagggncnncntntncnngaccnnngggaccncccccccntttnnccttcccaanggggccnggnatnnccagggggggggccccccggncccgnnnnnantggnantggnggggngggnncgngngnggagcnnggngggggggtntncnnntnnngggaggnanggggntggggtncnngtgnggngnnnnntanagggnngggannnnnngnntnnanngannnannntnnntgaggnan

SEQ ID NO: 7795 - DNA, 640 bp, Homo sapiens
  misc_feature 563, 566, 580, 586, 629: n = A,T,C or G
taaagggaacaaaagctgggtaccgggccccccctcgggtcgacggtatcgataagcttgatatcgaattcctgcagcccgggggatccactagttctagagcggccgcccgggcaggtacgcgggggcgggcagggggagaggaacaagcaatttatggaaaaaatgcaaatggctcttaaacagacaaatatgctactgagagggatttaaatgaaaactacgtggaacatattcatcatgaatcttgattatggtgttggtttcacgggtctgtgtccaaactcaaaacactttaaagatgcactttattgcaccaagtgtacctcggccgccaccgcggtggagctccaattcgccctatagtgagtcgtattacgcgcgctcactggccgtcgttttacaacgtcgtgactgggaaaaccctggcgttacccaacttaatcgccttgcagcacatccccctttcgccagctggcgtaatagcgaagaggcccgcaccgatcgcccttcccaacagttgcccagcctgaatggcgaatgggacgcgccctgtagcggcncanttaagcgcgggggntgtggnggttacgcgcagcgtgaccgttcactttgccagcgccctagcnccggttctttg

SEQ ID NO: 7796 - DNA, 657 bp, Homo sapiens
  misc_feature 564, 650: n = A,T,C or G
cctcactaagggaacaaaagctgggtaccgggccccccctcgggtcgacggtatcgataagcttgatatcgaattcctgcagcccgggggatccactagttctagagcggccgcccgggcaggtacaagggagacagcatgcagggtgtgttcagaagagcttgctgaggtgctcggctcttagcattaaaaatgtgatgttggtatatcatcctgatagaaaacactgctttccaaatcctagtcactggatgggaggaaagtaagaacagattctgccaaccactactgatttgttataattctccccattgaaattgggacaaaatttgtaacatgctactctgaaattgatcacattctcaattctgtcaatagcagagaatttagcctcaacaccaccaattcaaaatagtttaggtcttgcccctgcctgattatgtaacagaaaggcataaagtttgcagggtggagcgggaggatttttctaggaaacttccttctcttccattaacgtgtgaatgagtaaggacaggtaatctctgcttctgatataaatattangggtagaggctgagtagaagaccctctttttgttttcagtagctcattctcattcaccaatgataaggagacttggctctcaactntaagtgt

SEQ ID NO: 7797 - DNA, 841 bp, Homo sapiens
  misc_feature 5, 20, 27, 30, 37, 38, 61, 202, 280, 281, 479, 491, 493,580, 675, 684, 739, 771, 781, 788, 810, 814, 815, 816: n = A,T,C or G
gccancgcgcattaaccctncactaanggnaacaaannctgggtaccgggccccccctcgnggtcgacggtatcgataagcttgatatcgaattcctgcagcccgggggatccactagttctagagcggccgcccgggcaggtaccggttgatgtaagcacagggatggtggggacagggtgaccaaagtgaactgggcacnaggtgagtagctggtatatagtgacttggaaggcaaggtgcttgaaatttcctggaaaatctctgcaagtgcacagtnnaaactattatcattggttacgtgcttcaagaggactgggcagatgggggggcaggaataagagagccactattcacttgacaaattcttggacattttgatttctgagccatatggatgtgtgtcctatcaaaaagaataagtgaaaatgttcaatagtaagagaacactttgtaaatctctggctgttgctctttgngattagcctctnancactcttatttggaataatcagaaaaatacaactatctaaattttgggaggagagtatacttgtggagatttgggaagaaagaaaanaagtatggaagtttcccccaataataaaatgaaattcactgggaagccatttcaaacatttagaaaggttaaccagaaaaatagaaaagtggccnggccgcagnggctcacgcctgtaatcccaccactttggggaggctgaggcatgagaattattgnaactgggggaaggcggaggcttcaatgggctnaaaattgagncccctgnactccaccttgggcaacaaaancctnnntaaaaaaaaaaaaaaaaaaaaaaac

SEQ ID NO: 7798 - DNA, 621 bp, Homo sapiens
  misc_feature 7, 8, 29, 35, 41, 45, 75, 231, 584, 617, 621: n = A,T,C or G
gttttgnngatactgaccccattttttgntgcttncaaccntaanccaaacccagcacggcatttatatattttnatgattttataatgtcccatttgctaatcctgaaataaaatacataggtaatagtaatgacttagcaatttcaaaatatcaatggaggaatactagtgtttggagacctaactatacaggagaaataaaaggaaagtcattttttataacattatncatgcatgtataaagcactcagatctgatgacattgggagacacggtggcatagccagatccttacacctgtttgtggactcaccatgaatacagcagtgacaaagcagacccccacggctataactgataggaatttcattggtcttggtgatgtcattttctagaatggtaagaaaatcttggtaaagtttaaatgaaacaaaataaaattgcccatcagtatacacagtagttgctgttctggaaagttcagtgcctcataaactatacaaaatatctatacaaactatacaaaatatataaagcagaattcattctgtgttcaagtgacagggattttattgttgctgntgttttacttacataaaattgagagaaacagcngaan

SEQ ID NO: 7799 - DNA, 685 bp, Homo sapiens
  misc_feature 20, 406, 453, 493, 504, 520, 526, 532, 534, 536, 555, 568,574, 576, 590, 596, 602, 607, 613, 624, 626, 629, 641, 643,646, 655, 658, 661, 662, 663, 668, 672, 677, 679, 681, 682,684: n = A,T,C or G
tcactatagggcgaattggnagctccaccgcggtggcggccgaggtacctgcacttcagaccctggctccatgtacacctgtgctccaaacctggctctgtggctactgcacaggtgccagcagctcaaacagtcaaacagtgccacccttgcaataaggaaacctacaagctagaccggatatcaagaaagattccttcagacatgacatcccctgtggaagaaaaagacattagggagtccctagcagcctttgtctttgaagatcccttactgctgctgtggatgcccacagccttgtttgttgaaaacccttgcaatcttcaccaattctgatctcagctgacaaagatgcacagggagtttgccacaggccccttccccagacctagaactggcacacctnactctgctaggtggcccttggcaccccaccttcaggtgggacttttntccgacaaaggccaggtcattacaccttgggaagggggcnctcaatcaaanttggcaaatatttaangcaggnttcccngnangggggaccttcaggaaatnttgccgttcccgnatgaancnaataacttttccanggaccnggttcnaaacnatgggnttttttattgncnacnaagaatttaaananggnttttttaanaanccnnnaaagngggnaaaangncnntnc

SEQ ID NO: 7800 - DNA, 630 bp, Homo sapiens
  misc_feature 558, 568, 575, 589, 623, 628: n = A,T,C or G
cgggccccccctcgaggtcgacggtatcgataagcttgatatcgaattcctgcagcccgggggatccactagttctagagcggccgcccgggcaggtacactctggatgctgtgatgcccagacagcaaaacttcttttcaggctccccaagaaggcagggaccccagttctctcaagagctaacattagagcaaatcagtctcaagagggagtcccagaatcaagaggaaatatgggcttgctccttgatcctggagtagagcacatcttccctgcttgcatggccatgctgtgaatctgcagctcagaagttggtctccctaatgccacactctggaaccatgtcagccacatgattgtggcttcccgaggccacggcgtgtgcactctgcctgttcatgttgtgttttcctcccgcgtacctcggccgccaccgcggtggagctccaattcgccctatagtgagtcgtattacgcgcgctcactggccgtcgttttacaacgtcgtgactgggaaaaccctggcgttacccaacttaatcgccttgcagcacatnccccctttcnccagctngcgtaatagcgaanaggcccgcaccgatcgccccttcccaacagttgngcagnct

SEQ ID NO: 7801 - DNA, 675 bp, Homo sapiens
  misc_feature 2, 3, 4, 5, 6, 17, 20, 485, 558, 566, 567, 578, 583, 586,675: n = A,T,C or G
gnnnnnaaagtcgtgancgnaacctagggaattttgccctcgaggccccgaattcggcacgaggcatcaacatacccgctttattgctgactcatgacaactaatgggaagacatggctcagatgtgcagccacagtgagcttctgaacatttcttctcagactaagctcttacacacagttgcagttgaaagaaagaattgcttgacatggccacaggagcaggcagcttcctgcagacatgacagtcaacgcaaactcatgtcactgtgggcagacacatgtttgcaaagagactcagagccaaacaagcacactcaatgtgctttgcccaaatttacccattaggtaaatcttccctcctcccaagaagaaagtggagagagcatgagtcctcacatggaaacttgaagtcagggaaatgaaggctcaccaattatttgtgcatgggtttaagttttccttgaaattaagttcaggtttgtntttgtgtgtaccaattaatgacaagaggttagatagaagtatgctagatggcatagagaaatatgttttgtgncttcaatnntgctaaaaatnacccngancatggataattcatttattaattgattttggtaagcccagtcctatttggagaaaattaatagttttctaaaaacgaatttctcaatan

SEQ ID NO: 7802 - DNA, 658 bp, Homo sapiens
  misc_feature 355, 394, 434, 453, 459, 460, 464, 465, 468, 486, 506, 509,513, 514, 515, 516, 517, 518, 533, 535, 539, 544, 545, 548,550, 563, 568, 573, 579, 587, 591, 595, 598, 599, 602, 606,613, 614, 615, 624, 632, 633, 637: n = A,T,C or G
cctcctaagggaacaaagctgggtaccgggccccccctcgggtcgacggtatcgataagcttgatatcgaattcctgcagcccgggggatccactagttctagagcggccgaggtaccatagttaattgcacaatttttatgccgagaagtaataaataaaactgaaaacatgcaaatttgggagtctttaaaaagttagttttatctgctgatttcttagtcattagaaattaaaagtaacatatttaaagtatttccttgtgcaatcatacactccactaagaatttgaactgtgccccacagcttcttagagctatggtgtggcaacacgttagatctctgaaacgatccangggtaccctgcccgggcgggccgccccccgcggggggangctccaatttcgcccctattagtggagtcgtattaccccncgcctcactgggcccgccnttttannaacnncgnggactgggaaaaaccctngcggtaccccaacttaattngcntggnnnnnnattccccctttttcncnagcnggggnnaanancaaaaagggcccnccccngatgncccttncccaaaantggncccnccnnaangggnaaagggnnnccccccttntcgggccnntaanccccgggggggggggggttcc

SEQ ID NO: 7803 - DNA, 673 bp, Homo sapiens
gcaattaacccctcactaagggaacaaagctgggtaccgggccccccctcgggtcgacggtatcgataagcttgatatcgaattcctgcagcccgggggatccactagttctagagcggccgctttctcttactgatagtaggatatttctgctttagttattgtcaccttaaatatattttcaatgttgaaatcctcacagcatgtttgatgaaatctagttttcaaattttcttaggtatatttctgtcacgttggcatgataacaaatgcaataacccaaaagaccccaaaagctagtgtaatcccttttgcaatccaagcatgaggattcatcttcatgttgacagtgcgtgaatgttcggtaggctttgtcaagcttgcatacaataaattatatatgtcccttttcttttagggtctcctgttaaagatggtcttctgaaggctaactgcggaatgaaagtttctattccaactaaagccttagaattgatggacatgcaaactttcaaagcagagcctcccgagaagccatctgccttcgagcctgccattgaaatgcaaaagtctgttccaaataaagccttggaattgaagaatgaacaaacattgagagcagatgagatactcccatcagaatccaaacaaaaggactatgaagaaagttctt

SEQ ID NO: 7804 - DNA, 645 bp, Homo sapiens
  misc_feature 20, 465, 481, 485, 488, 489, 499, 500, 514, 515, 516, 519,520, 533, 536, 540, 541, 542, 545, 547, 549, 550, 551, 552,553, 557, 564, 566, 568, 571, 575, 576, 577, 578, 582, 584,586, 587, 588, 589, 590, 591, 592, 594, 595, 596, 597: n = A,T,C or G
  misc_feature 598, 600, 603, 604, 605, 606, 607, 608, 609, 613, 614, 619,625, 626, 629, 631, 634, 635, 638, 642, 643, 644: n = A,T,C or G
tcactatagggcgaattggnagctccaccgcggtggcggccgagtacgcgggcggtctgaatggaggaagttggtaatacttggcttttttttttcttctctcatgcaagtttccaggatatagcttctttttttgctgtatgtaattgagaccaaactctaagcttggggccctggagagaacagttgtggcctgcaggtcattagtgaggtgagcagaagggaatcctggacttcccagagaaagaggagaccatgccagcctcgtggaacacagctaccaggaaatacagaagcaggtctattccttgcgaactccgaagtccatgaaaaaacggacccacagtggggtggctaaaatgtcccagcgcaagctgccgctgctgctgatggaccatagctcaagggcaaggcttgtaaaggattttacaaaggattttaaagtatagccagaaaagatacggngtttagaagttaaacnctgntgnntgaaggaagnntgccgggaaaaatnnngcnnaaagggctaccgnacnaagnnnggncnannnnnttanttactgngncngtnaccnnnnggtntngnnnnnnncnnnnncnccnnnnnnntatnngccgnttttgnnggncntcnnganaaannna

SEQ ID NO: 7805 - DNA, 645 bp, Homo sapiens
  misc_feature 16, 416, 512, 582, 591, 601, 606, 614, 633, 636, 644: n = A,T,C or G
tatagggcgaattggngctccaccgcggtggcggccgagtactaaaaaatttcaattaacccaaaaaaggcaggaatggaggaacaaaggaacaaaaaaatgacaaataaaaaacaaatgacaagataagacacttagtaaaacaagtagcaagtatgggggatctacagcaacctcatcaatcattactggtaattgcaaatggagaaactccatgtgcaaagcagggattgtcaccaagacccaactccatctacagacacccacgtaagatacaaagacaggttgggtgtctaaaggatagaaaaagatccacagtggtccaggagtggtcccagcattgtggtaggcacaagagtgaggatcacttgagtcttagagtttgacctgtaatccaagcactttgggaggctgangcaggcagatcacctgaggtcaagagttccagaccagcctggccaacacggtgaaaccctgtctctactaaaaatacgaaaaaaattagccaggcntggtggtttgtgcctgtaattcccgctactggagaggctgaagcaggaaaattcctgaaccaggaggcanaagttgcancgagcccaanatcgngcccttgnacttcagcctggcaacaanagngaaactcnt

SEQ ID NO: 7806 - DNA, 535 bp, Homo sapiens
  misc_feature 2, 3: n = A,T,C or G
gnnagattacagctgagctccccgcggtggcggccgctctagaactagtggatcccccgggctgcaggaattcggcacgagtagagttgggagcagtagatgaaatgggtcagtgagttggctaaattaagtgcccatatcatgcgaatggaataactgaggcataagcagaggatggaaaacgatggaagatttcaagatcaaatgtttagtatggtttctgaatagttatcattaaggtctcaacatgcttaaaataaattgagagcatattgttataagaatcactgataccagaattacaagaacaatgtaaaataaactggttatagtggtgtgtgcctgtggttccagctacttggaaggctgaagcagtaggactgcttgaggctgggagtccaagtctagcctgaacaacatagcaagacctcgtctctaaaaaaataatgaaaataaataaataatgacatgtgagcattttgctcaaagaattgaaagcgggagatggtgttacttttgaaatcatcagttgttg

SEQ ID NO: 7807 - DNA, 609 bp, Homo sapiens
  misc_feature 3, 9, 10, 11, 14, 22, 23, 31, 35, 43, 76, 395, 396, 397,402, 403, 409, 410, 414, 415, 422, 426, 429, 431, 433, 435,436, 438, 439, 440, 441, 442, 443, 444, 448, 449, 450, 451,452, 453, 454, 455, 456, 457, 458, 459, 460, 461, 462: n = A,T,C or G
  misc_feature 463, 464, 465, 467, 469, 471, 472, 473, 474, 475, 476, 477,479, 480, 481, 482, 483, 484, 485, 486, 487, 488, 489, 490,491, 492, 493, 494, 495, 496, 497, 498, 499, 500, 501, 502,503, 504, 505, 506, 507, 508, 509, 510, 511, 512, 513: n = A,T,C or G
  misc_feature 514, 515, 516, 517, 518, 519, 520, 521, 522, 523, 524, 525,526, 527, 528, 529, 530, 531, 532, 533, 534, 535, 536, 537,538, 539, 540, 541, 542, 543, 544, 545, 546, 547, 548, 549,550, 551, 552, 553, 554, 555, 556, 557, 558, 559, 560: n = A,T,C or G
  misc_feature 561, 562, 563, 564, 565, 566, 567, 568, 569, 570, 571, 572,573, 574, 575, 576, 577, 578, 579, 580, 581, 582, 583, 584,585, 586, 587, 588, 589, 590, 591, 592, 593, 594, 595, 596,597, 598, 599, 600, 601, 602, 603, 604, 605, 606, 607: n = A,T,C or G
  misc_feature 608, 609: n = A,T,C or G
ttnttgctnnnctncttttttnnatatattncgcnatacattncttttggtttatcctttaaaatatttgctgagnatagcatttaaatgttaatgctgtatttatatttgttggatgcttaattcaatgtgtcttctttccctttccatgaatgaaaagaaattggaagaagagaatcaactatttcgtgcaagtattttgttcagtttagaagatgttatggtattgtgaaaacaatattctggagttagacatggaatcacaatggccttccaagtcagaacagtctgggttgaaattgactccttactggtccaaagccacataactgattcatcatgcagcctttttttaaaaaaaagttttttttttaaagctactcaaatatgtcagnnntattnnctctgnncctnngccgccnccgnggngnancnncnnnnnnncctnnnnnnnnnnnnnnnnnncncncnnnnnnncnnnnnnnnnnnnnnnnnnnnnnnnnnnnnnnnnnnnnnnnnnnnnnnnnnnnnnnnnnnnnnnnnnnnnnnnnnnnnnnnnnnnnnnnnnnnnnnnnnnnnnnnnnnnnnnnnnnnnnnnnnnnnnnnnnn

SEQ ID NO: 7808 - DNA, 646 bp, Homo sapiens
  misc_feature 179, 213, 230, 320, 333, 371, 375, 385, 393, 395, 398, 399,400, 403, 405, 406, 408, 410, 414, 416, 417, 419, 424, 425,427, 429, 431, 432, 433, 434, 437, 438, 442, 443, 447, 450,454, 455, 457, 460, 461, 469, 470, 471, 477, 478, 480: n = A,T,C or G
  misc_feature 483, 485, 490, 491, 493, 494, 499, 500, 505, 506, 507, 510,514, 515, 519, 520, 521, 522, 524, 527, 529, 535, 536, 537,539, 541, 546, 551, 552, 554, 555, 556, 559, 561, 563, 565,568, 571, 572, 573, 574, 575, 579, 585, 589, 590, 591: n = A,T,C or G
  misc_feature 593, 595, 596, 598, 599, 600, 604, 608, 611, 612, 617, 619,623, 625, 626, 630, 632, 633, 634, 635, 639, 641, 643, 644: n = A,T,C or G
ggcgaattggagctccaccgcggtggcagcggccgcccgggcaggtacttttttaatttcttttttttttttttttttttagtagaagcattcaagtcaggtaacgggacaaacaagaaagaatgtaggcaggtaattctggagactctgagaagaacagttgagtgaactcacttcanatgcatgtagattatttgcactccaggaatgtanactgtgggcactccagnagactaccagaattgggggaaccacagtgactcattaggtttctctgttacaatcaggcatgagaaatatatatattttgttgatgtgangctattgaaatgngatatattggaaactgagaacattggcctttatgtganaggnagtgtgaatngttaggtnanatnnnacntnngngnagangnntngtggnncngnannnnggnngacnnatgngangcgnnanggnngggtgtgnnngggaanngngcngngagtnnanngtganntaggnnntantatnnattnnnngnttngnttgcannntnanagaanaatcnntnnntgntngntngtnttnnnnntttngctgtntgcnnntntnntnnngtanggtnggnngagangnaaananngagntnnnnaganangnnga

SEQ ID NO: 7809 - DNA, 636 bp, Homo sapiens
  misc_feature 441, 517, 526, 533, 555, 574, 587, 591, 597, 601, 605, 608,615, 623, 627, 629, 635, 636: n = A,T,C or G
cctcctaagggaacaaagctgggtaccgggccccccctcgggtcgacggtatcgataagcttgatatcgaattcctgcagcccgggggatccactagttctagagcggccgcccgggcaggtaccttttgcaatatattcataactttttaaaaaaattatatcaattttctattagttttgtatttatcccatattttttaatctctgttccttctttcctgctgtcttttgggttaatcaaatattttttgttttctttttattttgttgactctttaatctatggtttctttgcatttttaaaaaaaattattttactttaagttcttaaatacatgtgttgaacgtgcagatttgttacataagcattcatgtgtcatggtggtttgctgcacctatcaaccccgtcacctaggttttaagccaacccgtcacctangttttaaagccttgcatgaattaaggtatttggtcatttacattcagataagtgaggattatgcttaaaaaaaaanaaaaaaaanaaaaaangggtccctcgggccgccccccnggggggagcccccatttcnccctttaaggagncgtnttaacncccncccnctnggccggnggttttanaacngnggggann

SEQ ID NO: 7810 - DNA, 615 bp, Homo sapiens
  misc_feature 3: n = A,T,C or G
atnaccctactaaagggaacaaaagctgggtaccgggccccccctcgaggtcgacggtatcgataagcttgatatcgaattcctgcagcccgggggatccactagttctagagcggccgggggccattgagactgccatggaagacttgaaaggtcacgtagctgagacttctggagagaccattcaaggcttctggctcttgacaaagatagaccactggaacaatgagaaggagagaattctactggtcacagacaagactctcttgatctgcaaatacgacttcatcatgctgagttgtgtgcagctgcagcggattcctctgagcgctgtctatcgcatctgcctgggcaagttcaccttccctgggatgtccctggacaagagacaaggagaaggccttaggatctactgggggagtccggaggagcagtctcttctgtcccgctggaacccatggtccactgaagttccttatgctactttcactgagcatcctatgaaatacaccagtgagaaattccttgaaatttgcaagttgtctgggttcatgtctaagcttgttccagctatccagaatgcccacaagaattcaactggatcttggaagagga

SEQ ID NO: 7811 - DNA, 647 bp, Homo sapiens
  misc_feature 16, 349, 410, 442, 483, 484, 510, 533, 541, 544, 545, 546,549, 554, 560, 566, 567, 569, 570, 575, 579, 582, 588, 594,598, 602, 611, 613, 614, 621, 624, 625, 627, 629, 647: n = A,T,C or G
tatagggcgaattggnagctccaccgcggtggcggccgcccgggcaggtactttttttttttttttttttttttttgggacagctttctattctgtcacccaggctggagtgcagtggcacaatctcagctcactgcagcctccacctgttgggctaaatccatcttcccacttcagcctcctgagtagctgggaccacaggcacgcatcaccactcccggctaattttgtttttcatagcacattacattaccgatttcccagtttataagtaaccaagatgctcaaacaagcaaatattttccttgagtatgacttactacaaaaaagagaaagaacagagaaattngttctgaaagtgcatttttctaaagcccatttcagtattttgatagctcaaatcatatagnaagtttttaatcaaaaaggctaaagaatattnttaattaaatatttctttctattccatcccttcccttcagnnttttcataaaattatttagttaaaanggggatttttttacccatggttncctgaaanggnnntgnatttnaatccnccctgnnanncattnaccnctntctggnttgganaaanaaantgggctttnannggtaaanagnngncnttataatttaatttcccn

SEQ ID NO: 7812 - DNA, 620 bp, Homo sapiens
  misc_feature 376, 384, 391, 392, 394, 397, 399, 402, 406, 411, 413, 414,416, 417, 418, 422, 423, 424, 431, 432, 433, 434, 435, 437,438, 439, 440, 442, 443, 444, 445, 446, 448, 451, 452, 454,456, 457, 458, 462, 463, 467, 470, 471, 472, 473, 474: n = A,T,C or G
  misc_feature 475, 477, 478, 479, 480, 481, 483, 484, 485, 487, 489, 490,492, 494, 495, 496, 497, 498, 500, 501, 503, 504, 505, 506,507, 508, 509, 510, 511, 512, 513, 514, 515, 516, 517, 520,521, 522, 524, 525, 526, 527, 528, 529, 531, 532, 533: n = A,T,C or G
  misc_feature 534, 535, 536, 537, 539, 541, 542, 543, 544, 545, 547, 548,549, 550, 551, 552, 553, 555, 557, 558, 559, 560, 561, 562,563, 564, 565, 566, 567, 568, 569, 570, 571, 572, 573, 574,575, 577, 578, 579, 580, 581, 582, 583, 585, 586, 587: n = A,T,C or G
  misc_feature 588, 589, 590, 591, 592, 593, 594, 595, 596, 597, 598, 599,600, 602, 603, 605, 606, 607, 608, 609, 610, 611, 612, 613,615, 616, 617, 618, 619, 620: n = A,T,C or G
ctatagggcgaattggagctccaccgcggtggcggccgtaccggcgccgctggcgctcaggaccgcacccgcgttcagcgtgacgtcggcgccgatgccgcgataaccgaggtcgaagccgcagcagttggcggccaggttcggcaggtctcccaccgtgccggcgccattgccctgattgatcagtttgatggtggcgccggtgatgctgttgacgctgatggagccggccatatggttggtcttgtcgctgccgtccgccatcagcagcgacacgttgccggtgccggcgtcgatcttcgccgccacgccctgcttgtcgacgcccatgctgagggtggcgatgccggcgtcgcggtaggcgtcgttgacgccnttggccangctgtcnntngcngncangttnaaatngnngnnncccnnnatgattnnnnnannnncnnnnngntgnncncnnnctgnntggncannnnnncnnnnngnnntntnnancnnnnngnncnnnnnnnnnnnnnnnttnnntnnnnnngnnnnnnntncnnnnngnnnnnnntnannnnnnnnnnnnnnnnnnngnnnnnnnannnnnnnnnnnnnnnnannannnnnnnnntnnnnnn

SEQ ID NO: 7813 - DNA, 632 bp, Homo sapiens
  misc_feature 550, 601, 614, 632: n = A,T,C or G
tcactatagggcgaattggagctccaccgcggtggcggccgaggtacacaataaatactttcaactattttgttgctagctttacatatttttttgcgataaaaatagcttttcccaaaaggaataaaaactaaaacaaaaaattcaaacatccaaaagttaacatccaaaagtgttggtttttcttctcagaaatagcaatttgttctgcttctcatcagtcccacttaggctctctctaggacttaactgagcaactcctaagatccaagttcccttaaattcctacaggcagtggtcccaccaacaaagacttctctactcttcctttgcctccagatgctcagacttgggcttctggtattctgaaagcatccttgtttattttcctaccagagattgttgatttgccccaaaggaagtttttttcttccattttgtgtagtgtgagtggtgactaactatgagaatggtctcaatggcatctctgaggccagaggaaagcttctgatgcaattcaaaattcagatctgaagcctatgaatatggntactgggcgtgatcgacagattgaggccaggtatcaaacagatctcagatnttgacagaacctntgctcattggaatgaccn

SEQ ID NO: 7814 - DNA, 658 bp, Homo sapiens
  misc_feature 16, 80, 112, 162, 249, 260, 277, 278, 279, 283, 290, 297,301, 305, 306, 312, 315, 316, 317, 321, 323, 325, 328, 329,330, 331, 334, 337, 338, 339, 340, 344, 345, 349, 351, 358,364, 366, 367, 374, 384, 389, 391, 397, 399, 400, 401: n = A,T,C or G
  misc_feature 403, 404, 408, 409, 413, 417, 420, 422, 424, 425, 428, 430,434, 438, 440, 442, 446, 451, 455, 456, 457, 460, 461, 463,465, 466, 468, 469, 472, 474, 475, 476, 477, 478, 483, 486,489, 490, 492, 496, 497, 499, 501, 507, 510, 512, 513: n = A,T,C or G
  misc_feature 517, 520, 522, 530, 531, 532, 534, 535, 538, 541, 542, 546,547, 551, 552, 554, 556, 558, 560, 561, 563, 564, 565, 566,567, 568, 569, 571, 573, 578, 579, 583, 584, 585, 586, 590,593, 595, 596, 597, 599, 600, 602, 604, 606, 608, 611: n = A,T,C or G
  misc_feature 613, 615, 618, 620, 622, 623, 625, 626, 630, 632, 634, 635,642, 644, 647, 657, 658: n = A,T,C or G
tatagggcgaattggnagctccaccgcggtggcggccgcccgggcaggtactttttttttttttttttttttttttttgnatatattccaccctcatggcaaatatgaaagnatttccattggatgagacactgaactcagtaaccacaacaatgaggggcntaatgcaatgaaactaaaaacatattcttaggaaagaaaaatgaaagtgaggaagtaagaaaattttttttttttatgagacagagncttgctctgtnacccaggctagagtgcnnncgcnctacctnatcctcntttncccnnccccanttnnnaccncntnccnnnnaanatnnnntacnnaccnanaacgggnaccggncnngcggggngcggggcggnggcangngaaagncnnngnnccgnnaatngctnaantnanntcncnctanccanancncccncgccnttannnggnntngnnannacngnnnnnggaancgnganncnaaanncngnaagtanaantnnaggngtncntccccgannnannacnagnnatannagtnngngngngnnannnnnnncncncggtnnccgnnnnccgncanannnanncngngncngangnanggncngnngnnctgncngnntcgctcncntantgacattttnn

SEQ ID NO: 7815 - DNA, 402 bp, Homo sapiens
agcgcgcgtaataccgactcactatagggcgaattggagctccaccgcggtggccgcccgggcaggtacgcggaggaaagggttcctcgcggctggtttagattgtggttgtttgttttgcttctactaagactgttttgtttcaaaaaggaaacaagttttgtgtttgctgtctacgctggagtcctgaactgtgggtagaaaacacgacctggctttgtagaaaggacacagggctgttttatgaactaagcggtgaggctcaggtggcggctctcacagagcccctgatgctgttgttctttgagggcttaaggcctgatgaacgtaggcacgtgatgcgtaatagtcttcaatggtacctcggccgctctagaactagtggatcccccgggctgcagg

SEQ ID NO: 7816 - DNA, 663 bp, Homo sapiens
  misc_feature 8, 21, 70, 97, 399, 418, 421, 431, 435, 444, 455, 458, 459,463, 464, 472, 474, 476, 477, 479, 486, 495, 499, 503, 504,505, 506, 509, 511, 512, 516, 517, 519, 524, 525, 528, 529,532, 534, 537, 541, 546, 547, 549, 550, 553, 555, 556: n = A,T,C or G
  misc_feature 559, 561, 562, 563, 564, 566, 569, 570, 573, 574, 576, 579,580, 584, 585, 587, 588, 590, 594, 596, 598, 600, 604, 605,606, 610, 615, 616, 617, 622, 623, 624, 626, 629, 630, 631,632, 634, 636, 638, 639, 640, 641, 644, 650, 651, 661: n = A,T,C or G
  misc_feature 662, 663: n = A,T,C or G
tcactatnagggcgaattggnactccaccgcggtggcggccgtctccggcttctattttgcccacccggnagtcgaaatacttcgtcgtcggcaagnatcggcatggaccaggtggaagacatggccaagcgccgcggcgccagcatcgaggacgtggaacgctggctggcaccgaatctgtcgtagtgccataatataagcacaaggcgcgcggaacttatcgcgcgccgcagcgcactaacgcagtatgccggtcggcatgctgcatgcccgctccggcccgttccctgactggctaaggaggatatatggcaagcaatttcaaactgaaacgctggcaaggatcaagtgatcctgttgctgggcctgtggctgctcgtttcgccatgggcgttttnctatcccgaaggctcgccnaanatgatcaacncctntgactgagncctggggatcntcnnactnnccgacttntncnngngctaaanctattattntgcntatnnnntananntcannanactanngtnnagntnttnactnttatnntnngtntnnttntnnnnanagnnaanntnatnntgtnngnngntggntnanantatnnncatngtgcnnnatcgnnnanaannnngntntnnnnggnctaccnnttttataacnnn

SEQ ID NO: 7817 - DNA, 922 bp, Homo sapiens
  misc_feature 555, 578, 597, 609, 633, 645, 659, 675, 677, 682, 684, 686,693, 700, 719, 724, 742, 743, 744, 746, 750, 753, 758, 762,771, 776, 782, 786, 792, 811, 815, 818, 819, 820, 824, 831,832, 833, 834, 835, 837, 845, 857, 870, 874, 880, 883: n = A,T,C or G
  misc_feature 886, 887, 897, 898, 903, 904, 907, 911: n = A,T,C or G
acgcgcgtaatacgactcactatagggcgaattggagctccccgcggtggcggcccgcccgggcaggtacatcgcggttttcttcttgaagcccaggatgcccaagatagtctgctggataggctaggtggaggaaaatgaaggcaccttatgagtgccaggcaactaccagccacaaagtgtgtggccatctgggaccagccaggctccagctgccctgccagttaactgcaactagatgagtgagtcaagtcagcataacatggagcaaagacaagccatcccagctaagctctgtctaaattatcaacccaaacaactgtaataagataaataatgcttatttcaagccacgaagttttggagttgtttatttcaaaacactagataaccaagcagtgtctgctagaaattgcatttgtaattttcccaaaactgggtgtttttttgtcattattcacacaattatgttggataaattatcgtctttgagactcaattgtctagtcaggacctcggcccgctctagaactagtggatcccccgggcttgcangaattccaatttcaaacttattngataccggcgaccttcganggggggcccggncccaacttttggtccctttagtgnggggtaaatggncccttggcgtaatnaatgggcattactggntncctgngngnaaattgntattccnttcacaatttccccacaanatacnaacccgggagcctaaaannntnaaanctnggggnggcntaaaggagnggctnacttanattnattggnttgggccttacttgccccntttncannngggnaaacctnnnnngncccctcgnattaaatgaaanggccaaccccccngggnaaaggnggnttnntttgggggcnnttttnnttncttntcattgaattc

SEQ ID NO: 7818 - DNA, 653 bp, Homo sapiens
  misc_feature 19, 22, 29, 30, 54, 633: n = A,T,C or G
gcaattaaccctcactaanggnaacaaannctgggtaccgggccccccctcggngtcgacggtatcgataagcttgatatcgaattcctgcagcccgggggatccactagttctagagcggccgcccgggcaggtacttttttttttgactatttgagggtggcagtgtaactctcagcctacttggtgaagtgagattcagactgagtggggtcacagcacagggcactgtcttgcctggctttatctgagccagtcacacctctcctggccactatctgtggtctagccccctttgtgcagaaagagaaagaagagccttgaggaccagcctagtcaggctgaagaaatgtcaacaattgggagttttgaaggattccaggctgtgtctctgaagcaagagggagatgaccaaccctctgagactgaccacctatcgatggaggaagaggacccgatgccaagacagatttcaaggcagtcaagtgtgaccgaatcaactctttaccccaatccttatcatcagccttatatctcacggaagtacctcggccgccaccgcggtggagctccaattcgccctatagtgagtcgtattacgcgcgctcactggccgtcgttttacaacgtcgngactgggaaaaccctggcgt

SEQ ID NO: 7819 - DNA, 661 bp, Homo sapiens
  misc_feature 89, 580, 581, 609, 613, 623, 637, 643, 659: n = A,T,C or G
tatagggcgaattggagctccaccgcggtggcggccgaggtacttgcaaaccaaattggcagcatattaaaagaattacacaccagggnaaaataaccctagaccttgcattctagtgctctgcttatctgtgacttcagacaaagatggagagagctgaccatcagtataatttagctgaatgaaataatgagatattttaggaagaagaacattgaatgtcagaagttaaatgtgagatccaagaagtaacagtgaacagacaagtttgtgggtatgtggatatgtcttaaataagtcaggttgtgtcaaattatgatggatgatgatgactgcgaggcaggaaggaagatgaaaaggaggaggcattgaacactaatggtcacagggagcaccgggagcgtggtgacgccagggtgagctgcttgttctgtgagggtggagggaagagatttattaaccttagactttgttaagtatacatgtgacgtctacatgggaaactgctaaatgaatagaagtggaaggtgtaacttccacaccattaaagggcaaaaaaaaaaaaaaaaaaaaaaaaagnncctgccgggcggccgctctaaaactagnggancccccgggcntgcaggaattcganttcaancttatcgatcccgcgncc

SEQ ID NO: 7820 - DNA, 622 bp, Homo sapiens
  misc_feature 622: n = A,T,C or G
cctcctaagggaacaaaagctgggtaccgggccccccctcgggtcgacggtatcgataagcttgatatcgaattcctgcagcccggggggatccactagttctagagcggccgcccgggcaggtacaaacttctactctggggtgacaccagcttttacttattcagatactgttttgcaatgttctcccaaggtatttttctaattgtagaatagattttcctttttaatgagcaacaacctgcagctagcacctgcagcgaacagagttttgagccagataaagaaggaagcaccccaagggcaggaagttcagtcagttttgtcgatatattccgcatgtctgcaatacgacaggcatagagagtgttcagtaagtatttgtgggaaaagaatggatgagttgataaagtaggaagagacacctgcttgtggaatgtagcttctttgtgaatgaagcaaccatctcaaaaataggaaatggtattgagatgcctgccccatccctctaaaagctctctctgtattctttcgagaagaaatacctttctcatgtaagagatcattcgaatatgtacctcggccgccaccgcggtggagctccaattcgccctatagtgan

SEQ ID NO: 7821 - DNA, 676 bp, Homo sapiens
  misc_feature 79, 114, 325, 397, 436, 443, 452, 460, 469, 473, 480, 483,502, 513, 516, 521, 535, 541, 558, 562, 564, 574, 578, 579,590, 598, 599, 604, 605, 606, 611, 614, 618, 623, 625, 628,643, 652, 653, 657, 664, 669, 673, 674: n = A,T,C or G
tcactatagggcgaattggagctccaccgcggtggccggccgcccgggcaggtacttttttttttttttttttttttgntttcaaaacccgcttatttcacgcgaggactcctntgcgaagacaggaaggatggggtcccacacctgagccaggcgcggtccccactgggtgctccgcagcccggagtggctccggacgacagcccgctcagcggacctttcgccaggctcggtggaccttctccgctgttctcctcagggcgcagtcaggtttcttcgacacacaccaaccgaagttgaagcgcgtgtccccgcgtacctcggncgctctagaactagtggatcccccgggctgcaggaattcgatttcaagcttattcgatacccgtcgaccttnaggggggggcccggaccccaacttttggttccctttagngagggtnaattgcccncttggggnaatcatggncaangctgttnctngggggaaatggttttccgnttaaaattccnacnaaaanacaacccgggaccnaaaagngaaagcccggggggccntaangngggggcctancccnnattaattgggnggggcttnntggcnnntttcnagngggnaaacntnttngccccttttttatanaattggccnncccnggggagnggggntttnntt

SEQ ID NO: 7822 - DNA, 664 bp, Homo sapiens
  misc_feature 391, 421, 434, 436, 463, 478, 480, 503, 513, 514, 515, 519,523, 527, 533, 542, 566, 591, 592, 623, 625, 644, 652, 655,658: n = A,T,C or G
cctcactaagggaacaaagctgggtaccgggccccccctcgggtcgacggtatcgataagcttgatatcgaattcctgcagcccgggggatccactagttctagagcggccgtcgaccgtacggcgcaaacggccagcggcatcgacagcgccctgctgcccggcatggagttcggcagcgaagaccgcacgcgccagatcggcgccaacgtgggctggaactggcaagccagtgcgcgcaccagcgtgaatgtcaatgccggctacgccggcgtgcgctcgctgagcgtgccccggcgcgacaacaacatcaccgtgacggccgccaccgcggtggagctccaattcgccctatagtgagtcgtattacgcgcgctcactgggccgtcgntttacaacgtcgtgacttgggaaaaccctngcgttaccccacntnatcggccttgcacacaatccccttttncccagctggcgtaananccaaaaaggcccgaacgaatggncctttccaannnttgnccancttnatgggnaaagggaanccccctttaaccgggcattaaacncggggggggggggggttcccccaannggaccgtttactttgcaaggccttaagcccngncctttggttttttcctttnttttttcncanttngcgggt

SEQ ID NO: 7823 - DNA, 658 bp, Homo sapiens
  misc_feature 19, 590, 605, 607, 611, 624, 648, 650, 656: n = A,T,C or G
cactatagggcgaattggnagctccaccgcggtggcggccgcccgggcaggtacctacttactattttatgagaattgatttttactaagcctgatttgaatgggttgcatttacaccaactgctatttattaatgaaagtggtagcctgctttttaagtaatatgtgttttggcaacaggagagggttttctgagcttttaacaccagtaaccctgaacttcttccaaaatccacaccttttattcccccttttccttgtctccttctaggtgcctcagtcctggcatctcgggaggactctgccattactcatctgttactgattctgaatcttgtgctctagctctacagcccagtgaagaagcaatatatctttaattcagggcttgcctcttgctttccaactctaacctgagagcagtgctacttttgtaattgcaggtctaaataacttaagcgtatatacagaagccaatcactgatcacttccattgcaatgaggcatctgttgtcaaagaaggaaaccatttgtcaagtcccttatagatattgaatctttaaacccaaatctggggatgtttacatttntggattaaaaacagngnaccncggcccgctctanaactagtgggatcccccgggctgnangaattnat

SEQ ID NO: 7824 - DNA, 671 bp, Homo sapiens
  misc_feature 16, 452, 478, 491, 496, 503, 506, 512, 514, 527, 528, 543,551, 552, 554, 556, 560, 565, 566, 574, 575, 580, 593, 595,597, 600, 603, 616, 617, 620, 622, 626, 630, 634, 635, 641,644, 647, 649, 651, 661, 662, 665, 671: n = A,T,C or G
tatagggcgaattggnagctccaccgcggtggcgtgcgcggcgatggcggcaagcgatgcgccctcctcgcacactgcgccggccagcatggccgtgcgcagttcggccagcacggcgcgcgcgcaggccagggtttgcacgcggccgtaatgtgcaatcagctcaaggcaagccgcgtcgcccaggatgcggtcgaccgacggcaggcgcacggtttgccccgtcgtcatgctggctggccctcgccgctgtcgttcttccccagccacagcagcggattgccgctggcgcgctggtagcccgcttcgcccaccagcaggtcgagcatcaggctggccagatcgtcggccagcggttcgacgttgtaatcgtgttcctggttgaagactttgcgataggtatggcaatcgtcgcaggtttccgcgcgcgccacctttttcggatcattcgncttgttgggcaatttgtcgtccttcnccgccacggggtngaacngctttgngtnggccgntntaaaactaattgnntcccccgggctgcangaatttgnntntnaaanttatnnataccgtnnacctngagggggggcccngntnccnaantttttttcctttnnagnanggtnaatngccnnttgggngangangnanaaagggggcnnggnggaaan

SEQ ID NO: 7825 - DNA, 664 bp, Homo sapiens
  misc_feature 5, 7, 541, 558, 646: n = A,T,C or G
gagcncnccgtaataccgactcactatagggcgaattggagctccaccgcggtggcggccgaggtacaaggattatataggagaaggaaatgaaagccttcgtcagttaacccaaatatctaaaaatgagtgactgatcactgaatattgttttgattttgtctgagtgtgaaggatagatgatatatatttaacagtgaatttgataaaaacagaatatgagcattacctccagttttagcccaaatctttaaagagcttagcatttccaattcccatccttacaataagaaatagttaaagaaacttaaaattgatggcttgtcttggacccgtcagagaactgatattacagggcaaactgtcaccttaaaatctagaaatacaagcaaattcagagttgcagagaactgcttacctggagtagaagcctctggggccataaactagtaggaaaacttaagaggtaattttgaaaacttctggatcctgaatgtgggaaatccttagagttggaaaagtcctggggttcctgtcttanggaatgttacctcaganaacctcaccttgttcccaaaaaaaaaaaaaaaaaagtacctgcccgggcggccgctcgctctagaactagtgggtccccccgggctgnaggaattcgatatcaaag

SEQ ID NO: 7826 - DNA, 633 bp, Homo sapiens
  misc_feature 308: n = A,T,C or G
tatagggcgaattggagctccaccgcggtggcggccgcccgggcaggtacccccatgctacctgggcactggggtttctcagccactccactgaaatttgcattggcttattgaaagtcaatcacaagtcaaaaccacagactcacataggagaacactgttgtttgggcccagcagctctgaaatcaatacctttaatggtagaacctaaaactaaaataaataggaaggaaggaaggagaaagaaagaaagagaaagaagaaagaaagagaaagggagagagtgaaaaaaaaaaaaaaaaaaaaangtccctcggccgctctagaactagtggatcccccgggctgcaggaattcgatatcaagcttatcgataccgtcgacctcgagggggggcccggtacccagcttttgttccctttagtgagggttaattgcgcgcttggcgtaatcatggtcatagctgtttcctgtgtgaaattgttatccgctcacaattccacacaacatacgagccgggagcataaagtgtaaagcctggggtgcctaatgagtgagctaactcacattaattgcgttgcgctcactgcccgctttccagtcgggaaacctgtcgtgccagctgcattaatg

SEQ ID NO: 7827 - DNA, 648 bp, Homo sapiens
tcactatagggcgaattggagctccaccgcggtggcggccgcccgggcaggtacaaatttgggcatagtcagaaactctgctgactctctcttcccatttaacctaatcttaccatagcactcctcaccctatgacttgcccattgcagtaaaccagaaagcaaaaaaaggtcaagcacgtgtgtttgagatccaactctagtgtttgtagcagctctgcagaaccacagtttgcacatctgtaaattgagcaataacaactgccctgcctgtttcacagggttgcttaaagagttatatgagctattgcatgtgaaagtgttccataagctgccatttgctctgaagctcacgggtataattattctagtctaacctacttatgtttgccctcttttctgcagttgcatctttgtgcataaagattctctctccaacctgtgcaattgattcatctttaaagaccaactcaaattcgaccttctaaaagaaatcttctctgaccttccaactctaaactagagtaatttactaactgtatttatcactttcaaattcttcattaggtcttgaatcatagaatattgttacccattggcatttatcatccctgccaacaagacagtgggttccatgtgttagacttcg

SEQ ID NO: 7828 - DNA, 658 bp, Homo sapiens
  misc_feature 512, 545, 561, 574, 595, 597, 607, 632, 635, 638, 642, 644,652, 653, 655, 656: n = A,T,C or G
tccaccgcggtggcggccgcccgggcaggtactaaaactattccaggaagactttaacttttgttgattcaaaaggaacatggtgcatcatttagcaccgtagggtcatcgttatgataatccatttttattacagtcctgtggttctcatctaccctaattatccagcaagtggttcattgcagattctgatttattccatcctacctcaaccctattaccaactatcaccacccaccacccgccacccaaactggaagacaaccagagataaatcctcaagaaacttctttttaagagggtggttaacaaagttaaattgggtagaaaacagatgaagcaagttttaatctctttgctgagtaagaatagtgcctacatggtgtgggtgatcatgtgtaagactctgatgggcaaacctggggcccattaggagggcatgaagactcaggcatctgagctggaccatggcactaaaagattacagtgatgacaactgtaacgatgatggntatgacgggaatatctctaacatcatcatcttnaattttagcatgtggnccttatgttccangcactgtcctaacactttgcntntactaacaantccactgagaggcactaggaatgtnccnagngtcncntgcagagnncnnac

SEQ ID NO: 7829 - DNA, 619 bp, Homo sapiens
  misc_feature 2, 3, 5, 7, 11, 12, 20, 21, 82: n = A,T,C or G
cnncntncggnntctcttgnnagagtggccataagacatggcacacaattcccaatttcacaaattcctcatgtctttgagnatttgatcagtttgtgaatattttatgctttgatgatatagtgagaatgcatcacttgcaaaaacgatctcaaaagtgtcagccttagataaacgttcagcattaaaaacgcctattatttcatttactagcattttaggatccagaagaattccaccagattgcatgagttagattgggaaatgggagtgggagataatattgggaggtatctattttaagtcaggggctttactagccgatttagttctcacaataaccatgtggagaagctgtgacatttttaatttacaacctttctggggctcagacataaagttacctatccaaggttgcagttgggtagtggtgggaccaggatggacaactcattggccctgcctcaaaagccatacctcttctcctgctatgcagaatctgtttctcctgaatctctgtgatgctggtgggaattgtttgcatagaggaaggacaataaccctgccatcgtgagttaatgtccgggctggtcacagtggttcatgcctgtaatcccaa

SEQ ID NO: 7830 - DNA, 642 bp, Homo sapiens
  misc_feature 5, 180, 233, 315, 398, 582, 636: n = A,T,C or G
ggaancccttgcagggccttcacatgggaaacgtgaatataatccggaagtgtgcttgagggcacacactcccgccagaactgctattgagcgcgtccttccagttagcgacccagcacagctgtgggtggtggaacctcgactgagggaactccgtcttgccctgaaattacatgctgngggcatgaccagatgagtttccacaaagggctaaatttcaacaagctcttcanatagtggctttttgtggcttgccaacttccaaactgacttcaataaatgtttacacaattcactccccagctcataagccanactgcctccatcacgctgttcccatgtgagggtcccccttcaccttgttcaacctcgaaaggccctacatcagtgcagcccanagtctctggatgcctccctcttgtcttccttcccaaggcttggccaattgtttttcctgttcggagcgtttctttttaaattccatgtgatcctcagcgaaatatttgaagattggatactggcacttctctttgactccatttttacccataagcttagggaacttgtctaggttgccagcanaaggaatattagtctattcgctgcaatggaaaccatgtacctcggccgctctanaactac

SEQ ID NO: 7831 - DNA, 647 bp, Homo sapiens
  misc_feature 42, 595, 646: n = A,T,C or G
cctcctaagggaacaaaagctgggtaccgggccccccctcgnggtcgacggtatcgataagcttgatatcgaattcctgcagcccgggggatccactagttctagagcggccgaggtacaccgagaacatcacctgacttccctaaacttcagtttccttgtccttaagagaaaataaaaatatcttcctcaatgattaatttcttaaaaatcaataaaatgtgaaataatatctgggatggattgtgacaaatattatgaatgaaattaatgcagtttcctttaattatttatcagagttcagagaaacacaaatgaaatcatgaatactaattaactgtgtgctttgtttagaaaatgcattacatctcagtattcaagcatgccttctttttttatttcaaattatcaatagcattctaattctgtcttcatactggtgctagaaattcatcacagttttaaaatctacttatataaaatgtattataatgtttttcacatcattttacaaagacatgatttcatggtagaaaacattggatgtgggaagaggcgctaaatatctgtgtctcaagattattgccctcttagnagttataagaattgggctggaaattgggctgatcatagtccgtcagaaatnc

SEQ ID NO: 7832 - DNA, 637 bp, Homo sapiens
  misc_feature 24, 27, 34, 35, 58: n = A,T,C or G
cagcgcgcattaaccctcactaanggnaacaaannctgggtaccgggccccccctcgngtcgacggtatcgataagcttgatatcgaattcctgcagcccgggggatccactagttctagagcagcggccgcccgggcaggtacgcgggtatgggagacgattgaaaaaggacaagaagaaaggagaattgttaagtctccactttctcagtttctgaactgaacttttgctcacagcaggtgaacacaggctccctcccacactgagacttcctcccctgccggtgtgcagtctgttaagtaaacagagacgttatactgagaaaggaacatttctctattttggctatgagttgttatttttaaagattcatcctccaaacattttcccctatccttgtttattttttcactagaaagaagatgaactgcttaaaaaaaaaattcaactccatgacaagaaaaacccacttctagtatgttctccccactcaatgccaatggagcctttggtgtgagcactctgccagccacacattgggcagcatacctcttgaaattcctgctgtgcttctatagagcttccatgcatccagattttcaaagtcaaagcaaaatgcccatggcagtttttttt

SEQ ID NO: 7833 - DNA, 643 bp, Homo sapiens
  misc_feature 502, 504, 547, 586, 616, 628, 643: n = A,T,C or G
ggagctccaccgcggtggcggccgaggtaccacctgaagttcaggagtgggcatggggcctaaggcaggccagtgagaactcagaggcactaagatgtatgttcccacttgcagaagaggtgcatgctcacccagtagttgctaaaaaggctgaaggtaggtgtagagatgcttttggggccatggttaccacccttgaggtaaggagggagggtgagtctgcctaaaaatgaaccaaatcgagagtgcaaccacaactgcactaaatggaaagaaacagaaataagagagatgggctcctctcacaacacatttggggacctgaactcagccccgcctcaccctaggtacctgcccgggcggccgctctagaactagtggatcccccgggctgcaggaattcgatatcaagcttatcgataccgtcgacctcgagggggggcccggtacccagcttttgttccctttagtgagggttaattgcgcgcttggcgtaatcatngncatagctgtttcctgtgtgaaaattgttatccgctcacaattncacacaacatacaagccgggagcataaagtgtaaagccntgggtggcctaatgagtgagctactcacantaattgccttgncctcactgccccctn

SEQ ID NO: 7834 - DNA, 651 bp, Homo sapiens
  misc_feature 264, 426, 427, 429, 432, 433, 437, 442, 445, 466, 527, 529,540, 543, 544, 545, 561, 563, 567, 568, 570, 574, 583, 584,585, 589, 600, 613, 614, 621, 625, 626, 627, 633, 636, 645,648: n = A,T,C or G
tatagggcgaattgggagctccaccgcggtggcggccgaggtacagtagggtattacacagcaaaaaagccttcctgctggaatatttcagcatttcagttatttattacattagctttatggcatatcacaacctatttgagacaggtagagtgaacccttttctgccacacagaggcacattaagtggccatcatgactggtgagacttaattgttttacaccgggcagttctctgtcgtgatttaaatccctcgtaaagcntctgaccccagttctcaggatgatttggatcccccgctaacttggaaaatcagagccagctgagagttggcttgcacattttagcatctggtaaaagcgtgcaagctagtgagatgtgcagggaaggagtcattggcaattgtatgtgaaaacacttaattnntnggnnatcnttgtnaanttggttaaatgatcataaaantgctcgcattattttgaagatgtcttcatgtttataaaactggcttcatgggcttcacatntntataaaacaanagnnncagtcatttaccaacntntagnntntganttagaacgnnntggncaaagcagatnacaatgcttttgnntccaaantcannngccagnggncttgggctntgnatg

SEQ ID NO: 7835 - DNA, 626 bp, Homo sapiens
cctcactaagggaacaaagctgggtaccgggccccccctcgggtcgacggtatcgataagcttgatatcgaattcctgcagcccgggggatccactagttctagagcggccgaggtacgcgggagagatgacaattctgccagatttggatcctgtgggcagagatgagaggtctgtaaatccacattcactcttcaaatcctggtttatagcagccagtcaagtgtgtcactaagatgaagatagattataatgactacaatttggtaattcatttactttactgaaatcagtgctcagtcatgttacaggcgcgactccatctggttcccatcaatgacagagggagcatcatgtttggacagaggggctgcatctgtgtctatgcagggaaagctgcatggattatccagcaaatcatggtgtagaccaccagcttggccagtccaggtccaagccagccgggtgactctgtcttgctatttattcacttctacattcgacaagtacctgcccgggcggccgccaccgcggtggagctccaattcgccctatagtgagtcgtattacgcgcgctcactggccgtcgttttacaacgtcgtgactgggaaaaccctggcgttac

SEQ ID NO: 7836 - DNA, 660 bp, Homo sapiens
  misc_feature 502, 564, 570, 590, 595, 601, 603, 604, 636, 639, 660: n = A,T,C or G
cctcactaaagggaacaaaagctgggtaccgggccccccctcggggtcgacggtatcgataagcttgatatcgaattcctgcagcccgggggatccactagttctagagcggccgaggtactcacatgctgagggtaagaggcagaatttcttttgcttgtaagtaacaggatcttttccagagcctgggtctgaagaccccaggtgtagatggaacttcagttatgactggatccgtgagttcaaaggatgccactgctatggtttagatatggtttgttttccccgcgtacctgcccgggcggccgccaccgcggtggagctccaattcgccctatagtgagtcgtattacgcgcgctcactggccgtcgttttacaacgtcgtgactgggaaaaccctggcgttacccaacttaatcgccttgcagcacatccccctttcgccagctggcgtaatagcgaagaggcccgcaccgatcgcccttcccaacagttgcgcancctgaatggcgaatgggacccgccctgtaagcgggcgcattaagcgcggcgggtgtggtggntacccncaacgtgacccgttcacttnccagngccctnanncccgttcttttcgcttttttccctttcctttntcncacgttccccggcttttcccn

SEQ ID NO: 7837 - DNA, 677 bp, Homo sapiens
  misc_feature 4, 213, 250, 260, 261, 280, 288, 291, 297, 299, 310, 318,323, 324, 329, 334, 335, 336, 337, 341, 342, 350, 354, 358,365, 369, 372, 375, 376, 379, 386, 387, 388, 393, 394, 399,402, 405, 406, 407, 411, 419, 420, 421, 430, 432, 438: n = A,T,C or G
  misc_feature 439, 445, 446, 451, 455, 456, 459, 460, 461, 465, 468, 477,478, 481, 489, 490, 492, 496, 498, 499, 500, 503, 504, 507,508, 511, 513, 517, 518, 519, 520, 523, 524, 527, 531, 532,538, 539, 545, 547, 552, 558, 559, 561, 564, 568, 577: n = A,T,C or G
  misc_feature 578, 584, 589, 593, 598, 600, 604, 607, 610, 612, 614, 617,618, 620, 622, 623, 626, 629, 633, 635, 638, 642, 643, 645,649, 650, 656, 658, 659, 661, 664, 667, 668, 675, 676: n = A,T,C or G
atanggcagaattgggagctccaccgcggtggcggccgcggtactgatcaagctaggtcatgtgctggaccctgggaaagcggtcacaaatatcctgcccttactggctgaatacgtaatgagggggacccaacatgggaacatataaatgtgcaatttcaattttttttaaaaaaacacccatgataagaaatcaaaatgtgcagtttcaanagtggtggcaaagccatgccaagaaatgacccgggcnccgggggctnncaacctgtaaatcccaacnccttttgngangggccngngccggggggancaccttgnagggnncggcntttcnnnnccanncttggccnatantggnaaaaaancccntcnttnnctnaaaatannnaaaanntatanttnggnnngaangggagccnnnccctttaantnccacanntatttnnagaanagtnngannnagangantaggtttannccngacaagcnngnaggntnnnatnnagnncananatgnnnncanncgnagtnnagatcnngtgggnanggagngggggnntnttntccngtataatannttgtantttantaanttatntncccnggnggngngnttnnananntanggntacncnccnggcnngngggnnattttntnnangtnttnnttatctnng

SEQ ID NO: 7838 - DNA, 680 bp, Homo sapiens
  misc_feature 23, 25, 493, 625: n = A,T,C or G
gactcactatagggcgaattggnanctccaccgcggtggcggccgcccgggcaggtacagtggcacaatcatagcttagtgcagcctcattctcttgggcacaagcgctcctcagcctccctcctcagcctcccagttgctggaacttacaggtgcaccaccataaccagctagttttattttttgtagagacagaagtctcactttttttcctagactggtctgaaatagaccattctatttgctagaatggtctcaaaccatccttctgcctcagcctcccaaattgctggaatttcaggcataattcatcatgcctagccatttcttttttctgctgcattgcagagttagaaccaatttcatttgtcctgcactgagaatgtgcattcccagcagatcatggttgagctcagcacacctgcaactcagccagcctctttgaagggtgcacagttactaactgtcagcgttgcacagccacctttagcangtatgttcagaacttacattcccaccctttctaaaacagctcacagtaacaagagaacgggatttaacttttgacatgcacactcatgaaaaccaatgattttggaaagcccaattggtgagaagataaggnggggattctgactactagtattttacaaatctgatggcgtggaggttttgtttat

SEQ ID NO: 7839 - DNA, 619 bp, Homo sapiens
  misc_feature 3, 4, 5, 6, 7, 8, 9, 10, 18, 23, 24, 35, 50, 168, 170, 515,616: n = A,T,C or G
tgnnnnnnnntaagccanagagnnttctttcgganaccccgtccgggagncttgaattgttactggatgtaggaattgtttcactgctcttaacttgctcaaactggggcaggttccaggaacttgaactaaaaatatctatttaagcctctctctctttctctcctncncaacttttttctgaaagccttgatttctgtagacagaactatggtttttggcatgttgggtcaagacgtgtttctataggaaatgcttgcacgtggcactggcttggtgagtcaagcttcctgagcttcagaccgtttgtcctgtcatctgtcctgcccaacactgtatggtttttctctagcacggcttcagttttgttctctgcacaaagcctttggtggttctgccctctgccctccagctttacccaccagagtaaggaatcttttctttttagaaatcaagaatttggcttcacagatggcttctcacagatgccctcctgccagccaaaccggacttgntcttcctgcctctgtgccttctctcattctccttctctccctccataccccactttgaggttctgtgggtaccatctttgtggactcttgtcttttttttnacc

SEQ ID NO: 7840 - DNA, 452 bp, Homo sapiens
  misc_feature 12, 204, 278, 331, 427: n = A,T,C or G
cgaatacgactnctatagggcgaattggagctccccgcggtggcggccgaggtacatgtggcctttcagctagcgcagaggatggaaaccagagtgggctgatgattggatgccaggcctgagccgggtgagtcctgttctcattatactgtaaagtgagctgctccaagcctccctgattcttagcactcccagtccctgcangggtccctgagaaggttaatcttgcattaggccctctgctgttttccctctgtaagccttactccactttgcantgagttctagtataacttctattccagtaagatcaaatggttaaggactccanaaaagaaatttggtgaacacaaagggtttgtcatactttaacttttgtccctttcccaggtggcccatgcttctaggccagcctcccaattcctancttgcttcatgctcctggcctttgc

SEQ ID NO: 7841 - DNA, 953 bp, Homo sapiens
  misc_feature 1, 2, 60, 67, 68, 69, 73, 74, 145, 231, 389, 444, 462, 496,544, 566, 572, 575, 592, 603, 627, 628, 638, 649, 655, 658,661, 678, 699, 704, 722, 723, 731, 733, 738, 743, 749, 756,757, 759, 761, 763, 772, 777, 778, 785, 795, 797, 798: n = A,T,C or G
  misc_feature 800, 804, 805, 812, 813, 814, 830, 840, 843, 847, 849, 852,857, 875, 880, 881, 887, 889, 890, 897, 907, 914, 917, 918,922, 925, 927, 928, 931, 935, 940, 948, 952: n = A,T,C or G
nngactactatagggcgaattggagctccccgcggtggcggcccgcccggcaggtactcnattattnnntttnnctttttgttttggaggttgaatgcagggttttattgagtggtggaggtggttctctgaaggatggatgcanagctggaagcggggatggcacgggaagataatcttcctgctgggtggcaaacctctccgaccaccctcggctgaactcctctcggngttcaaatgttcctcttctctctttctctgctgtatcgtttcaccattcatctgcttgtctgggatggtgaagacaactgtttgctcatttgcttggcgataggtgattgtctcgccgctcagctataggcgatggtctcaccactcggtgataggcnattgtcccatctaggtcgccaaaatgtgtctggaattggtggggttcttcgtctnactgacttcaagaatgangccgccgacactcgcagtgagtgttgcagttctnaaaggcggcatgtctaagagtttgttccttctgatgtcggatgtgttnacagattctttcttctggtggngttcgnggnctcgctggctcaaggantgaagctagtngaccttccgggggttacagctcannaaagcattgntggacccccangagggnccncancaagatttattgcaaanaccaaaagaacaaatcttccnccgtntggaaagggacccaacannttcccccntnccctngggcnatttanaaactanngngngncccccggcntaagnnatttganttccagcttntnntnccgnnaaccttnnngggggggcccggtacncaaaattttngtncttnanggngggtnaaatgcgccccggggggnaatanngggccntnnttttccnggggaaaatntttctcntcnnaatnccncnnttnaaancgggnacataaangttnt

SEQ ID NO: 7842 - DNA, 648 bp, Homo sapiens
  misc_feature 6, 9, 14, 18, 22, 27, 30, 55, 78, 95: n = A,T,C or G
tatgtnaanacaangtgntttncaatnctnctgcttggcgactgacctccctcanaccactaaactctgtgcatcagnatgcactaacaatgagnacattggtcactcactgagtaggtgggcatggtgaaagccttttttacccatagatccgtgggaactgcttaaaagcctgaaatgcattcagttgatgcaccagacatcagttactgaagaagcagaggcgatgaacttcccttaacattgacctaagtggataaatgcatggcaacatgttgagtgacttcgacaatgcagatacatccaaagtcaaaatgccacagggctacccagtgctgcaaggctgggactgggttcccgtgagactgtcttaaggcagtgggatttctgatggaactgtgggcataagcatatgtccccataccccactcccactactcactgtaggaacagcagtgtaacatttgtcttggctaacaacgacaaacaatccccaagtcccgatgcaaaccaacagtgctggggccacacagtggcctgagcaacatacatatgggtagtaactgagaagacatttccaacggattgccattccaacaggcatgggaaacgctcaacatcactaatcatcagagatgaggtacctcg

SEQ ID NO: 7843 - DNA, 615 bp, Homo sapiens
ggagctccaccgcggtggcggccgcccgggcaggtacttggggcggcaggtggagttataattatagcttagaaaaaagcagcatcagcagctgttgcttctgtttgttcccagctataactgtcatcagtgggtaaactggcataaacaggcctctacaagtggaaaaacatttaacccctgttcttgtcacactctgggtcctctcagtggccagagaacagaaagaaaatctgactgtgcacgagcgaagggtgacaccgggcgtgcagcaccgacctgaaggcacctcttcgggggagccagaaatttgaagattctctttcctgtcggagactacaaaccaaataaatagggttttatgttactctggtagtgaaccgatggtggaaccagtttgtgaatttgccctggccagacaggctaatgttcctcatctctagcagtgttcacggaagcgacgagcacgggcgcctgcttagaaggacgctgatgcgctacgtcaatctcacctccctgctcatctttcgctcggtgagcactgctgtgtacctcggccgctctagaactagtggatcccccgggctgcaggaattcgatatcaagcttatcgat

SEQ ID NO: 7844 - DNA, 473 bp, Homo sapiens
  misc_feature 4: n = A,T,C or G
actncttagggcgaattggagctccccgcggtggcggccgaggtactaacagtcaggaacaaatagaacacatagagaggacagtgggaggtccccctggctaaagcagagggtgtattgagagaaggaaacctttgcctcaatggatcgtaggcaaactgagaaggaccataacaccttgctgagaagtttgaatgtgattccttggtgaccacagcaggaggtcctgaagtccctgtccttcagatgcaaacaaggaggctgtcccatacagactatcagggaaaaaatgcactgtttatcaaaagatatgaatgttcttgacaggcaaagccctgctcaaatgaaatggcagtgcagggagatgatattcagtgtgatgcagctgtgagtacctgcccgggcggccgctctagaactagtggatcccccgggctgcaggaattcgatatcaagcttatcgataccgtcga

SEQ ID NO: 7845 - DNA, 661 bp, Homo sapiens
  misc_feature 17, 49, 523, 594, 612, 638, 640, 646, 651, 653, 661: n = A,T,C or G
ctatagggcgaattggnagctccaccgcggtggcggccgaggtacaggnatgcaaacacttctaaaattgtcttctgggatttctgtagataaaagctagtaaaagacctgagaagagatttttattgagcctatagcaatttggtttcataccctgagtagtaacagatattacattcaaagatgcttaattaccttcacaaagtatgaaattccaagcctacaaattgaatcagcaattcaaacttgaatttggaacttttcattatttatgtggacattctattagcagagaaccagctatacttcttatttccataggagagaaaagagcacaaagcagaacaagaggattccctacaggtgtgaaagaaatatttccgcttgatattcctacagttacagaagaacaaccttaggaaggtcaggacattgtgtctgggggaggaaggcaccaggcaatcactttccagagaagctatcaacattcatcattacaggagcagcactccgtttaggctgnttgtattttccatgggtctaggcacatgtgcccttctctcctggcacttggcccctctttccctgccccanatgcttttttttgagaangagtctcgccctgtcacccggctggntngcaatngcatngntctcggtn

SEQ ID NO: 7846 - DNA, 665 bp, Homo sapiens
  misc_feature 504, 521, 532, 570, 583, 605, 607, 614, 638, 646: n = A,T,C or G
tatagggcgaattggagctccaccgcggtggcggccgagtacttttttttttttttttttttttttttgcctggagagagagagatgttttatttttgccaaagcatgtgagagtaagtagcaaacatcatgacacttcacccctcaaatattttcccacgtatcacttaagaacaagggcattcattctgttacatgaccacaatacaatcagcacagatagatattaacattgagacaatgctctgatgtattggtatctactatgcagttcataatcaaataagggttttggtaacttgggatccataaatggtctgcaaggtcagcctctgtagacctgcacttagtgggtgccatttccctgtctcaggtgcctgctctactggtgatatttttcactggctctgttgctcacttagaattttttctcccagctgttgacattttattttctgcatagttctgaagctgcagcagttgttcttatgccttcttgatggnaatttcatagaagctgncaatttctaanggatttcatctcctttgatgcagccaggtcaatagctncaacctatctganaatgtctgccatcggcctcctntntgtctanaaaggggtcttaagtctttcagcnctttgggnggtgggggggggcggatcc

SEQ ID NO: 7847 - DNA, 654 bp, Homo sapiens
  misc_feature 20, 25, 27, 31, 34, 35, 70, 141, 654: n = A,T,C or G
ttggtacagatttccctttnttttncntttnctnnttaactttttgctattaattcagaagttttaattngcttttccagtttcctagtgtttgtattcccatcctgcaacaatctctgtatttttcttttattatatcantaagtctctctgtagttcaggtgaatttatagacagtcatccttacactacctatataaaattatggaaggatgtctagaggcatgcttctacttcagattaccaaaatgataatgaccactgcgcagtgctgggatcagtccactggcactacactttaacaatcctttatagcactgatagtgcttgccttccatttttcaggattcacctccaatttccagatcaaaacagagtgtgcctttgtatatacttcaaagaaaacaaagatgctagacaacaggaaatataaagtgaaatcaggtattttccaaaaaccaaaactatactagaattgattttttttaaatgtatatgtcttaatcattcaaataaagtcaactacaatggaggagatatttgaacccctcaattctaactttttactgagtctagaaaataataaatgcttgtagatactactgaaaagttctagttggcaaaccataaaagacatcccatacaaacacagan

SEQ ID NO: 7848 - DNA, 691 bp, Homo sapiens
  misc_feature 1, 2, 3, 4, 5, 7, 10, 11, 12, 15, 17, 21, 30, 51, 141, 163,376, 402, 429, 438, 441, 463, 518, 534, 555, 560, 572, 577,583, 589, 596, 611, 622, 630, 633, 634, 636, 643, 647, 651,659, 664, 665, 668, 678, 683, 689: n = A,T,C or G
nnnnncnccnnnatntnaggncgattgggnctccccgcggtggcggccgcngtactttttttttttttttttttttttttttttgcaaatttacacagttttcttaggaatgctctttcttttttttttctctttggactntacattcctgtagctcctattnttcaagggcacaggggcttacttaaacataaaattttacaacttaactggaagggtgccctgcttgcaaatggaaaactgccacagagcagacttaactgcagcaagcaggtgacagagcaaggaacaggatccaaaattatgattttttgtgtgctactgaagtaaaagaatttaagaaggttttactcagggtcataggctgggttggaanactgggaaaaggaaatcagtagtatntatatctaattatggggacagaatttnacagacatnttntaacctaggtcaaacgtcaaanacatgaacacctaagacactttcacacattccctgagcatcatgattaaattcanatagtttggggatctntccccaggaccatgtttcctnttttngtaaggggcctntaaanaataanactttntgtgttnttcttccccaacaanaaagttggaanttaattanccnncntgggganaaanaaanagactttnccaanntgnggtttttaantttcngtaaancc

SEQ ID NO: 7849 - DNA, 647 bp, Homo sapiens
  misc_feature 593, 627, 635, 637, 642, 645: n = A,T,C or G
ctcactaagggaacaaaagctgggtaccgggccccccctcgggtcgacggtatcgataagcttgatatcgaattcctgcagcccgggggatccactagttctagagcggccgcccgggcaggtacaggacaggtagcatggtaaccaagagagcactgggcgaggatctcatcctggcctccacgtctgctgtgcagattctagccagtgacttcacctttttggcctcagtttcctcacctgcgctcaatagttgtaggggcacttccagctataggtgtctatgattctggtttaaacgtttttctttcctaggaagaaatctaaatcaagtctgcaatttccgagtatatttatttcgaaggtagttcttttcttgttttgttatatttttatttttgaaagaaatacattttaaaatgtttcccaagaaatcagatttcaactaagacttttcttcctatttatggcgacatatttgtttgattgcatcttgcttttttcagaacattcttctaagatggtgtcttgtaacagagtttgcgaatagcaaagcctgacagctgagggaacgcagctgcgtctttaaaagngtgaccctttctagtctaagccatctgagtttanagacctcngncgccnccncg

SEQ ID NO: 7850 - DNA, 634 bp, Homo sapiens
  misc_feature 16, 87, 592, 618, 634: n = A,T,C or G
tatagggcgaattggnagctccaccgcggtggcggccgcccgggcaggtaccagttttatcacctaaatgccgcaggaataaatagnatcatttactaagattactgggctttttgttggcttctttgttcatttttaatctgcaaatataaaagattgtgttacataattctttaggttgaaacatgaaatgatggaagaagacttcaacttccaggagagatttattagctagtggatactcagtgctcccaccaaaaccactagaaaaaaatgtatttaaaacaaataaatcaactagttcaaggaaatagagagctgaaaaggcaaagagaccttgacgaagtaagactccagataaggcaacacttagtgaggtgaactgacttttaaagactttatccttggatgcatttcataattctgggcatgttttaggcagaataacagtatttaaatcctgtaaaaaggaattcagtttgcagatgcaaataaggttggtaatcaactggcctgagatagggtgggcacaatctttttcacctgagtcttaaaagcagacagcctatcttagatatagtcacaagggacnggaaaatgcaaggagagtcaaaaaangtgcgatgttgctggn

SEQ ID NO: 7851 - DNA, 669 bp, Homo sapiens
  misc_feature 47, 436, 443, 463, 465, 466, 468, 473, 477, 479, 481, 482,490, 493, 497, 498, 500, 504, 505, 514, 515, 519, 520, 522,526, 528, 531, 533, 536, 537, 547, 549, 553, 554, 557, 558,560, 561, 562, 564, 571, 574, 576, 577, 579, 582, 583: n = A,T,C or G
  misc_feature 584, 586, 587, 589, 593, 595, 598, 599, 600, 601, 604, 606,609, 610, 613, 618, 620, 623, 628, 630, 631, 632, 633, 635,636, 639, 640, 641, 642, 646, 647, 651, 652, 654, 656, 660,661, 663, 664, 665, 666, 667: n = A,T,C or G
tatagggcgaattggagctccaccgcggtggcggccgagtacgcggnaaatgttagacaaatgtagccaaaccaaaaaatacacatgttctatgaatccatatatgcaaggttcacaataggtgatagtagctactcttttgggaaggagtgaggaaaggactgagagagtattgcagagggggctccgggtgtttgtaatttctatttcccagtgcaggtgtggtttgcatgagcatgttcactttgtggaaattcattgagctgtaactaaatatacagaattatttatgaatgaaatgatatataattcagtgggaacctgggaggatagggaggaggtgggggagctgaagaaacacgtgtggccgaatgcttaacaattgttattgttagggtatggatacccggggggtggttgtacctgcccggccggncgctctngaactagtggatcccccggncnngnggganttcntntnnagcttatnatncccnncncctnnagggggggnnccgnncncacntntgntnccnntttggagggntnattnngcnntnnngntacttgntgnanngnttnnntnngnaatntntgnnnnccnanttnngcnaagtnanagncagangnnnnannggnnnntttnntggnntngnttgnnannnnngt

SEQ ID NO: 7852 - DNA, 662 bp, Homo sapiens
  misc_feature 22, 94, 121, 460, 465, 478, 494, 500, 507, 517, 521, 526,534, 538, 545, 553, 560, 561, 564, 574, 582, 592, 593, 603,604, 611, 617, 623, 624, 625, 629, 632, 639, 643, 648, 650,651, 658, 660: n = A,T,C or G
actcactatagggcgaattggnactccaccgcggtggcggccgcccgggcaggtacttttttttttttttttttttttttttggagtctttaanattatctctatgttggctggctgcggnggctcatgcctgtaatcccagcactttgggaggccaaagcgggaggccaacactggggctacccaaggagttgaccaaaggtgatattaatacatatgcttacttattaccttgttcgcacagttctagtgtaagtcttgaaaatcaagtaaatttggaaacatagttgcacaaactctctcatgagtcacacagttaatccagaatattatttctaagttatcataaagccaacaagcaaatatgatgtacctcggccgctctagaactagtggatcccccgggctgcaggaatttcgatatcaagcttatcgatacccgtcgacctcgagggggggncccgntccccagcttttngttcccctttagtganggttanttgcgcnccttgggcgnaatnatggncatagctngttncctgggngaaaattntaatccnnttncaatttcccncaaaaatncaacccgggnnccataaaggnnaaagccngggggncctaannngggngcntaccccnattnatggngnnggccccncngg

SEQ ID NO: 7853 - DNA, 668 bp, Homo sapiens
  misc_feature 32, 594, 626, 648: n = A,T,C or G
gaattggagctccaccgcggtggcggccgagnaaagtggcgcagcaatggaaagtgtcgcgcgaacagcaggacgcgttctccgttgaatcgcaccgccgcgccatcgccgcgcagcaagccggtttcttcaaggccgaaacgacgcccgtcgaaatcatcacgcgtacgccgaacctggccacaggccaggtggacgtatcgcgccgcaccgtcgacaccgacgaaggcgcgcgcgccgattcgacgctggagtcgctgggcaaactgaaacccgtgtttgccgccaagggcaccgtcacggccgccaacagctcgcagatgtccgacggcgccggtgcgctgctgatcgtcagcgaaaaaatcctgcgcgaacataacctgactccgctggcgaaattctcctcgttcgccgtgcgcggcgtgccgccggaaatcatgggcatcggcccgaaattcgccattcctgcagcgtgcgccgccgccggcatcacgcaagaccagctggactggatcgagctgaacgaagcgtttgccgcgcaagccctggccgtcatcggcgacctggacctggacccgtcgaaggtcacccgtnggcggggcgatcgccttgggccacccgttggngccaccggggccttcgggccgnaccgggattcaagcgctgac

SEQ ID NO: 7854 - DNA, 675 bp, Homo sapiens
  misc_feature 2, 530, 560, 568, 574, 621, 635, 639, 648, 653, 654, 659,662, 663, 666, 668, 675: n = A,T,C or G
tntagggcgaattggagctccaccgcggtggcggccgaggtacgcgggagttgctaaaacgctaaaaactaaatgtgtaagatttatgcattttagtgtatttaaattataacccccagaaagcattgcctcattttttctggagggtaaatatgctcgttaggagcataaggggatgattttgagaaacccttgctctgtcattctgtcagtaaaccgccactaacttttctggtttcaaaaaagcaaggtccattgatgaaactcctttgtgccttagtgacaaataacattgataaggcctactgtcaacaagagtgtgtttgttatatcttttgtttttagtgactaaatttgtaggaatgatattttcatgggattactcaatctcacccaccattagttgcaggtgacaagaaagctaagttggcagatgtttgtgctagaagctgtgggtttacgtctcctttgtgcatgtgttccagacataccagtggcttggtatttaaacatcatgctcaggtgtgcanggtagtttttgagttataataagtatgcangcgctgtnggattncttggttgtttatgtaaaaatattttgcactccttctgaaatgagtnggtagtagaatatntttngaggaggtnccagnnttgantgnnaancngccctgn

SEQ ID NO: 7855 - DNA, 582 bp, Homo sapiens
  misc_feature 474, 552, 567: n = A,T,C or G
tttttttttgtatactcaaaaaacatatatttgcatgtgccaggaaaaggtaaggaaaagggagccttcatgtgccagcccctgtgctgagccctggagctgtagagatgagtgaggtggattttttgtctgtaaagagtttgccgatgggaccaagtctgtcatctctctttcctggcctgaccgaggacaagcacttcttagtaaccctgtgaataccgatgcatcccgtcagtcagcagctgtttgcggaacaccagctgcaggccaggcaccgtgctgcaaggcgtagatatgttgctgaacatgactcccttccagatgttcaggatttaacaggcaagtaaacagagggtccagagaaggcactcagcactgcctcatgacatcagggaggattgctcagaggaagtgatgcctaaacccagctggatcgtagtgtaatggatagaggggtaaacaagagctgatttnctagcggtcctgagtctcgacaggttgccacgtcaggagtattgatctttttctggaagcgatggtgaacctttgaanagtttaagcccccgngtacctgcccggcgg

SEQ ID NO: 7856 - DNA, 670 bp, Homo sapiens
  misc_feature 601, 638, 658, 670: n = A,T,C or G
gcattaaccctcactaagggaacaaagctgggtaccgggccccccctcgggtcgacggtatcgataagcttgatatcgaattcctgcagcccgggggatccactagttctagagcggccgaggtactttgttacaacagcctgaaaggactaagacaccgacctagtctccccgatgaaaaagtttctctcagacttctaccctttccaatgtggccaaagcttttcattccgaagaagtttcctttctgagaacgctcattgtgtcgtttggctttccccgtctctgcttgacacatgaaccaaaacagaggcagccaaagcagggaaaaaaaaaatcctaggatcagagtccactctatgcccttttgagcttcaaaaggagaaagagacaaaagccaaaagcaatggaggtcaagctgcccggtacctgcccgggcggccgccaccgcggtggagctccaattcgccctatagtgagtcgtattacgcgcgctcactggccgtcgttttacaacgtcgtgactgggaaaaccctggcgttacccaacttaatcgccttgcagcacattcccctttcgccagctggcgtaatagcgaanaggcccgcaccgatcgccctttccaacagttgcgcancctgaatggcgaatgggacnccccctgtaccn

SEQ ID NO: 7857 - DNA, 1113 bp, Homo sapiens
  misc_feature 4, 5, 7, 9, 16, 17, 20, 24, 29, 35, 38, 41, 42, 45, 53, 57,62, 63, 64, 68, 69, 75, 76, 88, 92, 93, 99, 100, 395, 496,502, 510, 519, 534, 553, 568, 569, 591, 611, 614, 618, 626,632, 638, 653, 661, 662, 684, 694, 713, 720, 731, 753: n = A,T,C or G
  misc_feature 756, 782, 789, 799, 829, 838, 854, 871, 879, 881, 882, 893,895, 896, 900, 905, 933, 938, 940, 941, 949, 952, 957, 968,972, 975, 981, 982, 984, 995, 1008, 1010, 1011, 1014, 1015,1021, 1026, 1031, 1034, 1036, 1037, 1041, 1045, 1047: n = A,T,C or G
  misc_feature 1049, 1053, 1057, 1059, 1060, 1062, 1064, 1069, 1071, 1077,1079, 1080, 1093, 1094, 1098, 1107, 1113: n = A,T,C or G
cccnntncntataatnnttnatanttcanttattntcnaannttngttatttntatnttgtnnncttnnctttcnnttaggaagcttnaagnnccgagnncctctagatcgacctgcaggcatgcaagcttggcgtaatcatggtcatagctgtttcctgtgtgaaattgttatccgctcacaattccacacaacatacgagccggaagcataaagtgtaaagcctggggtgcctaatgagtgagctaactcacattaattgcgttgcgctcactgcccgctttccagtcgggaaacctgtcgtgccagctgcattaatgaatcggccaacgcgcggggagaggcggtttgcgtattgggcgctcttccgcttcctcgctcactgactcgcttgngctcggtcgttcggctgcggcgagcggtatcagctcactcaaaaggccggtaaataccgggtttatccaccagaatcaggggataaccgcaagggaaaagnaacatngtggagcnaaaggccangcaaaaaggccaggnaaccgttaaaaagggcccncggtttgcttggccnnttttttcccataagggctttcngcccccccccttgaccggangcnttcnacaaaaanaattcngacccncttcaaaagttccangaaggggnnggccggaaaaaccccggaacanggggaccttntttaaaaagaataccccangggccgntttttcccccncttgggaaaagccttccccttnggntgccggctttttcccttgttttccgnaaccccnttggcccggntttaacccggggattacccttggttcccgnccctttttnttcccttttctggggnaaagccggtggggcggncttttttntnnaataagcttcncnncttngaagngggtatttttcaaaatttctggggggtnaaggngnngtatcccnttncaaanacttgtgggcntttntgngtccannanaaacccccccncttttaaaccccnannccnntgtgtnccttnttacncgngnnaaantatntntntttngggncnncnanccccngnggaagnannaccattttttttnncccntttggcggnacaccn

SEQ ID NO: 7858 - DNA, 633 bp, Homo sapiens
  misc_feature 20, 27, 30, 38, 61, 596, 604, 605, 609, 610, 611, 612, 618,633: n = A,T,C or G
gccagcgcgcattaaccctncactaanggnaacaaagnctgggtaccgggccccccctcgnggtcgacggtatcgataagcttgatatcgaattcctgcagcccgggggatccactagttctagagcggcctgggtttgaatagtgctcctcatggttagaacaacagcaaaaccttgaggcacatcactagtctcacttccctccatgtctccatcctgaagacttggaaatatcctccatctaaagtcataggaagagtaaatgagctttaactgtaaatcagtgagaaaagccccaaaatttgttttgtttgttgtttttcttaactactgattcaagcttcgacccagagcaattgtcagaactgctgaaatacaacctggatctcagtagttttttaatcatctgggtgattctgaaataatccttgatttggatattccaaccaacgtgaaaaaagacgtccttgtagatgctccctaagtatgagcttccaactccttctttctcacagttcccatttttccaaattacagaaaaattccttccttgccctctgtacctcggccgcaccgcggggggagctccaattcnccctatanngagnnnnattacncgcgctcactggccn

SEQ ID NO: 7859 - DNA, 631 bp, Homo sapiens
  misc_feature 631: n = A,T,C or G
cctcactaagggaacaaaagctgggtaccgggccccccctcgggtcgacggtatcgataagcttgatatcgaattcctgcagcccgggggatccactagttctagagcggccgcccgggcaggtacaacaactgctaatgagctaacacttaatgagtaatgaccaggcaccagacactgttctagcactttatacttactgatttctttactcttcatgataaccctatgaggaaagtgcttttttgttaagctccattttcagctgaagaagctgaggcctggagaagttacatagctttctcacggtgtctccactatgaagtagctgagctgagatctcacccaaggccctgctgggttcaggccacactcttaagtacctcggccgccaccgcggtggagctccaattcgccctatagtgagtcgtattacgcgcgctcactggccgtcgttttacaacgtcgtgactgggaaaaccctggcgttacccaacttaatcgccttgcagcacatccccctttcgccagctggcgtaatagcgaagaggcccgcaccgatcgcccttcccaacagttgcgcagcctgaatggcgaatgggacgcgccctgtagcggcgcattaagcgcn

SEQ ID NO: 7860 - DNA, 649 bp, Homo sapiens
  misc_feature 544, 585, 592, 594, 629, 631: n = A,T,C or G
ctatagggcgaattggagctccaccgcggtggcggccgagtacagccctgagctgcatcatttaaagaccaattgttaaggaccaatctgagggcctgtgcattagttaaaactccttatctggtcatagagggtggtgtggtttggacgcgttccccttgtctgtgcaattcccaacagaggcaagtgcgcatttgagacaggttgagggttcaagctgtccaatccctgctcatctgcagcacaccaaggaatgtggactaatgaaaaataaactgcatgcatgcaatgcccatcacactgcctgcattttctaatcttcacaataactctgtgttgagaaatattcctgtctgtaatcccggcactttgggaggctgaagcgggcagatcacctgaggtcaggagtttgagaccagcctggccaacatggtgaactccccccaaccaacgacccttcccatatctactaaaaatacaaaaattagctgggcatggtggtggggacctataatcccagctactttggaggctgatgcagcanagtctgttgaacccagaaggcagaggttgcagtgagccaanacagtgncnctgggttccagcctgggcaacaagagtggaaactntntcccaaaaaaaaaaaaaa

SEQ ID NO: 7861 - DNA, 632 bp, Homo sapiens
  misc_feature 20, 91, 116, 172, 521, 543, 549, 579, 614, 615, 622, 623,632: n = A,T,C or G
tcactatagggcgaattggnagctccaccgcggtggcggccgcccgggcaggtaccacacacacacaggcacacgcaggcacacacgcagnacacacacacacataaacacacagnagttcactagtccgagttactgattttcttaggattctcaaagtgacaacaccggnaaacaaggtaattcatgttaaaacacaagggttatatcagtaagagatgggatccccgaagtaaaccgtggaatttgaatcaagtttcgaagagctaaaaaaagaaattggagtttcaacattcaccttcttgaatccttaagaaatacagaagttcaaaatagaaaacattacagtttcaggatacaaaagtagaaacatctgagattaagcctacatttttaaaaaaagatattgaaaattactgtgcttgtaataccagcttttcaaacatcatacccagtattggcattacctagatcaatctttttcatcaagttggaaaaaataagcattggggttggaaagnccatcaaatgtccatattgaanattggnccttgctagttcattaaaaaattaccgccntatgttggtcttcttcattccaggcttattggacnnactttgnnttcatggcn

SEQ ID NO: 7862 - DNA, 658 bp, Homo sapiens
  misc_feature 506, 531, 550, 614: n = A,T,C or G
gcattaaccctcactaagggaacaaagctgggtaccgggccccccctcgaggtcgacggtatcgataagcttgatatcgaattcctgcagcccgggggatccactagttctagagcggccgcccgggcaggtactgcctgtgcgtagctgcattaaaccaaatgatcaagaatatcaagatacatcttcctggatcttcaatcccacttaaagatttggagaacatatcattttatattaaaaccaataacattttcagaatacatttgaataatttctttttacctaaaaacagagtctttaaataagtatcatttttgagatgcattgccataggatacatactgaggtatcttctctttcccttacctattagaggcatttctgggcaagtttgaggagcatggaattaacagtcatcaatgcattgctggatttgaaaatgatttatatcaatcagcagaggacctccactggtgatgtcagcaggatctgaggatgttcangtagacatgctatgctttgaatctnccccgcgtacctcggccgncaccgcggtggagctccaattcgccctatagtgagtcgtattacgcgcgctcactggccgtcgntttacaacgtcgtgactgggaaaccctggcgttacccaacttat

SEQ ID NO: 7863 - DNA, 637 bp, Homo sapiens
  misc_feature 21, 623: n = A,T,C or G
gcattaaccctcactaagggnaacaaagctgggtaccgggccccccctcgggtcgacggtatcgataagcttgatatcgaattcctgcagcccgggggatccactagttctagagcggccgcccgggcaggtacattgacagtgcttctggtttcagcacacatggagatatagaattgaaattgctctgctttctttacaaatgactcagagtgtgcttgtccttccctaaaatgttgccagcatgtaaaggattttcaatgagcagtgcaataagccagcaactgggaaggcttggagcggcactgatataacgtggtgctgtcacacagataatcagggctggagccaagtctcggtagcgctgtgcattatcctggtcacatactggaagttttgtttatccaacttggttgctcttgaagctggtgagagccctgccaggatgtggagtggacttcctagcagaggcagtactcatggggttcacatggttttgaatcaccagggccgcccatcaggagatgcctttatccagatgaagtctgcggacagagcatttatggctgcacagaagtgtcataaaaaaaacatgaaggacagatatgttgaagtctttcagngttcagctgaggac

SEQ ID NO: 7864 - DNA, 660 bp, Homo sapiens
tatagggcgaattggagctccaccgcggtggcggccgcccgggcaggtaccaccacgcctagataactttttgtatttttaatagagacagagtttcaccacgttggccaggctggtctcaaactcctgacctcaagtgatctgcctgcctgggcctcccaaagtgctgggattacaggcataagccagcacacctggccgttaaactagttattttaatcatgctacacaaagaagacatttctccaaaggaaatatataaagggaaacactgttgaaataaatggaaagctaaaagtctcagcatagaagctataaaaagaaacaagtggaaattgtagaactgaaaatacaataacaaaatttactggaaggtctcaacacaatgaagatgactgagggaagagtcagtaaatttgaagatacatgagcagaaattatctagtctgaatgacagagaaaaaagtgaaaaaaatgagaagacctttggggatctgtgggacaatatgaaacagtctaatattcatgtcttaggagcccagaaagaacaattggaagaaaaaatatctgaagaaataatagctaaaaacttccaacatctggcaaaaaacaaatattcacatacatttacatagcattctattaaagccggtctgctgc

SEQ ID NO: 7865 - DNA, 672 bp, Homo sapiens
  misc_feature 45, 467, 468, 469, 470, 471, 472, 473, 474, 475, 476, 477,478, 479, 480, 481, 482, 483, 484, 485, 486, 487, 488, 489,490, 491, 492, 493, 494, 495, 496, 497, 498, 499, 500, 501,502, 503, 504, 505, 506, 507, 508, 509, 510, 511, 512: n = A,T,C or G
  misc_feature 513, 514, 515, 516, 518, 519, 520, 521, 522, 523, 524, 525,526, 527, 528, 529, 530, 531, 532, 533, 534, 535, 536, 537,538, 539, 540, 541, 542, 543, 544, 545, 546, 547, 548, 549,550, 551, 552, 553, 554, 555, 556, 557, 558, 559, 560: n = A,T,C or G
  misc_feature 561, 562, 563, 564, 565, 566, 567, 568, 569, 570, 571, 572,573, 574, 575, 576, 577, 578, 579, 580, 581, 582, 583, 584,585, 586, 587, 588, 589, 590, 591, 592, 594, 595, 596, 597,598, 599, 600, 601, 602, 603, 604, 605, 606, 607, 608: n = A,T,C or G
  misc_feature 609, 610, 611, 612, 613, 614, 615, 616, 617, 618, 619, 620,621, 622, 623, 624, 625, 626, 628, 629, 630, 631, 632, 633,634, 635, 636, 637, 638, 639, 640, 641, 642, 643, 644, 645,646, 647, 648, 649, 650, 651, 652, 653, 654, 655, 656: n = A,T,C or G
  misc_feature 657, 659, 660, 661, 662, 663, 664, 665, 666, 667, 668, 669,670, 671, 672: n = A,T,C or G
tcactatagggcgaattggagctccaccgcggtggcggccgaggnacgcgggggagtgtaaaatatttatgtggcttttctcctcgcatttgctagcatgaatgcaggggcatgaaagtctgaatagggctttcaaccatcacctggggcttagaaaatgaaaatcagagtttaggatacgtcaaaaagggccacattgtagagtggatagcaatccattcaaaagctcagcactaacaaatattaaacttcagatttaaatcaattcaattattgattcaaaaaagttaatgcgaccttatcataactcctggccaaaagaaaatatcacttcttttgggaagaatatagcatcatttagatcctcaaatgaatgctacacatggtcagacgaagtgtttaacagccaatcaaaataatcaagtatgaaaaaaaaaaaaaaaaaaaaaaaaagtacctggcccggnnnnnnnnnnnnnnnnnnnnnnnnnnnnnnnnnnnnnnnnnnnnnnnnnngnnnnnnnnnnnnnnnnnnnnnnnnnnnnnnnnnnnnnnnnnnnnnnnnnnnnnnnnnnnnnnnnnnnnnnnnnnngnnnnnnnnnnnnnnnnnnnnnnnnnnnnnnnnngnnnnnnnnnnnnnnnnnnnnnnnnnnnnnngnnnnnnnnnnnnnn

SEQ ID NO: 7866 - DNA, 660 bp, Homo sapiens
  misc_feature 3, 9, 35, 650: n = A,T,C or G
gtnatacgnacttcacttttaggggcgaaattggnaactccaccgcggtggcggccgcccgggcaggtaccttcaggcctggggcctgtgccaatagagtattactggatataggaatagctctgacacctcaaggtcaccctagaagttgaaggatttcagggctcacatattttagactcaaacttctagaacactgttctgacccagctgagctattgaagatagttttcacggcactgctatccttgattgacctcctaggggatctgtctctcttgagaataggcctcaactctaatttccttgggcccaagaccaagagtgggcaaggggagcctagcctgcaccttgccacctggtgttggccattatcagggtgccaggagctgaagtggcacatgttagtgtctacagagtgccacgtgggtagtgctaggtcttccaggaggctcagccactgatgactttaaggcatgcaggtctccagcatggctgcaggaaaactaagagaacttgtttctagtagatctacccttaaagaatagctaaaggaacttctccaccagaaagaaaatggtaaaagcccaaagctgagattttcagagcagggagaacaggatgagtaaaaatagaagtaaacatactanactattcttt

SEQ ID NO: 7867 - DNA, 609 bp, Homo sapiens
  misc_feature 2, 554: n = A,T,C or G
gnctcactatagggcgaattgggccctctagatgcatgctcgagcggccgccagtgtgatggatatctgcagaattcgcccttagcgtggtcgcggccgaggtacttgtgtgggtgtcttaccttacattagaatatcctaggcctttctaattcttcctcttgaattccctgtgtcactcatctgaggtcatctcttggatttaaatacatttggtctgaaattctcaaactgctgaataaaatgccatagtaagtccaactatatggtttcatgtagggtaaagtaaccattgtggaaggattacgataaaactgtgtgacaataaatagaataaaagatggcaaaacaatctgtaaattacaaagtgttataaaaatgcattgaatttctagtgttcttacactttcatatttctcattggcacatcaatcagaccttgccttcctaaagtgggaggaagaaaaaggctgcacctgtctgggctgagggtctgggcagaacactagcaaaacttttaataaatcttcatgtcaccaccccaaactcattanggcccaaacttatttcattatcttcactatccccatggttttcctctccattatt

SEQ ID NO: 7868 - DNA, 654 bp, Homo sapiens
  misc_feature 181, 184, 267, 320, 448, 459, 501, 566, 591, 607, 613, 633,647, 652: n = A,T,C or G
cctcctaagggaacaaaagctgggtaccgggccccccctcgggtcgacggtatcgataagcttgatatcgaattcctgcagcccgggggatccactagttctagagcggccgagggacttttttttttttttttttttttttttttggtttcaaaataattcaggttacccacatttcatnttntcaagagctgcctatggtaactggctaccatattggacggcccaggtctattccataatcagtgagcagagacaaatgtttanaaggatggtctccaaaatggtccaagttgtgatcctgggggtgaatttatggnaatgtttgctttcgtatttatgttttccttactgtttgtttgttatgataagagttatcctgtataggtaaagaaaaattaaactgcatgcatttctgaaggaacaaagagagaaaacagcttgttangtgtcatgaanatatacgaagcagccctttctaattccttgttaaaaggacanatcctaccagcctgggcaacatggcaaagccccctcttcaccccaaaaaaaaaaaaagggaggangaagaagaaaaattgccaggcgtcngggtgcatgcctgtantcctanctcctcaggaggctgagggngaaggatcacctgnccccngg

SEQ ID NO: 7869 - DNA, 599 bp, Homo sapiens
  misc_feature 572: n = A,T,C or G
gtggtggttggagctgccaagggcacccaacctggtcaacaaattagtgtgctcagccagaggcagtcctggatgaattcaggctgcaaagtgccctgtgacctggcccttgggaagccacgctctgatgaggtttgcagatctccccgcaatccagggccaagcatgaatgaaggtgttaggcatttcaaggatgcgactaggacgtgctgctgtctcaggttcacattatactgaaataaggtcctggccagacagcaccatatagttaattgaggtgtttgggagatactcaaatgggtgttaatatttcccaggcaatattttcaaggctcagagcctctattcaaaagataactgaaaggctagcaaagggtattgcaaaggtatattctgatttctgacaggaagatcgatggatggacagtgagagtataaagaccttagggtttggggttctgatttggccttggtctgttgaatgattgattcattcattcaacaaatatttatacaacacccacagggggcaggcattgtgctgactgtggaagatacagagagtgtgtcanagtgaaattgactttggaactgtcttt

SEQ ID NO: 7870 - DNA, 648 bp, Homo sapiens
  misc_feature 577, 604, 612, 617, 619, 622, 627, 643: n = A,T,C or G
cctcactaaagggaacaaaagctgggtaccgggccccccctcgggtcgacggtatcgataagcttgatatcgaattcctgcagcccgggggatccactagttctagagcggccgaggtacacatctgatatgcttcccctttctaatttttggcatcaagaggctacgtgaattgactggaatgtaagagtcctcccctccattttctccctttcctgatgacaggcaggccacgtgatcacagcagaacatctcataatagttactgatatacctgcccgggcggccgccaccgcggtggagctccaattcgccctatagtgagtcgtattacgcgcgctcactggccgtcgttttacaacgtcgtgactgggaaaaccctggcgttacccaacttaatcgccttgcagcacatccccctttcgccagctggcgtaatagcgaagaggcccgcaccgatcgcccttcccaacagttgcgcagccctgaatggcgaatgggacgcgccctgtagcggcgcattaagcgcggcggggtgtgggggttacccgcagcggtgaccgctacacttgccagngccctagcgcccgctcctttcgctttnttcccttnctttntngcncgttngccggctttccccgtnaaggc

SEQ ID NO: 7871 - DNA, 666 bp, Homo sapiens
  misc_feature 11, 33, 50, 201, 203, 204, 206, 283, 328, 432, 541, 576,595, 610, 650, 653, 657, 658: n = A,T,C or G
ccgcttttttngcctcactaaaggaaccaaagnctgggtaccgggccccntttcggggtcgacggtatcgataagcttgatatcgaattcctgcagcccgggggatccactagttctagagcggccgaggtacttttttttttttttttttttttttttgggatggagtcttgctgtcacccaggctggagtgcagtggcntnntntcggctcgctgcaggcttcgccccctggggttcacgtgtgtttctaatttttaaggccctactttaatttctactgncactaaataaaaaagaacaaaagctttttcttttaaaaaccctanacatcatgttcctgcttctgctggaaaaagagacaggatatcaccatctcaaaccagcacctttcagcaactgaagcctttttgtcctcaccctgagtgttaanacaatggctccctcacacgtcacaggccctggaagtgctacaacagctgaatgggttttcatgggacataaatcactttcccactacctgccacctacaaacctacttntcatgaaccttggatcctgcacaatatggctcgtnatatcctttgtgactgctntgaacaaggggactntttgcatgagtagatagagggcatttttccttttgcccgntancctnncccctaat

SEQ ID NO: 7872 - DNA, 430 bp, Homo sapiens
ctatagggcgaattggagctccaccgcggtggcggccgaggtacaacgtttcagccactggtggtttgccaaactggctgattacccataaacacacaacatggttctgttttgctcctagcaatccttaaaccattgcatgtctaacattctcagactaattcacaaatcagaaacatctgatgcccaacccataccaaatgcatttcagggcaaaaattatgctcctataatgtctggcttcctgtcttcaaggcactttgcttacatgactgaatcctcactgtgaggtgtagctatccatcatttttgagcaagaaagccaagatggataaataagtgactttcccaagacaactagagtggttggcaccatgatgggattggttgtcttatttttcagttggtcctgcccgggcggccgctctag

SEQ ID NO: 7873 - DNA, 664 bp, Homo sapiens
  misc_feature 16, 432, 474, 499, 500, 504, 516, 522, 523, 524, 531, 547,548, 556, 558, 566, 567, 569, 578, 593, 594, 597, 612, 614,620, 621, 628, 634, 637: n = A,T,C or G
tatagggcgaattggnactccaccgcggtggcggcgctcgacaccctgtcgatgggcatgtcggccgacttgcgcgccgccgtgctggaaggcgccaccattgtgcgcgtgggcagtgccatcttcggttcccgtaattactctcactgattgaatgaaagaatcaccatgacgacagaattgaacatcgccttcgtgggcggaggcaatatggccgccgccctgatcgccggcctggcaggcaaattgaccctgggcggcaatatccacgtgatcgacccccatgcgccggcgctggaaaaattgcaggcgcagttcggcgtcacgacggcgactgccgccggtgaagcgctgcggggcgtggacgtgatcgtgctggccgtgaaaccgcaaagcatgcgcgaagtggcggcgcaattgctgccctttctngatggagaacgggcgccattgatcctgtcgatcgcgggccgnattcgcgcccaagaactgtcgcganngctnggggactaccgngccatnnngcgctgnattgccgaatcaccanncctgatcngnattggccnnancggcattgngggcaacaacggggnnagngaggaaaaaaaaaanangggggnngccattnttggcnccntttggcaaaaccttttggtttaaaaaa

SEQ ID NO: 7874 - DNA, 905 bp, Homo sapiens
  misc_feature 4, 583, 690, 713, 714, 721, 731, 756, 787, 788, 790, 792,800, 802, 804, 811, 816, 832, 838, 840, 844, 854, 859, 873,875, 887, 888, 898: n = A,T,C or G
tggnggtatcgactactatagggcgaattggagctccaccgcggtggccggccgcccgggcaggtacgcgggaggcatagataagattaaaagaatccatatacaccatgaccacgaccatcactcagaccacgagcatcactcagaccatgagcgtcactcagaccatgagcatcactcagaccacgagcatcactctgaccatgatcatcactctcaccataatcatgctgcttctggtaaaaataagcgaaaagctctttgcccagaccatgactcagatagttcaggtaaagatcctagaaacagccaggggaaaggagctcaccgaccagaacatgccagtggtagaaggaatgtcaaggacagtgttagtgctagtgaagtgacctcaactgtgtacctcggccgctctagaactagtggatcccccgggctgcaggaattcgatatcaagcttatcgataccgtcgacctcgagggggggcccggtacccagcttttgttccctttagtgagggttaattgcgcgcttggcgtaatcatgggcatagctgtttcctgtgtgaaaatggtattccgntcacaattccacacaacatacgagccgggagcataaagtgtaaagcctggggtgcctaatgagtgagctaactcacattaattgcgttgcgctcactggcccctttncagtcgggaaacctgtcgtgccnngctgcanttaatgaatngggccacgcccggggagagggcggnttggcgtattgggcgctttttcgctttcttnntnanttacttgntngngcttggnctttnggttgtggggagcggnattagntnactnaaaggcgggnaattncggtttcccagaantnggggataacccnnggaaagaaantttgact

SEQ ID NO: 7875 - DNA, 638 bp, Homo sapiens
  misc_feature 19, 596: n = A,T,C or G
gcaattaaccctcactaanggaacaaagctgggtaccgggccccccctcgggtcgacggtatcgataagcttgatatcgaattcctgcagcccgggggatccactagttctagagcggccgcccgggcaggtacttttttttttttttttttttttgagagagagatgttttatttttgccaaagcatgtgagagtaagtagcaaacatcatgacacttcacccctcaaatattttcccacgtatcacttaagaacaagggcattcattctgttacatgaccacaatacaatcaacacagatagatattaacattgagacaatgctctgatgtattggtatctactatgcagttcataatcaaataagggttttggtaacttgggatccataaatggtctgcaaggtcagcccctgtagacctgcacttagtgggtgccatttccctgtctcaggtgcctgctctactggtgatatttttcactggctctgttgctcacttagaattttttctcccagctgttgacattttattttctgcatagttctgaagctgcagcagttgttcttatgccttcttgattgtaaatttcatanaagctgtcaatttctaagggatttcatctcctttgatgcaca

SEQ ID NO: 7876 - DNA, 671 bp, Homo sapiens
  misc_feature 619, 623, 644, 646, 651, 666: n = A,T,C or G
ctcactaaagggaacaaaagctgggtaccgggccccccctcgggtcgacggtatcgataagcttgatatcgaattcctgcagcccgggggatccactagttctagagcggccgaggtacctcaggtgatctgcccgcttcggtgggttgtagcttttagcgggagctaagggttctgggatggaggtgggaagtaggatttggccggctgagtcttctagaggcaatattggggtgttggtcttccccaaggggaagggtggtgaggctgagggagaagcagttatgttttcagctgggcaaacatggacggttgcccgtagaaactttgccactgtacctgcccgggcggccgctcgccaccgcggtggagctccaattcgccctatagtgagtcgtattacgcgcgctcactggccgtcgttttacaacgtcgtgactgggaaaaccctggcgttacccaacttaatcgccttgcagcacatccccctttcgccagctggcgtaatatcgaaaaggcccgcaccgatcgccctttccaacagttgcgcagcctgaatggcgaatggggacgcgccctgtagcggcgcattaagcgcggcgggtgtggtggttacccncagngtgaccgctacacttgccagnancctancgcccgctcctttcnctttt

SEQ ID NO: 7877 - DNA, 465 bp, Homo sapiens
  misc_feature 193, 407, 425, 426, 451, 455: n = A,T,C or G
gggcgaattggagctccccgcggtggcggccgcccgggcaggtacccatgaacatagtttttactctttttaaaagctgtaggcactggaaggtcagtgttcagccatgacagtggaaggtcagtgttcagccatgacaaggcccaatgtcatgggccctctgtcatcatcctctgtccgtagtgatccccanacacttttgcatggctgtttagacagaattttcctgcagctcttttgggagtagctcttgaaagtttaacccctgacagttgatgaagaacagtgaggcttaggaggcaggtaggcctttgagcaaataactctgagcaactggttgccattgtcagttcccctaccaagtatgcgtttgatttttaaaaggattccccaaagtttctatttangactacagagtctctaannaatgtatttctgttgtcaaggtcanggancaagatcatc

SEQ ID NO: 7878 - DNA, 641 bp, Homo sapiens
  misc_feature 52, 620, 634: n = A,T,C or G
acttctttagggcgaattggactccaccgcggtggcggccgagtacgcgggnattgctatgttggatgatttggagcatgcagaggcagatacagtagtagaatcagctttctgcctccatcttttactccgctccctgtcgctctttaactcagcagtttttctctctcagtctcccaacttgtgtgagtgttttatattctacataaattgagggtggagggcaacttctggttgtgttgaatgaggagattggcagaattgacaaaagcaaaatgaaacaatctcagcattctggaaaaattgagcaggggcatacaacaatctgagaagtatttatgcctgtaactgctgaatttcaggtgagaacagtgagactgtatggcatttggcctggagctattcctatgccctctcccatctgtttggtaaagaggttctgtccagccactgtcagctgtgaggaccaacagcttcgctgtgtgggtgaaaaggaggactgttcattttagagtggtagcaaccctgcctgtggtcttgtagatgagagtgacagtcttggagatgggcaagtggggagacacagcggctctgttttagcccaggttggggcaagatanaaaaaactatttgnagaatat

SEQ ID NO: 7879 - DNA, 641 bp, Homo sapiens
  misc_feature 9, 23, 563: n = A,T,C or G
gactcactntagggcgaattggnagctccaccgcggtggccggccgcccgggcaggtactggtttgacaaccacctgtttccagctccacaagctagcatgtaattcccttggtgagagtaattcgttcaaggatgaactatacaactcaattttcatagagttgttggaattaactggcaaaaggctatctttgcaataacacttgttgctgtaagaatgatgtaagcctggaactgctggaggtcaccatattgggtaaatgtgcctggcaataaagtagaaaagaggacctgagaccagctgaatttgggccaccattgagcaacatttgaaaccaggtcaactcacagatttttctcaattatttgaggaaataagttaactttttagccaaagctattttggattgctgccccttgcaatataaagagtcctgaagaatgcactaatttttacatgttattgtcaaccacttttcaacaaaacacccccaaatcaatccatgtgattctagctacaaaggtttttgttcacacttcttttctcaatagaacaacctangttgtgaggctcaactcaattctgttactaaaacaccttctgatcatgctttggtccaatagaaccagctctcacaac

SEQ ID NO: 7880 - DNA, 664 bp, Homo sapiens
tatagggcgaattggagctccaccgcggtggcggccgaggtacctcagttggaaatgcagaaatcacctgcctactgcattgatctcgctgggagctgcagaccggagctgttcctattcagccatcttgccagcaggtatttctttatagcaacacaagaacagcctaatacaatttccagtatcaacgggctgttacaagttccccctaccccttcccagtgggatggagacagtggagtgtctaaactttcaacatcgtccagaagtaaagaggccactcgctccctcttccctctggtgtcaatggaggccatgtggagaacagtaatgagacactcctattctttccaactaggatgggatcagtagaggcctagtggggagccaaaactcctagtcccaccatgcagtaacaaggaggcccccatccctggtgccagtaaaggctgagtgggaacctagacttctacctccagttggtagtaacaggggaagtgcctccctgcgctgcctcttttagagcagcgtcagagaaagccagctaaaacagaaagtcaaagtaatatccagactctcataatatccaaaatgtccatgttttaatagaaaatcactcattatgccaagatccagaaacatctcaatttgaaagaaaaaaaag

SEQ ID NO: 7881 - DNA, 641 bp, Homo sapiens
tcctttagggcgaattggagctccaccgcggtggcggccgcccgggcaggtaccatgcttttcctgtagttgaaaatctaccatcaaacatgctactacctaatgacgaattcagagaaggtaaagaaagtatgtaaacctttccctcactggtggcccttattagcttaaaaatgtagtcttcatataatatagcaagacatttatgcaagtctaacatttttagactaaagaaaaaagtgtaattactatattaatagaaagacttaattatctttctattccagccactgaagttattatgacagaattgttatacaaaggtaacataataacatgtagccaaaatatataggagaagatattatagaaatatattggacaattagttaataaatgttatttttcaaatgttatgacatttgtgacattggtcagctttttatatttttaattatactttttggcattctaaaagacagatttataatcttttttgtgtttataatcagcattctttttcttaaagacaactccccaaactgcttcagaatcacaaaatcttgatttgccccaattgagactgaagttcccaacaagactttagtttcttatcacatcaaatatatattagatgatac

SEQ ID NO: 7882 - DNA, 865 bp, Homo sapiens
  misc_feature 1, 2, 8, 9, 23, 28, 39, 40, 590, 722, 743, 748, 755, 760,792, 799, 806, 820, 857, 859: n = A,T,C or G
nngccccnngacgcgcgttatangactnactatagggcnnattggagctccaccgcggtgggcggccgcccgggcaggtaccctggcctagatgccagtagcatattccccagttgtcaaaaccaaatagttctcccagcaatgcaaattatcacctcatgtgtgcgtggtattgggggtggaggaacattgtcacagttggggactactgggccggaggtctgtctgtgcaaaaggggaatctcaaccatcactctgtagtcacaaaatgaaaataaaagaaaaagctatttttaacatttcatattctctctctgcttttcacattttgctttctacttgccaaactttccccattatcagagctccttgtgtttcctagccaccttcaatcatctcgtgtctcagtagaatgcacaatgacaacacagctgcagtgctgagtccgttacatggacacagccaggaacttcttaaagtgaaaagatacttttccaggacagaatgaaattaaatccacatgattttttgagaaccatcaccacttgtataagtatgttctagtaaaaaaaaaatcgattattcaaaanggttgaaaatggagtgttatgggttattgaatagtcaaagtaaactacatggtatgctgtatggcaattccagttttcaacaaagttaatgaacaataaagtgcccttaacagaaatgctttggaacatggngaaatcttcatttaatgattnccaanccctttnacgtnaagcaagccttgggcccattttatttgtaaanaacccanaatgtanatgtttcaaaaggngaaataaaactgggtgaaacctttgatttcctgaaanangttctt

SEQ ID NO: 7883 - DNA, 677 bp, Homo sapiens
  misc_feature 449, 458, 665, 677: n = A,T,C or G
tatagggcgaattggagctccaccgcggtggcggccgcccgggcaggtacctgggacaccaggcagtagccctggagtaagatcaagtgggagacacatattcctcccctaatgggactgcagtgtgcattctgcctgtcaatccattcctagcatttgtgggcaaagacccaacatccccctttaaacacagattccagggtcaggctggaaggctcagaactaggaagtcacgcttaaaacctttaagttggcctctaaatcaacaaaaattcacaaacaaccttattttaccactctacagtaaaaaacaaacaaacctgtatagtttgaaaaataataaatataatgcattcatatcgattaatattaacaggccaggaacagtagctcacgcctgtaatcccagcactttgggatgctgaggtgggaggatctcttgagcctangaattctangtttccgtgaactatgattgcaccactgcactccagccggggtgacagagggagaccctgtcttttaatcacaacaccaacaacaataattagcattttgatggaaatactactgattgaaaacttttaggaaaatggtagctgctgaaaaaagggccttttaaaaatatcttttcttatagtatagcataagctgctaaatgccanaaaccaaattgn

SEQ ID NO: 7884 - DNA, 664 bp, Homo sapiens
  misc_feature 472, 509, 514, 552, 590, 632, 645: n = A,T,C or G
gaattggagctccaccgcggtggcggccgcccgggcaggtacatgcaggagaagtcattctcaggaaaaggtgagtgtgggaccaggcagggaagccagtttctgtcctttatttggaactataatcaaggcagacaaccacagtaaagagatgcagaggcagggagtagtgtaaaaccaccttacacacagcttcctggctttcccttcactttaggttgtagctcaagttattcttgggctaaaaaataagctctgttggcccaattaaaccagaattaatcaccaattccccatctttatctggtaattttagttcaacattgctcagctgatggctcattaagccaagaactctcccaggtctcagttaccattttcagacaagacacctcctggggtgcctgccctgtggtctgaagctcaagatgtggctctgggtctcccttcctgagggctagctacccagaanggctggtgtgacttcctcttgaatgggtgagctgaangcatncagggcacctagggcaactagtgcataaatacttgaangggaaaggactctcatgttctgatttgagtatcatttncttggggttgaataattagagcctggcatgtgagatgtgganggcttcaaagacntttgattttcaacagaaac

SEQ ID NO: 7885 - DNA, 631 bp, Homo sapiens
  misc_feature 544, 603, 615: n = A,T,C or G
gcattaaccctcactaagggaacaaagctgggtaccgggccccccctcgggtcgacggtatcgataagcttgatatcgaattcctgcagcccgggggatccactagttctagagcggccgaggtacgtgtgcacatgcatagtcttaccccactacaccactgggcacctagcccagacattgggctagatgcttacatatattatttcctcagaggacctagattaatatacatatttccaggaattatatccatttatttatttttttctagggtgaccttattttttaccctgtagtcagtgaaaggtaagcctgtttttcttgacttagtgctgtaaacagccaaatgacaaagtgaccgccttgctggcacagcagtgcttgcccactgtgacatttcccctcagcttcttgatttttctgccccaaaatgcaaatactacaggactcccattaactgattgagaggctaacgcgcaactgcaactcaccagtctttcctgtgctgcttctctttccttccctacctttttccttctgngttcttatttctatcccttctcttgggcttgatttcctataagtcattaaatgccttanagtaacgttttncaagttctagcagcac

SEQ ID NO: 7886 - DNA, 646 bp, Homo sapiens
  misc_feature 566, 610, 621, 645: n = A,T,C or G
tcactatagggcgaattggagctccaccgcggtggcggccgcccgggcaggtcaagactgtaatgagctatgattgcaccactgcactccagcctaggcgacagagctagattccatttcaaaaaaaaaggtgatgatggtggggcccggcatggtggtttacacctgtaatcccagcactttgggagtgctgaggtgggagaattgcttgatcccaggagttcgagaccagcctgggcaacattgaaagaccccgtctcttaaaaaaaaaaaaaaagagaggtaatggtggctccctttctctcatcaacacactctgggggatgaaaaggatgataatgtctatgtgtgtgatagattgtagaacgactgccactgtgttgagcgaagaaaaggagtatgtctgctgaacagattagcttctggtctccaatcagtatgtgtggtggcgtagggggactgcatgactttaactttttatttttgagaggtctaggattattgcaatcccctgagttgtttttttttttttttcatggcagagtgtcactccgcctaggcgacanagctagattccatttcaaaaaaaaaaaaaaaaaaaaaagtcctnggcccgtctanaactaggggatcccccggctgcang

SEQ ID NO: 7887 - DNA, 642 bp, Homo sapiens
  misc_feature 23, 463, 536, 589, 626, 630, 633, 638: n = A,T,C or G
gactcactatagggcgaattggngctccaccgcggtggcggccgaggtacttttttttttttttttttttttttttgttttgagatggagtctcgctctgttgcccaggggagcgcagtggcgcgatctcggctcactgcaacctccacctcctgggttcaaacaatcctccttatttttaaaaagagaaaaacaactcaaaaaagtaaagtgatttgctcatagaacacatggaaaaccagaaaccaggaagaaaatgaacatacagttttcaaatcatgtgttttcatacaaagtatcgtatttaaaactaaaaacaattctgaaattagtaataaacccattttcacaaataaggatctaaagcttaaagaacctgcaggcatacaattagtcaacagcacaggcagaacagaaactctgagtctatgtgattctagaacccacttctcactgccctaangcagaatttatatcttctaatttctagttcacgggtccttccattatactctggattctttttttcaactatnaaaaatcctttattctaactgaatgatcaatattttaaaaagatgggagcatncctgagttctggctagcttcataattgaaaaaggagngggntgnaaagntccg

SEQ ID NO: 7888 - DNA, 621 bp, Homo sapiens
  misc_feature 41, 524, 529, 577, 590, 604, 616: n = A,T,C or G
cctcctaagggaacaaaactgggtaccgggccccccctcgngtcgacggtatcgataagcttgatatcgaattcctgcagcccgggggatccactagttctagagcggccgcccgggcaggtacgcgggtgctcttgagtcggcagatgttgtaagggactgtgtagatcaacctttaggacaggaggtagcacctaaaagtgaggaccagctgtggtggtggcaatagagtttatgcttgacctttgttaatcgggaggagttcttgggcatttcagatgatgggtagggccatggaactctcagtagtcctggtcccatgatctgcctctgaaacaggaggggtgggatgtggtagtgggatccactttgttctcgtgctcctgacccagtgaggctctctcctgcagtccaacaccggcagcaagtcacaagaagtttgtcttcagaccatgaaactgcctcaagctgtaaagcttcctgcctaggtcaaaattgtggctatcagactaaaaccctcccanttcantacctcggccgccaccgcggtggagctccaattcgccctatagtgagncgtattacgcgcnctcactggccgcgntttacaacgtcntgact

SEQ ID NO: 7889 - DNA, 644 bp, Homo sapiens
  misc_feature 2, 22, 583, 635, 636, 644: n = A,T,C or G
gnctcctatagggcgaattggngctccaccgcggtggcggccgcccgggcaggtacgcgggaatttagggaagaatcatcccactttttgtattgagaacagatttggggaagtagtggcaggaaagtgtagaagttggaagatcctttagtaggaatatcctcttgcaataatacgatgttgatccaggatcttaattatggaagcattaagtagaacagatttgaagatgcacttaacacaatttgcggtgcactctgaaaaaaaaatgaaatgagagaaattaaaatgactccacagttgctgtcctgagtatctagaagaacgaagttgtaatttacttgaatggagaagacaattcggggagcacgtctgcatgaaaaatgaatcatctggtttgaataagttaggttgaagatctaagagagacaagtactcataacatattagtttaaagttcaagggacaggcaggggtagagaccccaaactgaaaatcctttacatcatgtcacgaggagaccaaattcagattacaaaaaattagatgtaagtgagctgaagagaaaccagcaaagaaacangaaaaagaaatacaaaagacaggagaagtaaaattgtggcagaccaaaattnncttcattn

SEQ ID NO: 7890 - DNA, 662 bp, Homo sapiens
  misc_feature 23, 619, 625, 634: n = A,T,C or G
gactcactatagggcgaattggnagctccaccgcggtggcggccgtggcgataccgtaggcgccgtgttgagcgcccatcccgacatcgcaaaagtctccttcaccggctcaacggctgtcggcaaaatgatcctgcgtaccggctctgagaccttgaagcgcgtcactctggaactgggcggcaaatcaccggtgctgattctcgatgatgcggatctcaagaccgctgtgcccatggctctccaggccggcttcatgaacagtggccaggcgtgcattgccggcacccgaatcctggtacctgaaaatcgcctttatgaagttgaagcgctgatgatccaggaggcggccaaagtacaagtcggtaatccccgtgagccagccaccgctgtcggccccatggtcagtcataaacagtgggagcgggtgcagcgctacattcagatcgggattgaggagggcgcgaatttattggcaggaggccccggtttgcctgaaggcatcacggctggctggttcgtaagaccgaccatattcagccgtgtgaccaatcaaatgaccatcgcccgcgaagagattttcggtccggtgctatcgatcattacctacgcgaccgangaggangcactgacnataggcaacgacacccccttacgggctt

SEQ ID NO: 7891 - DNA, 702 bp, Homo sapiens
  misc_feature 20, 29, 575, 584, 585, 586, 587, 588, 589, 590, 591, 592,593, 594, 595, 596, 597, 598, 599, 600, 601, 602, 603, 604,605, 606, 607, 608, 609, 610, 611, 612, 613, 614, 615, 616,617, 618, 619, 620, 621, 622, 623, 624, 625, 626, 627: n = A,T,C or G
  misc_feature 628, 629, 630, 631, 632, 633, 634, 635, 636, 637, 638, 639,640, 641, 642, 643, 644, 645, 646, 647, 648, 649, 650, 651,652, 653, 654, 655, 656, 657, 658, 659, 660, 661, 662, 663,664, 665, 666, 667, 668, 669, 670, 671, 672, 673, 674: n = A,T,C or G
  misc_feature 675, 676, 677, 678, 679, 680, 681, 682, 683, 684, 685, 686,687, 688, 689, 690, 691, 692, 693, 694, 695, 696, 697, 698,699, 700, 701, 702: n = A,T,C or G
gacgccgtaatacgacttantatagggcngattggagctccccgcggtggcggcccgcccgggcaggtactaacagtcaggaacaaatagaacacatagagaggacagtgggaggtccccctggctaaagcagagggtgtattgagagaaggaaacctttgcctcaatggatcgtaggcaaactgagaaggaccataacaccttgctgagaagtttgaatgtgattccttggtgaccacagcaggaggtcctgaagtccctgtccttcagatgcaaacaaggaggctgtcccatacagactatcagggaaaaaatgcactgtttatcaaaagatatgaatgttcttgacaggcaaagccctgctcaaatgaaatggcagtgcagggagatgatattcagtgtgatgcagctgtgagtacctcggccgctctagaactagtggatcccccgggctgcaggaattcgatatcaagcttatcgataccgtcgacctcgagggggggcccggtacccagcttttgttccctttagtgagggttaattgcgcgcttggcgtaatcatggtcatagcttgntttctcggnnnnnnnnnnnnnnnnnnnnnnnnnnnnnnnnnnnnnnnnnnnnnnnnnnnnnnnnnnnnnnnnnnnnnnnnnnnnnnnnnnnnnnnnnnnnnnnnnnnnnnnnnnnnnnnnnnnnnnn

SEQ ID NO: 7892 - DNA, 644 bp, Homo sapiens
  misc_feature 41, 639: n = A,T,C or G
cctcctaagggaacaaagctgggtaccgggccccccctcgnggtcgacggtatcgataagcttgatatcgaattcctgcagcccgggggatccactagttctagagcggccgcccgggcaggtacaggtgaaaattgaaccatgatcagcccggatctctgacggactatgatcagcacaatttccagccaattcttataactcttaagagggcaataatcttgagacacagatatttagcgcctcttccacatccaatgttttctaccatgaaatcatgtctttgtaaaatgatgtgaaaaacattataatacattttatataagtagattttaaaactgtgatgaatttctagcaccagtatgaagacagaattagaatgctattgataatttcaaataaaaaaagaaggcatgcttgaatactgagaagagatgtaatgcattttctaaacaaagcacacagttaattagtattcatgatttcatttgtgtttctctgaactctgataaataattaaaggaaactgtattaattttcattcataatatttggcaccaatccatccaagatattatttcacattttattgatttttaagaaattaatcattgggggaagatattttttatttttctnttaag

SEQ ID NO: 7893 - DNA, 662 bp, Homo sapiens
  misc_feature 23, 662: n = A,T,C or G
gactcactatagggcgaattggngctccaccgcggtggcggccgaggtacactgatcttaaaacagctctggctgtaaaatcactttgctggagtcaatgaggtaagaggctagaacacaatactagggatctgacccctgcaggctggccatgatccatccctcaggcagccttcccagagcagaaaaatccagggagccacttaatgagacgttttctttaatgttttctttaactctgacaattgcaactgaaatttagcaggagcttgtagccctccaaaattctttctctttctttctctctccctctctccctcttgctgctactctttttactgcttttatgcaccaaacttcatggttttttttttaatggaatgatgttcttggggaagaaaagatttaaagatatcatggtaacaccaatgaaaattgtaaaaaagtccaaatttaaaagttaaaatcttggtatctacttttaacattgatttatttcctttataaaatgaataatgttacaaccactacaaccatgcctttcttccgccagcggtttttgaacgcttattgcacgtcaacctcttgtttacttctcagagacacaaatatgaagaaagcacagtccccaaagcttactgataggcacaggctctacacan

SEQ ID NO: 7894 - DNA, 598 bp, Homo sapiens
  misc_feature 3, 7, 10, 25, 26, 54: n = A,T,C or G
gcnttcnggnactcacttggggccnncttgggactccaccgcggtggcggccgnggtacgtggcgtagcattccatgttcagctttgacatttattttctcatatcaaccctttttacacgtgaaacacaatctcgctcttgaattcttaactgcatgatctgtgaaacctgtatttatattttcttcagtgtattcttgtcgtgtgtgtgtcctaaacaaaccaaaagaaaactttccaaatctaaagtattcattctccaattggagcaagaggagtcagttagatactatcacggcattcatttgtggctggcttgtcatatttacttatgattgataataaatctattttgctttttagagcctcccgagaagccatctgccttcgagcctgccattgaaatgcaaaagtctgttccaaataaagccttggaattgaagaatgaacaaacattgagagcaggtaaattttttaatggaactatgcaaagaccaatatttcaatattggacattttgatggtccttctatccccaatgctttatttttttcaactttgatgaaaagatttgatctaggtaatgccaatactggta

SEQ ID NO: 7895 - DNA, 512 bp, Homo sapiens
  misc_feature 506, 509: n = A,T,C or G
cactactatagggcgaattgggccctctagatgcatgctcgagcggccgccagtgtgatggatatctgcagaattcgccctttcgccgcccgggcaggtacagggaactattggagcacctaagaggagcacctaccttgaatttaggggttagcagaggcatcctgaaaaaagtcaaagctaagccacaatctataagcagtttaggaattagcagaacgtgcgtggtgaggagatgccaaaggcaagaagagaagagtattccaaacaggagggattccaaagagagaagagtatcccaaacaacatttgcacaaacctgatggggagagagaatgtggggtggggatggatgatgagactgaagaagaaagccaggtctagataatcagtggccttgtacctcggccgcgaccacgctaagggcgaattccagcacactggcggccgttactagtggatccgagctcggtaccaagcttggcgtaatcatggtcatagctggntcnggg

SEQ ID NO: 7896 - DNA, 652 bp, Homo sapiens
  misc_feature 23, 584, 629: n = A,T,C or G
gactcactatagggcgaattggngctccaccgcggtggcggccgggtacccgcttgtgtggtttccatgatccttcttctgcctggaatgaggctcctcttgagtcctgagagcttcatttctgtctgtcttttgggctgtgccaaagcccctctgccttcgtggactccccactgattcattaccaattttcctctcctctgggctcttcttagattgcaaatggtgcctctggattgggtaccaagacttgcagtgccttattttgataccactaatatgagaccatgttatatgcctcttgagatatcattccctttctagcaatagacagtgataagcatgcgtatagagggtaaacgtaggactttgaggttcatccatctcaatagacaaaagtaaaagtatgctaatttcaatccttcacacagtaaattgaatgtaataggtcttcagtaactatttgaggaatgaaattgttattgatatattgatttaactgagcaaatccataagtgccacgcttggagtaaagtacagggaatctcattttttgggtaatttcaaacaagtaggagaccatncactatctattaaggacaaaggagatttgagtgacaaacatgttncagaccatccaatggtgttattc

SEQ ID NO: 7897 - DNA, 1011 bp, Homo sapiens
  misc_feature 3, 4, 5, 6, 8, 9, 10, 11, 12, 13, 14, 15, 16, 17, 18, 20,21, 22, 23, 24, 25, 26, 27, 28, 29, 30, 31, 32, 33, 34,36, 38, 40, 41, 42, 43, 44, 45, 49, 52, 53, 60, 63, 64,65, 66, 67, 68, 69, 70, 71, 73, 74, 75, 76, 77, 79, 80,82, 84: n = A,T,C or G
  misc_feature 85, 89, 90, 92, 93, 94, 95, 97, 98, 101, 103, 105, 112, 483,653, 769, 787, 796, 799, 813, 824, 830, 840, 859, 867, 881,890, 898, 933, 938, 949, 953, 955, 957, 967, 991, 997, 998,1005: n = A,T,C or G
ccnnnntnnnnnnnnnnntnnnnnnnnnnnnnnntntntnnnnnnatgntannaatggantannnnnnnnngnnnnncnnangnngggnntnnnntnnccntnanacgactnatatagggcgaattgggtaccgggccccccctcgaggtcgacggtatcgataagcttgatatcgaattcctgcagcccgggggatccactagttctagagcggccgcccgggcaggtactctttgttagacttacgaaagaagtgggctgtctcacaaaggatgttaaaatcatcacaagtgacaatgacaatcctaagtaagcgaaaatttccttaactatctccagcacgagtttccgaagcatgacagaaagccggacgcgtgggtcgactcaagctagcttgacctcggcccgccacccgcggtggagctccagcttttgttccctttagtgaggggttaattgccgcgccttgggcggtaatcatnggtcataagctgtttcctgtgtgaaaattgttatccgctcacaaattccaccaccaacataccggagcccgggaaagccattaaagtgtaaaggccctgggggtgccctaatgaagtggagcttaacttcacattaatttgcgttggcggcctcacttgcccggcttttnccaggtccgggggaaaacctggtcgtggccaagcctgccatttaatgaaatcgggcccaaacgccgccgggggagaaggccggtttttgccgtaatttggggccgccttctttccngcttttccttcggcttcnacttggacntcngcttgccggcttcngggtccgtttncgggcntggcgggccnaagccggggtattcaagcntcaacttnaaaaagggccgggnaaaataccngggtttanttccccccaagaaaattaagggggggaataaaccnccaanggaaaaaaaanattntngnagcccaaaanggcccagccaaaaggggcccaggnaacccnnaaaaaangggccc

SEQ ID NO: 7898 - DNA, 674 bp, Homo sapiens
  misc_feature 20, 85, 373, 401, 644, 674: n = A,T,C or G
tcactatagggcgaattggnagctccaccgcggtggcggccgagtactttgtgggttgagggtaggaggctaagactgccagggnaggaggtcccggcttcctgctcctaccggggagcagcaggtgaaactctgaccacgttactgcaatcctgacatgctccagtggagtggcgacatttttcttctcgaggcagcttttggggatctgtattactttcatgtggaccacttgctagttttgatttcaatgataatttcttccttcctttttttttttttcaagcctgtcttcatagtgatgacaacacatttaacatttgttttgattttaccctctcctctctccccactctcagtctgcagccagganagcagggacgtcctgtgcgaactgtcanaccaccacaaccacactctggaggaggaatgccaatggggaccctgtctgcaatgcctgtgggctctactacaagcttcacaatattaacagacccctgactatgaagaaggaaggcatccagaccagaaaccgaaaaatgtctagcaaatccaaaaagtgcaaaaaagtgcatgactcactggaggacttccccaagaacagctcgtttaacccggccgctctagaactagtggatcccccnggctgcaggaattcgatatcaagcttatcn

SEQ ID NO: 7899 - DNA, 653 bp, Homo sapiens
  misc_feature 16, 23, 26, 34, 296, 539, 567, 571, 625, 640, 647: n = A,T,C or G
gcgcgcattaaccctncactaanggnaacaaagnctgggtaccgggccccccctcgggtcgacggtatcgataagcttgatatcgaattcctgcagcccgggggatccactagttctagagcggccgaggacgtgggggaggcatccacacatgtcctcagaagcacagcgtgtgccatcttattacatatcgcgaaggtttcttttgcagttagtttatattcaaagttttactttggagttgattatttggtatgaggggttgatctacaactctgcctcttaaagccttcaantttccaaattctttcattgtctaccaagtttccttaatagttcacattcctttctgatacatatgtatacatttaggagctttaatgagtctcccgcgtacctgcccgggcggccgccaccgcggtggagctccaattcgccctatagtgagtcgtattacgcgcgctcactggccgtcgttttacaacgtcgtgactgggaaaaccctggcgttacccaacttaatcgccttgcagcacatncccctttcgccagcttgcgttaatagcnaaanaggccccgaaccgatcgcccttttcaacagttgcgcaacctgaatggcgaaagngacccgccctgaacngcgcatnaagccc

SEQ ID NO: 7900 - DNA, 603 bp, Homo sapiens
  misc_feature 2, 43, 573: n = A,T,C or G
gnccccgcgtccgctcctgtgacgatacagccgatggcccagnatgcagctgccatccacagtacaagatgcacacagatgggaggagctgccttgagcgagaggacactgtcctggaggtgacagagagcaacaccacatcagtggtggatggggataaacgggtgaaacggcggctgctcatggaaacgtgtgctgtcaacaatggaggctgtgaccgcacctgtaaggatacttcgacaggtgtccactgcagttgtcctgttggattcactctccagttggatgggaagacatgtaaagatattgatgagtgccagacccgcaatggaggttgtgatcatttctgcaaaaacatcgtgggcagttttgactgcggctgcaagaaaggatttaaattattaacagatgagaagtcttgccaagatgtggatgagtgctctttggataggacctgtgaccacagctgcatcaaccaccctggcacatttgcttgtgcttgcaaccgagggtacaccctgtatggcttcacccactgtggagacaccaatgagtgcagcatcaacaacggangctgtcagcaggtctgtgtgaacacagtgc

SEQ ID NO: 7901 - DNA, 479 bp, Homo sapiens
  misc_feature 22, 470, 473: n = A,T,C or G
cccccatgcgcacatggttctntggccacaaggaggtaagagggaaaattagttggggaggttaaggaacagaaagatgaggtattaaaaaaaacagcacatattggtggggcattatgtaatatgcaaaatgctttcacaccaatctcatttgatatttacaaaaattctatgataggggaggaaacatattgttattcctattttacaggtaagaaaactgaagcctaaaatagagatgcaactttcctgtgctacccatctcataaatgacagaaatgaaacttgaaccctggtctcctgcttcaaggccaaggtctttactactttcaggactctgggtgttctacagagaaatagaccaagccaattgttaacaggaaatatgcaaagatgctacagcttctaatgaagctggaaataggaaaacattgacaaattagaaagggaaggttgaagatgagcagcanccncaaggg

SEQ ID NO: 7902 - DNA, 662 bp, Homo sapiens
  misc_feature 16, 436, 615, 624, 647, 650, 651, 655, 657: n = A,T,C or G
tatagggcgaattggnagctccaccgcggtggcggccgtgccttgtagcggcagccgggtcgggaacaaggtgtagttctggttgccgtcgccagccacgccgtccgccgtgccgccggctgtgcccgcgccggcgggctggccgtacagcgcgggcggcccggccgcgtagatgccgtccgcgcccgtgatctggtccacgccgtacaccaccacggcgccagcggcaaaggccggccccagggtggtcagcagctgctgtcgcatggtggcggccgcgctgaagcgcgtggcttcgtccgccgcgctgctgctgagcacgggactgaccgtggcgctgatggcgtcggccagcgtctgtttcgccttgagtacgaggcccagctggccgctctgcagcggatcggcgatgccgttgaggcgatcgaggatgtangcgggcggcgcataggtggccgagaggaacttgtcgatggcgtcgagacagctttgcagccacaggttcaagtcgacgctattgagcgtcagcgcatgcggcgtattggtcggataggcgtcgatgctgaccatgccggtttccagcgagctctagaactagtggatcccccgggctgnaagaatttnatattaagctttttcgataccgnccnncccnanggggg

SEQ ID NO: 7903 - DNA, 497 bp, Homo sapiens
  misc_feature 4: n = A,T,C or G
tacnactcactatagggcgaattgggccctctagatgcatgctcgagcggccgccagtgtgatggatatctgcagaattcgcccttagcgtggtcgcggccgaggtacctgggtgatggccatactgcgtgccgccatagctcaagccatgtgcctgaggctgtgcatgagggagagaaagaatgtccactcccaaaagaactgattcaggcatgaacagaaccattgcacatcctcaggaggttctagcaaacctgcacatccatgtctgcacttagacaacataaacagagtgagaatgccttcccagagcacagcagaagttcaactggcaacgaccaggagaattttcagctcatcctttacagaaaatgtaacttccatggagaggacaggagaatcagacaaagacaagcggagactctttcttttctgcacgtgctggtacctgcccgggcggccgctcgaaagggcgaattccagcacactggcggccg

SEQ ID NO: 7904 - DNA, 606 bp, Homo sapiens
  misc_feature 3, 27, 210: n = A,T,C or G
ccnattttttctgtctcttgataaccncatccatacctgtcacaagtcctttttaaacgctgctccacaaactaagccccatttgggagatggtaattaaaaaatacagtattcctacaccttgcccatggagcttttgattcagtatatagagtgtcaagtttcaatcttggtatacccagggaattaaatttaaaaaagatgcctgancaacatccccagaaattctgatttaacaatactgcatttgggcctggataatgatggctttaaaagtttctcagttaattctactgtgcatctaaggttgaaaacaggtgctctagggtgagatgtaggaatgaggactttaatatgctaccaaggtaactctgtggtcagtcaggcttgaaaccactgtgttaggcacctcctcactagctggaatggacttccttcacgtttagatggtcttaggataaaacacttcagggctgccctttccagcattctttctcccacccctgtacctcggccgctctagaactagtggatcccccgggctgcaggaattcgatatcaagcttatcgataccgtcgacctcgagggggggcccggtacccagc

SEQ ID NO: 7905 - DNA, 675 bp, Homo sapiens
  misc_feature 16, 616, 645: n = A,T,C or G
tatagggcgaattggnagctccaccgcggtggcggccgaccttggcgccaagccgcgccagaccttcatgcaagtgattttgccgctgtcggtgccggggattgcggcgggttcgatctttacgttctcgctgaccctgggggacttcatcgtgccgcagctggtgggcccgccgggttacttcgtcggcggtatggtctacgcgcaacaaggcgctatcggcaacatgcccatggccgctgcattcaccttggtgccaatcgtgctgatcgcggtttacctgtccatcgtcaaacgtctgggggccttcgatgcactctgaaaaagcttcgtggagtctaaaaatcgcggcctggggcgggttggttttcctgcacttcccgatcctgatcatcttcctctacgccttcaacaccgaagaagcggcgttcagctttccaccccagggcttcaccctgaagtggttcagcgtggccttctcgcggccggacgtgctggaagccatcaagctgtcgctgcaaatcgccgccatcgccacgctgattgcgatggtactcggcaccctggcgtcggcggcgttgtatcgccgggagttcttcggcaagcaaggcatctngctgatgctgatcctgccgattgcactgncggggatcatcaccggtatcgcgttgctcg

SEQ ID NO: 7906 - DNA, 664 bp, Homo sapiens
  misc_feature 23, 62, 598: n = A,T,C or G
gactcactatagggcgaattggnactccaccgcggtggcggccgcccgggcaggtacctggnataatggtgactgaatgattgatggaactgactttttgctttccttttttctttctccactggtggccctatgttcctattaagagaatcttccagccaggcgtggtggcacacgcctgtaatcccagactttgggagactgaggcaggcagatcacgaggtcaggagattgagaccatcttggctaacacggtgaaaccctctctctactagaaatacaaaaaattagccaggtgtggtggcacgcgcctgtggtcccagctactcgggaggctgaggcaggagaatcgcttgggccgaggaggcggaggttgcagtgagccgagatcccgccactgcactccagcctgggtgacagagcaggactctgtctcaaaaaaaaaaaaatctttctgcctgttttttgaaatagccgcaggagtgaggcaatctcagctcctgctcacacatctttttgtagaatttccatcacaaagaatggttattagaatctctactcttggcccaaagtgtctgtttgcttttctcccaatcangaaatcacactgttggatcttgatcttaatctcttggacatgccaactttcttgcttcttaatata

SEQ ID NO: 7907 - DNA, 672 bp, Homo sapiens
  misc_feature 606, 626, 631, 668: n = A,T,C or G
tatagggcgaattggagctccaccgcggtggcggccgcccgggcaggtaccttgagtaacattgggaaggaccactcattgaatgaaccatcaatcaaatgatacatactgcatccttccagaaaacatctcaaagcactttgcagatgttaacattaaagttaaactgagtgtaagggagccttacaaaataggccagcttgaatgccttatccaaaaatgtagaactgcttcaaggcaggtgtcagtgttttaaagaaattgaagcatcttgggttgaaagaaaaataagaaaatctctatggatgtaaagatcattcccagttcaaaagctaaggatgggcagcaaggtcgtgtcctggaaaatgtaaactctgtcaaatttgtaaccaagatccaggcatcctccctgctggaagtaacttacattctgttgaaacaagcaggctgagcacagagagaattggaccagaggaggttcttcataaaatgaaaacttggagggaggtgacaagtggatgcacaaataatgaatgacagacacagctgagacatgataaaagcacgcacaggggctctccacatctctgcaagacgtacctcggncgctctagaactagtggatnccccnggctgcaggaattcgatatcaagcttatcgataccgncgac

SEQ ID NO: 7908 - DNA, 657 bp, Homo sapiens
  misc_feature 183, 294, 311, 375, 411, 413, 443, 559, 619, 623, 625: n = A,T,C or G
cctcactaagggaacaaaagctgggtaccgggccccccctcgggtcgacggtatcgataagcttgatatcgaattcctgcagcccgggggatccactagttctagagcggccgaggacttttttttttttttttttttttttaactccagcttccttttgctttttacttgaccaaagctaanacaatagccagatggttggtggggcagccaggcagggaggacccagggctgggattctccaaccttaggccattcctgcagccctcaccacctccagcccctccaagcatntcgtgtagggacccacncagatggtcccattcattcactattgcccccccgcgtacctgcccgggcggccgccaccgcggnggagctccaattcgccctatagtgagtcgtattacncncgctcactggccgtcgttttacaacgtcgngactgggaaaaccctggcgttacccaacttaatcgccttgcagcacatccccctttcgccagctggcgtaatagcgaagaggcccgcaccgatcgcccttcccaacagttgcgcancctgaatggcgaatgggacgcgccctgtagcggcgcattaagcgcggcgggtgtgggggntacncncagcgtgaccgctacacttgccagcgccctat

SEQ ID NO: 7909 - DNA, 636 bp, Homo sapiens
  misc_feature 19, 29, 37, 542, 610, 636: n = A,T,C or G
ccagcgcgcattaaccctncactaagggnaacaaagnctgggtaccgggccccccctcgggtcgacggtatcgataagcttgatatcgaattcctgcagcccgggggatccactagttctagagcggccgaggtacgcggggggagtcccaatgtcatggagtatatatctaatgccactgagaaacctggctcaccctgcactgagagaagcactcaaaaccaccatcaccaatagcgctactaaagacagtgctttggagcttccaagctgatagattatcctttctccccaccctcagatttctccagtgtctctggcacttatagtccatgtttgcaagaaatattttattatagtgctctgaaacaaatttataaagtttgcaagagaagttttaaaaaagcaagctcagcaatatttgggggcttttaaagctgatgatgcagctgacctactggagacaaaggcagtgggagggcccttactggtataaataaataggagtctctggtacctgcccgggcggccgcacccgcggnggagctccaattcgccctatagtgagtcgtattacgcgcgctcactggccgtcgttttacaacgtcgngactgggaaaaccctggcgtacccan

SEQ ID NO: 7910 - DNA, 682 bp, Homo sapiens
  misc_feature 20, 82, 560, 650, 672, 677, 682: n = A,T,C or G
tcactatagggcgaattggnagctccaccgcggtggcggccgcccgggcaggtacgcgggtcatcatcatagtgagcccagnaagccactgcccagcagcatgctcacaccacctaccctagtgtaggtaataggtctacgctaggaccccgtgctgggctctcagcccatcatgagattttggtggatttaatggcaggtaggaacttatttatagtggactgataattgctttataattccttggtaatgacagctcagggaaggtttcacaaggtcatgatcaggagacttgaattgttactggatgtaggaattgtttcactgctcttaacttgctcaaactggggcaggttccaggaacttgaactaaaaatatctatttaagcctctctctctttctctcctccccaacttttttctgaaagccttgatttctgcagacagaactatggtttttggcatgttgggtcaagacgtgtttctataggaaatgcttgcacgtggcactggcttggtgagtcaagcttcctgagcttcagaccgtttgtcctgtcatntgtcctgcccaacactgtatggtttttctctagcacggcttcagttttgttctctgcacaaagcctttggtggttctgccctctgccctncagctttacccaccagagtaangaatnttttn

SEQ ID NO: 7911 - DNA, 642 bp, Homo sapiens
  misc_feature 12, 20, 44, 176, 302, 524, 557, 564, 566, 573, 582, 597,602, 616, 628, 629, 631, 634: n = A,T,C or G
cctcctaagggnaacaaagnctgggtaccgggccccccctcggngtcgacggtatcgataagcttgatatcgaattcctgcagcccgggggatccactagttctagagccggccgcccgggcaggtactttttttttttttttttttttttttgggcagctaaaatctaggatggngttaagtttcttcattttgtcaattatatataaaaaattagaaacaacatgaatctgcatttcttggatgagatagttaataacaaactatttctcaatatttgtatactaaaaactagtgaaggngttatgtgtttcagtatcttatctcttatttgaacatgggtttctgaaaggagcctatataataatataaatggtatgtagtaaatgaggcactgtcttggctgggactgctataaaaaaattaccatagaccattgactaaaccacaaacatatacttctcacagttctggaagttggaagccaagaagaggatgccagttggctagccttctagtgaggnccccttgcaagttgcaaacagcccggctttttnggtcctnanatggcangaaaaaagngccccaagctctttngcctntttttcaagggcantaattacctctnnangcnccccccca

SEQ ID NO: 7912 - DNA, 669 bp, Homo sapiens
  misc_feature 544, 605, 612, 642, 657: n = A,T,C or G
gcattaaccctcactaagggaacaaagctgggtaccgggccccccctcgaggtcgacggtatcgataagcttgatatcgaattcctgcagcccgggggatccactagttctagagcggccgaggtacaggatgggagggcatgggaggccaaaaggcaactttcaagtgcaaaaacaggaatgcctcttctcatttaaggttgtgggtttccaggcttgagggggtagcctttgccagggaaccacgctcttctacccagtatttccatcccctgttcatatcaaaatgaaacttgtaatttttattccctattaaaagtaaaacaaaagcttccaataccatcatccctctttcatgtagctgatccatgttatcgttggctagaactgtgtcacatggttatttctgactgtgagagaggctgggcacgtgataagattttttcgtatcaagagcgtagtacctgcccgggcggccgccaccgcggtggagctccaattcgccctatagtgagtcgtattacgcgcgctcactggccgtcgntttacaacgtcgtgactgggaaaccctggcgttacccaacttaatcgccttgcagcacatnccccttngccagctggcgtaatagcgaaaaggcccancgatcgcctttccanagttgggcagct

SEQ ID NO: 7913 - DNA, 668 bp, Homo sapiens
  misc_feature 46, 515, 569, 598, 633, 643, 652, 663, 665: n = A,T,C or G
gactcactatagggcgaattggggctccaccgcggtggcggccgangtacccaatgaagtgaatgtgcccccacaacatttaacagtcacatcagcagggaaagggaaaacgactgcgaaaatgtaaacaattccttgcttcagctacttgttaactatggctgcagctgtctgagccagctgtccagtggtagcctgattcccagcgtgcatctggaagcagtggaagaatgccaataaagaataagaaaggaccaaatatgctagtggaaaccaactaaccatgctaaggcttccacctccatatgtgtggagggaaagccctaactctgcctcctgggaatgccagtgtctccttcttagtcagttaattttacaacctttccttgttgcttccagtcatcctgtcttcttaagtcttgctgtgtttccaaaacttattttttttcataattcattatattgctttcccactatagctctcctcaccacttagaatttcttttgtttctagncctgtttcttttagttgctaatatctgaaaatattatgagtgagtatttattgnggtatttaacattcttgaatcttcaaagnggccaacacttttgttgactcttcacaataacccnttaaaatgcnccttatagntgatgctcaancnggc

SEQ ID NO: 7914 - DNA, 901 bp, Homo sapiens
  misc_feature 44, 56, 58, 63, 296, 385, 396, 402, 418, 466, 476, 483, 484,487, 515, 530, 533, 615, 625, 655, 663, 664, 672, 675, 676,681, 689, 690, 693, 698, 710, 714, 721, 727, 735, 739, 751,755, 756, 765, 779, 789, 805, 813, 816, 822, 833: n = A,T,C or G
  misc_feature 836, 841, 849, 850, 875, 876, 900: n = A,T,C or G
ctatagggcgaattggagctccaccgcggtggcggccgcccggncaggtacgcggnanaactngatctatgaatgacaggagggcagaccacattgcttttcacatccatttcccctccttcccatgggcagaggaccaggctgtaggaaatctagttatttacaggaacttcatcataatttggagggaagctcttggagctgtgagttctccctgtacctcagccgctctagaactagtggatcccccgggctgcaggaattcgatatcaagcttatcgataccgtcgacctcnagggggggcccggtacccagcttttgttccctttagtgagggttaattgcgcgcttggcgtaaatcatggtcatagctgtttcctgtgngaaattgttancccgcncacaatttcacacaanatttcgaggcggggagcataaagtgttaaagcctggggtgcctaatgnggggaacctnaacctcnncantaaattggcgtttgcggcttcacttggnccggctttttcaaanccngggaaaacccttgttccttgcccaaccttgcaatttaaatgaaattcgggcccaaaccccccccgggggaagaagggcccgnttttgccgtnatttggggcgccttttttccccttttcctngggttcanntgaacctncgnnttggncctccggnnccntttcngggtttgcgggnggangccggtntttaancctttaantttnaaaagggcgggntaannaccggttanttccacaagaaatnaagggggatntaccccaagggaaaanaaacattnttngagccnaaaaagggccnacnaaaangggcccgnnaaccctaaaaaagggccccgtttgnntggcgttttttccaaaaggctccnc

SEQ ID NO: 7915 - DNA, 662 bp, Homo sapiens
  misc_feature 1, 21, 472, 512, 529, 558, 562, 585, 606, 609, 610, 619,624, 625, 629, 652, 658, 662: n = A,T,C or G
nctcctatagggcgaattggngctccaccgcggtggcggccgcccgggcaggtacagaagaatttgaaaaacacagctgctgaagaacatgttgctcaaggagatgccactcttgaacattccacaaatttagactcctcaccatccttaagttcagtgactgttgtgcctctgagggaatcgtatgatccagatgtaattcctctgtttgacaaaagaactgttttggaaggtagcacagccagcacctcccctgcggatcactctgctctccctaaccaaagtctgactgttagggaatcagaagtccttaagacaagtgacagcaaagaaggtggtgaaggtttcacagtagatacaccagcaaaagcaagcatcactagcaaaagacacattccagaagctcaccaggctactttattggatggtaaacaagggaaaggtaatcatgcctcttggaagtaagttaacnggcgtgattgtggaaaaatgaggatattaccaaagaaggnggcttagtggacatggncaaaaaaaaaaaaaaaaaaaaaaaaagtncctnggccggttcttaaactagtggantcccccgggctggagggaatncanntcaagcttntcgannccgncgccctcgagggggggcccggtncccacntttn

SEQ ID NO: 7916 - DNA, 779 bp, Homo sapiens
  misc_feature 2, 5, 6, 7, 8, 9, 12, 13, 14, 15, 16, 17, 29, 725, 743, 763: n = A,T,C or G
gntgnnnnnttnnnnnntttttcagccgnggcccagatgcagctgcctcccagtacaagatgcacacagatgggaggagctgccttgagcgagaggacactgtcctggaggtgacagagagcaacaccacatcagtggtggatggggataaacgggtgaaacggcggctgctcatggaaacgtgtgctgtcaacaatggaggctgtgaccgcacctgtaaggatacttcgacaggtgtccactgcagttgtcctgttggattcactctccagttggatgggaagacatgtaaagatattgatgagtgccagacccgcaatggaggttgtgatcatttctgcaaaaacatcgtgggcagttttgactgcggctgcaagaaaggatttaaattattaacagatgagaagtcttgccaagatgtggatgagtgctctttggataggacctgtgaccacagctgcatcaaccaccctggcacatttgcttgtgcttgcaaccgagggtacaccctgtatggcttcacccactgtggagacaccaatgagtgcagcatcaacaacggaggctgtcagcaggtctgtgtgaacacagtgggcagctatgaatgccagtgccaccctgggtacaagctccactggaataaaaaagactgtgtggaaatgaaagggcttctgccccaagtgtgtcaccccgtgtgtcctgcactgcggtaaagagtggtggangaaacggtgctttctcanatgtcacttctggcatttanctcttttaagactgca

SEQ ID NO: 7917 - DNA, 608 bp, Homo sapiens
  misc_feature 574, 576, 608: n = A,T,C or G
ggccgcccgggcaggtacgcgggatttgtgtgaccttccaccttaattttcatcacatgtggactctagtatcacctggattattcagattgattttcttacttaaattcagtagaaaaattgtgaatctgactatgaggggaggcagtatgaactcattaaatatgtattcctgtttggagaaatattcgctggatagctagaattttagattgggaaatcaggttttacatcagcaatcaaatgaatagtagtttagaagttttattttttaacttctcattttgaaataatttcagatttacaaaaaaattgcaaaaatagaacaagcaatttcagctttcccagtgttagcatttcatataaccacagtacctcggccgctctagaactagtggatcccccgggctgcaggaattcgatatcaagcttatcgataccgtcgacctcgagggggggcccggtacccagcttttgttccctttagtgagggttaattgcgcgcttggcgtaatcatggtcatagctgtttcctgtgtgaaattgttatccgctcacaattccacacaacatncnagccgggagcataaagtgttaagcctgggggn

SEQ ID NO: 7918 - DNA, 597 bp, Homo sapiens
  misc_feature 3, 447, 516, 539, 556, 563, 568, 576, 582, 591, 592: n = A,T,C or G
gcnggccgcccgggcaggtacctggtgcagcccatatccatacacagtctaactctggatcccacactctaaaccgcgatgcagtaatacctggtttcagtgcacctcagattcgtcctcctaggctgccgctggaagactagcagctcttcattctgttttccttttcattgtcatagattatttgttacaactgtctgtggaatgaaatcagaatatttttaacaaatggatataaatcatgcgtcatttctctatggctaacatgtgtctccttaagttgaaaatgaaattccaaacggactaggctatatacatgattgttttccactctgcctcccttttaaagatgtcacaacctgccatttataatgcagagcggtttctcgctccatctctcctattttctaacccgttaacaaaaaccctcctgcagacagcaccttntggcatctgcctgcggaggtgtgggatttggccttgcacgttgggttttatgcagtgtttttctaagtnttttaattatcttttccaatttnatattggccctttaganctctganttctnaaaccttncattangggtcattnntactg

SEQ ID NO: 7919 - DNA, 592 bp, Homo sapiens
  misc_feature 2, 33, 35, 592: n = A,T,C or G
tntacacattcctgcattgaacacagctactgnancagtatataatccaattgattgatggatctcagtgcctcttccttcatggtgaatggaactaaataaatagataaaatatgcattgcaccatgacatgaatttcttcctttggttccttattttctatgatgcagaaactgcatagcagcatgtttgaaggtggcctgtcaaatttgggaaactgacggtgtgactgagctagtcacaggggtcttcacagaaaaggcagtcggggtcctggtcaactggagattccatctgaatggtgagtgagtgcatcgtaaagcttttgctaagggctttagcaatttctctccgaaccacttggctgtcccggctggctgctgtagcaacatgagctgagagaattacttgattcattgttagagaccagatgtgcaggctgtgcacagacagcaccccgtcgactgctaaaataagctctttcacaccactgtaattcaggctctttggcacaccttccatgagtaagatggagaagtcctttaagatagtgatggtgctggccaagaccaggatggaaaagatgaatgtn

SEQ ID NO: 7920 - DNA, 681 bp, Homo sapiens
  misc_feature 22, 344, 370, 480, 677, 679: n = A,T,C or G
gactcctatagggcgaattggnagctccaccgcggtggcggccgcccgggcaggtacttttttttttttttttttttttttttgctgcttaaaacaacagccattttatttaatatctcatgattttgtggtcaggaatgtggacagagctcagctgggagattgttccactccatgtagcatcagaagacaggtctcttggtgatattcagctggagaataagttaatatgcagagttcaagatggtttcactcacattgacaccttggcagggatggctggagggctgggctcagccagatcagttaactggcgtgcctgcatatgcactctccaccatggnggtctctagaattgactcaaatctanaattggctggaagacatagtgggagaaataaacttagcagccacatttagtctaccacatggagtaagagagaaagaaaggagtcaaaggggcctagtttatttcaatgngatttaaaattgtgacaacatagaaataaccaaaatatccaactgagaaaatggctaaatatattatataggtttacattcacataatagaatagatttacatttacataatagaatatttgcgaatgtaaatctgtgtaataagccatttgagaatatcgatgaatgagagaagataatgcatgatatgcctctgngngg

SEQ ID NO: 7921 - DNA, 892 bp, Homo sapiens
  misc_feature 129, 660, 661, 662, 663, 664, 665, 667, 669, 670, 671, 672,673, 674, 675, 676, 677, 678, 679, 680, 681, 685, 686, 687,692, 704, 707, 712, 722, 723, 724, 735, 736, 737, 739, 742,744, 746, 751, 754, 781, 784, 796, 799, 800, 810, 815: n = A,T,C or G
  misc_feature 819, 823, 838, 839, 840, 841, 842, 843, 844, 845, 846, 847,848, 853, 854, 855, 856, 857, 858, 859, 860, 861, 862, 863,864, 865, 866, 867, 868, 869, 870, 871, 872, 873, 874, 875,876, 877, 878, 879, 880, 881, 882, 883, 884, 885, 886: n = A,T,C or G
  misc_feature 887, 888, 889, 890, 891: n = A,T,C or G
cgtcgactactatagggcgaattggagctccaccgcggtggcgcggcccgcccgggcaggtactttctctcccagctccaggcacttcttccctacttcaccaggctggaatggtcagcatggcatggncagctggaatggtcaacatggcatcctatgttttggagtctaactggcgtgggtgtcctgcctcttccatccactttgcacaagttacttatcctctctaagcttcagtttccttttcctcatctaaagaatggaaacacgtctgttaggattctttgattgcaagcaacagaaacagattcacttttgccagaaagggtaatgtattggaataatcttagttctctgccagaaacaaaggaaaaggccttgcaaagaatggaaactaggcaactccatggatcgagatgacagaagaagtatattctcctcagcattctgacaccagaatgactccaccctaaccatttgtcatcctgggttctcacagggtaagcttgattggcttaccttgagtcatgtgtctccactttggtaggaaggaggggtaggggattttgactgacaggctccgggacccaagggactggggcagaggcaactacttaaagaaaaattggagtgctgctttggaaaaaggagggaagaccnnnnnnanannnnnnnnnnnnncccnnngcccnttaaaaaaaaanganccccncggggggggnnnaaaaaaaaaannngnttntntnggccnganaccccgggggggggggcccgccccccnctnttgggccctttnaanngggggaaaangggcngcgngggnaaaacggggggaaannnnnnnnnnncttgnnnnnnnnnnnnnnnnnnnnnnnnnnnnnnnnnnnnnnng

SEQ ID NO: 7922 - DNA, 653 bp, Homo sapiens
  misc_feature 20: n = A,T,C or G
tcactatagggcgaattggnagctccaccgcggtggcggccgagtacgcggggctgcttaaaactcttcagaggttcaccatcgcttccagaaaaagatcaatactcctgacgcggcaacctgtcgagactcaggaccgctaggaaatcagctcttgtttacccctctatccattacactacgatccagctgggtttaggcatcacttcctctgagcaatcctccctgatgtcatgaggcagtgctgagtgccttctctggaccctctgtttacttgcctgttaaatcctgaacatctggaagggagtcgtgttcagcaacatatctacgccttgcagcacggtgcctggcctgcagctggtgttccgcaaacagctgctgactgacgggatgcatcggtattcacagggttactaagaagtgcttgtcctcggtcaggccaggaaagagagatgacagacttggtcccatcggcaaactctttacagacaaaaaatccacctcacccatctctacagctccagggctcagcacaggggctggcacatgaaggctccctttccttaccttttcctggcacatgcaaatatatgttttttgagtatataaatcaatgaatgatgagaatatcttgcaactccttcaaaccgact

SEQ ID NO: 7923 - DNA, 651 bp, Homo sapiens
  misc_feature 510, 587, 597, 619, 635, 650: n = A,T,C or G
taagggaacaaaagctgggtaccgggccccccctcgggtcgacggtatcgataagcttgatatcgaattcctgcagcccgggggatccactagttctagagcggccgcccgggcaggtacgcgggagactagagggaattgcacctcctcactgcacaagattagctaatgcgggtgaagctattggagtgcttctgaagaaatcaaaattttgttattatgattatactgttagatatttctttcttgagattctaaatgaatttgtttaatgccttattggtccattcctgcatctctgcttccagaagccaagaacaagttctctggatcacataggctcctctgctgcttcctcagaaacagagatggtacctcggccgccaccgcggtggagctccaattcgccctatagtgagtcgtattacgcgcgctcactggccgtcgttttacaacgtcgtgactgggaaaaccctggcgttacccaacttaatcgccttgcagcacatncccctttcgccagctggcgtaatagcgaagaggcccgcaccgatcgcccttcccaacagttgcgcagcctgaatggngaatgggacncgcccctgtagcggcgcattangcgcggcgggtgtggnggttacccccagcgnc

SEQ ID NO: 7924 - DNA, 678 bp, Homo sapiens
  misc_feature 20, 675: n = A,T,C or G
tcactatagggcgaattggnagctccaccgcggtggcggccgcccgggcaggtactcaataaaataagagatactatagtaaaactcttacaggaaaaattattagaatttgtgctataccaaatcaatttcacaaaaatgaactgcctgtccactgtttttccacaaaaaatccaggccatctacaccttgctggaaggatggaacctcaactgctatactccttagattgctatacagcaatctaagtggccccatcacagctcctctccttgaacatttgttgagatcaagttgcagctgggccaggcacaatcggtcacagttagacagctgagggcattccaaagagtagtgttccttcctccacattatctgccaaagtagtcatctaccttcaggcagagctaacccaaggcctgtccctgaaaaaactgcctgagacttggcttctttgcactacagtcttagatcactggaaagtcagatcacctgaaaattcaagtgagatcaggtcacagggctattcccgcctggaggatattcccacccccaggcctttctacccaaatctagagagctagagccctcagctgtcagcaggctcatgtttctggactaaaaagttttgagtacctcggccgctctagaactagtggatcccccgggctgcangat

SEQ ID NO: 7925 - DNA, 658 bp, Homo sapiens
  misc_feature 5: n = A,T,C or G
gagcnccccgtaataccgactcactatagggcgaattggagctccaccgcggtggcggccgcccgggcaggtacgggccacaaagtatttcctgaagccagaagtcttacagaagtatatggttgatccaggcagaatttgcatttctggtgacagtgctggtggaaatctggctgctgcccttggacaacagtttactcaagatgccagcctaaaaaaataagctcaaactacaagctttaatttatccagttcttcaagctttagattttaacacaccatcttatcagcaaaatgtgaacaccccaatcctgccccgctatgtcatgatgaagtattgggtggactacttcaaaggcaactatgactttgtgcaggcaatgatcgttaacaatcacacttcacttgatgtggaagaggctgctgctgtcagggcccgtctaaactggacatccctcttgcctgcatccttcacaaagaactacaagcctgttgtacctcggccgctctagaactagtggatcccccgggctgcaggaattcgatatcaagcttatcgataccgtcgaccctcgaggggggggcccggtacccagctttttgttccctttagtgagggttaattgcgcgcttgggcgtaatcatggcattagctgtt

SEQ ID NO: 7926 - DNA, 459 bp, Homo sapiens
  misc_feature 6: n = A,T,C or G
cgactnctatagggcgaattggagctccccgcggtggcggccgaggtacagaaggcatgaaaggcttggggcagacctattacattcctcatcttcttacagcccaagagaatatagactcaaagataatgatgcagaatctagagttctcaaatctgggagaaaacctcaggctctgggatttcctgtaagccctgcaacttctttctctccactccccagcccagaaaagctaaacctcatgaaacttcatttaatgagaagacttgagaaatgaaacactcggacttggaagtatatcgtgaagattatttggtcttctttggttcaaaatcatacgatgcttcactattaccattcagagcatcacagaagatttccaagtatcttaggccaagtgtggtggctcacacctataatcccagcactttgggaggccgaggtggacagactgcctga

SEQ ID NO: 7927 - DNA, 679 bp, Homo sapiens
  misc_feature 20, 74: n = A,T,C or G
tcactatagggcgaattggnagctccaccgcggtggcggccgcccgggcaggtacacctgcattagggacaagnaaatctctatgttgaacaaatactgcaggtggtgctgatgctaaacttttacaaacattggttatacaattaatcaacagttatttgatgattcagcacacaaataactctttgcaaccaggtttacgttactgggaacaaactaactaggtttccccaggtgtggagagctttcacacaatataccctaacttacataaacaaaattacccaggtaaatatttactaaacagttttaacataaatgatagtgatacacaaatttgagtaataattcaagaaaataagtgcacaattaggctgttaactgctgtttatctgtttaatgtgaaatacccactagcttccctccaccctttaccctaactcccataaaatcctccaaccaagccaccaacatatacccaccatacttgccactctgtcctcaaactcctgtttgggcatttgctcctggttcttgaaacttcattctgacaaagctgaataaaattacctccttagaaaacagtctgttcatgattaaataactaataaatagttgagccagaatctgaacgcaagcctatcaaaagcctgagtgaattgaggcagttcaactggat

SEQ ID NO: 7928 - DNA, 607 bp, Homo sapiens
  misc_feature 4, 13, 14, 17, 19, 38, 55, 96: n = A,T,C or G
tggngcctccctnntgnantcaataggttctggcatgnacactcattaacatggnataactctaatgatacactatctttggtcaacattcacagnaaaaatttaaatcttacactaattcaactattacattctctacttctgggttgctaagttttgttggataaaattatgctttctcccactgataatactatgatttctagtctccaatccccaatcttcaaaatttcatagtaaactttctacattttcttaatccatgttctcttcaatactccctggtagcaacttcaaaccatttccacttttctcaagaattctaccctactactagcctccttgttcatgcacgaaacagaatatgttaaactccctaagcattctggagtgagtagcactatccacagccagttgtataagcccgaaatacagacaccgtccttgatatctcctcttttcaccatggctctcatcttcttcttcaataggctctgttgcttttgtttctctaatctgtcttgaatctgtccctttccatctccaccaccactagtgtagtttcatccaggtacctgcccgggcggccgctcgagttcggctgcgg

SEQ ID NO: 7929 - DNA, 595 bp, Homo sapiens
  misc_feature 7, 16, 23, 29, 31, 70: n = A,T,C or G
tggtacntcactctgngggcctnattggnanctccaccgcggtggcggccgagtacaagtctccactggnaataaaaaaaactgtgtggaagtgaaggggctcctgcccacaagtgtgtcaccccgtgtgtccctgcactgcggtaagagtggtggaggagacgggtgcttcctcagatgtcactctggcattcacctctcttcaggactgcaaggggcctactctgtcacctgtggctcttcctctcctctcaggaacaaacaacaaaaatcaaatgactctgcttttggggatgtcaccaccatcaggacaagtgtaacctttaagctaaatgaaggcaagtgtagtttgaaaaatgctgagctgtttcccgagggtctgcgaccagcactaccagagaagcacagctcagtaaaagagagcttccgctacgtaaaccttacatgcagctctggcaagcaagtcccaggagcccctggccgaccaagcacccctaaggaaatgtttatcactgttgagtttgagcttgaaactaaccaaaaggaggtgacagcttcttgtgacctgagctgcatcgtaaagcgaaccgagaag

SEQ ID NO: 7930 - DNA, 840 bp, Homo sapiens
  misc_feature 4, 11, 17, 22, 31, 33, 43, 66, 576, 599, 600, 608, 611, 616,619, 641, 644, 648, 653, 672, 674, 702, 711, 713, 719, 720,723, 728, 753, 765, 772, 773, 780, 786, 795, 810, 812, 815,816, 820, 838, 839: n = A,T,C or G
cganccatatnaatagntgtgnctgatggtntntcaccgcggnggcggccgcccgggcaggtaccntgttactgaggcaatacctttctgggtaattttctcaatcctctgggtatattgaggttgcctactgtggctgatgaggaggccagctattatttctagccttctctgtccattgagcattgttctatctgcttcttttcagtagttatttgccctgcagtttcctcacatgtgtgcactgatcaatacttaagcctgaaactgtctgcagcactccagatctttatttctcttttactttgcaacttgttctctctgtagttctactctcttcgctctctctctcttccctcagcacaaccctctccatctctacacttcctctcacctctgccctgtgaattctaattgcatttgctgccccaaatcctctttaactcattcagaccactgagctctggatttttcctctctgagctgcagcctgagaactttcttcaagcagcaaactggagcaatatagagattaccaatttttattggttggtttggtatggtttttggctccangaaatctctggctagcactggcnnaattttgnccntcaanatntgaaaaactggttactgggganaangttnatatnaacccaatggctccattcnancatggccaaaagtgaaaaaacaatcccncatattaantnggaagnnggntttanggctcttaaaattttaattggaaanttccaatttttnaaaaaannttttaantttttngcgggaaanccccgaaaaaaaaantnttnnattnaaaaattttttaccttanna

SEQ ID NO: 7931 - DNA, 655 bp, Homo sapiens
  misc_feature 24, 69: n = A,T,C or G
gcactcactatagggcgaattggngctccaccgcggtggccggccgcgcgggcaggtaccctatccagngggttctaccccatgtagaacctctcttttctgttcacctgattaggtgtagaagtagccagtcaaattcatcctcgctaccactgttatttctgccccacctctaagcattttcttctttctcattcaccacttttttaaacatgtgtaatacatcagtaactaatttataatattccactccaatccatcaacctcagtaaatttaatattcacatcatcagcccttcatatccatacattacttcaaattctttattctgtttgactccatggatttgcatcacctctccacagcagcaaggccaagacccaaacactgaaagtctctgagggctccatcttgagcctcttgagaatctctaactggaaccactgccactgccatttctttcaattccccaccacgcctgatttctactgtctcttgttcacttcatccatacctgtcacaagtccatttcaaacgctgctccacaaactaagtagatttgggagatggtaattaaaaaatacagattcctacaccttgcccatggagcttttgattcagtatatagagtgtcaagtttcaatctttggtatc

SEQ ID NO: 7932 - DNA, 659 bp, Homo sapiens
  misc_feature 1, 2, 3, 4, 5, 6, 8, 9, 10, 15, 17, 18, 21, 25, 31, 51, 68,143, 153, 298, 485, 569, 580, 588, 609, 611, 615, 617, 639: n = A,T,C or G
nnnnnncnnntcctntnnggncgantggganctccccgcggtggcggccgngtacagtttagtcaggnaagcaggcattaaacacacatatacactcacaatgctaaaataaaataaagctgttaatttgatcaatgccaagnaagaaaaagnaatggggcttataagagaatacaacaagcggtgcaacttaaatgagggggcaggggagtatctgagaagccctctgtgagtgagtgactttttttttttttttttttgagatggtgtcacactttgtctccaggctggagtgcanaggtgcgatccagctcactgcaatatccccctcaagcaattcccctgcctcagcctcccgagtaactgggacttcaggcacatgccaccacgcctggctaaatttttttgtatttttaatagagacggggtttcaccatgttggccaggatggtctcgatctcttgacctcgtggtccacctgcctnggcgtccgaaagtgctgggattacaggcgtgagccaccgcgccaggccgagggagtgacatttaatctcaaactaaataactancaattagccangaaaaaantttgggaagagtgtgccaagnanaaananatgcgtttgggtcttggaaacnaaaaaaaaaaaaaaaaaaac

SEQ ID NO: 7933 - DNA, 617 bp, Homo sapiens
  misc_feature 598, 600, 604, 609: n = A,T,C or G
actactatagggcgaattggagctccccgcggtggcgtcgcggccgaggtaccctgaaggccgcttacttggaaccgtatcttctaaatgctctgaaaacctatccaaaggcaattaaaatcacaaatatcattgaaaacatctaagaactacgtgtaagcacttcgggatagtcaggtaaaggcggccctctaattatgaagcattttgataattaatagaattctaagccaaagcttaaatccggatacacatcataatggttaagccaaataacacttaatcattttaccttttattattgataaagacaacacactgaagtagacagacagtaaagaaaaagtccacatctttttattgggtccaaataacctgattgtaaatacttagcctctgattttcatgtttcagaatttgtatgttaatgaccttagtagatgtggctttgtccagcctcaaaaagggttgctctccagccagggccccttttttccagttactgctcccatctcctttaagtatattcaactggtgagtgaactctttatcccgtgtgacaaatgcgtatttgaggccctaacatgccccagacctnanatgngctgntctacatt

SEQ ID NO: 7934 - DNA, 679 bp, Homo sapiens
  misc_feature 14, 23, 45, 54, 58, 83, 86, 93, 106, 113, 641, 647, 657,667, 668, 671: n = A,T,C or G
gactcctatagggncgaattggngctccaccgcggtggcggccgngtaccaagnaagnaagccatgggcactgtcagtaaagnagnatctagnaatgggaacaagnacagggnagaaagccaggtgcaagacacaggaaaagttctagaaagaaagctttttgcatctaacatcagtctccccagattcaacccatctcaatattgaagaaattgtcatcctattcccaaataaagtgaaatgaggttttttatgtaaagtgcttagaatggagtgtggcacacagtaaggatcacctttaagtattacctatagatatactgataaatacatggatatgtcaagggagaggttggccttttaacttgaaggagtcagaaaaaaactgccatgcgcattttgctttgactttgaaaatctggatgcatggaagctctatagaagcacagcaggaatttcaagaggtatgctgcccaatgtgtggctggcagagtgctcacaccaaaggctccattggcattgagtggggagaacatactagaagtgggtttttcttgtcatggagttgaattttttttttaagcagttcatcttctttctagtgaaaaaataaacaaggataggggaaaatgtttggaggntgaatntttaaaaatnacaactcatnnccnaaatagag

SEQ ID NO: 7935 - DNA, 678 bp, Homo sapiens
  misc_feature 20, 62, 79, 90, 644: n = A,T,C or G
tcactatagggcgaattggnagctccaccgcggtggcggccgaggtacatgtgacccaaggnaccagcccaaacgcagnatgcagacagnattccagactcttcagcaatccttcccttatctggggcaaaggctgtgatgcctacacagtctctgtcatttcatccctgatgctccagtttttaggagaaaccacctcgtcatgttcaaacttccagaaatggtggtcctgtggaaagaatcctaggccagcagctaggagacctgctgtgagtcccagccctgcccatcacagctatgtcaggtggttcagacatgttgggcttcaggtccccatctataatcaaaaagtttgtttctagcttcaacaatctatgactattatttccgtttactgatagagtaactaattacttcattataggttttcaagaccagttacctcctgtttggttcaattagcaaaatgccaacatgattgtcattgattttggtggttgggcttccaggagagaagcccaatgggaaatagttcaggatcttaagcagattttgtatttattattccaaggtagtatatgcaggagcagggtttgtcatgcatttctcaaagttcttgcctaggaaaagctcactcccatcgntctcttccattctagtgatgccttaagactcttc

SEQ ID NO: 7936 - DNA, 669 bp, Homo sapiens
  misc_feature 23, 89, 154, 337: n = A,T,C or G
gactcactatagggcgaattggnagctccaccgcggtggcggccgcccgggcaggtactttttttttttttttttttttttttactggnggaaatgacacaaactgacaagtatttatttagcctcattcccatcactcaccactgccacccanaaaagtgtcacctgagtatttattgcatgcagccccaacactaaagaaagatcagaaatatttgttcccgtggtggaaaataaagggctatttgcccacgtcgccaggcttcctctggaaagcatctgggaatcattccagaaattcaatttccaggtgtgtgtttctttaaggaaatattgnggagtagagaaggaacgcactgtgcaggtgccattggctgtgggcgttgctatggcagatcagccttattactgaatagcaaaggaaggagtcaccaggaaaacacaacatgaacaggcagagtgcacacgccgtggcctcgggaagccacaatcatgtggctgacatggctccagagtgtggcattagggagaccaacttctgagctgcagattcacagcatggccatgcaggcagggaagatgtgctctactccaggatcaaggagcaagcccatatttcctcttgattctgggactcccttttgagactgatttgctctaatgttagct

SEQ ID NO: 7937 - DNA, 640 bp, Homo sapiens
  misc_feature 1, 8, 19, 337, 353, 355, 358, 363, 368, 369, 373, 379, 383,384, 385, 386, 388, 391, 393, 394, 399, 401, 402, 405, 408,410, 411, 412, 413, 414, 418, 420, 421, 422, 425, 429, 431,432, 437, 439, 440, 441, 451, 456, 463, 467, 468, 474: n = A,T,C or G
  misc_feature 478, 479, 480, 482, 483, 487, 489, 491, 493, 494, 495, 496,497, 501, 502, 503, 504, 505, 508, 512, 513, 518, 520, 521,524, 528, 530, 531, 535, 536, 537, 538, 539, 541, 542, 543,554, 555, 556, 559, 562, 570, 571, 572, 575, 581, 582: n = A,T,C or G
  misc_feature 583, 586, 588, 590, 592, 597, 603, 609, 613, 620, 625, 627: n = A,T,C or G
nctatggnatctttgcctncttgtgtttctttttgctttgtaacattgcaagtggtccacattttcctttatttaaaatttaaagttggtgcctggggtttctggtgttaaatagaagtgatacttctgcataaagtattatggagatgctctgttccatccagggaggtgcaggtgaaaagagggcagttcatcctcctcacacttagggcagggagcagcatgcaggggcagatcagcagctttgcatgttgacaaatccactctctgctgcagatgcctaggggaagttgcagacttaaattttcttttgtaaaatgggggaacacaaacagancttatgtcacactggntnctncagtnaaaannaagnaaaagnaggnnnnantgnannagtangnnggntgnannnnncatngnnngcnggtncnnccgcncnnntgtttcttcnagtcnttttttncttnntttttntttnnncnntttntntntnnnnnggtnnnnnggntgcnnttttngnngtntttngnngtgnnnnntnnntttttttttcnnnttntgnggggcggnnnatntttatnnnttntntngncgccncctttncttttntccnctctccntcccncntttccgttttttt

SEQ ID NO: 7938 - DNA, 762 bp, Homo sapiens
  misc_feature 8, 17, 54, 72, 132, 197, 598, 608, 657, 687, 722, 746, 758: n = A,T,C or G
ggacttanttgttggcngattggagctccaccgcggtggccggccgcccgggcnggtacagagaattcctanatagccctcacccagtttcagtttctctaacgttatcatcttacattaccctgctatatntgtcaagattaagaaatcaacactactgttaaaaatactccagattctatgcagacttcatcagntgttttcattactgatctttttctgttccaggatctgatccaagaagcacattgcatttggctcacatgtctccttagtctcatgtggtctgtgattgtttctcaggattcccttattttccatgatttttacagttttgaggaatactctaaaataccccagggatattttgtagaatgtccttcaacttgagtttgctggatgttttagctcataattagattgggattatgaatttttagaaagattatctagaacaaatctgaatgacttatcactggtgacgttaattttgatcacttggtgaagacgtcatttgtcatttttctcccctgtaaagttactatgtttccctttccatactccactctttggaagtgagtcactgattttagtgaanactccccaangggagaaggactgagttctacctccttgagtggagggtatttacctatnttatctttccgcggtcctcgggcgctctanaactagggggatccccccggctggcaggaattcgnatatcaaagcttttcggatcccgncggaccctcggngggg

SEQ ID NO: 7939 - DNA, 665 bp, Homo sapiens
  misc_feature 24: n = A,T,C or G
tcgactcctatagggcgaattggngctccaccgcggtggcggccgaggtacactaaaaatggcaccttctgtcttctgacatcactggacagtatagggggggaaaaaatcaaccttaagaaaaagaaatttgatatgaaaaaaagaattcaaaacatcccaatttgcaattacaactggtaatataagctgtgtcatctgatactcttcagtgtccaattaaaatcacactctatctggcaatctatagtcacaactacctaaaaatgtcttaaggaagtaggaataaagaaggcatgtagctttaactgaagcactactttgttaaagaataaaagcatttttttttaaatgtcacctgacaccaaatatctggttggaagaggtgctgttttaaattttcaggggaaccctcaagatttatgcaagaattgaaaaaaataaaagtaaattttctcttccttgtataggcttagcattattgaatatactatgcctactctcaataaaaatgaaacaactcaaaatatttaaaagatacttgtttcctaagcacttcaattctcagggtatactaaactttatgatttcatattccctcaataaatcctaaattctctcaataaaatccccgcgtaccccacaagctgcattcaaactcaaat

SEQ ID NO: 7940 - DNA, 673 bp, Homo sapiens
  misc_feature 1, 2, 3, 5, 7, 9, 12, 14, 15, 16, 18, 22, 24, 25, 28, 36,38, 58, 200, 277, 308, 340, 343, 385, 390, 427, 447, 462,464, 472, 502, 503, 504, 510, 515, 516, 523, 524, 526, 527,531, 532, 535, 536, 541, 545, 551, 554, 559, 560, 561: n = A,T,C or G
  misc_feature 564, 565, 566, 567, 569, 571, 583, 587, 589, 592, 593, 598,602, 604, 612, 619, 620, 622, 623, 625, 634, 644, 645, 646,651, 656, 663, 664, 665, 667: n = A,T,C or G
nnncncntnatncnnntncatntnnggncgattggnanctccccgcggtggcggccgnagtactttttttttttttttttttttttttggacagtgagaagtggtcttatttcttccccttgtttaggtcacagcagttgagtcagggtatcatgctatcgcagggcacaaatttctatcatcatccatagatcactggnattagttgaaaaagtcactcaaatgctgaccaggagcacatgaacttctgtttatttcggactttctgataaatggnggccaggtacctgcccgggcggccgctctanaactagtggatcccccgggctgcaggaattcnatntcaagcttatcgataccgtcgacctcgagggggggcccggtncccancttttgttccctttagtgagggttaattgcgcgcttngcggtaatcatgggtcatanctgttttccttgtgngnaaaattgnttattccggttcacaatttcacacaacatnnnaagccngggannctaaaanngnnaaannccnnggggnggcntaatgnggngggcnnnacnnnnantnatttgggggtgncctnanccnnccccntttncnattcaggnaaacctnngnngnccaactggntttaaataannnggccnacccnccggggnnnanggcggt

SEQ ID NO: 7941 - DNA, 622 bp, Homo sapiens
  misc_feature 6, 7, 12, 13, 25, 29, 31, 32, 63, 70, 519, 551, 553, 560,573, 578, 595, 598, 611: n = A,T,C or G
cctggnngcggnngttgcagtaagnctgngnncacgccactgcactctagcctaggtgacagnagcaagnactctgtcaaaaaaaaaataataataaaaaagaatgtgggccttttgactaggagctatggcataaccatagacaatagcaagatgcctcagtgcacccaaaggccagaagggatggatacatcaacagtggagaccagaaaatgtccagaaggcaactagtggaacagaggtctctccgatccccactcttaacgaatttttccttaagctcagatatctcccagggagagacaaaaaagaagggtggtgtagaaatgggagaaagaaggtaggacgagcacctggaattggcctagctaacctgaaaaagactaagttttaaactggaagaaaatgggttgcctggcagggccaagtttaagttattttctccattagcagatatgaagctgtatgtacctgcccggggcggccgctctagaactagtggatcccccggggctgcangaattcgatatcaagcttatcgatacccgtcnancctcganggggggcccgggncccanctttttgttccctttangangggtaattgcgcncttggcgtatc

SEQ ID NO: 7942 - DNA, 647 bp, Homo sapiens
  misc_feature 23: n = A,T,C or G
gcgcattaaccctcactaagggnaacaaagctgggtaccgggccccccctcgggtcgacggtatcgataagcttgatatcgaattcctgcagcccgggggatccactagttctagagcggccgcccgggcaggtacccacagaatgtggccccaaatgattcaattacagctagaagttgttctcttcccaaagcacgagtcttttgcattcacaggatattttttctttcataaacattcctgcgagaatgtaagtgcggatgaagattgtgttctgtcttcttcttgtcttttttctgtttactctgattttataaaatgcagtgtcatgtcttaggacaaattatcctcagtttgccagcaagtgagtttataaattattttattcaaatgagaaaattttccgctagaaccaatagtaaaggatggtgagtttccagctgacccacaatgacgtatttaactcacagtgaaactcagctctgcggttttaatagtttccttttatttctaagagcaagggagcctatgtttctaataattggacatgtctggaactgtccctaacatttgacagttttttcctccttgccagtgttaaggagattctttcttcctcacttcagagacagcttaatgtgttgac

SEQ ID NO: 7943 - DNA, 944 bp, Homo sapiens
  misc_feature 2, 3, 8, 12, 15, 18, 79, 569, 571, 589, 595, 621, 623, 644,659, 663, 713, 728, 739, 765, 780, 791, 804, 809, 815, 819,826, 830, 841, 853, 855, 857, 871, 876, 883, 888, 889, 893,901, 905, 911, 914, 916, 921, 922, 923, 942: n = A,T,C or G
gnnagttntgcnttnatncgactcactatagggcgaattggagctccaccgcggtggcggccgaggtacacgtctggcnaacatacatggcatatagaatatcaccttcttccacatgcagcctgaacttcttcaccttctcaaataaggccttagcctgctcaccttcctttttatccagagcccctgcagtggatttatcaactacaaacttctcaggaatggactttaaagactgagagttgaccaggctgccttctggaccagattggatggtgttggacctgttcatgttgttcttcctgttgtccttttcttctgagtcctccccagacacttcagataaagcccgtgtggtccaaggagagtcaaaacacttccccagaatggagatgaaatgttctattttggagctggaaccagggaatttgaaaccaaaagttactggagagcataaagaccaggggtatggatgaaggacaagggaagggaaaaactttggcataccaagtggagggcttcgcttataacacatcttgaatttataaaggctggtccttgcccgggcngnccggttttagaaactagngggatncccccggggcttgcaaggaaatttcnantattcaaagctttattcgaanacccggtcgaccctncggnggggggggggcccccgggaacccccagctttttggttcccctttaagggngggggttaaaattgngcccctttggngggaaatcaattggggcaataaagcntggttttcctggggngggaaaattgnttattcccgcttnacaantttccncacnaaaaaanaacnaagcccggggnggcttaaaaagngntnaaacccttgggggnggccntaaaggnggggnngccnaacccccnattnaattgngtngnggccnnncttgccccctttttcaggncg

SEQ ID NO: 7944 - DNA, 631 bp, Homo sapiens
  misc_feature 557, 618: n = A,T,C or G
actactatagggcgaattggagctccaccgcggtggccgagcggccgcccgggcaggtacatcatgcctccagttctggagctaacacagatttctccaatttcatctgttttgcagagctggggaggtccatctggtttcacaatgcacatcatcccaccaggcattacatgccctacatcctggaccgtcagtgctgaatttttatcttcagtattgacccgtattaccccatagctcaatccattcattgagagaatggctcttcctggcaaaggggctcctggaactccaggcctgcggattgctacagtcatggcttcagcagacgtggcgcacggtcagatggcctcaggcttcagtccatgactttggaacagactcaggaaggcatcacaggatgacacggaccaggggttagctccatctgtcacaattaacattcggagggaactcaagctcacgtctctttggtcccgatgtgccatcatagcccagtgcaagtcccgacattttactaaagctaccttggctttgtgagcatgtacctcggccgntctagaactagtggatcccccgggctgcaggaattcgatatcaagcttatcgataccggcnacctcgagggggg

SEQ ID NO: 7945 - DNA, 524 bp, Homo sapiens
  misc_feature 2, 3, 7, 221, 309, 312, 313, 314, 316, 317, 318, 319, 321,322, 324, 326, 337, 338, 343, 347, 348, 350, 351, 355, 356,357, 358, 359, 362, 363, 366, 369, 370, 373, 374, 376, 380,382, 383, 385, 387, 388, 392, 393, 394, 395, 401, 402: n = A,T,C or G
  misc_feature 404, 405, 407, 409, 412, 413, 424, 429, 432, 433, 435, 436,458, 459, 460, 462, 468, 470, 474, 477, 478, 480, 481, 483,484, 485, 489, 491, 495, 497, 503, 504, 505, 514, 516, 519,521, 524: n = A,T,C or G
gnnagancactacttagggcgaattgggtaccgggccccccctcgaggtcgacggtatcgataagcttgatatcgaattcctgcagcccgggggatccactagttctagagcggccgtttaactttagtcactgggcaggcaatgcctctaatacttgttatgctagaggtgatgtttttggtaaacaggcggggttcgtgtttgccgagttccttttacntttttttaatctttccttaaagcacgcctgtgttgggctaacgagttagggataggtaattctattgttgggttagtacctgcccggnccnnntnnnncnntntncttcattcatnntattntcgnntnncctnnnnntanncanaannttnnangttncnntncnnaatnnnntttttnntnncntnaanntaaaattatgnttctnctnntnntcataaggccccaccctccccnnnanctttgntncctntcnncnntnnntctntntttntngtcctnnnctttcatantntgntnttn

SEQ ID NO: 7946 - DNA, 666 bp, Homo sapiens
  misc_feature 8, 39, 163, 324, 335, 336, 368, 380, 389, 399, 402, 412,413, 416, 417, 419, 422, 423, 424, 433, 439, 443, 448, 452,453, 455, 460, 461, 464, 466, 471, 472, 476, 478, 483, 487,488, 493, 494, 497, 501, 503, 504, 505, 509, 510, 512: n = A,T,C or G
  misc_feature 513, 520, 525, 526, 533, 536, 539, 540, 541, 542, 543, 545,548, 555, 558, 561, 565, 566, 569, 572, 580, 583, 585, 586,589, 592, 593, 596, 597, 599, 601, 605, 612, 624, 627, 634,639, 643, 644, 646, 648, 656, 657, 660, 665: n = A,T,C or G
taaagggnaacaaaagctgggtaccgggccccccctcgnggtcgacggtatcgataagcttgatatcgaattcctgcagcccgggggatccactagttctagagcggccgaggtacctgtcactagtaaaccctccccctcagttgtgacaaatatagatatntttgggcattgccaaaatgttccatgggaggcaagattgctcccagttgagaactagttatgaaagagccttggaaacgctatacaacctatatgattatatctatatctatacctatatctatataaagagatatacacatacatgtatactcatatctntatacaacagnntatacatacatgtatacatctacatatgcatntatatatattgngaatataangtacctaggnccngcaccagagnnganncntcnnngcgattcantgaatnaagngatanacanncngcggnntgnancaggnntaantnagcantagnnccccnncgngctncnnncganncnngcggccnccggnnaggtcgntcngcnnnnntnggngcgggcngtngtnagtnngcnacngcgaattntgncnntcnttnnagnngngnggtngtaagtncgcgggaggccnccnggcgacngcccnggcnncntntttcggtnngancggcnc

SEQ ID NO: 7947 - DNA, 624 bp, Homo sapiens
  misc_feature 20, 27, 30, 37, 624: n = A,T,C or G
gccagcgcgcattaaccctncactaanggnaacaaanctgggtaccgggccccccctcgggtcgacggtatcgataagcttgatatcgaattcctgcagcccgggggatccactagttctagagcggccgaggtactagactgggactgcaggagggcactaccactacgcaggcgtgtcttgttcaggtcagactgggcttctctcaatttccgcttatatctcaggacctcccctttcagctggtgattgtgattctggaggctactgatgaggtggcgcatctccctgtttatagggcctgcttgttcattggcagcaagggtctgctcaaattctatcctcagcatttcatactccttgcggacctgggccaatgtatcttctagctgaattacttcagtcctcagcttcttatgaagactaacctcatctcgctcaataagctcaacctggtgctggtgggttcctctggtgccatgaagcagggtccgagcctcatccaagtgtgctttcaactgtaggctctcattcccgcgtacctgcccgggcggccgccaccgcggtggagctccaattcgccctatagtgagtcgtattacgcgcgctcactggccgtcgttn

SEQ ID NO: 7948 - DNA, 664 bp, Homo sapiens
  misc_feature 91, 492, 529, 560, 579, 584, 592, 625, 627, 629, 655, 657,663: n = A,T,C or G
tcactatagggcgaattggagctccaccgcggtggcggccgcccgggcaggtacgcgggaatgagagcctacagttgaaagcacacttggnatgaggctcggaccctgcttcatggcaccagaggaacccaccagcaccaggttgagcttattgagcgagatgaggttagtcttcataagaagctgaggactgaagtaattcagctagaagatacattggcccaggtccgcaaggagtatgaaatgctgaggatagaatttgagcagacccttgctgccaatgaacaagcaggccctataaacagggagatgcgccacctcatcagtagcctccagaatcacaatcaccagctgaaaggggaggtcctgagatataagcggaaattgagagaagcccagtctgacctgaacaagacacgcctgcgtagtggtagtgccctcctgcagtcccagtctagtacctcggccgctctagaactagtggatcccccnggctgcaggaattcgatatcaagcttatcgatcccgncgaccttcgagggggggcccggtacccagcnttttgttccctttatgganggttnattgcgcncttggcggaatcatgggcaaagctggttcctgngngnaaattgttattccgttccaatttccncnaaatang

SEQ ID NO: 7949 - DNA, 620 bp, Homo sapiens
  misc_feature 7, 92, 112, 446, 447, 448, 449, 450, 451, 452, 453, 454,455, 456, 457, 458, 459, 460, 461, 462, 463, 464, 465, 466,467, 468, 469, 470, 471, 472, 473, 474, 475, 476, 477, 478,479, 480, 481, 482, 483, 484, 485, 486, 487, 488, 489: n = A,T,C or G
  misc_feature 490, 491, 492, 493, 494, 495, 496, 497, 498, 499, 500, 501,502, 503, 504, 506, 507, 508, 509, 510, 511, 512, 513, 514,515, 516, 517, 518, 519, 520, 521, 522, 523, 524, 525, 526,527, 528, 529, 530, 531, 532, 533, 534, 535, 536, 537: n = A,T,C or G
  misc_feature 538, 539, 540, 541, 542, 543, 544, 545, 546, 547, 548, 549,550, 551, 552, 553, 554, 555, 556, 557, 558, 559, 560, 561,562, 563, 564, 565, 566, 567, 568, 569, 570, 571, 572, 573,574, 575, 576, 577, 578, 579, 580, 581, 582, 583, 584: n = A,T,C or G
  misc_feature 585, 586, 587, 588, 589, 590, 591, 592, 593, 594, 595, 596,597, 598, 599, 600, 601, 602, 603, 604, 605, 606, 607, 608,609, 610, 611, 612, 613, 614, 615, 616, 617, 618, 619, 620: n = A,T,C or G
ttttttncattaccttagtttaacaccctttatatatattaatatgtttcagtctctatgattatattttattttcttagtattgatgcagnatatagtcaatacttccagnagggaaacacttatagtcaatatattaggtctaaaatgagaggagcaagatggtggaacagaaagcttcgctgatcgtctaccctacaaggacaccaagttaacaaatatctacacagaaaataataccttcataagaaccaaaaatcagtttaccactcacaggacctggttttaccttcaaatgattgaaagaagcacaggatatttaagaaaaaaaaaaagtcctgaataaccgataccacccctctttgaccccctacctgcctcctccacatctgtggcttggtgcggagagcatctctgggcactggaggaacgggtaccttgcccgnnnnnnnnnnnnnnnnnnnnnnnnnnnnnnnnnnnnnnnnnnnnnnnnnnnnnnnnnnntnnnnnnnnnnnnnnnnnnnnnnnnnnnnnnnnnnnnnnnnnnnnnnnnnnnnnnnnnnnnnnnnnnnnnnnnnnnnnnnnnnnnnnnnnnnnnnnnnnnnnnnnnnnnnnnnnnn

SEQ ID NO: 7950 - DNA, 453 bp, Homo sapiens
gttgaaacactacttagggcgaattgggccctctagatgcatgctcgagcggccgccagtgtgatggatatctgcagaattcggcttagcgtggtcgcggccgaggtaccctcggttgcaagcacaagcaaatgtgccagggtggttgatgcagctgtggtcacaggtcctatccaaagagcactcatccacatcttggcaagacttctcatctgttaataatttaaatcctttcttgcagccgcagtcaaaactgcccacgatgtttttgcagaaatgatcacaacctccattgcgggtctggcactcatcaatatctttacatgtcttcccatccaactggagagtgaatccaacaggacaactgcagtggacacctgtcgaagtatccttacagggtggcggtcacagcctccattgttgacagcacacgttttccatgagcagcccgcc

SEQ ID NO: 7951 - DNA, 462 bp, Homo sapiens
  misc_feature 3: n = A,T,C or G
agnttgaatcactactatagggcgaattgggccctctagatgcatgctcgagcggccgccagtgtgatggatatctgcagaattcggcttagcgtggtcgcggccgaggtaccctcggttgcaagcacaagcaaatgtgccagggtggttgatgcagctgtggtcacaggtcctatccaaagagcactcatccacatcttggcaagacttctcatctgttaataatttaaatcctttcttgcagccgcagtcaaaactgcccacgatgtttttgcagaaatgatcacaacctccattgcgggtctggcactcatcaatatctttacatgtcttcccatccaactggagagtgaatccaacaggacaactgcagtggacacctgtcgaagtatccttacaggtgcggtcacagcctccattgttgacagcacacgtttccatgagcagccgccgtttcacccg

SEQ ID NO: 7952 - DNA, 649 bp, Homo sapiens
  misc_feature 440, 477, 478, 495, 496, 507, 522, 523, 524, 533, 536, 537,538, 556, 559, 564, 566, 568, 575, 581, 582, 583, 590, 598,599, 602, 603, 604, 605, 606, 607, 608, 610, 620, 621, 622,632, 633, 634, 642, 643, 644, 645, 646, 647, 648, 649: n = A,T,C or G
ctcactaagggaacaaaagctgggtaccgggccccccctcgggtcgacggtatcgataagcttgatatcgaattcctgcagcccgggggatccactagttctagagcggccgcccgggcaggtaccaattgaaacatctggacaacatctgcatgagtgtgaccgaggacacagttgccattgatgtctacaataacatcgcctggtgcaattttcccatcctgagctgcgggaccatctttcagcacatttttcacttgtaggaactcatcaggtctatctccaccaataatagtaaaaccaaatcccattgtgctttttttcagtgatgctcgaacaaggacacctttaagctgggatggatctcttgtgaagtgtgatttttccatcccgcgtacctcggccgccaccgcggtggagctccaattcggccccttatnagtggagtccgttatttacgcgcgcttactgggccgnngtttttaaaaacggtcnngggcttggggnaaaacccctggggtnnncccaaattnaannnccctttgggaaaaaaatnccnttttncnanggggggnaaaaannnaggggcncccccccnnacnnnnnnncntttccaaaannnggcccccctnnngggggggnnnnnnnn

SEQ ID NO: 7953 - DNA, 813 bp, Homo sapiens
  misc_feature 599, 633, 642, 649, 674, 693, 699, 704, 717, 737, 738, 754,764, 766, 769, 770, 787, 809, 810: n = A,T,C or G
gcgcgtaatcgactactataggggcgaattggagctccaccgcggtggcggccgggggccattgagactgccatggaagacttgaaaggtcacgtagctgagacttctggagagaccattcaaggcttctggctcttgacaaagatagaccactggaacaatgagaaggagagaattctactggtcacagacaagactctcttgatctgcaaatacgacttcatcatgctgagttgtgtgcagctgcagcggattcctctgagcgctgtctatcgcatctgcctgggcaagttcaccttccctgggatgtccctggacaagagacaaggagaaggccttaggatctactgggggagtccggaggagcagtctcttctgtcccgctggaacccatggtccactgaagttccttatgctactttcactgagcatcctatgaaatacaccagtgagaaattccttgaaatttgcaagttgtctgggttcatgtctaagcttgttccagctatccagaatgcccacaagaattcaactggatctggaagaagaaaagaaactgatggtgttaactggacccattttgattgaaacctacccanggctgatgtcattcattggaaacccgcacaaacntggctattncccttgncccgtggggagtattggtttttggngaagtctttttggtccttnggccgntctanaactagtgggatncccccggcctggaggaattnnaatttaagccttattngatcccgtcnanctnnaggggggggccccggtnccccaacttttggtccctttanngag

SEQ ID NO: 7954 - DNA, 1071 bp, Homo sapiens
  misc_feature 3, 4, 5, 6, 7, 11, 14, 16, 566, 690, 699, 707, 724, 769,779, 816, 821, 917, 923, 925, 935, 947, 954, 961, 966, 971,982, 988, 991, 1003, 1006, 1024, 1026, 1031, 1046, 1049,1054, 1058, 1068: n = A,T,C or G
gannnnnttantgnancgctactataggggaattgggcctctagatgcatgctcgagcggccgccagtgtgatggatatctgcagaattcaggaccaagcagaggagttcactcttcttccctgttctgaatgcagccattttcaggtcaaagtcaaagaaacccctcagttcctgcacatgggtgagatcatagacggtgtagacatgagagctgaggttggaattcttacccggaatattgtgatccaaggagaagtggaggactcatgctacgcagaaaatcagtgccaattttttgattatgatacctttgggggacacattatgataatgaaaaattttacttcagtccatctttcttatgtggaattgaaacacatgggtcagcagcagatggggcgataccctgttcattttcacctgtgtggtgacgtggattataaaggaggatacagacatgcaacatttgtggacggcctgtctattcatcacagcttctcaagtgcatcactgtgcagggacaaaggcttgctaataaaagacaccatgggtttgacacactangtcatgtttcttttgggaagaggtattgaacagaggaatactttgttccacaatctggggactcctcaccaagccgggtactccatagtgtccccatttcggagcatgtagtagtcccaaagcnttccccagncctccagnccataataccccttttnggggtcatcatctgaccagaaagaggccccaaagtcgctgggganggaccagctngggggcctcctggggattccgctcacggaatgatgcnggcangcgtcgtcccggaattcccagcacactggcgggccgttactagtgggatccgagccccgggaaccaagccttgaaggccatagctggaggaatccnaacggngncaccctaaanaggcttgggggnaatccanggggcanagccnggttncccgggggggnaaaatngtnaacccggcccanaanttcccccacaaaaaatcngnggccnggaagccttaaaggnggnaaaancctnggggggcccnaat

SEQ ID NO: 7955 - DNA, 650 bp, Homo sapiens
  misc_feature 51, 579: n = A,T,C or G
tcactatagggcgaattggagctccaccgcggtggcggccgggtaccaggnattcattctcatcaaatatcatgaagtggagaacacggtgaactatgttggggttgatgtctttgcggcatacagagagagggcctaccagtccactgtgaaggtccttagccacagatacagttgaatagtaaaaccaaggtatgcattcaaagtccagtgaggtaggaccagttctatcaggtatctgccaagtatatatttgaatctctcctggctgagttggaacaacagtggaattatttgttttcactccatgagcatgaatagaatacggtcttgcggctttatttttaaagataatttgaattatttgaccagggttgagcaatattaatggacctagtatatcgagatgtttttcaccttcattcctttttgtttgatttgtgaacgtgttatcatcatattgacgatataagactttcttgtatttggacccaagaagtgttccacttctgtccacatacatgctcgtttggctttaagaaaataaaaacaaaaacaaaaaaaaaaagttcctgcccnggccggccgctctagaactagtggatcccccgggctgcaggaattcgatatcaagcttatcgataccgtcg

SEQ ID NO: 7956 - DNA, 657 bp, Homo sapiens
  misc_feature 22, 464, 471, 497, 519, 521, 534, 546, 549, 550, 553, 554,559, 571, 573, 578, 585, 591, 599, 601, 604, 608, 609, 613,621, 622, 624, 625, 626, 627, 634, 635, 642, 656: n = A,T,C or G
gactcctatagggcgaattggngctccaccgcggtggcggccgggtactgtccttacaacagtttggactgaatattcttgtttccattcacaaacatttctttctgaactagcaacagcactaatcaatagctacacttaagccatttaagactaagctttagatgtgtgtctaattatctggcaaaaataaaagaaccaaagagtttcatgttagcagcaaattaactagatttaagggtcttgatttttttcataagcctttggaagcctgcatattaaacactggtgagttttaaattctcaatggaaatggtgatggcatttactgaaccaagccagctcatattacaacgtttttttttttttttttcgtggttctgagtgcagtctttataaagcccagtgctgtaccctgcccgggcggccgctctagaactagtggatccccccggggctggcangaattcngatatcaagccttttcgatacccgcngaccctcgaaggggggggcccngntcccaagcttttngttcccctttantgnnggnntaatngccccccttggngnaattnatgggcnatagcnggttcctngnggnaaanngttnttccgctnncnnnnttccccnnaatatancggccggggaggcnt

SEQ ID NO: 7957 - DNA, 541 bp, Homo sapiens
  misc_feature 2, 11, 25: n = A,T,C or G
gnattcgttanggcgaatacgactnctatagggcgaattggagctccccgcggtggcggccgcccgggcaggtacacatgcatgcatacacacccatacaaacatctgtgtgagggcagttctggagatgagcagagagagaccggaataaactcaatcttttctttcccaagctcctagccaacactatccttgggagaaagaaatttgcagaaactgctaagaccaagtgtggagatgtcaagctagttcacactctgaggctcagaatatgtaggacatgcacaattgtgcagtcctttgggattggaagtgaaacagtctgtgatcccctaccttctagggaactaggacctaggaagaggtaaagattatcaggtatgcaaagcgccccaattcttctgctgccatgggggattttaccccaactccagggttcgaggccaatctgagaatggcttaggattgcaatgtcaaggtattatatcagccccttgcttgaggcttgaggtcataatatccctctaggacttacctgttc

SEQ ID NO: 7958 - DNA, 679 bp, Homo sapiens
  misc_feature 4, 17, 30, 415, 436, 438, 475, 483, 488, 492, 495, 498, 502,523, 525, 537, 540, 541, 542, 545, 546, 549, 550, 553, 556,558, 563, 568, 579, 584, 585, 589, 596, 598, 599, 600, 603,606, 608, 610, 614, 616, 618, 620, 621, 624, 625: n = A,T,C or G
  misc_feature 627, 628, 629, 630, 635, 639, 643, 648, 651, 652, 653, 654,656, 658, 659, 660, 661, 662, 664, 665, 667, 668, 671, 673,674, 676, 678: n = A,T,C or G
tagnaatcctactgggnaagtataggcagnatctctccctcatataacggatgtttcttggcgcttggaatatcagataaagaccaatcaacttcataggatgtacctgcccgggcggccgaggtaccagactcttatttcctgcagcttttgagaattctaaagatacctgagtcattttaaataaatttcagctttctttaccaaactacccttaaccggattctccttgaaatgacatcacctgacacccatggcatgctgcatgcccacagctagattactttttagtgcgcccacgcacttctgcttttattaggtgaggcagaatcaagattcccttttgttggatcttgaacctgttcatgccactttgatatttctaaattcatacataaaccaatgaaatatatgngttaagaaaaattgctatttntngctggacgcagtggctcatgacctataatcctacccntttggccnggccnaggncanganggantggttggaagccacaagttgntnaacagcctgggnaannnagnnagnnccngtntnttcanaagantattttaccanaaaannatgngtggggncnnnggngtnananctgnanancnnaanntnnnnaggtnagangggngaaantannnngncnnnnngnnannacngnnantng

SEQ ID NO: 7959 - DNA, 602 bp, Homo sapiens
cccgcgtccgcttttctctagtttcagtccagaagaacttcatatttagagctaaggccactgaggaaagagccatagcttaagtctctctgtagacagggatccattttaaagagctacttagagaaataattttccacagttccaaacgataggctcaaacactagagctgctagtaaaaagaagaccagatgcttcacagaattatcattttttcaactggaataaaacaccaggtttgtttgtagatgtcttaggcaacactcagagcagatctcccttactgtcaggggatatggaacttcaaaggcccacatggcaagccaggtaacataaatgtgtgaaaaagtaaagataactaaaaaatttagaaaaataaatccagtatttgtaaagtgaataacttcatttctaattgtttaatttttaaaattctgatttttatatattgagtttaagcaaggcattcttacacgaggaagtgaagtaaattttagttcagacataaaatttcacttattaggaatatgtaacatgctaaaacttttttttttttaaagagtactgagtcacaacatgttttagagcatccaagtaccat

SEQ ID NO: 7960 - DNA, 634 bp, Homo sapiens
tcctaagggaacaaagctgggtaccgggccccccctcgggtcgacggtatcgataagcttgatatcgaattcctgcagcccgggggatccactagttctagagcggccgaggtacagatttttttttttaaccactcaatcccaaatggaggcctacaaagaacatcgtaataacacatggaagcaaaccctgggtttttaagagcaaattctgtcccccctcactcccccaagtgacaagatactaatgaagaaagttcttcaccatagtgtttgttttaactaaactcattggagtctagttccaaatttggtagggtcatcatctctacattccttaggatttctctccctatcaagctggcccagatacaagtacctgcccgggcggccgaggtgaaataacaaccaggaactgctttttcttttcctgctgagtacctaacctacctttaagactgggataactattggaaacaatagctaataccggatatagttatttatcgcatgatgagtaatagaaaggagcttcacagcttcacttaaaaatgggggtgccaggcccctggaaagcaggggttaccgttacgaggctgtggtccggggcaagccaagtacctgcccgggcggc

SEQ ID NO: 7961 - DNA, 601 bp, Homo sapiens
  misc_feature 3, 12, 467, 581: n = A,T,C or G
tcnccgtggtgncggccgaggtactttggtccagataacactggtgatatcatgaccctgaaattcttgactggacttcagaatttcataagcagcatggctactgttcacttggtcactgcagatgggagttttgattgccaaggaaacccaggtgaacaagaagctttagtttcttctttgcattactgtgaagttgtcactgctctgaccactcttggaaacggtggctcttttgttctaaagatgtttactatgtttgaacattgttccataaacttgatgtacctgcccgggcggccgctctagaactagtggatcccccgggctgcaggaattcgatatcaagcttatcgataccgtcgacctcgagggggggcccggtacccagcttttgttccctttagtgagggttaattgcgcgcttggcgtaatcatggtcatagctgtttcctgtgtgaaattgntatccgctcacaattccacacaacatacgagccgggagcataaagtgtaaagcctggggtgcctaatgagtgagctaactcacattaattgcgttgcgctcactggccgctttncagtcgggaaacctgtcctg

SEQ ID NO: 7962 - DNA, 580 bp, Homo sapiens
  misc_feature 541, 552, 579: n = A,T,C or G
ttctactcagggcgaattgggccctctagatgcatgctcgagcggccgccagtgtgatggatatctgcagaatttcgagcggccgcccgggcaggtacctactatgtgtcagccatgggggatacaaagatctataaggcacaagaccctcagtcttgtagtcgcctgacagccagccagctacaacataatgtggaaaggacaatggtgggaaatgcactcaggtcttcctaatgcacagagtatgctcaggctgtgacatcaggaagaaaacagatatttaccttaacacggacttggaggaccttcaaaaaacagtgatgggaggaaatccagttttaaaagtcttgatttaaaaaaaagaaaacactttctgtggataaagataggctgcaggaaatgtaacctatgaaattttctcaaattagctttcaaacacacacaaaaaattgcatttggttgaggagcagaatgtaacttatattaaagaataaactactatttagtatctgagtgaagtacctcggccgcgaccacgctnagcccgaattncagccactgccggccgtactagtggant

SEQ ID NO: 7963 - DNA, 658 bp, Homo sapiens
  misc_feature 1, 22, 587, 590, 609, 613, 654: n = A,T,C or G
nactcctatagggcgaattggngctccaccgcggtggcggccgaggtactgcatgttacatattcttctttaaaattttgtaataaacattgacagtgtttggtgggcacagggaaacaggataacgtagagtcattacagaagaaaaaaacttattgctaacattgcagtattccttttatcagaattaggtgagtattgattgtaaaagctctatcaactcttgctcttatttgatgactttgagacttttttactcttgctataaaaagaaggctactttctttccctaatatatttctaccaatgcgaataattcaggaaacaatgagagaaaagtaattcacacttaatgtgttgttacttaagagatttgacggataaaataaaatcaaattaaatcattgaaaaggcaggcttagacccccttaaaaacaccgttagttgcctaccataatttgagcactttttcatgaaaaaaaaaaaaccatttcagtttcctacagattttgcacagttcattccatggagatacttttagggaaatagggaagagggttgtgaaatgtagcctcccctcattcctnctnttgtgcagcccagcagctntgancgcatgtgatcctcccgtacctgcccgggcggccgctctanaact

SEQ ID NO: 7964 - DNA, 821 bp, Homo sapiens
  misc_feature 2, 3, 4, 5, 6, 8, 16, 17, 23, 104, 105, 136, 242, 250, 251,309, 348, 526, 535, 548, 587, 591, 623, 649, 724, 749, 780,795, 805, 807, 821: n = A,T,C or G
gnnnnngngtttacgnntatcgnctactatagggcgaattggagctccccgcggtggcggcccgcccgggcaggtaccgtttcctcagcggcggactgctgcannaagaatgtcttttccacctcatttgaatcgncctcccatgggaatcccagcactcccaccagggatcccacccccgcagtttccaggatttcctccacctgtacctcggccgcccgggcaggtacatttaatcagtnaatcagtnncacatcatgtattgtgatgtttcaatgtgagacacaaaaacaatggcttgaaacttgngtatcatatgtgattttgaaatgaacaccttgaatagcnctaatttttatttgtggtatttttctataacaaaacaagtagctctaggaaaagaggttttattttgtaaacgatcatttgtgacctcagacactctctggctaatattttaataagctcacagcagataattctgagatcatgggtgaggggtggtgcatgttgagatttaaattgncataaagcngcatactttttgnctagctggttgattcattttttaatatagtatgccaatnttgngactggtcccatgtgaaagttctgttgaaaanaacaattgtctgccccacaatcaaanaatggatgtgtaaaggtgtgaataaatcttatatcaaatgtcaaacttttacatgtgaatgaattttcttaaaanacatagaaaaggccataaaaacctnttaatttccactcggccggtctagaactagngggatcccccggctncaagaaattnanatcaactttcgatn

SEQ ID NO: 7965 - DNA, 404 bp, Homo sapiens
gagcgcgcgtaataccgactcactatagggcgaattggagctccaccgcggtggcggccgaggtactaatatagtatttccactatttactgttattttacctgataagttattgaaccctttggcaattgaccatattgtgagcaaagaatcactggttattagtctttcaatgaatattgaattgaagataactattgtatttctatcatacattccttaaagtcttaccgaaaaggctgtggatttcgtatggaaataatgttttattagtgtgctgttgagggaggtatcctgttgttcttactcactcttctcataaaataggaaatattttagttctgtttcttggggaatatgttactctttaccctaggatgctatttaagttgtacctgcccggc

SEQ ID NO: 7966 - DNA, 624 bp, Homo sapiens
  misc_feature 1, 4, 56, 478, 506, 551, 567, 579, 582, 584, 609, 612, 613,617, 621, 622: n = A,T,C or G
nctnctatagggcgaattggagctccccgcggtggcggccgaggtacatgcagggnatattacaattgcaatcattattttaacaccatctcctccccctcttcccttcccaaaagatataaagacataaacatcatctgctgccaaataaatcctgaaattcgagggcgatgctgggaaggtatgaaattagagggaggcatgttgcttttgcactttcagatcaatggctgaattccagacccggggaagcctttcagatccgcatgtaatttgtttaaacaattgctgttcatctgccacagcagcacttgtaatgccgcagggaggaacttgcagcatttcttgctcacttcaagaaatcaactataacaaacctcttccagaagactacgacatccatatttctgcaatagttagataaaagttaaagaactgttccttttgtgaatattcacagtccactgcatataatcgnttatgaaaactgaaccctataaagagcnagagtagaggactgtggtgagaacagagggatcgaaggggatcanctcgttgaagagctgncccccgggcggncgntnttagaactagggggatccccccggnctnnaggnattnnat

SEQ ID NO: 7967 - DNA, 429 bp, Homo sapiens
gcgtaatacgactcactatagggcgaattggagctccaccgcggtggcggccgaggtacctctttgccttaaattgctttttagttctaagattgtagaatgatcctttcaaattgtaatcttttctaacagagatattttaatatacttgctttcttaaaaaacaaaaaaactactgtcagtattaatactgagccagactggcatctacagatttcagatctatcattttattgattcttaagcttgtattaaaaactaggcaatatcatcatggatacataggagaagacacatttacaatcattcattgggccttttatctgtctatccatccatcatcatttgaaggcctaatatatgccaagtacctgcccgggcggccgctctagaactagtggatcccccgggctgcaggaattcgatatc

SEQ ID NO: 7968 - DNA, 544 bp, Homo sapiens
  misc_feature 2, 3, 8, 493, 533, 542: n = A,T,C or G
gnngattngccgaatacgactcctatagggcgaattggagctccccgcggtggcggccgcccgggcaggtacagtatccattagaagtgctttgtttgcatttaattgaatcaggaaatcttactgatgaggggcagcagtattgttgtagattagtggaaatggattcaaaaagtggtccaggcctcattggcttaggcattaaagcattacaagacaaaaagtatgaagatgctgttaggaacctaacagaagggttaaaggaaagccctgtctgcacaagtggatggtatcatctggcagaagcccaagtcaaaatgcatagacctaaagaagctgttctttcatgcagtcaaggtatttttgatactttttgggttgacatataagggtgaccaaccctatttgtttttatcttaaaggacaaagatagtgatttttaaaaaccaaaatgctatatttttggattttaaaatgctaaattttaaattcnatgagggtaaataaaaagtctgccttgcatgaaaaccttnggccggttnta

SEQ ID NO: 7969 - DNA, 546 bp, Homo sapiens
  misc_feature 2, 3, 5, 10, 11, 21, 495, 509: n = A,T,C or G
gnntnattcnncctatcactnctatagggcgaattggagctccccgcggtggcggccgaggtactgaaaacttaaaagttacaccgtgaatactgcactgtaaatcctgaatactataatgacccacccccacccttccacagccctggtgagggtcagaaaccattcatctgcctccagactttgctagtcctcagagacactgctgcgagggtagtgggcagtgggattagcctcccgcagagctctggcctcctccagagcttctctgtatcgggagggccaggcctgggggtctttcttaaagaccctggccaggaactccatgatttgcatcttggtgatttcgcggctggcccgggagccccaaaagaactcgtattcgggcggctccacgtatgggacgcgctggtacctgcccgggcggccgaggttttttttttttctttaagaaaggtttttattttattgatataaaattaatttatgggtttnaagggatacactgngggggtcttgcctactagctttatttttggaaaactt

SEQ ID NO: 7970 - DNA, 403 bp, Homo sapiens
  misc_feature 5, 388, 395: n = A,T,C or G
gagcnccccgtaataccgacctcactatagggcgaattggagctccaccgcggtggcggccgaggtacttggcatatattaggccttcaaatgatgatggatggatagacagataaaaggcccaatgaatgattgtaaatgtgtcttctcctatgtatccatgatgatattgcctagtttttaatacaagcttaagaatcaataaaatgatagatctgaaatctgtagatgccagtctggctcagtattaatactgacagtagttttttgttttttaagaaagcaagtatattaaaatatctctgttagaaaagattacaatttgaaaggatcattctacaatcttagaactaaaaagcaatttaaggcaaagaggtacctgcccggncggccgntctagaac

SEQ ID NO: 7971 - DNA, 493 bp, Homo sapiens
  misc_feature 1, 6, 8, 10, 22, 429, 430, 443, 447, 451: n = A,T,C or G
ngcccnancnctacttagggcnaattgggtaccgggccccccctcgaggtcgacggtatcgataagcttgatatcgaattcctgcagcccgggggatccactagttctagagcggccgcccgggcaggtactgcgccatctgggacaccttgtgtcccagctgggaggcttcagcccgggcagcattggccagcggctcaatgagatgggagatctcttggactgcagtgagcatctgagtgtgcaaggcctcttgagagattccctcacggggagcaagctgctggctgactgcagcgagggaagcctggtctaggtcccgtagacaactgttcagagctgcaatgggccgtttcacactccagctgccctggagccttgtccctcatggcttgtaattagcttcttgatgggagtctgaggacaagnnccttcggccgcanccgngggnggagctccagcttttggttcctttatggagggggttaattgt

SEQ ID NO: 7972 - DNA, 480 bp, Homo sapiens
  misc_feature 2, 12, 17, 21, 45, 466, 469, 470, 473, 475, 476, 477: n = A,T,C or G
gnaggtgatcantaacnactncttagggcgaattgggccctttanatgcatgctcgagcggccgccagtgtgatggatatctgcagaattcgcccttagcgtggtcgcggccgaggtactctggcgtgcaacctggaattggaacggaggtatttgtaggcaaaataccaagggatttatatgaggatgagttggtgcccctttttgagaaggccggacccatttgggatctacgtcttatgatggatccactgtccggtcagaatagagggtatgcatttatcaccttctgtggaaaggaagctgcacaggaagccgtgaaactgtgtgacagctatgaaattcgccctggtaaacaccttggagtgtgcatttctgtggcaaacaaccagactttttgttgggatccattcccgaaggaataaggacttaaaggaaaaacattttttgggaaaaaaaaaataantannaantnnnaac

SEQ ID NO: 7973 - DNA, 586 bp, Homo sapiens
  misc_feature 5, 582, 586: n = A,T,C or G
tgggnccgggccccccctcgaggtcgacggtatcgataagcttgatatcgaattcctgcagcccgggggatccactagttctagagcggccgcccgggcaggttgctgcagtgtaatgagaatttgccatcttcacctggatataactcctgtgatgaacacatggagcttgatgaccttcctgaacttcaggcagttcaaagtgatcctacccaatctggcatgtgaagggtcacaccagggaagctggagagggttccccttgagaaagctgcagagaatctatgttcctcaggtacctcggccgccaccgcggtggagctccaattcgccctatagtgagtcgtattacgcgcgctcactggccgtcgttttacaacgtcgtgactgggaaaaccctggcgttacccaacttaatcgccttgcagcacatccccctttcgccagctggcgtaatagcgaagaggcccgcaccgatcgcccttcccaacagttgcgcagcctgaatggcgaatgggacgcgccctgtagcggcgcattaagcgcggcgggtggtggtgggttaccccccagcgtgaccgntacn

SEQ ID NO: 7974 - DNA, 539 bp, Homo sapiens
  misc_feature 2, 3, 4, 11, 13: n = A,T,C or G
gnnngtcttgncnctacttagggcgaattggagctccccgcggtggcggccgcccgggcaggtacaaaaggagaaaaactatgtctaaggagggaagcacataatagaattctattattacaatagaatactataaatacaaaattggataaactttatcagaagcaggtgtttgtcaccattttatatgtgaaactcaggaagttcttgattttttaagagctgtattccttaatctggttacaggctataaaggagataatcatttacatgatcatattctcaaacagatggtcaccaaatggaatcaaaggactgatttgatgtagccggtagtatgataatttgtagttaaatgaaaatacagatagatccagaaaataagtaatttcccagtagccagttaataaattacagacctagaataagcaatttaacaagattagaaaagcaactctgatacaaaccgtgttgataacaagtacctcggccgctctagaactagtggatcccccgggctgccgaattcgatatcaagg

SEQ ID NO: 7975 - DNA, 680 bp, Homo sapiens
  misc_feature 2, 3, 4, 5, 6, 12, 18, 25, 26, 423, 468, 529, 537, 556, 565,574, 584, 592, 598, 628, 637, 655, 660, 662, 675: n = A,T,C or G
gnnnnngttganttttgnctccccnntcctatagggcgaattggagctccccgcggtggcggccgaggtacttggcatatattaggccttcaaatgatgatggatggatagacagataaaaggcccaatgaatgattgtaaatgtgtcttctcctatgtatccatgatgatattgcctagtttttaatacaagcttaagaatcaataaaatgatagatctgaaatctgtagatgccagtctggctcagtattaatactgacagtagtttttttgttttttaagaaagcaagtatattaaaatatctctgttagaaaagattacaatttgaaaggatcattctacaatcttagaactaaaaagcaatttaaggcaaagaggtcctgcccgggcggccccccgggcaggtactgaaacattttanactgcatgggggggtatatattttcatgttgaagggaagaggggnaatcagcaaagtcccttccacaaagcattaggctgccttgcaaagagccacggcagaaaancggacttnttctttgctcacgctcggngaaattctntggaaaccntggcagggtncttaacanggtgtnctctgactggcgcctggttcacccggaaangcattcctncatcaagtcatagaaggngggcntnccgttgttaacanaataa

SEQ ID NO: 7976 - DNA, 638 bp, Homo sapiens
  misc_feature 559, 574, 578, 581, 584, 590, 598, 608, 611, 617, 626, 628,631, 633, 634: n = A,T,C or G
gcttggtaccgagctcggatccactagtaacggccgccagtgtgctggaattcggctttcgagcggccgcccgggcaggtacataaattgcactgttgtcagagtcttcatctggatctacaggtgggcctagatcaagatctggtccttcatccatgggtcctgccaaccaggaaagatcatataaaatattattagtgcacgtcttgcaagctacaaaccttacaaacacacatagctatctactataccaccatttgatggggattcattaaactcaaaatgacccgcactgctaaaatggagcagtgtctctttaacatttgtgaaaggtttgctagggtttgcttttttcctttgctggtttgcttctaaaccattaaccaaatacactctcaatgcttatgtgccaaatcagtgttaaatttaagtcaaaatttttcctctaaataaaccaaatttaaaaatttattctcccccatattacagaagcagttactcaatacttcaagttaccctttgttttgtaaccataggttaacccttattaacccctaanacaatgccggcagtncctnggncgnaccacnctaagccnaattctgcanatntccatnacactggcngncgntnnagca

SEQ ID NO: 7977 - DNA, 545 bp, Homo sapiens
  misc_feature 2, 3, 9, 14, 18: n = A,T,C or G
gnntttgcnaatcnactnctatagggcgaattggagctccccgcggtggcggccgcccgggcaggtacacatgcatgcatacacacccatacaaacatctgtgtgagggcagttctggagatgagcagagagagaccggaataaactcaatcttttctttcccaagctcctagccaacactatccttgggagaaagaaatttgcagaaactgctaagaccaagtgtggagatgtcaagctagttcacactctgaggctcagaatatgtaggacatgcacaattgtgcagtcctttgggattggaagtgaaacagtctgtgatcccctaccttctagggaactaggacctaggaagaggtaaagattatcaggtatgcaaagcgccccaattcttctgctgccatggggggattttaccccaactccagggttcgaggccaatctgagaatggcttaggattgcaatgtcaaggtattatatcagccccttgcttgaggttgaggtcataatatccctctaggacttacctgttcccccagatctt

SEQ ID NO: 7978 - DNA, 601 bp, Homo sapiens
  misc_feature 24: n = A,T,C or G
gccccgcgtccgaaatgggaaggnaggcggtgttttgctgatctgttaaattcttagtgaagtttccttgatttccagtggctgctgttgtttgagtttggtttggagcaaaactgaggtagtcctaacatttctgggactgaatccaggcaagagaaagaagaaaaagaagaagaaaaagaggaggaaaaaggtagggagaaataaagggaggagagaagcacagtgaaagaaaaaaaaagtcccttttcgacatcacattcctgtgttttccctcagcctggaaaacatattaatcccagtgcttttacgcccggaaacaaagagactaagccagactatgggggaaagggagataagaaggatcctggaactttaaagagggaaagagtgagattcagaaatcgccaggactggactttaagggacgtcctgtgtcagcacaagggactggcacacacagacacacgagaccgaggagaaactgcagacaaatggagatacaaagacttagaaggacagctcctttcacctcatcctacttgtccagaaggtaaaaagacacagccagaaagaaaaggcatcggctcagctctcagat

SEQ ID NO: 7979 - DNA, 542 bp, Homo sapiens
  misc_feature 2, 3, 4, 6, 9, 10, 539, 542: n = A,T,C or G
gnnntntcnntcactcctatagggcgaattggagctccccgcggtggcggccgcccgggcaggtacatttccatgggccctgttcccattgatgtatactgcttccttactaacagtgagggatgactttcatcagtcttttatcacctgaacagtcttccggccataatgatagtaactataagctgatgcagctgtggtgaaagctgtaaaacaccttttatggaagaaaagaaataaaatgtagttgtcaagtctaaaaaatagtagcaacgggaatcataatgaatacatgcaatgaatttaaaatgtaaaaatgaatttaaaaagtaaaaagggctctgtggtgtaatttttcttaactacaagagtctaaatacactgcttttctttaagagttcattttaattagtaaccgtcaaacaaaattattctagataatgagccctacaaattactactactagcaactgtcattttttactcgggcatctcttaagggtcttacattctcattttattcttacaacgaactcatnctn

SEQ ID NO: 7980 - DNA, 603 bp, Homo sapiens
  misc_feature 420, 440, 444, 461, 462, 479, 489, 493, 494, 496, 501, 504,516, 520, 523, 526, 528, 529, 533, 535, 536, 537, 538, 540,543, 545, 548, 549, 554, 556, 559, 565, 568, 570, 572, 574,575, 578, 579, 583, 585, 587, 588, 590, 592, 595, 597: n = A,T,C or G
  misc_feature 598, 600, 602, 603: n = A,T,C or G
ggagctccaccgcggtggcggccgcccgggcaggtaccgcatcagcaaaagtgcctggctgaaggacactgttgacccaaaactggtgaccctcaaccaccgcattgctgccctcacaggccttgatgtccggcctccctatgcagagtatctgcaggtggtgaactatggcatcggaggacactatgagcctcactttgaccatgctacgtcaccaagcagccccctctacagaatgaagtcaggaaaccgagttgcaacatttatgatctatctgagctcggtggaagctggaggagccacagccttcatctatgccaacctcagcgtgcctgtggttaggaatgcagcactgttttggtggaacctgcacaggagtggtgaaggggacagtgacacacttgatgctggctgaactgncctggtgggagataagtggntggnctacaagtggttacatnntttggacaggaatttcnttatccctgnaagnncngcccnatncactgtactganggtntanagnannttgngnnnncnatntntanntcaantnctnttttcnatnancngnnttnntagntnannancntcngnncncnn

SEQ ID NO: 7981 - DNA, 620 bp, Homo sapiens
  misc_feature 613, 620: n = A,T,C or G
cccgcgtccgcataaaatgaaatgtccagtatggaaaacatagggtaccaaagtgtggaccaggagtacaaattcagtcccaatactcaatacgtattatagatgactatgagtgcaaaccttaggatgtgattttctgaataattgttctttgtaggatttggttacattatttaaaatgaaaaagatctagttttagtgtgagctcagtaatgttaattggttaagttcattgtgaatcttgagttttagataagtagttatttttttcaatatcacttctgtttttagtgatattatatcaagaaacaacgtattcaagagccatggctgacagtgccagatatacttagggataaacatcaaaatgcaattatagttgctataacgttagatactcggaatcaaaatttatttgcaagctgacttgataaactaaatgaaccaataaaatttgtagaaatgctatcctgaaataattatatacatgaagacaatgttgactaatgaattaagatccattatatactagttaatgctactagtctcagtacctgtttttagccatctgtactggcccaatacacctcattccacatttctattttccccnggattcn

SEQ ID NO: 7982 - DNA, 625 bp, Homo sapiens
  misc_feature 4, 29, 564, 625: n = A,T,C or G
tcgncccacgcgtccgtaaaaatgtaagnattttgaatccacttaatttcttgaaaatagtacaagtcagtgtaatagagaagcattcatatattcaacactgtaagacaaaacagcagagaccttggatttgataattgatctgatatcctggacagtattcatatgtacagtgataggtatctttctttggagttttttttttgtgcatatgtgtatagttttatgggttctgagttggtgaccagtaagttgcatgtagtgctggcacttacttaataactattcatgatattgttaataacttgttataggattgtattcccaattacagtctctaagattgtaattgatattatctgagaggtagtgtgacaactttcttttgttgttacattaagccgaaaacataatactaatagacaactaacagtttgcttatcaggcacatcaactaaggcacctccccccatgctaagtttctcctggatatatggaagttgattgtttcccagtttaaaaacttgaactaatatctcctaagaaaatctgagtccatattgnttttattttacttagctagaatctcatagcatgttaaagtcatatccttatccccactaan

SEQ ID NO: 7983 - DNA, 660 bp, Homo sapiens
  misc_feature 16, 17, 58, 568, 578, 583, 608, 610, 620, 633, 642, 658: n = A,T,C or G
tattggcctctccttnngtggtggtttttttggtaggtcatagttccttatacacagnacacctgcatcatcgaaggtctttttttcctaaaaaaaaaaaatgggattttagttcttattctgtgataactatcctcctcatataatactattctttttgacaccatttgaaggaaccaatatttggaccttattttgaggttgtctgtctcgaagaaaaagaaaataaaatgtataggcagggttccttcaattggcattttccccagaattgtgagccaaagcctatagtaattgcagacagcaaatgattccggatctctaaaaggctctctcagatgaaaagggagtaaaggaaaaaagaggtcaaccactgtttctgataatgtacttgagtttcattgttcttttagtttgtattcttataaaaaatgtttacactctgcagattgattttttttttttagtactgtggctttcttttcctattttatgaaaaaaatgataatctttttgtaaaattgtctgtgaaatataaacattaatatataaagaaaaaccttgaagngctgtatagngaagnataaattaatggtttattgatttgngnagaatttaanactattatataantatcttggnggatctattttatgcntg

SEQ ID NO: 7984 - DNA, 666 bp, Homo sapiens
  misc_feature 4, 612, 622, 641, 663: n = A,T,C or G
actnctatagggcgaattggagctccccgcggtggcggccgaggtacagaaataaaaattagcaaacaattattctagggatattttcagattttacttcatttcttgaaatgcgtgtgccatatgcaattgcatttcttgtgccaagaaactaatagaacttatttcactttacctttttttaaaatgtgaatttagttattatagttcaattttatggccttacagatggcttttattttgtttgcagctgacactgcagttcctttcatgcaaaataccataaactgtttgatgaaaatcatgcccctaatggaaactctctagtttttccatataactatcctactgtacctgcccgggcggccgcttcgaccaacatgtggtgagcattccacgggcgcatgaagtctgggtgctgtgctcgagtctctgaatattttgataggaagcgacaagaaaattcaaactgctctttgctgactactgggaaagtgaaaagatgctcaagtttaccattcaaagaaaccataggcatttcaaaaacctctttctaaactttggtttaaaaaaaatcagttcacccccaacagaaatataaatcgaggctgnagccagctgntgggcatgtccttggcagncttttgggcaaaataaggcatnttt

SEQ ID NO: 7985 - DNA, 644 bp, Homo sapiens
  misc_feature 487, 573, 619, 637: n = A,T,C or G
gtatacgactcctatagggcgaattggagctccccgcggtggcggccgaggtactatgaaaagttgattgtagcacaactgttcaatcagtaaaaggtcttcggcaaattccctttagagtatactttctataaactacatgttccacaaaaaggtcaattatatatacaattgatttgttttacttaatcttatttgctcagatcttgcaaatgcaatgagaatattaagcctgaggctagttctcagtgtataggtttaacaaattaaggctcattttcccaaatcaaaatagtttttagttttccttttaaattatgaattacattcatagtacaagaagaaatgcttaaggaagaatttcaaaagaaatctgagcagttaaataaagagattaatcaactgaaagaaaaaattgaaagcactaaaaatgaacagttaaggctcttaaagatccttgacatggctagcaacataattgattggncactctacctggggcttccaagctacttggagtagggacaaaatatcttggctcacgtatttaagagcctgaatattccaggggcntcgctttgacacccaggctggaggtgcagtagcacaaaacatgggncattggagcctcaacctncccggct

SEQ ID NO: 7986 - DNA, 409 bp, Homo sapiens
gagcgcgcgtaatacgactcactatagggcgaattggagctccaccgcggtggcggccgaggtacttggcatatattaggccttcaaatgatgatggatggatagacagataaaaggcccaatgaatgattgtaaatgtgtcttctcctatgtatccatgatgatattgcctagtttttaatacaagcttaagaatcaataaaatgatagatctgaaatctgtagatgccagtctggctcagtattaatactgacagtagtttttttgttttttaagaaagcaagtatattaaaatatctctgttagaaaagattacaatttgaaaggatcattctacaatcttagaactaaaaagcaatttaaggcaaagaggtacctgcccgggcggccgctctagaactagtggat

SEQ ID NO: 7987 - DNA, 444 bp, Homo sapiens
gaattgaatacgactcactatagggcgaattgggccctctagatgcatgctcgagcggccgccagtgtgatggatatctgcagaattcggcttagcgtggtcgcggccgaggtacaaaaaagaaaaacaaaagattgactattgtggtctgcatgacataaacaaacaaatggtgatatcaaagcaacgtataccccagtccagtgtgtgttgccataatttgcaattcagcttaacagtgcacccaatctatatttgcattttgatattatttaagctccatgtacctgcccgggcggccgctcgaagccgaattccagcacactggcggccgttactagtggatccgagctcggtaccaagcttggcgtaatcatggtcatagctgtttcctgtgtgaaattgttatccgctcacaattccacacaacatacgagccggaag

SEQ ID NO: 7988 - DNA, 903 bp, Homo sapiens
  misc_feature 2, 5, 6, 8, 113, 589, 725, 759, 772, 776, 824, 837, 841,843, 850, 890, 896, 901: n = A,T,C or G
gnagnngngttgggcccgcgtaatacgactcactatagggcgaattggagctccaccgcggtggcggccgaggtacaatccggcctccaccctcagctggaatctgataaagncccaaaatggggacgttttcaacaactgctgtttcctgctttaaaacctccaatcctgaaacaacacaacaaaaaacaacagccatgagagtttccactgagcagtgagttatttcctgatatttcatccacgtgacaaataaaccacatttacaaaatctaatattcaattaaaacattgcaaatttttagaatagaaaagccttaagaataagccttttagaatagaaatgtcttaagtgccattgatttgttttagcaaaattcactttgtgtgtatttccgtatctatccactttcatttttactggccatggcagtacctgcccgggcggccgctctagaactagtggatcccccgggctgcaggaattcgatatcaagcttatcgataccgtcgacctcgagggggggcccggtacccagcttttgttccctttagtgagggttaattgcgcgcttggcgtaatcatggncatagctggttcctgtggtgaaaattggttatcccgctcacaatttccccacaacataccgagccggggagcataaaagtggtaaaagccttgggggtgccctaaatggagtggagcttaactcacatttaattgnggttggcgctcaacttgccccgctttccaagtcngggaaaaccctgntcgnggcccagcttggcatttaatggaatccggcccaacgccgccgggggangagggcgggtttngggnanttggggngccttttttccctttccttgattaaattggacctccttgngctttngggtngt

SEQ ID NO: 7989 - DNA, 719 bp, Homo sapiens
  misc_feature 2, 3, 4, 5, 6, 10, 12, 295, 309, 313, 317, 319, 322, 328,333, 340, 352, 356, 374, 379, 384, 385, 403, 418, 424, 428,431, 432, 441, 453, 461, 462, 463, 464, 465, 466, 468, 471,472, 478, 485, 486, 487, 493, 494, 501, 502, 503, 504: n = A,T,C or G
  misc_feature 506, 512, 515, 517, 518, 519, 520, 521, 522, 524, 536, 537,543, 547, 548, 549, 550, 552, 553, 555, 560, 561, 562, 563,564, 565, 567, 568, 571, 572, 573, 574, 575, 576, 578, 579,581, 582, 583, 584, 585, 586, 588, 589, 590, 593, 595: n = A,T,C or G
  misc_feature 601, 607, 609, 610, 613, 614, 615, 617, 618, 619, 620, 621,622, 623, 624, 625, 626, 627, 628, 629, 631, 632, 633, 634,635, 636, 637, 638, 640, 641, 642, 643, 644, 645, 646, 647,648, 649, 650, 651, 652, 653, 654, 655, 658, 659, 660: n = A,T,C or G
  misc_feature 662, 663, 664, 665, 666, 667, 668, 669, 670, 671, 672, 673,674, 675, 676, 679, 680, 681, 682, 683, 684, 685, 686, 687,688, 689, 690, 691, 692, 693, 694, 695, 696, 701, 703, 704,705, 706, 707, 708, 711, 715, 719: n = A,T,C or G
gnnnnngttntntttggcgtctcgactactataggggcgaattggagctccccgcggtggcggccgcccgggcaggtacgatatacgaagactctgagctgtttgcctccgatggtttccagtatttgcccgttgtaaagctcattaaggccaacttttactttcaatatgtgattctgcagaattaatttaaggaggcgctgatccatgctgagagtatcatcagaaaatgcattattcacaggtgccagcaaagtgtattctccatctggcctcagagcagatgccaagcctnattgggcccaaaancccngaangnggnttgctnttttncaacccnctcaataacttntttngggggaatcaagaattangaccngctcnntcaaatggggtgacaccntttttttttttcttngccgcnctanaannaaaaaaaancccccccccccncggggggnnnnnntnaannttattnttttttnnncccttnnggggggnnnncngggggnccngnnnnnngngccttttttttnngttttnatannnngnntnggggnnnnnncnnggnnnnnnanntnnnnnncnnnggngnaaattntttttncnnttnnnannnnnnnnnnnnntnnnnnnnngnnnnnnnnnnnnnnnnaannncnnnnnnnnnnnnnnnggnnnnnnnnnnnnnnnnnnggggngnnnnnnctncccntttn

SEQ ID NO: 7990 - DNA, 630 bp, Homo sapiens
  misc_feature 20, 27, 30, 37, 38, 489, 511, 514, 516, 517, 524, 525, 526,527, 534, 537, 541, 544, 546, 547, 548, 549, 552, 553, 554,555, 556, 557, 559, 560, 561, 562, 563, 564, 565, 566, 567,568, 569, 570, 571, 572, 576, 577, 578, 579, 580, 581: n = A,T,C or G
  misc_feature 582, 583, 584, 585, 586, 587, 588, 589, 590, 591, 592, 593,594, 595, 596, 597, 598, 599, 600, 601, 602, 603, 604, 605,606, 607, 608, 609, 610, 611, 612, 613, 616, 617, 618, 619,620, 621, 622, 623, 624, 625, 626, 627, 628, 629, 630: n = A,T,C or G
gccagcgcgcattaaccctncactaanggnaacaaannctgggtaccgggccccccctcgggtcgacggtatcgataagcttgatatcgaattcctgcagcccgggggatccactagttctagagcggccgaggtactgtataggccatattcctttacgtgggacattaatgaaaagctgccttttccaaactgaatgcgcctattaataaaaaaatacacctgaccatctaatgctgaagtcatccgccaagatggtacctgcccgggcggccgaggtacttttcaattttcaatattatacaaggcatatattattcaaccttttcctgaacaagataatactaatatactgcttacggacagttaagtaatatatttcacactatttggtgactttttttttaacctatgagacttactgaaatcagtacctgcccgggcggccgccaccgcggtggagctccaattcgccctatagtgagtcgnattacgcgcgctcactggccgncgntnnacaacgnnnngactggnaanaccntgncnnnnccnnnnnnannnnnnnnnnnnnncatnnnnnnnnnnnnnnnnnnnnnnnnnnnnnnnnnnnnnnccnnnnnnnnnnnnnnn

SEQ ID NO: 7991 - DNA, 621 bp, Homo sapiens
  misc_feature 365, 567, 568, 573, 574, 579, 595, 596, 607, 608, 610, 611,613, 617: n = A,T,C or G
tactaagggaacaaaagctgggtaccgggccccccctcgaggtcgacggtatcgataagcttgatatcgaattcctgcagcccgggggatccactagttctagagcggccgcccgggcaggtacaggaaactactaatcttgccatcttgctttaaggtgttatggtggcacagttactgctcgcctgttaaatttcaaatgtcctgtttgatactactgtagaacactatttttaatacagaaaaagctccctataatgcacttcagagaaattaaaaatcacagagtatttattaccaatgctgcaggtccgggctgatgatgccaatgtggttcgtgaccgtgacctcgaggtggacaccanccctcaagagcctgagccagcagatcgagaacattcggagcccagagggcagccgcaagaaccccgcccgcacctgccgtgacctcaagatgtgccactctgactggaagagtggagagtaccttggctttaggttttcattcgcacggaacaccttttggcatgcttaacttcctgggaacaccttcacctgcattgggtnnctttnnctttnttctttcttttttttnntttttttgagnngnngnttgntttt

SEQ ID NO: 7992 - DNA, 608 bp, Homo sapiens
  misc_feature 1: n = A,T,C or G
nccccgcgtccgctttgtgtggattgaggtgttcagaaataccaaccataaaaatgtaatctagttggcaaaggtgtgcgctaaaacacggaaccgaacatgcattgatttggataacttttgagggtttttgtcaaatagcatgtgaagagttacatttttcttaaaagattggtggtcccaatgtcagagttcttggaacagataactgaatgatagattttttttttttaaagataaaactttacaacctgcacatttgttatgcatactaaatggtgtgttaaaattagggtttctttgcctctctacactacactaatgtgcctaaaggtggttgtttcatatttataatgctaattatcatacctacctactttaaattttaggtagaaaattatctgatttaaatacaaacatatttttctcacattgagtaatatgcataatgtagttccaaatgtatttcattactatagtcacaatatccaactaaaaattacgctatctagaattgtaccaaccaaaatctcgtattggcagatcttgacaggctggacctgcaagatgtggcttgaattttaaccatttattacataatctctagg

SEQ ID NO: 7993 - DNA, 385 bp, Homo sapiens
gagcgcgcgtaataccgacctcactatagggcgaattggagctccaccgcggtggcggccgaggtacagcatacagggcagatgtcagagattatgatcacagggtgctgctcagatttccccaaagagtgaaaaaccaagggacatcagatttcttacccagccgaccaagatattcctgggaatggcacagttgtcatcaacattaccacagtatggatgagtttagccactatgacctgcttgatgccaacacccagaggagagtggctgaaggccacaaagcaagtttctgtcttgaagacacatcctgtgactatggctaccacaggcgatttgcatgtacctgcccgggcggccgctctagaactagtggatcccccgg

SEQ ID NO: 7994 - DNA, 497 bp, Homo sapiens
  misc_feature 4, 25, 36, 37, 92, 478: n = A,T,C or G
ttcntttcaatcctcttatagggcnaattggagctnnccgcggtggcggccgaggtacgctcaaagccgaagccacagctcctcctgccgcntttctttcctgcttgcgaattccaagctgttaaataagatgtgcaaagggcttgcaggtctgccggcttcttgcttgaggagtgcaaaagatatgaaacatcggctaggtttcctgctgcaaaaatctgattcctgtgaacacaattcttcccacaacaagaaggacaaagtggttatttgccagagagtgagccaagaggaagtcaagaaatgggctgaatcactggaaaacctgattagtcatgaatgtgggctggcagctttcaaagctttcttgaagtctgaatatagtgaggagaatattgacttctggatcagctgtgaagagtacctgcccgggcggccgctctagaactagtgggatcccccgggctgcaggaattcnatatcaagcttatcgatcc

SEQ ID NO: 7995 - DNA, 654 bp, Homo sapiens
  misc_feature 9, 604, 641: n = A,T,C or G
tctcgggcnattggagctccccgcggtggcggccgaggtacatcgatgttgatcttcagtttatctccccgcgacttgtccacgtagagctcaggatgcacctccgtggtgaggtaatactgcacctgcccgggcggccgaggtacatgcctagacctgggctccggccagcgcccaacagcgtggatgtcgatgacttcatcaatacgagaatacaggaggcagacaatgaccccacggctcctccttatgactccattcaaatctacggttatgaaggcaggggctcagtggccgggtccctgagctccctagagtcggccaccacagattcagacttggactatgattatctacagaactggggacctcgttttaagaaactagcagatttgtatggttccaaagacacttttgatgacgattcttaacaataacgatacaaatttggccttaagaactgtgtctggcgttctcaagaatctagaagatgtgtaaacaggtatttttttaaatcaaggaaaggctcatttaaaacaggcaaagttttacagagaggatacatttaataaaactgcgaggacatcaaagtggtaaatactgngaaataccttttctcacaaaaaggcaaatattgaagntggttatcaactt

SEQ ID NO: 7996 - DNA, 548 bp, Homo sapiens
  misc_feature 2, 3, 7, 9, 12, 498: n = A,T,C or G
gnngcgncnctncttagggcgaattggagctccccgcggtggcggccgaggtacatgtattgccatttctctgctatatagtaatatttcttgacaccaatggtaatgtgtttgtttctttctcagcaccagatgtgtccatatgtatttaaacagtaggagcattgtttctaaattcatctatgctatgacatatataaacccattattattatgtttcactaaagttccagcactttagaaaagtttcagttcaaagtcattttggctcattcatttagataatactgaccattttgcactacaatttcaaaaggaacatgagaaatttggatttctttgaaagagtcaaatatgtaattacagaattgaaacactgtgttaattcacaaaggggatgtaaataataaacattaaaaatttcccaagtaatgatgacttaagcgttcaaaatccagttatgtgctttggtattgaaaacagtccaaacaaaaatcntttggtggtttctggtctctttttcaaaatacataaatcctcctggaggt

SEQ ID NO: 7997 - DNA, 648 bp, Homo sapiens
  misc_feature 5, 585, 600, 604, 605, 611, 620, 631, 634, 635: n = A,T,C or G
tactntagggcgaattggagctccaccgcggtggcggccgcccgggcaggtactagaaattgcactgtcctagaaattcctccatcccatgaagccatttccatcatgaaacctttgacacacttgaacacaagttccgctctccttaagcaccagggtatagtcatttcctctgacatatcatgtacttaagcactgcagatgctccagtaatatgcccataagttcctttccaatttcaattactgggaaaatatacatatggacaatagatggatgccacaataaaaggctggcagcctaaccctcacatgaatttttccctacctctatttagggtgacagtggagggcctctggtttgctttgagaaggacaaatacattttacaaggagtcacttcttggggtcttggctgtgcacgccccaataagcctggtgtctatgttcgtgtttcaaggtttgttacttggattgagggagtgatgagaaataattaattggacgggagacagagtgacgcactgactcacctagaggctggaacgtgggtaggggatttagcatgctggaaataactggcagnaatcaaacgaagacnctgnncccagntaccagctncgccaaacctnggnnttttttgggttat

SEQ ID NO: 7998 - DNA, 648 bp, Homo sapiens
  misc_feature 4, 549, 585, 598, 633: n = A,T,C or G
actnctatagggcgaattggagctccccgcggtggcggccgcccgggcaggtactgacaggagattggcttttacactaaaaaagacagaaaatggactaaataggaacataatttcagagtttatgagtcagtttacaatatgccatattagcgatctcatgatgattcagaccacagtctgggttaaagatgtcttgacctctgaggctagcataacatatatgagaatacaacttgcctatttccagaaaatctgtatatttttatagaataactttatttacaatttctatcatccaattactcactaggcattatttgtagtacctcggccgcccgggcaggtactcatggaaagtattaaagatctttaaaaaaatcgaatgctgtcatgtcaaagtgaggcatgaaaagtattattaatgtggctccatcgatttgggggttccaatctgaggagggctttttatttaatggttttaatgaatcaaaatatcttcttagaatgtctctgaaaatggcatctcattaccttactgggaactgnctattgagcactcttctccatcattaagtaatgctnaggatctttaagnggcatcttaatttgatacttggcataagataattnggcaattaaaatcag

SEQ ID NO: 7999 - DNA, 633 bp, Homo sapiens
  misc_feature 3, 8, 505, 534, 537, 551, 560, 565, 572, 574, 588, 589, 590,591, 600, 601, 602, 603, 604, 623, 625, 629: n = A,T,C or G
gcncaatnaccctcactaaagggaacaaaagctgggtaccgggccccccctcgaggtcgacggtatcgataagcttgatatcgaattcctgcagcccgggggatccactagttctagagcggccgaggtaccagtgaaaacgctggttacccgcatcaagacgaagagaccccgtggagctttactataacttcgtattgaaaattggtttagcatgtgtaggataggtgggagactttgaagctgggacgctagttctagtggagtcaaccttgaaataccacccttgctaaattgattttctaacccgttccccttatctgggaaggagacagtgcgtggtgggtagtttgactgggggcggtcgcctcctaaagagtaacggaggcgttcaaagctacactcaatatggtcactcctcctcagccacacctcctgtctttgggggaatttggttacttggagctctgtgggtgctatatgaatcctagagacagcaaacttntgctgtacctgcccgggcggccgcaccgnggnggagctccaattcnccctatagngagtngattacncncgctcactggccgnnnntttacaacnnnnngactgggaaaaccctggcntncccnacta

SEQ ID NO: 8000 - DNA, 723 bp, Homo sapiens
  misc_feature 2, 3, 4, 5, 6, 7, 8, 9, 10, 11, 12, 16, 19, 22, 29, 42, 44,682, 695, 719, 723: n = A,T,C or G
gnnnnnnnnnnnagcnctnagnctaacgntacttcatctagnangccctcggtttttatttcgtttttgttttgatccagtgctctcccatctaacaactaaacaggagccatttcaaggcgggagatattttaaacacccaaaatgttgggtctgattttcaaacttttaaactcactactgatgattctcacgctaggcgaatttgtccaaacacatagtgtgtgtgttttgtatacactgtatgaccccaccccaaatctttgtattgtccacattctccaacaataaagcacagagtggatttaattaagcacacaaatgctaaggcagaattttgagggtgggagagaagaaaagggaaagaagctgaaaatgtaaaaccacaccagggaggaaaaatgacattcagaaccagcaaacactgaatttctcttgttgttttaactctgccacaagaatgcaatttcgttaacggagatgacttaagttggcagcagtaatcttcttttaggagcttgtaccacagtcttgcacataagtgcagatttggctcaagtaaagagaatttctcaacactaacttcactgggataatcagcagcgtactaccctaaaagcatatcactagcccaagagggaaatatctggtcttcttactgggcctatattaaagactagtncaaatgtggtggncttccactttcattggaaatgccntatn

SEQ ID NO: 8001 - DNA, 459 bp, Homo sapiens
  misc_feature 94: n = A,T,C or G
acactactatagggcgaattgggccctctagatgcatgctcgagcggccgccagtgtgatggatatctgcagaattcggctttcgagcggccgnccgggcaggtaccttgttaatgaactacaggaatgcacattgatataatgcacaatgtcttcacatgtctcaatcctcattcctcttcctttcatgcctccctaatgcctcagtatccaatataaaactacaaaaactactgttcttttcgtttgagtggtatttaattaaaacttcaattctatgttatttccacagtccagtaatttattttaaatttgagtaatttcaaattccacaaacaaaactgaagaacagcaatattttgtttgaatttctctcttctgtacctcggccgcgaccacgctaagccgaattccagcacactggcggccgttactagtggatccgagctcggtaccaag

SEQ ID NO: 8002 - DNA, 605 bp, Homo sapiens
  misc_feature 3, 29, 38, 39, 50: n = A,T,C or G
ccnccctttcgtccggttaccttccccanagcctccanntttgctcaagnaaaatgagctgatgtttttggaaacaagtgcgctcacaggggagaatgtagaagaggcttttgtacagtgtgcaagaaaaatacttaacaaaatcgaatcaggtgagctggacccagaaagaatgggctcaggtattcagtacggagatgctgccttgagacagctgaggtcaccgcggcgcgcacaggccccgaacgctcaggagtgtggttgttaggagagcacacaggtgttcatacagtggcatttgggacacaatcgttggaacctgaagaatctgaagttttttttaccaccatctttttctactctgtaaggaagtagatctttatggggaaaagagaatttggggtgttctgcaagccagtcaaagtggcacagcaaatcatataaatcgaattaaatggacaacaccgttagatgtgtatgtaaaaattttctgtttcatatttttcctttcactttcggtttaaaacatgctatatgtactgtatgtcctgtagcccagtgcggctccacagcatggaatctgatgtatgatatgatagaatgtg

SEQ ID NO: 8003 - DNA, 639 bp, Homo sapiens
  misc_feature 327, 399, 451, 462, 466, 485, 549, 554, 611, 614, 620, 639: n = A,T,C or G
tcactatagggcgaattggagctccaccgcggtggcggccgcccgggcaggtctttttttttttttttttttttttttggcgaatacagataaatttattagttaaatactgattttccagccatttcaccttaagacaatgttaacaggtttgtgggttagggagggtatacgagggggcctttggaagaaaacaatgtaaatgatgattaaaacagaatcttggttcaaaggtattctctgctatagccagtaggattttggagtgaggggtctgggcgtgtggggaggcgtattaatgccacagtcagctacagctctgctganaaagaggaaggagtctccttgagctccagcatcaggggcagaaacagcaatgtgcagaggagaacgcggcanatcccggagcagctcaaagtcggaggctccctccaggcccccctgccgtgtnttagcagtcgncttntttccaggaattctgttgngttgggtttgtttgcttcgaattcgtgttgcagaatctctggctttttgcctcctggacaaaanacttntgccggggcgaggctgcaggtcctgagggactctggctgccatctgaccaaggctangangagcanacagacagcaggtgggccn

SEQ ID NO: 8004 - DNA, 531 bp, Homo sapiens
  misc_feature 7: n = A,T,C or G
gtgcccnaaacactacttagggcgaattggagctccccgcggtggcggccgcccgggcaggtacggtggtcttgctgagggtggcctcccggacgcgtcacgcagacctctcttgggatggaatgtctctgctggttgagctcatcacgtcagggctgcccacgtccccagttagcttcttcttcacccattggatacttgctgccaatttctgtaacacactccacccatctgattggtcactcaacaaatgacaacacgaaggaatgtcacagggccgctgagctgaaaacacagtgatttctttccttcaccttgttcttcttcaagggaggaagccagccttcacggttgctctggagccaggattaaacagccccttctgcttcctgcgggttccaatccagagagatatgaggcccaaatgggccttttcttgtctttgtccttgcctgcacgaggctgttaatttctggtcagttccttcatcaaaggtacctcggccgctctaaactaggtgggatcccccgg

SEQ ID NO: 8005 - DNA, 785 bp, Homo sapiens
  misc_feature 4, 9, 14, 16, 19, 21, 22, 24, 32, 43, 525, 586, 607, 618,625, 632, 637, 640, 645, 696, 762, 765, 769, 773: n = A,T,C or G
ggcnaaatnggccntntananncntgctcgancggccgccagngtgatggatatctgcagaattcgcccttagcgtggtcgcggccgaggtacatttccatgggccctgttcccattgatgtatactgcttccttactaacagtgagggatgactttcatcagtcttttatcacctgaacagtcttccggccataatgatagtaactataagctgatgcagctgtggtgaaagctgtaaaacaccttttatggaagaaaagaaataaaatgtagttgtcaagtctaaaaaatagtagcaacgggaatcataatgaatacatgcaatgaatttaaaatgtaaaaatgaatttaaaaagtaaaaagggctctgtggtgtaatttttcttaactacaagagtctaaatacactgcttttctttaagagttcattttaattagtaacgtcaaacaaaattattctagataatgagccctacaaattactactactagcaactgtcattttttactcgggcatcctctangtgtcttacattctcattttattcttacaacgaactcatccttcagaaggacttcatcctncaaaaaggactcattctcaanaaggactcatnctcaaanggacttnttcanaanggggnaatgggaaacccgggtaacttgctcagggcttatccaaaactatgttgggncctgactcgttttgaccttaaagccccatgctttttttaatggcccagctttttaaggtacctggnccnggcnggcncttccaaaaggg

SEQ ID NO: 8006 - DNA, 664 bp, Homo sapiens
  misc_feature 20, 45, 53, 131, 194, 218, 229, 339, 364, 377, 403, 406,431, 433, 468, 501, 511, 543, 555, 570, 572, 594, 607, 609,623, 630, 638, 654, 661, 662: n = A,T,C or G
tcactatagggcgaattggnagctccacacgcggtggcggccgangtacaagnttcttttttttttttttttttttttcctgttgctactaagaatgtttcaattcgcaacgtgtctcgctaatttgactntggattcatcaaaatgcaactgaggtttgctcagttaggttaccccattcggaaatctccgtntcatagtttatttccaactccacnaagcttatcgnaggtaatcgcgtccttcatcgactttcaacctgcccgggcggccgcccgggcaggtaccaaaaaccaacatgacacacaggaaaaaataaaagtgcaattttaatatagngaatgtgatacatgtataattcctnataacaaaatggncaaaacctttaaaagatccacaatanatntcttgaaaatcttagcaatgctgtntntattttgaggactaaatgatgaatttatattcaanttgttcaaatatattttcaaaactttcagagcncagatccatnggtaattttgcttttatttaaaaacccaaganaattcatttctntgtaaattagcaatnangaatttatctggtttttgggcnttcttcatctatntnaagggtttattgtngtgaccngaattatngtcctccctatagggnaaaaatnncg

SEQ ID NO: 8007 - DNA, 454 bp, Homo sapiens
  misc_feature 2, 3, 4, 6, 8, 16, 25, 27, 31: n = A,T,C or G
gnnntntnttctgatntcaatcccngnttgntaccgagctcggatccctagtaacggccgccagtgtgctggaattcggcttagcgtgggtcgcggccgaggtacctctttgccttaaattgctttttagttctaagattgtagaatgatcctttcaaattgtaatcttttctaacagagatattttaatatacttgctttcttaaaaaacaaaaaaactactgtcagtattaatactgagccagactggcatctacagatttcagatctatcattttattgattcttaagcttgtattaaaaactaggcaatatcatcatggatacataggagaagacacatttacaatcattcattgggccttttatctgtctatccatccatcatcatttgaaggcctaatatatgccaagtacctgcccgggcggccgctcgaagccgaattctgcagat

SEQ ID NO: 8008 - DNA, 629 bp, Homo sapiens
  misc_feature 4, 6, 52, 397, 411, 499, 515, 530, 534, 536, 538, 558, 574,586, 589, 592, 617, 622, 627: n = A,T,C or G
ggcntngtccgcgccggttggttccatgaaggatgggaagaaattaaaatangtcttcaaacttcttccttattatatttggttgctttggaaaagattggtcctatcctcaatctaatttattcactattaatattttaaaaacattcctgagatacttaaaaagacccacttagcgattatagttgctcaatgaaacaagaatttatttatgcatagatttttctctgtatcttaccaaaatccactttacttagataacactaaattgttcttaaagactactcatttcccaataatcctttatgatttcaaaatttctagtggctcagaagtgaattttattttatttgtctttcacttgaataagtgagaacccagaaattaataatgttgnttattgcttactgncaggactatttcaaagactaagaagagtttcttctaacccctccctctcaaaggaatcctaaattattagttgttagataagttttgnatgctaagatattcanggttataggttatgnatgngngnatatatataaaaatatatgnattataaatattatgntcaggttggagnctngcncaactccttatgtggattagagagnaaganatatngg

SEQ ID NO: 8009 - DNA, 638 bp, Homo sapiens
  misc_feature 2, 3, 4, 5, 6, 8, 12, 14, 15, 29, 571, 586, 589: n = A,T,C or G
gnnnnnanggancnntcctatccgattgngccctctagatgcatgctcgagcggccgccagtgtgatggatatctgcagaattcggcttcgagcggccgcccgggcaggtacccctaagtgggaacctaccaggacattcaaagcaagagcagtaagttctgaatgttctgggacaacctgggtgatatgcatggatatgggctgtggaggctgagcattttaatgataacttagggaaacgaggcatggccatggtgtaaaactctcaaatcccaacccctaatccaaccttaaaatccgagtcttctaaagggctgttttaaccatgaaaggaccataagaaaggcaattcacagaaaatgaagccatgtggccaagaaatataagaaaaacagtaaaagcccttaatctcaatagcaatagagtggatgcaaatgaatataatgagttgccatgtcgttcttactggattggaaaagaaattagaatgtctaaataacatgtatcatccagggatgtggggaaatgggagctcttgtacctcggccgcgaccacgctaagccgaattncagcacactggcggncgntactagtggatccgagctcggtaccaagcttgcgtaatcatggtcatag

SEQ ID NO: 8010 - DNA, 606 bp, Homo sapiens
  misc_feature 1, 473, 487, 499, 502, 516, 530, 531, 537, 541, 553, 554,555, 564, 565, 566, 567, 568, 575, 586, 587, 588, 592, 594,599, 600, 601, 602, 603, 605, 606: n = A,T,C or G
nagcgcgcaattaaccctcactaaagggaacaaaagctgggtaccgggccccccctcgaggtcgacggtatcgataagcttgatatcgaattcctgcagcccgggggatccactagttctagagcggccgcccgggcaggtacttcccaaaccactgtcgacagcggtgaggtaaaaaccttcttggccctggctcacaaatggtgggatgaacaaggagtatatgcacctcttcattccatgaatgacctgagggtgccatttattagggacaatcttctgaaaacaattcctaatcaccagccaggaaaacctttgttggggatgaagattcttgacgttggctgtggtggtgggctgttaactgaacctctagggcggcttggggcttcagttattggaatcgaccctgtggatgagaacattaaaacagcacaatgccataaatcatttgatccagtcctggataaganaataaaagtacctnggccgccaccgnggnggagctccaattcnccctatatgagtcnnattacncccnctcactggccgnnntttacaacnnnnngactggnaaaccctggcnnnaccnanttaannnnntnn

SEQ ID NO: 8011 - DNA, 639 bp, Homo sapiens
  misc_feature 8, 208, 240, 247, 249, 255, 257, 265, 267, 274, 283, 294,327, 330, 336, 339, 407, 436, 438, 444, 451, 453, 454, 469,473, 477, 487, 497, 502, 503, 509, 521, 522, 524, 526, 553,569, 593, 595, 604, 610, 613, 621, 622, 623, 626, 630: n = A,T,C or G
  misc_feature 635: n = A,T,C or G
gcgcaatnaccctcactaaagggaacaaaagctgggtaccgggccccccctcgaggtcgacggtatcgataagcttgatatcgaattcctgcagcccgggggatccactagttctagagcggccgcccgggcaggtaccagcagaaacctggccaggctcccaggctcctcatctatggtgcatccaccagggccactggtatcccanccaggttcagtggcagtgggtctgggacaganttcactntnaccatnancagcctgnantctgaanattctggantttactactgncagcagtataataactggcccccgtaccttggncgncaccgnggnggagctccaatttcgccctatagtgagtcgtattaccccccctcacttggccggcgttttaaaacctngtgactgggaaaaccctgggcgtttcccnanttaaangcctttnannacattcccctttttncagntggnggtaaaaccnaaaaggcccnaaccnntggccnttccaaaaattnncnancctgaatgggaaatggaaccccccctntaccgggcattaaacncggggggtgggggggttcccccangngaccgttanatttgncangcccttannnccngttnttttntttt

SEQ ID NO: 8012 - DNA, 964 bp, Homo sapiens
  misc_feature 1, 4, 6, 12, 20, 29, 30, 31, 55, 62, 66, 77, 81, 85, 89,90, 104, 108, 110, 114, 128, 144, 145, 169, 179, 182, 184,185, 211, 227, 237, 238, 259, 267, 275, 287, 321, 331, 332,369, 394, 399, 413, 420, 428, 466, 467, 468, 471, 477: n = A,T,C or G
  misc_feature 488, 492, 500, 512, 526, 527, 543, 546, 554, 561, 562, 633,651, 657, 729, 756, 757, 758, 763, 766, 776, 782, 783, 784,790, 791, 805, 816, 820, 826, 833, 843, 870, 881, 898, 916,958: n = A,T,C or G
ncangngaaaancccccacnatagggctnnnggaaaccggccccccccccgaggncgacggnatcntttagcggganatcnaaancccnntgcccgggggattncacnancccnagagcggccgaggnacgacaggttatttcnnacttatgtcacccaggagagaagngggggagaanggngnnaaaaacacaaatagaccgggcgcggnggctcacgcctggaancccagcactnngggaggccgaggcgggcggancacgaagncaggaaancgagaccatccnggcaaacacggggaaaccccgctctactaaaaanacaaaaaaannaagccaggcatgggggcgggcgcctggaggcccagcnactaaggaggctgaggcaggagagnggcgngaacccgggaggcnggagctngcaaaccngcccgggcgggccgccacccgcgggggagccccagctnnnggncccctnaagggaggggnaaangcgcgccnggcggaaacaangggcaaaagccggnnccccgggggggaaaanggnaacccgcncacaaannccacacaacaaaccaagcccgggaagccaaaaaagggggaaaagccccgggggggccccaaaagagggganccaaacccacaataaaanggcggngcgccccaccgggccccctttccaaggcggggaaaacccgggcgggccagcccgcaataaaagaaaacgggnccaacgccccgggggagaaggccgggnnngccgnaanggggcgcccntccgcnnnccccgnncaaccggacccgcnggggccccggncggnccgggnggcggcnagcggggaanaacccaacccaaaagggcgggaaaacngggaaccacanaaacaaggggaaaaccncaggaaaaaacaaggggnccaaaaggccccaaaaggcccggaacccaaaaaaggcccggnggccgg

SEQ ID NO: 8013 - DNA, 629 bp, Homo sapiens
  misc_feature 2, 5, 12: n = A,T,C or G
tnctntagggcnaattggagctccccgcggtggcggccgcccgggcaggtactttgtaaagaggtgcaagaaaaccaaaaacataggcatccaaggtagaaggcgtatctccaaagaaaactgagatgttcccaatctgtttgatagaagatttaggcactccttggcatctctgtatatctgtgcttccacttctcggaggtggtagaggggaggctgtcctctggtcaggagaatcctattcagtgctcccttagacattcttccaggcaggatcaaactcaaaggaagaggaatttgtgaagcaaaccatggctttgtcacagtaaagtaattgtcactctcaacccagaatgtgtgaagcactgcagggagaagcttctcttcgaggagagcaatataagccaatgtatctgccccttgttttgctgagagttcataatcagcattatatttctgttttcttaaaaagtttagtatttttgctggctgagaaaccatgtcgtcttcagttgtcaaaattggtacctcggccgctctagaactagtggatcccccgggctgcaggaattcgatatcaagcttatcgataccgtcgacctcgagggggggcccggtacccagctttt

SEQ ID NO: 8014 - DNA, 613 bp, Homo sapiens
  misc_feature 294: n = A,T,C or G
cctcactaagggaacaaaagctgggtaccgggccccccctcgggtcgacggtatcgataagcttgatatcgaattcctgcagcccgggggatccactagttctagagcggccgggggatgcgaggctcggagcacccttgcccggctgtgattgctgccaggcactgttcatctcagcttttctgtccctttgctcccggcaagcgcttctgctgaaagttcatatctggagcctgatgtcttaacgaataaaggtcccatgctccacacaaaaaaaaaaaaaaaaaaaaaaangtacctcggccgccaccgcggtggagctccaattcgccctatagtgagtcgtattacgcgcgctcactggccgtcgttttacaacgtcgtgactgggaaaaccctggcgttacccaacttaatcgccttgcagcacatccccctttcgccagctggcgtaatagcgaagaggcccgcaccgatcgcccttcccaacagttgcgcagcctgaatggcgaatgggacgcgccctgtagcggcgcattaagcgcggcgggtgtggtggttacgcgcagcgtgaccgctacacttgccagcgccctagcgcccgcttctttcg

SEQ ID NO: 8015 - DNA, 624 bp, Homo sapiens
  misc_feature 78, 88, 453, 472, 520, 565, 568, 581, 587, 588, 594, 609,610, 617: n = A,T,C or G
actactatagggcgaattggagctccaccgcggtggcggccgaggtactttttttttttttttttttttttttttttnggttcttggnttctgagtccagtcccctttgcataaacgcccggcgtggctctctcagcgtccccgcaccttcatgcgcagcagattcttggacaactttgtctttctctcggccgctctagaactagtggatcccccgggctgcaggaattcgatatcaagcttatcgataccgtcgacctcgagggggggcccggtacccagcttttgttccctttagtgagggttaattgcgcgcttggcgtaatcatggtcatagctgtttcctgtgtgaaattgttatccgctcacaattccacacaacatacgagccgggagcataaagtgtaaaagcctggggtgcctaatgagtgagctaactcacattaattgcgntgcgctcactgcccgtttncagtccgggaaacctgtcgtgccagctgcattaatgaatcggccaacncgcggggagagggcgggtttgcgtatttgggcgctcttccgcttnctngcttacttgactngctggnnctcggncgttcggcttgcggnnaagcggnatcaact

SEQ ID NO: 8016 - DNA, 610 bp, Homo sapiens
  misc_feature 3, 8, 543, 571: n = A,T,C or G
ttngggcnattggagctccccgcggtggcggccgaggtactgggacattccaaatggctgcaaactaatcaggaatcgatcggattgtaaggacattgattggacgacatatacctgtgtgctaggatttcaagtatttggtgtctggccagaaggatctgatgggacagatatcaatgcactggtgcgatcccacaatagaaaggtgatagctgttgccgatgacttttgtaaagtccatctgtttcagtatccctgctccaaagcaaaggctcccagtcacaagtacctgcccgggcggccgctcgactggcgtttttccataggctccgcccccctgacgagcatcacaaaaatcgacgctcaagtcagaggtggcgaaacccgacaggactataaagataccaggcgtttccccctggaagctccctcgtgcgctctcctgttccgaccctgccgcttaccggatacctgtcccgcctttctcccttcgggaagcgtggcgctttctcatagctcacgctgtaggtatctcagttcggngtaggtcgttcgctccaagctgggctgngtgcacgaacccccccgttcagcccgaccgttggcctta

SEQ ID NO: 8017 - DNA, 634 bp, Homo sapiens
  misc_feature 491, 568: n = A,T,C or G
tatagggcgaattggagctccaccgcggtggcggccgagtacatttcctaagtatcacatgacttaacaggtgcaagctggcaggcatcggacttggtatccgtaagacctgttgcccctttgccttctgccatgattgtaagtttcccgaggcctccacagaagctgaacagatgccagtatcatgcttcctgtatagcctgtcgcctttgggcagctggacacctcacccacgcttcaggctggagccttcctcatctttattaggtgtcttagaggcaagtgccggaggtaacatcctcctctgcatttcctacactgacaaggagaatgctgtggctctacgcagtcatccttttacaacttttgccagggagcaaagtctgccacatcagtcgatgagtacctgcccgggcggccgctctagaactagtggatcccccgggctgcaggaattcgatatcaagcttatcgataccgtcgacctcganggggggcccggtacccagcttttgttccctttagtgagggttaattgcgcgcttggcgtaatcatggtcatagctgnttcctgtgtgaaaatggtatccgctcacaatttcacacaacatacgagcccgggagcataaagtgt

SEQ ID NO: 8018 - DNA, 637 bp, Homo sapiens
  misc_feature 5, 499, 513, 543, 557, 569, 570, 577, 579, 591, 592, 593,597, 600, 605, 610, 613, 614, 615, 619, 622, 624, 626, 628: n = A,T,C or G
tgatncgccagcgcgcaattaaccctcactaagggaacaaaagctgggtaccgggccccccctcgaggtcgacggtatcgataagcttgatatcgaattcctgcagcccgggggatccactagttctagagcggccgaggtactttggcctctctgggatagaagttattcagcaggcacacaacagaggcagttccagatttcaactgctcatcagatggcgggaagatgaagacagatggtgcagccacagttcgtttgatttccaccttggtccctcggccgccaccgcggtggagctccaattcgccctatagtgagtcgtattacgcgcgctcactggccgtcgttttacaacgtcgtgactgggaaaaccctggcgttacccaacttaatcgccttgcagcacatccccctttcgccagctggcgtaatagcgaagaggcccgcaccgatcgcccttcccaacagttgcgcagcctgaatggcgaatgggacncgccctgtagcggngcattaagcgcggcgggtgtggtggttacncgcagcgtgaccgntacacttgccanngccctancncccgttcctttnnntttnttnccttnctttnttnnncacnttngncngnttttccccg

SEQ ID NO: 8019 - DNA, 379 bp, Homo sapiens
  misc_feature 345: n = A,T,C or G
gtaaaccactcactatagggcgaattggagctccaccgcggtggcggccgcccgggcaggtaccaggctaagttggtgccaacactctgactggccctgcaggagagggtggctctttcccctggagacacagacagggtggctggagactgcgtcatcactatttctccagtggtatctgggagccagagtagcaggaggaagagaagctgcgctggggcttccatggttccgtctgggtcctaactgagcagttcctcccccgcgtacctcggccgctctagaactagtggatcccccgggctgcaggaattcgatatcaagcttatcgataccgtcgacctngagggggggcccggtacccagcttttgttccctt

SEQ ID NO: 8020 - DNA, 395 bp, Homo sapiens
cgcgtaatacgactcactatagggcgaattggagctccaccgcggtggcggccgaggtaccaggctaagttgctgctaacactctgactggccctgcaggagagggtggctctttcccctggagacacagacagggtggctggagactgcgtcatcactatttctccagtggtatctgggagccagagtagcaggaggaagagaagctgcgctggggcttccatggttccgtctgggtcctaactgagcagttcctcccgcgtacctgcccgggcggccgctctagaactagtggatcccccgggctgcaggaattcgatatcaagcttatcgataccgtcgacctcgagggggggcccggtacccagcttttgttccctttagtgagggttaat

SEQ ID NO: 8021 - DNA, 374 bp, Homo sapiens
  misc_feature 2, 187, 248, 250, 254, 277, 286, 294, 311, 324, 328, 330,364, 366, 371: n = A,T,C or G
gnggtggcggccgccgggcaggtactttggcctctctgggatagaagttattcagcaggcacacaacagaggcagttccagatttcaactgcctcatcagatggcgggaagatgaagacagatggtgcagccacagttcgtttgatctccagcttggtcccctgaccaaaagtgtacctcggcccgntctagaactagtggatcccccgggctgcaggaattcgatatcaagctttatcgataccgtnancctngaggggggggcccggtacccagntttttgttncccttttngtgagggttaaattgcncgcttggcagtanttcntnggtcataagctgcttcctgtagtgaaatttgttntncgttnaca

SEQ ID NO: 8022 - DNA, 712 bp, Homo sapiens
  misc_feature 20, 23, 29, 45, 80, 86, 89, 127, 132, 142, 172, 178, 180,182, 186, 190, 204, 205, 206, 246, 247, 248, 249, 252, 259,265, 285, 302, 307, 317, 319, 329, 349, 357, 360, 374, 385,397, 404, 414, 419, 425, 426, 433, 434, 439, 442, 443: n = A,T,C or G
  misc_feature 444, 445, 453, 461, 508, 509, 511, 514, 526, 532, 536, 543,546, 549, 553, 558, 571, 572, 586, 587, 588, 592, 594, 598,599, 600, 612, 627, 672, 675, 676, 677, 680, 686, 687, 689,692: n = A,T,C or G
ggcgaattggagctccccgnggnggcggncgcccgggcaggtacnagcagaaacctggccaggctcccaggctcctcatntatggngcntccaccagggccactggtatacccagccaggtttcagntggcnagatggggtnctggggaacagtagcttttactgcttgcancccatncngncctnaaangggggtagtttccnnntgtaccccccctttttttttggggggggggtgccccccgnnnnaanatgtggngtctgntttttttttccccccccctntttttggggggggtttntaaanatataaaaangngggggggggnggaaaaaaaaataatttatntttttttnggncccccccttttttnggggggggggnggcccccccctntaaaaangggggggggnattantatatnnttttttnngtttntcnnnnaaaaaaangccccccntttttttttttaaaaaaaaaaacccccttttttttttggggggggtnntnttnttttatttaaanatcccncccnaaaaaanaanggngggngttgntttcccccccccnnctagaaaaaaaaannngggngnttcnnnttttattttttntagaaaaaataattntttttttttctcctaaaaaattgaaaaaaaaatcccttttttttnttnnnaanttaaanntnaanaaattttctcccccccccct

SEQ ID NO: 8023 - DNA, 595 bp, Homo sapiens
  misc_feature 99, 100, 110, 111, 117, 118, 119, 120, 121, 122, 124, 125,126, 133, 134, 140, 147, 151, 168, 174, 175, 176, 177, 186,187, 188, 189, 190, 191, 200, 201, 202, 205, 206, 207, 211,219, 226, 231, 232, 233, 234, 235, 236, 237, 239, 240: n = A,T,C or G
  misc_feature 241, 242, 249, 257, 258, 270, 278, 279, 280, 285, 286, 288,289, 290, 291, 294, 309, 310, 317, 318, 322, 332, 333, 334,338, 339, 345, 346, 358, 366, 367, 368, 374, 375, 376, 377,378, 379, 380, 382, 383, 386, 387, 388, 397, 399, 404: n = A,T,C or G
  misc_feature 405, 406, 407, 408, 414, 423, 424, 425, 426, 427, 433, 437,438, 439, 440, 441, 442, 443, 452, 454, 455, 456, 457, 466,471, 472, 473, 474, 489, 490, 499, 503, 504, 505, 506, 507,508, 512, 520, 521, 544, 546, 561, 564, 565, 566, 570: n = A,T,C or G
  misc_feature 575, 580, 583, 584, 586, 588, 593, 594: n = A,T,C or G
ttttttttttttttttttttttttttttttttttttttttttttttttttttttttttttttttttttttttttttttttttttttttttttttttttnnaaaaaaaaanntttttnnnnnnannnttttttnnaaaaanggggggnaaanggggggggggggggggnccaaannnnccccccccnnnnnnccccccccnnnttnnngggncccccccnggggggnttttnnnnnnnannnnttttttngggggggnnaaaaaaaaaaantttttttnnnaaaanncnnnnggnaaaaaaaaccccccnnttttttnnaaangggggggggnnnaaanntttttnncccggggggggncccccccnnnaaaaannnnnnnannaannnttttttttncnaaaannnnntttttnccccccccnnnnncccccnaaannnnnnnggggggggntnnnncccccaggnttttnnnnccccggggcaaaaannttccccccncccnnnnnntttntttttccnnaaaaaaaaaaaaagggggggccncntttttttttaaaagnggnnngggnttttnttttnttnngngngaaanng

SEQ ID NO: 8024 - DNA, 536 bp, Homo sapiens
gaaaaatgttccggagtcaccacgcgtccgggacatgagggtccctgctcagctcctggggctcctgctgctctggctctcaagtgccagatgtgacatccagatgacccagactccatcctccctgtctgcatctgtaggagacagagtcaccatcacttgccaggcgaatctagacatttccgactatttactttggtatcagcagaaacccggggaagcccctaaggtcctgatctacgatgcatccaatttggaggcaggggtcccgtcgaggttcagtggaagtggatctgggacaaattttactttcaccatcagcagcttgcagcctgaagatactgctacatattactgtcaacaattagaaggtctcccgtacacttttgggcaggggaccaaactggagatcaaacgaactgtggctgcaccatctgtcttcatcttcccgccatctgatgagcagttgaaatctggaactgcctctgttgtgtgcctgctgaataacttctatcccaagagaggccaaagtacag

SEQ ID NO: 8025 - DNA, 1139 bp, Homo sapiens
  misc_feature 14, 23, 28, 40, 49, 79, 208, 209, 216, 226, 233, 236, 239,244, 249, 253, 255, 256, 263, 268, 271, 278, 280, 285, 293,295, 301, 306, 308, 314, 315, 317, 326, 327, 335, 337, 341,342, 345, 353, 357, 360, 362, 363, 368, 369, 378, 379: n = A,T,C or G
  misc_feature 380, 386, 394, 395, 403, 404, 407, 408, 410, 411, 412, 414,418, 421, 427, 428, 429, 432, 435, 438, 440, 442, 443, 446,450, 455, 458, 470, 472, 482, 483, 484, 485, 489, 492, 493,498, 503, 505, 506, 508, 509, 510, 512, 515, 517, 519: n = A,T,C or G
  misc_feature 524, 528, 530, 538, 547, 548, 549, 558, 559, 560, 561, 563,564, 567, 569, 570, 571, 573, 582, 583, 584, 587, 588, 589,590, 593, 595, 603, 604, 606, 609, 610, 611, 613, 615, 617,620, 621, 622, 623, 629, 630, 632, 638, 640, 641, 642: n = A,T,C or G
  misc_feature 644, 645, 647, 649, 650, 651, 652, 654, 657, 659, 660, 664,667, 668, 670, 674, 676, 677, 683, 686, 688, 690, 691, 692,694, 696, 697, 700, 701, 703, 707, 717, 718, 719, 720, 721,725, 728, 732, 734, 736, 737, 743, 747, 749, 750, 751: n = A,T,C or G
  misc_feature 753, 755, 758, 759, 762, 763, 765, 767, 769, 771, 773, 774,777, 778, 780, 783, 785, 786, 791, 794, 801, 802, 805, 806,808, 810, 811, 812, 815, 818, 821, 822, 826, 833, 834, 839,849, 854, 855, 857, 858, 859, 861, 865, 868, 869, 873: n = A,T,C or G
  misc_feature 878, 879, 883, 884, 886, 889, 898, 901, 912, 914, 916, 917,919, 927, 932, 933, 935, 937, 940, 943, 945, 946, 949, 950,951, 955, 960, 961, 962, 965, 972, 973, 976, 977, 981, 985,988, 989, 995, 997, 1000, 1003, 1009, 1011, 1012, 1016, 1019: n = A,T,C or G
  misc_feature 1024-1026, 1028-1030, 1033, 1035, 1038, 1041, 1043,1045-1046, 1054, 1057, 1059-1060, 1063, 1067-1070, 1073, 1075,1077, 1079, 1081, 1084, 1087-1088, 1090-1091, 1097, 1100, 1102,1104, 1109-1111, 1113, 1115, 1117, 1119, 1124-1126, 1135, 1139: n = A,T,C or G
cccccccccgggtngaatactcnctgcncgggtatcgcgnccggattanaagtaacggccgccagtctgctggaattcngctttcgagcggccgcccgggcaggtacctggatcttccaagcacagccacttctgtgaacatccctgacctgcttcctggccgaaaatacattgtaaatgtctatcagatatctgaggatggggagcnnacccccnactcccatcnccggtancgnccnccgcnccacncccnannccgaatnctgcnatntccatcncnctggnggcgctcnancatgcntctananggcccnntncccctatanngagtcgtntnaccnnccnctggccgncgcnttncnncgtcnncactgggannnccctgncgtccccnnctccaccnnctnncnnncntccnctntccccnnngcnttnccncnannaancccnccccnatncccccccccccntncccccccccnnnncgcnaanngatcnccccntnncnnncnttnancnccccnggtntngtcgcccncccccctcnnncccccctcnnnntnnccncnnncncccccctcnnnccnnnnccncncccccccnncnccnnntncncnccnnnnccccgnncnccttcncnnntnncncnnnncntcncnnttcnccnntncccncnncccccnctncntnnncncnnccnncncccnccttcccccnnnnncccnccncctncncnnttcccncccncnnncncnccnntcnncntncntncnnctnncnccncnntcctnccncccctcnntcnncntnnnccnccnccnncccnttccccnnccctnctctccctcnctccnntnnntncctnccnncttnctccnncctnncntcntcccccccnccncccctcccccncntnntncccctctnccccnncntnctntcncnnccnnncctntcccnnnccnccccccnnctnncttnctcnccnnctctcncnccnccncttccncnncctntcnctccnnncnnntcncnccntcncntnntctctccnccncnntcnttcnnnnccncncntntnccnccnncnncccccntcncncnccctnnncncncntnctccnnnctcccctcncccn

SEQ ID NO: 8026 - DNA, 378 bp, Homo sapiens
  misc_feature 2, 4, 9, 378: n = A,T,C or G
tntngggcnattggagctccaccgcggtggcggccgaggtacgggggccagttattatactgctgacagtagtaaactgcagaatcttcagactgcaggctgctgatggtgagagtgaactctgtcccagacccactgccactgaacctggctgggataccagtggccctggtggatgcaccatagatgaggagcctgggagcctggccaggtttctgctggtacctgccccgggcggccgctctagaactagtggatcccccgggctgcaggaattcgatatcaagcttatcgataccgtcgacctcgagggggggcccggtacccagcttttgttccctttagtgagggttaattgcgcgcttggcgtaatcatgn

SEQ ID NO: 8027 - DNA, 637 bp, Homo sapiens
  misc_feature 542, 586, 623: n = A,T,C or G
ctcctaagggaacaaaagctgggtaccgggccccccctcgggtcgacggtatcgataagcttgatatcgaattcctgcagcccgggggatccactagttctagagctgcccaccacccggttaaaagcagactgctggaaactagataagtgtccctaaacaacaaataattccaagatgaacagcaagacatgctaaacagacagggtaattaatgtgcgcttaagatcaccaaaatgtaatgaataagcaaagtggctaacaaagttcttcaacagttagtagaaatcaaattatttgattatgatgccaaagtccacctgaatgatattaccaagaatatttcactaagtacctcggccgccaccgcggtggagctccaattcgccctatagtgagtcgtattacgcgcgctcactggccgtcgttttacaacgtcgtgactgggaaaaccctggcgttacccaacttaatcgccttgcagcacatccccctttcgccagctggcgtaatagcgaagaggcccgcaccgatcgcccttnccaacagttgcgcagcctgaatggcgaatgggacgcgccctgtnagcggcgcattaagcgccggggggtgtgggggttacncgcagcgtgaccct

SEQ ID NO: 8028 - DNA, 580 bp, Homo sapiens
  misc_feature 20, 27, 30, 302, 317, 329, 333, 335, 336, 339, 340, 341,342, 343, 344, 345, 346, 347, 348, 353, 354, 357, 358, 359,362, 363, 364, 365, 366, 367, 368, 369, 370, 371, 372, 373,374, 375, 377, 378, 379, 382, 385, 387, 388, 389, 390: n = A,T,C or G
  misc_feature 391, 392, 393, 395, 396, 397, 398, 399, 400, 402, 403, 404,405, 406, 407, 408, 409, 411, 413, 415, 417, 418, 419, 421,422, 423, 424, 425, 426, 428, 430, 431, 432, 433, 435, 436,438, 439, 440, 441, 442, 443, 444, 445, 446, 447, 448: n = A,T,C or G
  misc_feature 449, 450, 451, 452, 453, 454, 455, 457, 459, 460, 461, 463,464, 465, 466, 467, 468, 469, 470, 472, 474, 475, 476, 477,478, 479, 480, 482, 483, 485, 486, 488, 490, 491, 498, 502,504, 505, 506, 507, 508, 509, 510, 512, 513, 514, 515: n = A,T,C or G
  misc_feature 517, 518, 520, 521, 526, 527, 528, 529, 530, 532, 533, 537,541, 544, 546, 547, 550, 553, 555, 556, 557, 558, 559, 560,562, 564, 566, 568, 569, 570, 572, 576, 578, 579: n = A,T,C or G
gccagcgcgcattaaccctncactaanggnaacaaaactgggtaccgggccccccctcgtagtcgacggtatcgataagcttgatatcgaattcctgcagcccgggggatccactagttctagagcggccgaggtacgggggccagttattatactgctgacagtagtaaactgcagaatcttcagactgcaggctgctgatggtgagagtgaactctgtcccagacccactgccactgaacctggctgggataccagtggccctggtggatgcaccatagatgaggagcctgggagcctgnccaggcttctgctgntacctgcccggncggncnncannnnnnnnnnttacnnttnnncannnnnnnnnnnnnntnnnttnttncnnnnnnncnnnnnntnnnnnnnntntnanannnannnnnntncnnnnanncnnnnnnnnnnnnnnnnnncntnnncnnnnnnnncncnnnnnnntnntnntntnnccctatntaancnnnnnnncnnnnanncnnttccnnnnncnntttnttcnttncnnaancantnnnnnncncnancnnnanaaantnnt

SEQ ID NO: 8029 - DNA, 425 bp, Homo sapiens
  misc_feature 16, 396: n = A,T,C or G
gagcgcgcgtaatacngactcactatagggcgaattggagctccaccgcggtggcggccgaggtacctgacaacaagagcattttagagtaattaatttaataaagtaaattagtattgctgcaaatagttaaattatatttatttgaattgatggtcaagagattttccattttttttacagactgttcagtgtttgtcaagctttctggcataaatatgtacctcggccgctctagaactagtggatcccccgggctgcaggaattcgatatcaagcttatcgataccgtcgacctcgagggggggcccggtacccagcttttgttccctttagtgaggggtaattgcgcccttggcgtaatcatgggcatagctgtttcctgtgtgaaattgntatccgctcacaattccacacaacatacc

SEQ ID NO: 8030 - DNA, 627 bp, Homo sapiens
  misc_feature 569: n = A,T,C or G
ctcactaaaggaacaaaagctgggtaccgggccccccctcgggtcgacggtatcgataagcttgatatcgaattcctgcagcccgggggatccactagttctagagcggccgaggtacgcgggggaggacttctggcctttggcacgtcctgctccgtggtgctctatgaccccctgaaaagggttgttgttaccaacttgaatggtcacaccgcccgagtcaattgcatacagtggatttgtaaacaggatggctccccttctactgaattagtttctggaggatctgataatcaagtgattcactgggaaatagaggataatcagcttttaaaagcagtgcatcttcaaggccatgaaggacctgtttatgcggtgcatgctgcttaccagaggaggacatcagatcctgcattatgtacctgcccgggcggccgctcggccaccgcggtggagctccaattcgccctatagtgagtcgtattacgcgcgctcactggccgtcgttttacaacgtcgtgactgggaaaaccctggcgttacccaacttaatcgccttgcagcacatnccccctttcgccagctggcgtaatagcgaaaaggcccgcaccgatcgccctttcccac

SEQ ID NO: 8031 - DNA, 1124 bp, Homo sapiens
  misc_feature 2, 3, 5, 6, 7, 9, 11, 12, 13, 15, 17, 18, 20, 21, 23, 25,26, 27, 28, 30, 31, 32, 35, 36, 37, 38, 39, 40, 42, 43,46, 47, 48, 50, 51, 55, 56, 61, 63, 65, 72, 74, 75, 77,78, 79, 81, 85, 86, 87, 88, 89, 90, 91, 93, 94, 95, 96,100: n = A,T,C or G
  misc_feature 106, 107, 109, 111, 112, 113, 128, 132, 142, 212, 236, 237,366, 402, 443, 523, 535, 550, 626, 687, 705, 724, 728, 731,733, 757, 763, 773, 774, 782, 798, 801, 806, 810, 820, 839,849, 870, 876, 880, 884, 892, 907, 919, 923, 924, 934: n = A,T,C or G
  misc_feature 949, 951, 958, 963, 984, 997, 999, 1007, 1008, 1014, 1034,1045, 1048, 1052, 1061, 1062, 1063, 1065, 1066, 1088, 1104,1108, 1109, 1118, 1119, 1123: n = A,T,C or G
tnncnnntntnnnantnntnntntnnnntnnnatnnnnnntnnttnnnannatgnnttatntnanattttantnngnnntnttcnnnnnnntnnnnagtngaggannanannnttgaattatcacttnaggncgaattgganctccaccgcggtggccggccgaggcaccaggctaagtaggtggtaacactctgactggccctgcaggagngggtggctctttcccctgaagacnnagacagggtggctggagactgtgtcaacacaatttctccggtggtatctgggagccagagtagcaggaggaagagaagctgagctggggcttccatggttccctctgggtcctaactgagcagttcctncccgcgtacctgcccgggcggccgctctagaactangtggatcccccgggctggcaaggaattcagatatcaaagcnttatcgatacccgtccgacctcgaaggggggggccccggtacccaggcttttgttccctttagtgaggggtttaattgcngccgccttggcngtaaatcattgggtnattagcctggttttccttgtgttgaaaattgtttatcccggcttcaacaattttcccacacaaaccataaccgagnccggggggagccattaaaagttgtaaaaagccctggggggtgcccctaatggaggtggagncttaacttcacatttaanttgccgtttgcggcctcanttgnccngnttttcccagttcgggggaaaaccnttgttncttggcccanncttgtcanttaattggaaattccnggnccaancgcngcctggggangaaggccgggttttgccgntatttggggnccggcttctttcccggttttncttcgncttnaacntgaacttnggctttgccgcttcngggtaccgttancggnntgccggccgnaagcccgggtatttnangccttcnacttnaaaaggggcggggtaattacncgggtttattccncnaagaaatnngggggnattaaccccaagggaaaaanaacaattgtgnaancaanaaagggccnnncnnaaaagggccagggaaccctttnaaaaaagggcccccgntttnncttgggcgnntttnt

SEQ ID NO: 8032 - DNA, 633 bp, Homo sapiens
  misc_feature 11, 14, 36, 43, 130, 256, 278, 293, 320, 355, 362, 370, 392,408, 425, 451, 460, 466, 494, 499, 525, 536, 541, 557, 560,569, 574, 576, 582, 584, 592, 596, 599, 606, 607, 617, 619,624, 633: n = A,T,C or G
cactacactancangtgcactaaagggaaacaacancctgggntaccgggcccccccctcgtggtcgacggtatcgataagcttgatatcgaattcctgcagcccgggggatccactagttctagagccngcccgggcaggtacccattggcgtttctaggttactggtttcttcagcttcaagtctgggatatattgggcaaaaaggaaacccagggaaacttaccaccatgtcatttctagccaccttgctttntcttccccacccttcaatgttntgttatgtttgcttnaatgtaatgtccagagtttttagttgnacctcggccgccaccgcggtggagctccaattcgncctatantgagtcgnattacgcgcgctcactggccgncgttttacaacgtcangactgggaaaaccctgncgttacccaacttaatcgccttgcancacatcccnctttcnccagctggcgtaatagcgaacaggcccncaccnatcgccctttccaacatttgcgcatncctgaatggcnaatgngacgcgccctgtaacngcncatttagcnccgcngntgtggngngttacgcncagnatnaccgctnnacttgccagngncctancgcccgttn

SEQ ID NO: 8033 - DNA, 631 bp, Homo sapiens
  misc_feature 505, 563, 565, 580, 591, 601, 609, 618, 623: n = A,T,C or G
ggccaattgggtccgggccccccctcgaggtcgacggtatcgataagcttgatatcgaattcctgcagcccgggggatccactagttctagagcggccgcacgggcaggtacacatattacaagagcctgctactgggaactaactgaattcacaaagaaacagtgattcagttcgttaaaactttgctctatcttgaataacaagcttattacatgcgaaacctattggggaccaactgaattcaccgtaatacttagattccgttctttaaatgttgctatatatttaaatgcacactcatataagcatgtcccattgggaactctctgaaatcgtctagaaattttgactccattcgtgaaaatttttctacatccggaacagtccacttattacttctgtggcctattgggaactaacagaattcaaaaatttactgagattcggcacaccaaatttttataaatctttaaagtacctcggccgccaccgcgggggagctncagctttttggtcccttttagtgagggttaattggcgcgcttgggcgtaatcattggncntagctggtttcctgngtgaaaatggntatcccctcncaatttcncacaacatnacaancccgaagc

SEQ ID NO: 8034 - DNA, 385 bp, Homo sapiens
gcgtaatacgactcactatagggcgaattggagctccaccgcggtggcggccgaggtacgcggggtagacggaacttcgcctttctctcggccttagcgccatttttttggaaacctctgcgccatgagagccaagtggaggaagaagccgaatgcgcaggctgaagcgcaaaagaagaaagatgaggcagaggtccaagtaaaccgctagcttgttgcaccgtggaggccacaggagcagaaacatggaatgccagacgctggggatgctggtacctgcccgggcggccgctctagaactagtggatcccccgggctgcaggaattcgatatcaagcttatcgataccgtcgacctcgagggggggcccggtacccagcttttg

SEQ ID NO: 8035 - DNA, 447 bp, Homo sapiens
  misc_feature 2, 3, 8, 10, 12, 252, 294, 302, 410: n = A,T,C or G
gnnagccnancnctactatagggcgaattggagctccaccgcggtggcggccgccacgctggttttgcatcttcaggagacgctcgtagccctcgcgcttctcctcggccagttcgcggaagaagtggctcacgccttccagagccacatcatcgcggtcgaaatagaagcccagagagaggtaggtgtaggaggcctgcaggtacctcggccgctctagaactagtggatcccccgggctgcaggaattcnatatcaagcttatcgatacccgtcgacctcgaggggggggcnccggtacnccaagcttttttgttcccttttagtggagggtttaatttgccgccgctttgggcgtaaatcaatgggtcataagactgttttccctgtggtgaaaaattggtttatcncgggtcacaaattcccacaccaaacataacgaagccc

SEQ ID NO: 8036 - DNA, 611 bp, Homo sapiens
actactatagggcgaattggagctccaccgcggtggcggccgaggtacgcgggggggcggggggatagctgtccaaggtctcccccagcactgaggagctcgcctgctgccctcttgcgcgcgggaagcagcaccaagttcacggccaacgccttggcactagggtccagaatggctacaacagtccctgatggttgccgcaatggcctgaaatccaagtacctgcccgggcggccgaggtaccaacagaaacctggccaggctcccagactcctcatctatgatgcatccgacagggccactggcatcccagccaggttcagtggcagtgggtctgggacagacttcactctcaccatcagcagcctagagcctgaagattttgcagtttattactgtcagcagcgtagcaactcgtacctgcccgggcgggccgctctagaactagtggatcccccgggctgcaggaattcgatatcaagctttatcgataccgtcgaccttcgagggggggccccggtacccagcttttgttccctttagtgagggttaatttgcgcgcttggcgtaatcatggtcatagctggtttcctgtgtgaaattgttatccg

SEQ ID NO: 8037 - DNA, 615 bp, Homo sapiens
  misc_feature 2, 3, 6, 7, 8, 20, 24, 25, 33, 615: n = A,T,C or G
gnnctnnnctgtttcctgtnggannaatagggnctccaccgcgggtggcggccgcccggcaggtacaacttcctcctagcgtttctggttaactatgtgaacacacaggcagacagatcaagccgctatgtgagggacaaataaacatactgaagacctaaaaatgtgaagtcagctgagcctcaattcaatccaaacctttgggggcttatgcaccattagtctgtatcatggcctccagtcatttgtccctctagaacaggaactctgaaaggcctgacaaagaagaatggacaatcacagatgctggttttgccttctcattccctgcaagtctactggatgcaggaagagggtggggggttcaagctgcctgcttaggagcttaaacatgacaaagattttctaatgaaaagctaacccagagattcctctttttcctatgataccacagcatccatcattcaaaaaccgaaaaaggacccacctgtataggcatctttaaaaagacaataaagggatccgagcaattgtctgcagagtacctcggccgctctagaactagtggatccccccggctgcagggaattcgatatcaagcttatcgatacccgn

SEQ ID NO: 8038 - DNA, 416 bp, Homo sapiens
  misc_feature 5, 7: n = A,T,C or G
gagcncnccgtaatacgactcactatagggcgaattggagctccaccgcggtggcggccgaggtactttggcctctctgggatagaagttattcagcaggcacacaacagaggcagttccagatttcaactgctcatcagatggcgggaagatgaagacagatggtgcagccacagttcgtttgatctccagcttggtcccctgaccaaaagtgtacctgcccgggcggccgctctagaactagtggatcccccgggctgcaggaattcgatatcaagcttatcgataccgtcgacctcgagggggggcccggtacccagcttttgttccctttagtgagggttaattgcgcgcttggcgtaatcatggtcatagctgtttcctgtgtgaaattgttatccgctcacaattccaca

SEQ ID NO: 8039 - DNA, 895 bp, Homo sapiens
  misc_feature 2, 3, 5, 6, 10, 17, 25, 32, 36, 37, 365, 448, 449, 450, 451,452, 453, 454, 455, 456, 457, 458, 459, 460, 461, 462, 463,464, 465, 466, 467, 468, 469, 470, 471, 472, 473, 474, 475,476, 477, 478, 479, 480, 481, 482, 483, 484, 485: n = A,T,C or G
  misc_feature 486, 487, 488, 489, 490, 491, 492, 493, 494, 495, 496, 497,498, 499, 500, 501, 502, 503, 504, 505, 506, 507, 508, 509,510, 511, 512, 513, 514, 515, 516, 517, 518, 519, 520, 521,522, 523, 524, 525, 526, 527, 528, 529, 530, 531, 532: n = A,T,C or G
  misc_feature 533, 534, 535, 536, 537, 538, 539, 540, 541, 542, 543, 544,545, 546, 547, 548, 549, 550, 551, 552, 553, 554, 555, 556,557, 558, 559, 560, 561, 562, 563, 564, 565, 566, 567, 568,569, 570, 571, 572, 573, 574, 575, 576, 577, 578, 579: n = A,T,C or G
  misc_feature 580, 581, 582, 583, 584, 585, 586, 587, 588, 589, 590, 591,592, 593, 594, 595, 596, 597, 598, 599, 600, 601, 602, 603,604, 605, 606, 607, 608, 609, 610, 611, 612, 613, 614, 615,616, 617, 618, 619, 620, 621, 622, 623, 624, 625, 626: n = A,T,C or G
  misc_feature 627, 628, 629, 630, 631, 632, 633, 634, 635, 636, 637, 638,639, 640, 641, 642, 643, 644, 645, 646, 647, 648, 649, 650,651, 652, 653, 654, 655, 656, 657, 658, 659, 660, 661, 662,663, 664, 665, 666, 667, 668, 669, 670, 671, 672, 673: n = A,T,C or G
  misc_feature 674, 675, 676, 677, 678, 679, 680, 681, 682, 683, 684, 685,686, 687, 688, 689, 690, 691, 692, 693, 694, 695, 696, 697,698, 699, 700, 701, 702, 703, 704, 705, 706, 707, 708, 709,710, 711, 712, 713, 714, 715, 716, 717, 718, 719, 720-895: n = A,T,C or G
gnntnnggangcgcgtnaacgactnactatanggcnnattggagctccaccgcggtggcggccgaggtacgcggggatccagaatacatttccaacaagagcactggccaagtcagcttcttctgagagagtctctagaagacatgatgctacactcagctttgggtctctgcctcttactcgtcacagtttcttccaaccttgccattgcaataaaaaaggaaaagaggcctcctcagacactctcaagaggatggggagatgacatcacttgggtacctgcccgggcggccgctctagaactagtggatcccccgggctgcaggaattcgatatcaagcttatcgatacccgtcgacctcganggggggcccggtacccaacttttgttccctttagtgagggttaattgcgcgcttggcgtaatcatggtcatagctgttcctgnnnnnnnnnnnnnnnnnnnnnnnnnnnnnnnnnnnnnnnnnnnnnnnnnnnnnnnnnnnnnnnnnnnnnnnnnnnnnnnnnnnnnnnnnnnnnnnnnnnnnnnnnnnnnnnnnnnnnnnnnnnnnnnnnnnnnnnnnnnnnnnnnnnnnnnnnnnnnnnnnnnnnnnnnnnnnnnnnnnnnnnnnnnnnnnnnnnnnnnnnnnnnnnnnnnnnnnnnnnnnnnnnnnnnnnnnnnnnnnnnnnnnnnnnnnnnnnnnnnnnnnnnnnnnnnnnnnnnnnnnnnnnnnnnnnnnnnnnnnnnnnnnnnnnnnnnnnnnnnnnnnnnnnnnnnnnnnnnnnnnnnnnnnnnnnnnnnnnnnnnnnnnnnnnnnnnnnnnnnnnnnnnnnnnnnnnnnnnnnnnnnnnnnnnnnnnnnnnnnnnnnnnnnnnnnnnnnnnnnnnnnnnnnn

SEQ ID NO: 8040 - DNA, 545 bp, Homo sapiens
  misc_feature 5, 7, 11, 39, 292, 344, 347, 353, 357, 360, 366, 367, 368,369, 370, 371, 374, 379, 383, 384, 386, 393, 398, 400, 407,422, 426, 439, 440, 441, 442, 443, 454, 455, 460, 461, 464,465, 471, 473, 479, 480, 490, 495, 505, 513, 516, 521: n = A,T,C or G
  misc_feature 523, 524, 531, 533, 545: n = A,T,C or G
tttcncntttnactactatagggcgaattggagctcccncgcggtggcggccgcccgggcaggtactttggcctctctgggatagaagttattcagcaggcacacaacagaggcagttccagatttcaactgctcatcagatggcgggaagatgaagacagatggtgcagccacagttcgtttgatctccagcttggtcccttggccaaaagtgtacctcggccgctctagaactagtggatcccccgggctgcaggaattcgatatcaagcttatcgataccgtcgacctngagggggggcccggtacccagcttttgttccctttagtgagggttaattgcnccnttggcntaantantggtcnnnnnntgntttcntgtnngnaattttnttatncntttccanaatttcccaaaaaantttnacaaacccggggnnnnntaataaatttnnaaaannccnngggggngncccttnnaggggggggnccctncccctctttntttttggntgnggccntnntctcccncnttttttaaaaan

SEQ ID NO: 8041 - DNA, 650 bp, Homo sapiens
  misc_feature 20, 53, 533, 546, 559, 571, 578, 601, 603, 617, 619, 620,626, 629, 630, 637, 639, 641, 644, 646, 650: n = A,T,C or G
tcactatagggcgaattggnagctccaccgcggtggcggccgagtacgcgggnaacacatttctttgggattttgcccttcctggggtataggggatcagaaatattgatccatgtgcacgcagataaaatggcttctgctaaacagactaaaatctttctctctagtctttctcacttgtacctgcccgggcggccgctcgaccgtctttccctttcgccctccacctccttcctgagaccagctgtgtttcagctcccccttccctgggcccacactgaatctctgttacccttacaaacccctgctgcctctaagagtaaggacccctatcccatcccaaactcaaacctaagcacatgcagcctcatcccatttctccaaaacatgtgaaagcaaaagaaaataaaaaactaactcagcaatcttgttcttcctacagtggtctttggctactgctggatgtggcccacttttaacctgtgagagtgccatccagtgaagagacaatgggaatgctacctcccagaggngagcccagcaggnaaaatacaggctnctcaaggctaanggcaggngctctggggtcaggggtcactgncngggctacggcgacngnngggggnggnnacgggcngngnccncnccgn

SEQ ID NO: 8042 - DNA, 483 bp, Homo sapiens
  misc_feature 2, 8: n = A,T,C or G
gnccctancactactatagggcaattgagctccccgcggtggcggccgcccgggcaggacgcgggatggaaactggggaaacatgcataagtgccaatcctttgaatgttccacggaaacactggtggacagattctagtgctgagaagaaacacgtttggtttggagagtccatggatggtggttttcagtttagctacagcaatcctgaacttcctgaagatgtccttgatgtgcggctggcattccttcgacttctctccagccgagcttcccagaacatcacatatcactgcaaaaatagcattgcatacatggatcaggccagtggaaatgtaaagaaggccctgaagctgatggggtcaaatgaaggtgaattcaaggctgaaggaaatagcaaattcacctacacagttctggagggatggttgcatgaaacacactgggggatggagcaaaacagtctttgaatatcgaacacgt

SEQ ID NO: 8043 - DNA, 628 bp, Homo sapiens
  misc_feature 9: n = A,T,C or G
ctcactaanggaacaaaagctgggtaccgggccccccctcgggtcgacggtatcgataagcttgatatcgaattcctgcagcccgggggatccactagttctagagcggccgcccgggcaggtacacaccacctgggtggggaccccgcacaccacctccgtcttctgcttcgatatcaccaacggcgtgtcttccatggcggggctctgcagtggcagcaagccggcgccgcgcccggaagtgtccccgcgtacctcggccgccaccgcggtggagctccaattcgccctatagtgagtcgtattacgcgcgctcactggccgtcgttttacaacgtcgtgactgggaaaaccctggcgttacccaacttaatcgccttgcagcacatccccctttcgccagctggcgtaatagcgaagaggcccgcaccgatcgcccttcccaacagttgcgcagcctgaatggcgaatgggacgcgccctgtagcggcgcattaagcgcggcgggtgtggtggttacgcgcagcgtgaccgctacacttgccagcgccctagcgcccgctcctttcgctttcttcccttcctttctcgccacgttcgccggctttccccgtcaagctctaaatcg

SEQ ID NO: 8044 - DNA, 404 bp, Homo sapiens
  misc_feature 4: n = A,T,C or G
gtanctactactatagggcgaattggagctccaccgcggtggcggccgaggtaccagcagaaacctggccaggctcccaggctcctcatctatggtgcatccaccagggccactggtatcccagccaggttcagtggcagtgggtctgggacagagttcactctcaccatcagcagcctgcagtctgaagattctgcagtttactactgtcagcagtataataactggcccccgtacctgcccgggcggccgctctagaactagtggatcccccgggctgcaggaattcgatatcaagcttatcgataccgtcgacctcgagggggggcccggtacccagcttttgttccctttagtgagggttaattgcgcgcttggcgtaatcatggtcatagctgtttcct

SEQ ID NO: 8045 - DNA, 662 bp, Homo sapiens
  misc_feature 4, 29, 399, 400, 401, 402, 403, 404, 405, 406, 407, 408,413, 414, 415, 416, 417, 418, 419, 420, 421, 422, 423, 424,425, 426, 427, 428, 429, 430, 431, 432, 433, 434, 435, 436,437, 438, 439, 440, 441, 442, 443, 444, 445, 446, 447: n = A,T,C or G
  misc_feature 448, 449, 450, 451, 452, 453, 454, 455, 456, 457, 458, 459,460, 461, 462, 463, 464, 465, 466, 467, 468, 469, 470, 471,472, 473, 474, 475, 476, 477, 478, 479, 480, 481, 482, 483,484, 485, 486, 487, 488, 489, 490, 491, 492, 493, 494: n = A,T,C or G
  misc_feature 495, 496, 497, 498, 499, 500, 501, 502, 503, 504, 505, 506,507, 508, 509, 510, 511, 512, 513, 514, 515, 516, 517, 518,519, 520, 521, 522, 523, 524, 525, 526, 527, 528, 529, 530,531, 532, 533, 534, 535, 536, 537, 538, 539, 540, 541: n = A,T,C or G
  misc_feature 542, 543, 544, 545, 546, 547, 548, 549, 550, 551, 552, 553,554, 555, 556, 557, 558, 559, 560, 561, 562, 563, 564, 565,566, 567, 568, 569, 570, 571, 572, 573, 574, 575, 576, 577,578, 579, 580, 581, 582, 583, 584, 585, 586, 587, 588: n = A,T,C or G
  misc_feature 589, 590, 591, 592, 593, 594, 595, 596, 597, 598, 599, 600,601, 602, 603, 604, 605, 606, 607, 608, 609, 610, 611, 612,613, 614, 615, 616, 617, 618, 619, 620, 621, 622, 623, 624,625, 626, 627, 628, 629, 630, 631, 632, 633, 634, 635: n = A,T,C or G
  misc_feature 636, 637, 638, 639, 640, 641, 642, 643, 644, 645, 646, 647,648, 649, 650, 651, 652, 653, 654, 655, 656, 657, 658, 659,660, 661, 662: n = A,T,C or G
tganacgccagcttggtaccgagctcggntccactagtaacggccgccagtgtgctggaattcggcttagcgtggtcgcggccgaggtacaagagatagaaagaccagtccttgctgaaagacaagtctgaatgctccactttttcaattctctctccattcttcagtaagtcaacttcaatgtcggatggatgaaacccagacacatagcaattcaggaaatttgactttccattctctgctggatgacgtgagtaaacctgaatctttggagtacctgcccgggcggccgctcgaaagccgaattctgcagatatccatcacactgggcggccgctcgagcatgcatctagagggcccaattcgccctatagtgagtcgtattacaattactgcggnnnnnnnnnnaaaannnnnnnnnnnnnnnnnnnnnnnnnnnnnnnnnnnnnnnnnnnnnnnnnnnnnnnnnnnnnnnnnnnnnnnnnnnnnnnnnnnnnnnnnnnnnnnnnnnnnnnnnnnnnnnnnnnnnnnnnnnnnnnnnnnnnnnnnnnnnnnnnnnnnnnnnnnnnnnnnnnnnnnnnnnnnnnnnnnnnnnnnnnnnnnnnnnnnnnnnnnnnnnnnnnnnnnnnnnnnnnnnnnnnnnnnnnnnnnnnnnnnnnnnn

SEQ ID NO: 8046 - DNA, 399 bp, Homo sapiens
cgtatcgactcactatagggcgaattggagctccaccgcggtggcggccggaagagcaaccgagatgaaggtgaagatgctgagccggaatccggacaattatgtccgcgaaaccaagttggacttacagagagttccaagaaactatgatcctgctttacatccttttgaggtcccacgagaatatataagagctttaaatgctaccaaactggaacgagtatttgcaaaaccattccttgcttcgctggatggtcaccgtgatggagtcaattgcttggcaaagcatccagagaagctggctactgtcctttctggggcgtgtgatggagaggttagaatttggaatctaactcagcggaattgtatccgtacctcggccgctctagaactagtgga

SEQ ID NO: 8047 - DNA, 527 bp, Homo sapiens
  misc_feature 207, 435, 439, 440, 443, 455, 459, 469, 479: n = A,T,C or G
gccgctatacactactatagggcgaattggagctccccgcggtggcggccgaggtacagatacatggacacaatcatggcagccagctcgaggcccccaattccagctgccacaccacccacggtgactgcattagttcggatgtcatacaaaagctgattgaagcaaccctctactttttggtcgtgagccttttgcttggtgcangttttcattggctgtgttggtgacgttgtcattgcaacagaatgggggaaaggcactgttctctttgaagtagggtgagtcctcaaaatccgtatagttggtgaagccacagcacttgagccctttcatggtggtgttccacacttgagtgaaagtcttcctgggaaccataatctttcttgatggcaggcactaccagccaccgtcagggaagtgctcaaccatttntggnngtncttgccccgggngggnccggttttanaaactaagtnggaatccccccggggcctgcaagggaatttcgaatattcaaaccttta

SEQ ID NO: 8048 - DNA, 630 bp, Homo sapiens
  misc_feature 2, 3, 6, 8, 13, 473, 521, 543, 575, 606, 621, 622: n = A,T,C or G
tnnttncnttttngggcgaattgggccctctagatgcatgctcgagcggccgccagtgtgatggatatctgcagaattcggcttagcgtggtcgcggccgaggtaccacttgctgcgctcgttgttgtccttcaggatacactcatcccccttatgcacgattttctgatcttgtttgtagtcacagagagctctgagaataatgggtttattgcttctgtagtctgggttacgaggcttcagctgtacctgcccgggcggccgctcgaaagccgaattccagcacactggcggccgttactagtggatccgagctcggtaccaagcttggcgtaatcatggtcatagctgtttcctgtgtgaaattgttatccgctcacaattccacacaacatacgagccggaagcataaagtgtaaagctggggtgcctaatgagtgagctaactcacattattgcgttgcgctcactgnccgctttccagtcgggaaacctgtcgtgccagctgcattaatgaatcngccaacgccggggagaggcggnttgcgtattgggcgctcttccgcttcctcctnactgactcgttggctcggcgtcggttgggcnacggtttaactcctnnaaggcggg

SEQ ID NO: 8049 - DNA, 583 bp, Homo sapiens
  misc_feature 5, 32, 33, 35, 38, 107, 489, 509, 540, 578, 583: n = A,T,C or G
gtcgncccgcgtccgaaaattccgccgaaaannanaanacgctttacccgactctttgggccgttatctcacggcgaactttctgaccaagtatacaactacccagnagggcctaggagaagtgctgtatagagagcagttcgacttcaacgctgagccaccttgggaacctagctgatgataggggggttccatctcccaacttgtccattttgttgcatattctaaggacccagacataggcttggtggcccgtctcttgtctttcctggtttatgactttcggctttgtggaatacggctgagatgaaaggatttattgatgatgcaaactactccgttggcctgttggatgaaggaacaaaccttggaaatgttattgataactatgtttatgaacataccctgacagggaaaaatgcattttttgtgggagatcttggaaagattgtgaagaaacacagtcaatggcagaatgtagtggctcanataaagccattctacacagngaagtgcaactctgctccagctgtacttganattttggcagctcttggaaccggatttgcttgttccantaaan

SEQ ID NO: 8050 - DNA, 724 bp, Homo sapiens
  misc_feature 1, 2, 3, 4, 5, 6, 7, 8, 9, 10, 11, 12, 13, 14, 15, 16, 17,18, 19, 20, 21, 22, 23, 24, 25, 26, 27, 28, 29, 30, 31,32, 33, 34, 35, 36, 37, 38, 39, 40, 41, 42, 43, 44, 45,46, 47, 48, 49, 50, 52, 54, 55, 56, 59, 60, 63, 66, 67,78: n = A,T,C or G
  misc_feature 102, 122, 123, 170, 381, 383, 387, 393, 399, 400, 406, 407,408, 410, 417, 418, 419, 422, 423, 424, 425, 426, 427, 428,429, 433, 435, 442, 443, 454, 457, 458, 459, 461, 474, 475,481, 492, 494, 495, 496, 497, 498, 508, 509, 511, 514: n = A,T,C or G
  misc_feature 515, 518, 520, 521, 522, 523, 524, 526, 527, 528, 530, 531,532, 535, 540, 544, 549, 551, 553, 554, 556, 557, 561, 564,565, 566, 567, 570, 574, 578, 582, 584, 588, 589, 591, 592,593, 596, 599, 602, 603, 604, 607, 608, 609, 610, 611: n = A,T,C or G
  misc_feature 612, 614, 619, 623, 624, 626, 627, 629, 633, 634, 635, 637,640, 642, 648, 650, 659, 661, 663, 667, 668, 670, 672, 673,674, 677, 680, 681, 683, 685, 694, 695, 698, 700, 703, 704,707, 712, 714, 715, 723: n = A,T,C or G
nnnnnnnnnnnnnnnnnnnnnnnnnnnnnnnnnnnnnnnnnnnnnnnnnngnannnagnntgnctnnagggtaacagnagtctgggtaccgggccccccctncgtggtcgacggtatcgatnngcttgatatcgaattcctgcagcccgggggcatccactagttctagnagcggccgaggtacctccgctaccgccaccaccaccaccaaaacgcattggcgaagtggagggttcattagggcaatgagcacagcggcttactttggggacagaagaaagctgtattttaggctgctgaagagaacgaatatcaggaagtgggactgctggagaaagcttagggccagcatgaaggggtgatggtacctgcccgggcggncnatgncaccgngggggnnctccannntncctatannncgnnnnnnnnctcncnccccctnngaccccccggncannntnggttacgggcgtnngccctntccccgctcgncnnnnnccccatcgcnncnctnnacncnnnnnannnannntgntgtgnttanattgngngnngnnaaanttnnnncgnagcnccgncgcntntatnncnnnccngtnttnnncgnnnnnngnctacngatnncnncncgtnnnanttncncgccgnanttttccccntntncatnncnannngtngcnncngngccacttcnnatntnccnnttnttttntnnaatttttnt

SEQ ID NO: 8051 - DNA, 412 bp, Homo sapiens
gagcgccccgtaataccgactcactatagggcgaattggagctccaccgcggtggcggccgacatcgccgccgagggatcgttggcagccgggtgggagtgtggctgtgttctcgtccctggctgacaacgaaggggagctagtcacttttcctgccacgacgactcgcgtccgcctctcgcctggagtacctcggccgctctagaactagtggatcccccgggctgcaggaattcgatatcaagcttatcgataccgtcgacctcgagggggggcccggtacccagcttttgttccctttagtgagggttaattgcgcgcttggcgtaatcatggtcatagctgtttcctgtgtgaaattgttatccgctcacaattccacacaacatacgagccgggagcataaagtgta

SEQ ID NO: 8052 - DNA, 417 bp, Homo sapiens
  misc_feature 3, 5: n = A,T,C or G
gcncnccgtaatacgactcactatagggcgaattggagctccaccgcggtggcggccgcccgggcaggtacgggggccagttattatactgctgacagtaataaaccgcaaaatcttcagactgcaggctgctgatggtgagagtgaactctgtcccagacccactgccactgaacctggctgggataccagtggccctggtggatgcaccatagatgaggagcctgggagcctggccaggtttctgctggtacctcggccgctctagaactagtggatcccccgggctgcaggaattcgatatcaagcttatcgataccgtcgacctcgagggggggcccggtacccagcttttgttccctttagtgagggttaattgcgcgcttggcgtaatcatggtcatagctgtttcctgtg

SEQ ID NO: 8053 - DNA, 617 bp, Homo sapiens
  misc_feature 5, 7, 62, 69, 78, 84, 100, 105, 111, 112, 114, 115, 116,117, 118, 122, 130, 133, 135, 136, 138, 139, 142, 144, 145,151, 154, 155, 158, 159, 162, 163, 176, 178, 187, 192, 195,198, 206, 207, 210, 211, 213, 214, 216, 225, 226, 231: n = A,T,C or G
  misc_feature 235, 237, 248, 250, 254, 255, 256, 265, 270, 274, 275, 276,281, 291, 295, 296, 304, 307, 309, 311, 321, 323, 324, 327,331, 332, 335, 338, 339, 345, 353, 357, 363, 365, 369, 370,371, 372, 374, 375, 377, 378, 379, 380, 381, 395, 400: n = A,T,C or G
  misc_feature 401, 404, 405, 406, 417, 423, 424, 434, 435, 436, 440, 441,442, 448, 451, 452, 456, 459, 462, 463, 477, 480, 482, 484,485, 486, 496, 498, 501, 503, 514, 515, 517, 520, 521, 522,532, 534, 535, 539, 540, 545, 568, 569, 588, 597, 608: n = A,T,C or G
  misc_feature 609, 616: n = A,T,C or G
aaaancnaattttttaaaaaaaaaaaaaaaaacaaaaaaaaaaaaaaaaaaaaaaaaatttnggggggncccttaaangggttnaaaaaaaaaccccccnccccncccccnnannnnnaaanaaaaaaanaangnnannggngnnggaaanttnnttnntgnnccttaaaaggggnanaaaaaaaanaaaanccnccnaaattttnnaanntnntnttttttttnnccggntttnangggggggttgncnaaannnaaaaagggnttttnaaannntgggnaccccggggncccnncccaaaanaantncntttccccttncnnccnaaannaanccnnggcccngggccttngggngggggnangggnnnnanntnnnnnaaaggggggaaaangggtnnccnnnaaaaagggggnaaaccnnggaaaaaaannngggnnnaaaggnccnnaaanggnccnnaaccctaaaaaggnccngntnnnggggtttttncnaangnccccccccccnngnaannnttaaaaaaantnncccnnaaggnaaaggggggaaaacccccccggnncttaaaaaaaccccggggnttccccctngaaaccccccnnggccccna

SEQ ID NO: 8054 - DNA, 658 bp, Homo sapiens
  misc_feature 581, 601, 626, 643, 657, 658: n = A,T,C or G
tcactatagggcgaattggagctccaccgcggtggcggccgaggtacgcgggtcttttaaccagtaatttaatcttcacatcacttttacttagaccttgatgaatgctcccagtccccgaaaccatgcaactacatctgcaagaacactgaggggagttatcagtgttcatgtccgagggggtatgtcctgcaagaggatggaaagacatgcaaaggtgagtgaagagtctctgacaatcgtgaccctagtctgtatcttttctttcaaatttaaatattagattatcaggaattatgccatgtgcatcaccttcattaaaaggtcccatcctagtggccatgttattgctcatagaaaaactctaccaatatgctcattgcaggaagcagagaggattaaaacccaagttaaaacagtttgcttcttatagaaaactgcataaattttaaaaaataaaataaaacaaaagttttggtatgggaagagatcgaaacaaatcactgaaataagatatttgttgttgttgcttatctaagctttatttctctaagctacctttattacaggtttactgtggnaaagtgaaaatggataggtnaatttaaattttttgcttaggtagnatcaaaagtaattattnatcaagctaaattnn

SEQ ID NO: 8055 - DNA, 937 bp, Homo sapiens
  misc_feature 9, 15, 540, 572, 578, 585, 637, 650, 652, 654, 658, 671,683, 687, 695, 718, 726, 733, 736, 739, 742, 756, 763, 778,782, 788, 791, 795, 804, 824, 832, 833, 837, 845, 855, 859,871, 872, 874, 879, 880, 889, 892, 899, 901, 905, 910: n = A,T,C or G
  misc_feature 917, 918, 920, 930: n = A,T,C or G
ttacgcgtncgattntgacttcactcaagtctgttaatggacaaatagaaagcctcattagtcctgatggttctcgtaaaaaccccgctagaaactgcagagacctgaaattctgccatcctgaactcaagagtggagaatactgggttgaccctaaccaaggatgcaaattggatgctatcaaggtattctgtaatatggaaactggggaaacatgcataagtgccaatcctttgaatgttccacggaaacactggtggacagattctagtgctgagaagaaacacgtttggtttggagagtccatggatggtggttttcaagtttagctaccggcaatcctgaacttcctgaagatgtccttgatgtgcaagctggcattccttcgacttctctccagccgagcttcccagaacatcacatatcactgcaaaaatagcattgcatacatggatcaggccaagtggaaatgtaaaagaagccctgaagctgatgggggtcaaatgaaaggtgaaatttcaaaggcttgaagggaaatangccaaatttcaccttacaccaggttcttgggngggatngtttgcncccaaaaacaccacctggggggaatgggaggcaaaaacaagtcttttgaaanattccgaaccccncnangggntgtggagactccntatttgtaaganattncacccctnttgaacattttgggggggtcctngatcaaanaaatttnggnggnggnacgtttggcccttngtttgcnttttttttaaaaccnaacntttttnttnaaantccccaacnaaaaaaaaatttaacttccnttaggggnncccncttgggtntaaatctttnggcnacccagtggcanngngaccnncaaaaattnccngtttttntntttnccaanatggttnngnaacccttttntttttct

SEQ ID NO: 8056 - DNA, 646 bp, Homo sapiens
  misc_feature 3, 9, 12, 19, 24, 33, 34, 35, 66, 98, 160, 495, 520, 542,547, 548, 552, 555, 557, 559, 562, 569, 572, 574, 578, 579,580, 581, 582, 583, 586, 587, 593, 594, 595, 597, 598, 599,600, 602, 603, 605, 606, 607, 608, 611, 612, 613, 614: n = A,T,C or G
  misc_feature 615, 616, 617, 618, 619, 620, 621, 622, 623, 624, 626, 627,629, 630, 631, 632, 634, 635, 636, 638, 639, 640, 641, 644,646: n = A,T,C or G
gtnatacgnctncactctnagggncgaattggnnnctccaccgcggtggcggccgagtacgcgggnaagcacatatttggtagcctttgcatacaagnaatgtgaaatttgttctcaagcacaaagtagcacagaagagggaggatgctgtttccaaagnaagtgactcgaaaactttctgaagctgataatagaaagatgtctcggaaggagaaagatgaaagaatcttgtggaagaagaatgaagttgctgattatgaagctacaacattttccatcttctataacaacactctgttcctggtcgtggccattgttgcttccttcttcatattgaagaacttcaaccccacagtgaactacatattgtccataagtgcttcatcaggactcatcgccctcctgtctactggctccaaatagaccatgtcagcttcaccccctggctttgtgtctatgggtggcctgtggtatatggaaaagtagcagggtggncagggtgggagacacaagatgtttntatagactagagcctttaaaanacccnnggantgnantncangtttgtnatngnctgnnnnnngcnnaggttnnntnnnntnntnnnnggnnnnnnnnnnnnnntnngnnnntnnntnnnnccngn

SEQ ID NO: 8057 - DNA, 645 bp, Homo sapiens
  misc_feature 2, 11, 30, 32, 82, 114, 123, 212, 266, 306, 575, 583, 586,588, 596, 598, 601, 608, 611: n = A,T,C or G
tnatacgactncactatagggcgaattggnanctccaccgcggtggcggccgaggtactttttttttttttttttttttttngaaccaaaatcatagtatttagagttggaagngacctttgngatcattatttcaatcctttcagagaattctctctgcaggaatatctatgtaggacttggatttgacccaagcacatacaatgtctcanagggctctctgctcctggccaagagcatcaggtcttgtttttaatataatcagngttgtaaattatggcacagagaacaggctcattcagctgnggaatgaactgagttaaatggacttgtaaacatccctaaatgaaagaattaaaaagtcaaatgaggaattatatagccgtcccttggtatcctcaagggattggttctaggacccctggggataccaaaatcctaggatgctaaactccctgatataaaacggcatagtatttcaatataatctaagcacatgctcccatatacctgaaagcatcgctatagattacttataatacttaatacaatgtaaatgctatgtaaatagctgntatactanagntnctttattngnatnatttttnatngggctccttttgctgaatattttctttttttttt

SEQ ID NO: 8058 - DNA, 646 bp, Homo sapiens
  misc_feature 21, 407, 486, 545, 557, 565, 567, 571, 577, 586, 590, 624: n = A,T,C or G
gcattaaccctcactaagggnaacaaagctgggtaccgggccccccctcgggtcgacggtatcgataagcttgatatcgaattcctgcagcccgggggatccactagttctagagcggccgtccgggcaggtacaaagcacgatgagatgagcaaagttaacatggcacagacttcctggtttctcccatacctgtgactcttgttgcctgcaacctggggtctcccattcatgtatatttctctccttgaagcctcctgacatcaatccctgtctgaggcaatttctaaaaaaaaaaaaaaaaaaaaaaaaaaaaagtacctcggccgccaccgcggtggagctccaattcgccctatagtgagtcgtattacgcgcgctcactggccgtcgttttacaacgtcgngactgggaaaaccctggcgttacccaacttaatcgccttgcagcacatccccctttcgccagctggcgtaatagcgaanaggcccgcaccgatcgccctttccaacagttgcccaacctgaatggcgaatgggacccnccctgtaacggngcattaancncggnggtggngggggtacnccangggaccggttaattgcaaggccctaacgccgctncctttggttttttcctttcctt

SEQ ID NO: 8059 - DNA, 645 bp, Homo sapiens
  misc_feature 68, 604, 637, 645: n = A,T,C or G
tcactatagggcgaattggactccaccgcggtggcggccgcccgggcaggtacgcgggcggtcccagnatttggtgggactctcctctggtatcagttttcaacgccacttcttgtttggagtcattcccagtgcagtcatggactctatgaacaaatacggttatttaaatgtatttgtccagtatgagaatcagaatgaactagtagaggctttacagatcagttggtctgacccattttacagatgaggaaacaggcctgagaagatggagggagttacccacaatctgaaggggctctaccatgactagacccaggtcacctgcctcccaggcctggctctttccactccgaggtgctggctcaccacagacttattctttaatggaattttggaaaggcctcactccagtgactctttggatctttcttctctaagtagatgggaagcctgtaagaagagacttggaggcgaagcaaagggaatcagcacttaaccctcacccaagggcccaagagaatctttagtaactggaggcagagcagactggagcctctacggggcatcttcccctattggagaattcagtctttggtttggnaatcttataatgtcttttggagaggctttaaanaattttgn

SEQ ID NO: 8060 - DNA, 664 bp, Homo sapiens
  misc_feature 22, 88, 556, 558, 559, 561, 562, 563, 564, 565, 569, 572,573, 574, 575, 576, 577, 578, 579, 580, 581, 582, 583, 584,585, 586, 587, 588, 589, 590, 591, 592, 593, 594, 595, 596,597, 598, 599, 600, 601, 602, 603, 604, 605, 606, 607: n = A,T,C or G
  misc_feature 608, 609, 610, 611, 612, 613, 614, 615, 616, 617, 618, 619,620, 621, 622, 623, 624, 625, 626, 627, 628, 629, 630, 631,632, 633, 634, 635, 636, 637, 638, 639, 640, 641, 642, 643,644, 645, 646, 647, 648, 649, 650, 651, 652, 653, 654: n = A,T,C or G
  misc_feature 655, 656, 657, 661, 664: n = A,T,C or G
gactcctatagggcgaattggnactccaccgcggtggcggccgcccgggcaggtacgcgggggttactaaggcagcagagtagaaagnatgaagtgcaaggacctggaaatcagacacacctgggttcctggtaagcttcactgcttcctggtctctgatatcagctctgcccaaatttcagctgtcacagaatgagtgatcctcatagtataatggaaatgcatcatctcagtttccccatggcctgaatatccatacaaaatgagagccggtagagaaaaacagaggacgtgaggagtttttaaaaattgaggaaaagtggaaggaaaagtaaggatgaaggtgaagatgaaggaatatgtcagagatgctagcactggcatcccccaccacacagtacctcggccgctctagaactagtggatcccccgggctgcaggaattcgatatcaagcttatcgataccgtcgacctcgagggggggcccggtacccagcttttgttccctttagtgagggttaattgcgcgcttggcgtaatcatggtcatagctgntnncnnnnngggnaannnnnnnnnnnnnnnnnnnnnnnnnnnnnnnnnnnnnnnnnnnnnnnnnnnnnnnnnnnnnnnnnnnnnnnnnnnnnnnnnnnnnnttanttn

SEQ ID NO: 8061 - DNA, 652 bp, Homo sapiens
  misc_feature 2, 20, 592, 614, 626, 629, 634, 652: n = A,T,C or G
gnctcctaagggcgattggngctccaccgcggtggcggccgcccgggcaggtacttagaaaaatggttatttctaagcctcagtgaaacgtgtccaatgaaagaaaagcctgaattaccaacatgggttagcatcactcacacgcaggcagagataacagcaagtgtcatttaagacttttctaaaacttcatgccttaaggagtaaagatccagttcatatagggttagcaactgccttcagcgaagaggaaaacagtaaataattaacaaaaagatcaagtcaggagataaggctaagagagacagactgaaaggttagaggaggatagtgaggcttggagacttgaaaaacagaggagcgtgaagattaagtggagacaaacggcacacaggaaacagaaattcccaagtgtggaagagactagacagctgaaataaggaacgcaggtgaaaagtcactctaaaattcagatgatgagaagttgaaaatatcagccccatatatcaagaatgatacttctcaactttattgcacagaagaatgtcccatgaaacatgtaaactgcagatttcagcagacttcagccccnccccaaagttgactggctggcnctggcccctcanaanggaanaaacctgctcaaaccttn

SEQ ID NO: 8062 - DNA, 636 bp, Homo sapiens
  misc_feature 20, 53, 85, 112, 520, 530, 578, 614: n = A,T,C or G
tcactatagggcgaattggnagctccaccgcggtggcggccgcccgggcaggnacgaccagtgtgaatgaatggagcaaccaagnggttaggcagtaggagatgaggccagnagaagaaagagggtgtggtagccccctaatgctggcacttacttccactggatctaaaatccagcacggaattatgctgaccacatcagcctaactaatattgatctaagtaacatttatgttctagcacctaaatcaggagcctgcaaaggatagcccactgccaaaatctggcccactctccagtttttgtaactaaaatgttatcagaactcagccaagtccattcatttacaaactgtctacggtggcagagacaatacggctcacaaagtctaaaatatttactctctggctctttatagaaaaaatttgctgaccccttgtctaaattatagcaagtatgaaatcctctatcatcagcaatggcatagaaggcagcataggaatttttaaatttgcccttgnattatattgnaagccttatgtatgaggtcctatttttgcaagtgctgagcaccccctnctattatgaggagtgccccctttctttctcattggnctgcctataacatttaccaaag

SEQ ID NO: 8063 - DNA, 636 bp, Homo sapiens
  misc_feature 23, 527, 531, 536, 594, 596, 606, 618, 629, 631: n = A,T,C or G
gcgcattaaccctcactaagggnaacaaagctgggtaccgggccccccctcgggtcgacggtatcgataagcttgatatcgaattcctgcagcccgggggatccactagttctagagcggccgaggtacctgcctcatgaagcttataaaacaagagaaggtaggcatgagttcatgtgaaaatgcaactcaccgtgctaggaaacacagcacagggatttggccaagtcaacagtcagtaaatgcttttctgcaaaagtgacacctgagccaaggtcttttggaaatcccagcgaaaagagcagtgcacagtgacatgtgtcaagggccccagccatggaaaagatggaatcctgctccgaggagagacagtagctggccaccgcggtggagctccaattcgccctatagtgagtcgtattacgcgcgctcactggccgtcgttttacaacgtcgtgactgggaaaaccctggcgttacccaacttaatcgccttgcagcacattcccctttcgccagctggcgtnatancgaanagggccgcaccgatcgccctttccaaagttgcgcaaccctgaatggcgaatggggacncnccctgtaacngcgcattaaacncggcgggtgtngngggtt

SEQ ID NO: 8064 - DNA, 461 bp, Homo sapiens
  misc_feature 2: n = A,T,C or G
tncttagggagtcgccccgcgtccgaagagtttgacttagaataatgaaggtaactagaaagtgagttaatcttgtatgaggttgcattgattttttaaggcaatatataattgaaactactgtccaatcaaaggggaaatgttttgatctttagatagcatgcaaagtaagacccagcattttaaaagccctttttaaaaactagacttcgtactgtgagtattgcttatatgtccttatggggatgggtgccacaaatagaaaatatgaccagatcagggacttgaatgcacttttgctcatggtgaatatagatgaacagagaggaaaatgtatttaaaagaaatacgagaaaagaaaatgtgaaagttttacaagttagagggatggaaggtaatgtttaatgttgatgtcatggagtgacagaatggctttgctggcactcagagctcctcactta

SEQ ID NO: 8065 - DNA, 849 bp, Homo sapiens
  misc_feature 1, 2, 5, 7, 9, 11, 12, 15, 16, 18, 19, 21, 22, 23, 24, 25,28, 29, 34, 36, 37, 38, 41, 42, 44, 47, 48, 51, 56, 57,59, 61, 62, 63, 65, 67, 68, 69, 70, 72, 74, 78, 80, 83,86, 88, 89, 91, 92, 93, 95, 96, 97, 100, 102, 103, 104,106: n = A,T,C or G
  misc_feature 107, 108, 109, 110, 111, 112, 113, 114, 115, 116, 117, 118,126, 129, 152, 163, 260, 319, 356, 361, 437, 440, 523, 528,536, 598, 614, 643, 683, 685, 734, 745, 754, 761, 771, 778,799, 826, 834, 840, 843: n = A,T,C or G
nnaananantnnaannannannnnnatnnttatnannntanntnatnntanattanntnannnanannnnanantttnanaanaanannannnannnttntnnnannnnnnnnnnnnnatggagtnttngcccgcctttccttctttacctntcagtcgcagnttcttttcacattaggctgttggttcaaacttttgggagcacggactgtcagttctctgggaagtggtcagcgcatccggcagggcttctcctcctntgtcttttggagaaccagggctcttctcaggggctctagggactgccaggctgtttcanccaggaagggccaaaaatcaagaagtgaagaatgtanaaagnttgtaaaatagaaaaaagtggaagttggtgaatcggttgttctttcctcacatttgggattgattgtcataagggnttnttagcaatgttcctccttttcttcaccctccccttttttctttctatttaatcaaagaggaaactttcaaagttaatggggantggtncggtatcntcacaaggctgaggaactcgtttcaccttccaagcatttttcatggaaaaaaacctggcttncttattaaatcatacnaaaacttcttcaaccattgattgtgaaanaggttttcacaaaatcctttcaaaaaataaaaaagttaangnaccttaagaaacctgccaaaaaaaaaaaaaaaaaaaaaaaaaaggggcngggccgcttangactatgtnttaagangaaaaaaacnttccaanaccttccccctgaaaccttgnaaaaaaaaaaaatggaaatgcaaattngttggttngtaaanttnttttaa

SEQ ID NO: 8066 - DNA, 669 bp, Homo sapiens
  misc_feature 478, 488, 503, 543, 556, 579, 590, 592, 598, 620, 630, 635,644, 649, 652, 656, 657, 669: n = A,T,C or G
tatagggcgaattggagctccaccgcggtggcggccgcccgggcaggtacgcgggcgctctgcacagcagtcaaagccatctcttcggcggtgcgcaaggcgggcatcgcgcacctctatggcattgctggttctaccaacgtgacaggtgatcaagttaagaagctggacgtcctctccaacgacctggttatgaacatgttaaagtcatcctttgccacgtgtgttctcgtgtcagaagaagataaacacgccatcatagtggaaccggagaaaaggggtaaatatgtggtctgttttgatccccttgatggatcttccaacatcgattgccttgtgtccgttggaaccatttttggcatctatagaaagaaatcaactgatgagccttctgagaaggatgctccgcaaccaggcccggaaccctggtggcagcccgctacgcactgtatggcagtgccaccatgctggtccttgncatggactgnggggtcaactgcttnatgctggacccggccattcggggagttcattttggggganaaggatgggaaanaaaaaaaagaaaggtaaaatctncagcctttacnanggcctnaccaaggactttgaccctgccngtacttagtnccttnggccgtctnaaaantangggnncccccgggctgn

SEQ ID NO: 8067 - DNA, 642 bp, Homo sapiens
gcaattaaccctcactaagggaacaaagctgggtaccgggccccccctcgggtcgacggtatcgataagcttgatatcgaattcctgcagcccgggggatccactagttctagagcggcccagcctggggctgcgtttggatttattgtttttattccacacttcctacttggtctctggaagttttaccacatgtaacagattcctttatatgtagtggaaatcactatttgtagaaactgtcaggtcaaaatatttaactgactgttgacatgtattttcttttttccttgtttttgttttttggggttttctgctttaagatatataccactatgtatatccagttaactgagagaattttgactctcttaataaaactgcattaagtttttgattttgtagaaattagcttttgtctaggcaactagtggttatactctgcaaatattgtaatgaatttttacttttttgatttttgtaataaaaattggtgcagataaaatgtcaaatgaacaaaccagtgttctaagagtgttactaacattttgttctaaaactgtccttcacaaattgaataaaaaactctcacactcaaaaaaaaaaaaaaaaaaaaaaaaaagtacctcggccgccaccgcg

SEQ ID NO: 8068 - DNA, 676 bp, Homo sapiens
  misc_feature 27, 50, 538, 560, 568, 580, 586, 594, 603, 604, 606, 632,639, 660, 669, 671, 673: n = A,T,C or G
gcattaaccctcactaagggaacaaanctgggtaccgggccccccctcgngtcgacggtatcgataagcttgatatcgaattcctgcagcccgggggatccactagttctagagcggccgcccgggcaggtacgcggggaataatggatgggtgatttgttggtgatgggtttgattatttcttctggtggagaatgggaggtcagtgtcaacagggcaaagtacaataagtgggtaaagttttttgtattgattatatatagcaaaggtgttcttaaattaaaacctaatttgaagccctagagaggaggaaaggtaatggatctctagtttcaggcatcaaccttctggagcatccctggccaataaaaatgaaatgcaagtcacacatataattttaaattttataacagccacagtaaaaagaactttaacaagtaaaaaaaaaaaaaaaaaaaaaaaaaaaagtaccctcggccgccaccgcggtggagctccaattcgccctatagtgagtcgtattacccccccctcactngcccgtcgttttacaacgtcgngactgggnaaaccctggcgntacccnacttaatncgcttgcannanattcccccttttgccagctggcggtnataaccnaaaaaggcccccccccgatcnccctttccnananttg

SEQ ID NO: 8069 - DNA, 663 bp, Homo sapiens
  misc_feature 19, 87, 621, 638, 655: n = A,T,C or G
cactatagggcgaattggngctccaccgcggtggcggccgcggtacggtgatcattactccccagcgcagctcaatccacttccagnactgttctaattgttggaataattttccttatgtaattcaatttcccatctattaatttatgagatatttatttaaaactgaccgtattccaggaactgggctaaacgaagaagagtagtgaattaatacagaaatcacccttgatttggcagaatattttccctggtagtgtaggtcacccctattgtggtgataatcccccaaatcatacagcaaaagaaacaacacacagacaaaaaccaagtcattcttctaggatgttttcatccaaggatttgaaaagatttaggtgatcttccatttttcatcctatgcaatctgggctatgctactactttacagattgaaaatatatttaaaaatcactgaactttcaatagtcaccaatgatcactgttctagttgcagttacaattaggtgttcaaggaaacacttataacttaaatttaatgtctaaatcttacacctttaattggaaaaataatgtaataagtgagcaattagattatctagtattagaaaaatacctgangattggctgggcatggnggcttatgtttggtatnccagcact

SEQ ID NO: 8070 - DNA, 426 bp, Homo sapiens
  misc_feature 5, 30, 90, 248, 249: n = A,T,C or G
tactntagggagtcgccccacgcgtccganaaaaaaaatcaatcaacacaacacacacacacatacatacacacacacctgcctttaaanggaggagccaatatttgttgtacctgtgaactgaggaattatagataaaccttaggtcaaatcatttcacaattgcattggtggtattgaaaaatgatgagatttctctgacagagagctttgtcctagtttttgttcttcataggtcaaaactggcnntattctcttgtctgcaagataaagtgtttgtgcttctatcaccatatgcatgaacatgtaagaatcagatacaatttctgcttcatcagtttcacatgttcatgttgtcactgaaaaaatgcatctactgtttatagctcccaaggagaccccaaatcctttttttttcttttgaga

SEQ ID NO: 8071 - DNA, 670 bp, Homo sapiens
  misc_feature 69, 97, 471, 512, 528, 555, 594, 629, 647, 654: n = A,T,C or G
tcactatagggcgaattggagctccaccgcggtggcggccgcccgggcaggtactaacttatccccagnggaaacagggtttatgagcactgacagnatgtcttccctgggcaaaaaaaaaaaaaatagtatatgtatacacacacacatacacatttatatttatatttcttaaagcttttaatccctttcattccctgatatctcagagatttcaaatcattgaacactgaagtatatttttcaggccagatgaaaaattgtattaaaaccctattcctggtcaggcgcagtggctcacgcctataatcccagcactttgggaggccgaagtaagcagatcacctgaggtcgggagttcaagacaaacctggccaacatggtgaaaccctgtctctactaaaactacaaaaaaaattagcctgatgtggtgttgtgtgcctgtagtcccagctacttaggagggctgangtaggagaattgcttgaacctgggaggcggaggttgcagtngagcccaaaattaccnccctggccttccagcctggggcaaaanacgaggacggcttcaaaccaccaccacaccaaaaccctnttccttggctttgtaggagtcaaaaaaaagaaccncctttttctttttttatnaataaancttaaagtctgggggc

SEQ ID NO: 8072 - DNA, 634 bp, Homo sapiens
  misc_feature 571, 601, 612: n = A,T,C or G
aaagggaacaaaagctgggtaccgggccccccctcgggtcgacggtatcgataagcttgatatcgaattcctgcagcccgggggatccactagttctagagcggccgaggtacttaactagggttagccgaggtcaggagggtggatgccttattatgggattagtgcccttctaagagggacagtagagggcttgttcatgctctctctctccatgcacaagaaagagcacacagtgagaaggaaagaggccctcaccagaacctgaccatgctggcaccgtgattgcagacttccagcctccaggattgtgagaagataaatatctgtggtttaagtcaccaagtctgtggtgtgttttatggcagcacaaggtaacccagatgatgcttttcaccactgggtggtccagcctttcatggaagctgtcagctcctcagccttgcaaaaaatgcttgctggtcactctctttggtcctttcagatgcctttcttagtggtgcctctaccaggcccttgacttcatccttttctgtcagaggaagggtgagtaaagtcctgcccgggcggncgccaccgcggtggagctccaattcgcccntagtgagtcgnattacgcgccctcactggccgc

SEQ ID NO: 8073 - DNA, 672 bp, Homo sapiens
  misc_feature 3, 30, 142, 182, 240, 246, 257, 321, 338, 345, 382, 460,471, 578, 583, 604, 605, 607, 614, 616, 628, 635, 636, 638,645, 653, 667, 672: n = A,T,C or G
gtnatacgactcactatagggcgaattggnactccaccgcggtggcggccgcccgggcaggtactttttttttttttttttttttttttcaggaattattaggaatcatttccaacaccaggacaaatatgcaaagtaaagngggtattgttatttctttgtccctagttcacatgatttanattgattaaaatgttaatttttacatatgtgaataaaacgtaaaggagcaaactgganattgcnccatgtgctancaatcattgcgggtgggtaaactgacaacatgtaactgcatattaagacaaatgtagaatttanacaaagtattccatctnttttcanatgtatacttttaaacctcaggaactgttttcagtanatgtcatgccttttaacttgaaaaaagataagcgcaaataagctcccaattgtctccccaatatgtaaaccacatctngggcctgctgnctcttgctactccctttgaagtttcccctgaaatgtcatgtgttgggaaaactgctgtgcataaacaagacattttgctccctctcaaaattcttacccgggttccncctgntttttggtattccaacccttnntntccgaananaccctttccagnccttttnngntatccancccaattngcccctttgggttntttan

SEQ ID NO: 8074 - DNA, 665 bp, Homo sapiens
  misc_feature 382, 406, 422, 428, 430, 450, 463, 466, 482, 493, 506, 514,523, 532, 533, 537, 555, 556, 559, 568, 573, 583, 610, 613,630, 638, 651: n = A,T,C or G
cctcactaagggaacaaaagctgggtaccgggccccccctcgggtcgacggtatcgataagcttgatatcgaattcctgcagcccgggggatccactagttctagagcggccgaggtacacctatgatgaatacaccaaaggctacctggatcaggcttcagggagtgccatcatcgatctcacagaaaatgaccaggtgtggctccagcttcccaatgccgagtcaaatggcctatactcctctgagtatgtccactcctctttctcaggattcctagtggctccaatgtgagtacagtttaaaaacaaatcttacacagccttacatttcaattttttttctttaaaggagtgagttgtgtacctgccccgggcggccgncaccgcggtggagctccaattcgncctatagtgagtcgtntacccncnctcactggccgtcggtttanaacgtcgtgactnggnaaacccctggcgttancccacttaatncgccttggagaanattccccnttttgcagntggcgttannaccnaaaaggcccgaccgatcnnccnttccaaaanttgcnccaacctaantgggaatgggacccccccctttaccgngcntttaaacccgggggggnggggggtncccccccggggancccttcactttgcc

SEQ ID NO: 8075 - DNA, 652 bp, Homo sapiens
  misc_feature 522, 534, 549, 555, 562, 563, 565, 575, 588, 606, 607, 611,616, 617, 643: n = A,T,C or G
gcaattaaccctcactaagggaacaaagctgggtaccgggccccccctcgggtcgacggtatcgataagcttgatatcgaattcctgcagcccgggggatccactagttctagagcggccggcgggaggctgacgagagccgggaggcgttagcgaaggaagagaaaaaccgaagacgaagccactacagcccccgcgtactatgcaggaaagaattaccactaccaagaagggatctatcacctctgtacctcggccgccaccgcggtggagctccaattcgccctatagtgagtcgtattacgcgcgctcactggccgtcgttttacaacgtcgtgactgggaaaaccctggcgttacccaacttaatcgccttgcagcacatccccctttcgccagctggcgtaatagcgaagaggcccgcaccgatcgccctttcccaacagttgcgcagcctgaatggcgaatgggacgcgcccctgtagcggcgcattaagcgcggcgggtgtggtgggttacccncagcgtgaccgntacacttgccagcgnccctancggcccnntnctttcgcttntttcctttctttnttggcaccgtttggcggnntttncccgnnaagcttttaattgggggctccctttnagggtccat

SEQ ID NO: 8076 - DNA, 433 bp, Homo sapiens
  misc_feature 8, 10, 420: n = A,T,C or G
ggagctcnanctccaccgcggtggcggccgtcgcactcatttacccggggacagggagaggctcttctgcgtgtagtggttgtgcagagcctcatgcatcacggagcatgagaagacgttcccctgctgccacctgctcttgtccacggtgagcttgctatagaggaagaaggagccgtcggaagttccagcacgggaggccgtggtcttcccgcgtacctcggccgctctagaactagtggatcccccgggctgcaggaattcgatatcaagcttatcgataccgtcgacctcgagggggggcccggtacccagcttttgttccctttagtgagggttaattgcgcgcttggcgtaatcatggtcatagctgtttcctgtgtgaaattgttatccgctcacaattccacacaacatacngagccgggagcat

SEQ ID NO: 8077 - DNA, 636 bp, Homo sapiens
  misc_feature 63, 573, 589, 629, 635: n = A,T,C or G
ctatagggcgaattggagctccaccgcggtggcggccgaggtacttttataaatagccagagnattgagtcgaggctctgaagaaagtccaccatgtgaaattctttccggtgacattatccagtttggagtagacgtgacagagaatacacggaaagttacccatgggtgtattgtttccacaataaaactttttctaccagatggtatggaagcccggctccgctcagatgtcatccatgcaccattaccaagtcctgttgacaaagttgctgctaacactccaagtatgtacctgcccgggcggccgcccgggcaggtacaccaagcacctatttttataacttagcttcccatggagagataatggcttgcgtgcattttatgtatccataacatacatacaaggctcggtcttttcaatgggataacagttcacaactcttcgatttgaattgtaatgaaatctggtgacaaggattttctctatggattccaagttagccagaacttttaatgtcagatgaaaaaaggtgtaaggggtatattttcttaattccttaccaaaggagntacttccaatttcctnatgttttttttcaaaaaaaaatttaattgggttcaaaaantttgang

SEQ ID NO: 8078 - DNA, 653 bp, Homo sapiens
  misc_feature 348, 416, 461, 468, 494, 497, 507, 510, 511, 512, 517, 522,523, 524, 532, 541, 551, 552, 553, 556, 568, 570, 575, 576,577, 579, 590, 592, 594, 632, 649, 650: n = A,T,C or G
tatagggcgaattgggagctccaccgcggtggcggccgcccgggcaggtacgcggggagaggtcttttgaactccttcggccaccgtcgccgcgttctcgctgtgcactcttattctgcgcctgcgcgcggctacagcacggttcgtttttcctttagtcaggaaggacgttggtgttgagcatacgtatcaaggacagtaactaccatggctcccgaagttttgccaaaacctcggatgcgtggccttctggccaggcgtctgcgaaatcatatggctgtagcattcgtgctatccctgggggttgcagctttgtataagtttcgtgtggctgatcaaagaaagaangcatacgcagatttctacagaaactacgatgtcatgaaagattttgaggagatgaaggaaaggctggnatcttttcaaagtgtaaagtatcttggaatataaaaaatttcttnaggttgnattacctaaaagtttggcactgactnggntccctgaacnttnnnccatnaattnnngggctaanaaaaaaagnttccttttgnnnaanaaccctttaccnantcccnnnanaaaaaaaaganananaaaaagggtaaaaaaaaaaaaaaaaaaaaaaaggcccncggcccctttaaaaaannggg

SEQ ID NO: 8079 - DNA, 637 bp, Homo sapiens
  misc_feature 636: n = A,T,C or G
gcaattaaccctcactaagggaacaaagctgggtaccgggccccccctcgggtcgacggtatcgataagcttgatatcgaattcctgcagcccgggggatccactagttctagagcggccgaggtacctgggatgaatttgggtggcctgtttcttcacttagcttatctaaaatatctcccatgacttgtgccttcaaatttccagttggtggtaatgggcctatttcttgatttcctccctttttaaagtcggctggatggctaacctcctctgataatccttttaaagaaaaagtaaatggctgaaattcttctgggttgcctccttcagctacagaggcaggtggttctttcgactctaggctgatgatcttgggagagaaaggtttaatttcttcattctgagattcctccctaagcaatgatgaaagctctgaaattgcaggcatcgtagaagatgcacaaagctctctattttcttcttttccttctctgctcctaagctcagctgggcctttttctaaaacagaatcctctgtttcagttatgggagactttgcttgttttgtacctgccccgggcggccgccaccgcggtggagctccaatttcgccctatagtgagtcgtattacnc

SEQ ID NO: 8080 - DNA, 672 bp, Homo sapiens
  misc_feature 22, 30, 537, 581, 618, 664, 667, 672: n = A,T,C or G
gcaattaaccctcactaagggnaacaaagnctgggtaccgggccccccctcgggtcgacggtatcgataagcttgatatcgaattcctgcagcccgggggatccactagttctagagcggccgaggtactctgtcaccatgtggaggctgttgatctcaatgaaacggctcaatttggtggcatcaatgctttcaatgtcttcgtcctctaaattcagttgttcattgtctacctgtatttccagctggcacgtctccttcatacttaaggctttgctattgcaaccaccaaaatcatcatcattatcatcataatcaggactcgtttaacatttgatgtgtctaaatgcttcctgactatttttctaggaattcctaggtctggtgcctgcacctcagctcacatcgctgtgcatggatcaagaatccccccccccccgcgtacctgcccgggcggccgccaccgcggtggagctccaattcgccctatagtgagtcgtattacgcgcgctcactggccgtcgttttacaacgtcntgactgggaaaaccctggcgttacccaacttaatcgccttgcancacatccccctttcgcccagctggcgtaatagcgaanaggcccgcaccgatcgcccttccaaaagttgcgcagcctgaaggcnaanggggn

SEQ ID NO: 8081 - DNA, 630 bp, Homo sapiens
  misc_feature 2, 4, 7, 8, 16, 22, 32, 33, 46, 90, 630: n = A,T,C or G
gntnctnncgcctctncccagnccttgcttgnntttttgaactggnacccatttcctgctaaaatcttcctggcctgcttcatcttaggnacacagccccattctattggattttattagattcttcatctcagaaactgtatcttattcctatttgctctcacacctccagttcctcgccgagtccctcctatattataggtatcccaggccagtccagggacagccaagtttggttccagtgtccctaacctaggctagattgattcaaatgagaatgctgaaataaggaaataggttcccaaagtaagttgcttatataggtgatggtaaaggtggatgctattgatgttgggtgttgctagttcttgatgaaaaatacacacaccagatggcagcttaacctgaggagtttgtcttccaagtgcgatttatgtgaaagagatgagagaatataattgtccaaagctcaggggaggagatcagtgtgaggggatctgcagaagaattaattgtaagacaaaggtgagaacactagactcatgatagatggaaaacccatttgaagtgagttctggaagacaagaatgaatagttcaactgaggctcaaaaaaaaaaaaaaaaaaaan

SEQ ID NO: 8082 - DNA, 650 bp, Homo sapiens
  misc_feature 80, 125, 132, 145, 173, 232, 245, 345, 362, 378, 384, 390,528, 612, 642, 650: n = A,T,C or G
tcactatagggcgaattggagctccaccgcggtggcggccgaggtacttttttttttttttttttttttttttttttcgncaattcaaagtaaaccaaatcatcacatcaagaaaaatacattgngcaactntcatgtccccttntgacaaagaaggcacatagccaggtgtntgttccctggaagcttaaaatctagttggggacaatcaggcaagagcacaaacggcctnttgcttgggctgnggcaaagagctggattttatcctaattgcgacaggatgacatcaggagagcaacatgatctcatagagattcttttaaatatatgaatttttaactttanagacagggtctcactgngtcacccaggctgganagcagnggtaanatcatagttcactgcagctttgacctcttaggctgaagcgatcctcctacctcagcctcctgggtagctaggactacagaagtgcttcatcatgacaggctaattttcaaattttttgtacagatggagtttcactgngttgcccaggctggtcacgaatttctgccttgaagggatcctcctgctttgcatatagattttaaaagctcattcaccctttgnggaaggggggttggaagatcaagactaganaaggcaan

SEQ ID NO: 8083 - DNA, 658 bp, Homo sapiens
  misc_feature 9, 11, 13, 15, 26, 32, 33, 34, 39, 48, 54, 55, 56, 97: n = A,T,C or G
ttttccaangnangnacatgtcaggncccttnnncaatncacccatgnctcagnnnaagcactgggttttcaccaacagcaaattccccaccaaagnatgctgttgtcacaatgaaacacaccctccaccatcccatcaatgtccccctgagacagtgtttagagtggaaacaaaataacttccatcacttgtgtctagggagtcaggatgctccagtggtgacaagagttaagtggagaatccaggcaaaatcttccccttccctacgcccacttctgtcaatgttcaaagggaatttttccttaaaagaagcccacattttcattttcatgaattagtaatttccaatcccctcgtgtgtatccaggccaaagaaaaatctttagaagtccttctcactcgattacatttttaaaggacccattaaaagaatgtaaatctgatcatttgaaagaagcaacagcagcgcgtatcacaggagacggaaatgttactcatttcaacagctctcatctcagcctggagtgcttcttactctaggaaaaacacacacccaacggctggccagcccacctgcacacaacacaacagcacctatcccagccgcggtcacctgctcagatccgtgtgcgatgaggaaaaatgctgcttaatgct

SEQ ID NO: 8084 - DNA, 643 bp, Homo sapiens
  misc_feature 22, 44, 57, 64, 79, 603, 607, 641: n = A,T,C or G
gactcctatagggcgaattggnactccaccgcggtggcggccgngtacagcaacagnaatgagnaagctacaaacaagnaaatgggaaaactcgaaacagtattttaaaaggtcacggatcgcctacagtgacgaagtacggaatgagctcctgggggatgatgggaattcctcagagaaccagagggcacatctgctcgataacacagagaggctggaaaggtcatctcggagactagaggctggataccaaatagcagtggaaaccggtaagaattctgagagtgagcaaattgtcttgcttatgcacagcagtcttcacaacacatgacatttcagggaaacttcaaaggagtagcagagacagcagcccgagatgtggtttacatattggggagacaattgggagcttatttgcgcttatcttttttcaagttaaaaggcatgacatctactgaaaacagttcctgaggtttaaaagtatacatctgaaaagagatggaatactttgtctaaattctacattttgtcttaatatgcagttacatgttgtcagtttacccacccgcaatgattgctagcacatggcgcaatctccagttngctnctttacgttttattcacatatgtaaaaattaacntt

SEQ ID NO: 8085 - DNA, 641 bp, Homo sapiens
  misc_feature 545, 554, 570, 575, 608, 638: n = A,T,C or G
gaattggagctccaccgcggtggcggccgcccgggcaggtacgcgggggcagtgggaagctcgcagcagctggggaggagtcaaagcctcggcgctcacctaagccgcagggagatacacccaactgggagatgaggaaacagcaacccagagaggagaactaacccacacaggatcatttcgcgaaggagcaaggctgaagaaccagacctggactttcttaggacaaacttactgcagcttgaaggagccaaccatggatttgaggcgtgtgaaggaatatttctcctggctctactatcaataccaaatcattagctgctgtgctgttttagagccctgggagcgatctatgtttaacaccatcttactaaccattattgctatggtggtatacactgcctatgtctttattccaatccacattcgcctggcttgggaatttttctcaaaaatatgtggatatcacagtacctcggccgctctagaactagtggatccccccgggcctgcaggaattcgatatcaagcttatcgatacccgncgacctcgnagggggggccccggtncccanctttttgttccctttaatgaggggttaattgcncccttggcgtaatcatgggcatagctgttncct

SEQ ID NO: 8086 - DNA, 1017 bp, Homo sapiens
  misc_feature 1, 2, 3, 4, 5, 6, 7, 8, 9, 10, 11, 12, 13, 14, 15, 16, 17,18, 19, 20, 21, 22, 23, 24, 25, 26, 27, 28, 29, 30, 31,32, 33, 34, 35, 36, 37, 38, 39, 40, 41, 42, 43, 44, 45,46, 47, 48, 51, 52, 53, 54, 55, 56, 57, 58, 60, 62, 63,64: n = A,T,C or G
  misc_feature 68, 69, 70, 71, 72, 73, 74, 75, 76, 78, 79, 80, 81, 82, 83,85, 86, 87, 88, 90, 92, 93, 94, 95, 96, 100, 101, 725, 729,831, 878, 896, 901, 911, 958, 961, 978, 1001, 1007, 1009,1010: n = A,T,C or G
nnnnnnnnnnnnnnnnnnnnnnnnnnnnnnnnnnnnnnnnnnnnnnnnagnnnnnnnngngnnnaggnnnnnnnnnannnnnnannnncncnnnnntatnnggcgaattgggtaccgggccccccctcgaggtcgacggtatcgataagcttgatatcgaattcctgcagcccgggggatccactagttctagagcggccgcccgggcaggtcaattctcgagatactggccatgccaagatgaaagaaaaagaaaaagaaaaagaaaaagaaaaagaaaaaatccatacagaatacacaagatacagtccacagaattcaaaaggccggacgcgtgggtcgactcaagctagcttgacctcggccgccaccgcggtggagctccagcttttgttccctttagtgaggggttaattgcgccgcttgggccgtaatcatggtcatagctgtttcctgtgtgaaattgttatccgcttcacaaattccaccacaacattacgaagcccgggaaggcataaagtgtaaagcctggggtgccctaatggagtgaagcctaacctcacattaaattgccgttgcgctcactgcccgctttccaagtcgggaaaacctgtccgtgcccaagctgcattaatgaatcggcccaacgcgccgggggaagagggccgggtttgcgtattggggccgctctttccgcttccttcggcttcacttgactcgcttgncgcntcggtcgtttccggcttgcggcgagccggtattcaagcctcactcaaaaaggcgggtaattaccggtttattcacaagaattcagggggaataaaccgccanggaaagaaacatggtggagccaaaaaggcccaccaaaaaaggcccanggaaccccgttaaaaaanggccnccgtttggcntggccgttttttttccattaaggctttccgccccccccttggcccangcntttaacaaaaaaaattnggcccccttcaaaggtaaaaagngggggngnnaaaccct

SEQ ID NO: 8087 - DNA, 643 bp, Homo sapiens
  misc_feature 527, 531, 532, 541, 547, 640, 642: n = A,T,C or G
tatagggcgaattggagctccaccgcggtggcggccgaggtactgacctcttagggatctaaggaaaagattctggaccagaatgggcctaggcttgaagtggatctcttccaaaagaatagtgaatagtttttatcttttctaaaagatggattgaatggaattcttccatttgtagtagttcttgtaagtttaattaattttgtaacatcttttgagaatttaccacatgccactccttgagctgggtgcttactatgtgtttattattttaaccctcacaacaacctcaacaccctcatgaagtaggtcctattaggatccctgttttgaagatgaactgaggctcatgtttagcccaagttcactgagctagtaactggcaaagttagaatctgaaatgaaatctgcctgatgtcagaatgatgttgttcattcataggctgatattcttaaggctctaccccaagacaatagtcacggcgtcatggcacaggcagcctgtggagctagctcatttgctccantccnnaaaaaaaanaaaaanaaaaaaaaagtacctgcccgggcggccgctcggctctagaactagtggatcccccgggctgcaggaattcgatatcaagcttatcgataccgncnc

SEQ ID NO: 8088 - DNA, 888 bp, Homo sapiens
  misc_feature 5, 6, 10, 11, 513, 546, 609, 634, 679, 689, 690, 712, 729,734, 755, 758, 775, 776, 788, 800, 807, 812, 814, 817, 822,824, 826, 828, 829, 833, 834, 836, 838, 840, 843, 846, 860,864, 869, 884, 885, 886: n = A,T,C or G
ttttnntttnngggtcgccccgcgtcctggctgacctttctttggaatgtcgtgagttccatttgtcccagaatacggtccgctaccgctgtgacatgagtgttagggaaggcgggttgtcacgtttctacaagccttccagtcaaaagggaaaccttgcctaagtccttgtagttgagaaatctctaagaggtggaagcaaatactgcacatgcgtgttggtcctgtgagggaaaccagctagtggagagggagaggttgaaggaacagaaaaatgagaagacaactcactggtagagtaacttggaatagatagaaatgggatcctgggcacgtattagttgtggggataggagaatgaatcctttatctgtgactcctgatggggtaaaaaaaagattatggataatcataagctcaaggtgtgaggtagggcagagagaaaaagaaggaatttgcacctgatggcttcttgtttctctgtaaagtttggtgacagagttgtcagtttantgtaaggcattcagatctgatggaacatttgancagtttgagaattgctttttaagggattagaaaaaaggcctcacctattcctgcttgggtcangtggattcctcacctcttaaatganaattaagtacttgcttcgtgagggtatttcaagggttgaattgangggccaattnnaaaaaaaaaaaaaagtttgaanggactttgaaaaattcntttcnccctttaaaccaatttatttnatnacaggtttcttaaattnnggggttttgttnaaaaatactacnttttttnccaancnccnttccnantnannatanntntntnttnaanggggggcccttaantttncctanaaaaaacctcccacnnnct

SEQ ID NO: 8089 - DNA, 461 bp, Homo sapiens
ctatcactacttagggcgaattggagctccccgcggtggcccgcccgggcaggtacgcgggggacaccctagatcccaagatctccaaggatttggtggcatacccactccagcacacagaagcatgaggttcatgactctcctcttcctgacagctctggcaggagccctggtctgtgcctatgatccagaggcccgcctcttgccccaggatcggggaacccttgccatgaagcatcagcagctcaaaaggaaaatgcaggtgaagacccagggttagccagacaggcaccaaagccaaggaagcagagatccagccttctggaaaaaggcctagacggagcaaaaaaagctgtggggggactcggaaaactaggaaaagatgcagtcgaagatctagaaagcgtgggtaaaggagccgtccatgaacgttaaagacgttccttgactcagtaccttcg

SEQ ID NO: 8090 - DNA, 625 bp, Homo sapiens
  misc_feature 8, 613, 625: n = A,T,C or G
tgcgcgcnccccacttgcccaattcttgacctcatttattgagctaaatccaaaaggaaactctaccactgactcttttctttctcatggcctccaaaatgaatcctaggtttttccagcagggtaaattcaaaaggactcaggttggaaattgacttcttggttaaaaaaaaaaaaaaagtataaacaaaaggtcctttttagaaatgaggtttattttcaaggctactcagtcctaaaagcctgcatatttactttttttccttcctccaggtttacctccaagtcaggatttcaaaaaccaccaacattcaggctcattcttattggtataaacaaacaaacaaaaaaaccagacaaaaaaaaaaaaaaaaaaaagtgcggccgctagactagtctagagaaaaaacctcccacacctccccctgaacctgaaacataaaatgaatgcaattgttgttgttaacttgtttattgcagcttataatggttacaaataaagcaatagcatcacaaatttcacaaataaagcatttttttcactgcattctagttgtggtttggtccaaactcatcaatgtatcttatcatgtctggatcccccgggtaccgncctcgaattaan

SEQ ID NO: 8091 - DNA, 625 bp, Homo sapiens
  misc_feature 1, 3, 4, 8, 530, 537, 580: n = A,T,C or G
ntnnctangggaacaaagctgggtaccgggccccccctcgggtcgacggtatcgataagcttgatatcgaattcctgcagcccgggggatccactagttctagagcggccgaggtacatgatctgttaaaacaaacatcttttcccaaccttccaagaaaataacctaaaaataaacaagaaacaaaaaatttatctggatatatttgcaaaagcctatccctgtagaagagtgtgaggagtgggagaaggcagggggacctactttctatggaatatattgaggcacataggttacaagtttctcaggcaaattcatggctagaacaaaacagagagctcagaatcttacatttcccccaaagttgatttctcggatagccacacctgattaaatactcccaaatgtgtccttagtcactgctatcatcatcgtcatcatcatcagacatctcatttaaaggagacttcaatgactggctgtaagagtctgatctcccgcgtacctgcccgggcggccgccaccgcggnggagctncaatttcgccctatagtgagtcgtattacgcgcgctcactggncggcgttttacaacgtcgtgactgggaaaaccctggcgttaccca

SEQ ID NO: 8092 - DNA, 648 bp, Homo sapiens
  misc_feature 6, 22, 149, 175, 273, 378, 415, 479, 493, 497, 510, 515,524, 539, 564, 573, 588, 621, 643: n = A,T,C or G
gactcntttagggcgaattggnactccaccgcggtggcggccgcccgggcaggtactttttttttttttttttttttttttttcttaagtatcaatgagttaattttaaaggtaataaactgtaacttgttttcttcaaaactgctttnaaatgttgctaatttctattcctgcncactaactgaacaaggatgctggcaatgataactgtaagacagagaaatgacatgattctgagctgcattttaaaaagattactttggcagccaggcnttatactgattagatgacagaaagaccagagaagcacaaaagataacggatgggtcttcggcttaataccggggtgacgaaataatctgtacaacaaacccccgngacacaagtttacttatgtaatgaaccttcacacccnccccggaacctaaaataaaagttaaaaaaaaaaaagaagaagatggaaagacccagaggagggnggcaagctaattanccantattgagaatggnaaatntggaaagantgtgagaaactctgngagagctgacccctcagggcctggncccggccgntttaggaaataatgnaaagggggcttcaatgctgcctccaaatttaangctcagggagggaaaaccggangcccc

SEQ ID NO: 8093 - DNA, 643 bp, Homo sapiens
  misc_feature 25, 28, 35, 52, 587, 591, 593: n = A,T,C or G
caacccgctttttaccctcactaanggnaacaaanctgggtaccgggccccncctcgggtcgacggtatcgataagcttgatatcgaattcctgcagcccgggggatccactagttctagagcggccgcccgggcaggtacaataaaggtaataacacaaatattattcaagtctgtgtttttggttggggagttcctagttttaaaaaatactcatttggtgaaataaatcatcttgagatttttctgaaaccatgctgcttacaaggatttcccatattactagaatttttttacttttctgtaaacattttctaattaagccagcatttacaaaaggtttaaaaatattaaaaatgtaactttaataactaaattaagaatgccttacataatacatctaacaattcccctcagtagtattatgaaaaaaaaaaaaaaactattaaaaggactataaattgttaaatttgtaacctttttcttttgtggtggattctggggtgtgcaattcccgtcgatcaaattgtcattaacagtccgtccgaaccagatcaagcccatcttcggaagtacctcggccgccncccngnggagctccattcgccctatagtgagtcgtattacccccccctcactggcc

SEQ ID NO: 8094 - DNA, 768 bp, Homo sapiens
  misc_feature 352, 386, 393, 440, 487, 488, 489, 490, 491, 492, 493, 495,496, 497, 498, 499, 500, 501, 502, 503, 504, 505, 506, 507,508, 509, 510, 511, 512, 513, 514, 515, 516, 517, 518, 519,520, 521, 522, 524, 525, 526, 527, 528, 529, 530, 531: n = A,T,C or G
  misc_feature 532, 533, 534, 535, 536, 537, 538, 539, 540, 541, 542, 543,544, 545, 546, 547, 548, 549, 550, 551, 552, 553, 554, 555,556, 557, 558, 559, 560, 561, 562, 563, 564, 565, 566, 567,568, 569, 572, 573, 574, 575, 576, 577, 579, 580, 581: n = A,T,C or G
  misc_feature 582, 583, 584, 585, 586, 587, 588, 589, 590, 591, 592, 593,594, 595, 596, 597, 598, 599, 600, 601, 602, 603, 604, 605,607, 608, 609, 610, 611, 612, 613, 614, 615, 616, 617, 618,619, 620, 621, 622, 623, 624, 625, 626, 627, 628, 629: n = A,T,C or G
  misc_feature 631, 632, 633, 634, 635, 636, 637, 638, 639, 641, 642, 643,644, 645, 646, 647, 648, 649, 650, 651, 652, 653, 654, 655,656, 657, 658, 659, 660, 661, 662, 663, 664, 665, 666, 667,668, 669, 671, 672, 673, 674, 675, 676, 677, 678, 679: n = A,T,C or G
  misc_feature 680, 681, 682, 683, 684, 685, 686, 687, 688, 689, 690, 691,692, 693, 694, 695, 696, 697, 698, 699, 700, 701, 702, 703,704, 705, 706, 707, 708, 709, 710, 711, 712, 713, 714, 715,716, 717, 718, 719, 720, 721, 722, 723, 724, 725, 726: n = A,T,C or G
  misc_feature 727, 728, 729, 730, 731, 732, 733, 734, 735, 737, 738, 739,740, 741, 742, 743, 744, 745, 746, 747, 748, 749, 750, 751,754, 755, 756, 757, 758, 759, 760, 761, 763, 764, 765, 766,767: n = A,T,C or G
acaactactatagggcgaattgggccctctagatgcatgctcgagcggccgccagtgtgatggatatctgcagaattcgcccttgagcggccgcccgggcaggtacaggaggccgacaatttggtgaccagtgatggcaggccactcagctttgagtagccatgtccgccacaggccctgcggcacatctcagctccctgggtgcagaattctgacatcatggccttcatgcccgtgctcagtgcgtggagctgtgagaacatggaggggggttgggcggtgttagggggcctccaccatagggaccaaccctgtgcaccacttactgagcatctactcatgcccagctcanctctgaggtaaggtccccgcgtacctcggccggngaccacnctaaggggcgaattccagcacactggcggccgttactagtggatccnactcggtaccaagcttggcgtaatcatggtcatagctgtttcctggnnnnnnnannnnnnnnnnnnnnnnnnnnnnnnnnnngnnnnnnnnnnnnnnnnnnnnnnnnnnnnnnnnnnnnnnnnnnnnnnggnnnnnnannnnnnnnnnnnnnnnnnnnnnnnnnnannnnnnnnnnnnnnnnnnnnnnngnnnnnnnnnannnnnnnnnnnnnnnnnnnnnnnnnnnnnannnnnnnnnnnnnnnnnnnnnnnnnnnnnnnnnnnnnnnnnnnnnnnnnnnnnnnnnnnnnnnnngnnnnnnnnnnnnnnnggnnnnnnnnannnnnc

SEQ ID NO: 8095 - DNA, 636 bp, Homo sapiens
  misc_feature 22, 307, 367, 512, 539, 545, 566, 569, 574, 577, 585, 592,598, 611, 631, 636: n = A,T,C or G
gactcatatagggcgaattggnactccaccgcggtggcggccgcccgggcaggtactttttttttttttttttttttttttgccttctggggaagtgctgggaacgcaacttaaggtgtttgtagacactgcccctcttagagcctgaaatgccacaatttaagctctaagcctttttgttctctgagtgtcctctaaaaaagataacatcttcaacccttttggttttcagggattctctgccagtagccctgggggtgaaaggaggtcagcaaagggacttgccggatgtccgagtaggaagaanattgctataaggagtccaatccaaacctcactcatttcacaattttaccggaggctcctnttgctctccccagggccctagaacattatcaaaccttggtgaagaaagctgacacctttgattgtctgctgggtaacttgatgaaagagggcagtccttggtgccagaaagtctggccaatttgtcacaggtgtgagcctggagnctttcagctctatagtgggagatccgnaaaatncatttcacaagaaaggcatgnttnttttntancccccttnttccagnttaatnaacccccaaaaanactcctaacccctggctganaaatn

SEQ ID NO: 8096 - DNA, 648 bp, Homo sapiens
  misc_feature 21, 518, 586, 593, 603, 648: n = A,T,C or G
gactcatatagggcgaatggnactccaccgcggtggcggccgcccgggcaggtacttggcggctatgcagcatatattcttttctctttaaagttttgcccaccagttttagaattcatcagtaaatcttgtctacagtaattattactatttgctattctaatgggaattttgtatatctccatcccttctaatatatttaacaactgaattctataaacaagatttgtttcttctccacattatttattttatcaatacagacacatactttgggggttataatccaatactattgttatttattatgttgttcatattgttctagctttggctactgggatcttttataagtgtcttctgtgtccttttgacatgccccatttttttctttttaagcacatctttactttctgagactacaagattgtccaggttctcatcttgtgttttcccttccctagccttggaatgagctgtttttccaatgatctctagttcctttattagaaaatggnggccaacatggtgaaaccccatctactaaaaaataccaaaaaaattagccaggcgtgggtggcaggcnccccgtngtcccacctnctctggaagctgttgcaaaattgcttgaaccccggaggcggagtn

SEQ ID NO: 8097 - DNA, 635 bp, Homo sapiens
  misc_feature 19, 617: n = A,T,C or G
tcctatagggcgaattggnagctccaccgcggtggcggccgagtacatttcttctaattgatcatatctgcttattttcctctggcattaaggatcaaggagatagtatattagatgatttgataaatttccaatgctttgcaaagtagttgaacaactttttctttgtgatgctaggtggcactactagtcaagacttggtatttcatagctggctttcttattctgaaggttgtaaaaagacatatgaagtaatatttaacattgaaaacatgataatcaatttgattatctatgaattgtcctaaacgttcagagtaaagtttcctttaaagttaaaatagttcaagtgaaggaaattataaagtcacatgtaaacaccaaaataagaggaatagagcaataggatatttttggctttataattcaatttaaaaattaaggtgcatttatttttttggcagctggccataaagcttcaatgtccagtaagcagttgctatctatgattcatgagatcatggggttccaacaccactgctgatattactgtcagcaatattaaaaccgcttaactcttggagaccaaattaactagttatattttgcttcccagntcctgcaccttctgtctg

SEQ ID NO: 8098 - DNA, 676 bp, Homo sapiens
  misc_feature 8, 9, 11, 30, 34, 52, 68, 69, 70, 76, 177, 325, 440, 486,526, 537, 538, 546, 554, 559, 561, 562, 567, 568, 574, 575,583, 592, 594, 596, 598, 599, 606, 610, 613, 631, 642, 644,649, 661, 663, 664, 670, 672: n = A,T,C or G
ttttttgnngncaaaaacccgcttttttancctncactaaaaggaaacaaanctgggtaccgggcccnnnctcggngtcgacggtatcgataagcttgatatcgaattcctgcagcccgggggatccactagttctagagcggccgaggtactttttttttttttttttttttttgnctttaccatatttcattttcattacttttagggctcggtgaaaaaactgcttctttaaaagcctgttgcagtagtcaaccacagactccctggttgtaaataaagcttcctctcctttcttggcctttgcccactttgaatccaaaanacagtccactgcttttgaagcaataaaataatcaacccggtgacccatcatattggtggactttgttggacagttgaatcgaaaatacttggccacagccttctcttctttaggnggttcaccaacttcctggatccgcttcttgtgtctcctgcgttccnccatgttgggccgctccccccgcgtacctgcccgggcggncgccaccgggnnggtagctncaattcgncctananngagtnngattannccccctcnactggccgntnantnnacaacgncaanacngggaaaaccctggggaangcccaatttantnagcangcagaaatagcncnngagganangtgg

SEQ ID NO: 8099 - DNA, 665 bp, Homo sapiens
  misc_feature 20, 54, 96, 408, 451, 470, 501, 525, 545, 546, 549, 562,577, 585, 622, 626, 628, 635, 644, 646, 650, 652, 660: n = A,T,C or G
tcactatagggcgaattggnagctccaccgcggtggcggccgaggtaccttagnatttctatgggacatcgtttaaaaactattgtttacgcgagnagccttgctaatttcctaaaaattgtggatacattttttctcccatgtataattttctcaccttctatttaaaaagaaaaaaaaaagtcagtgtagtatttacatattttaccctataaggagctaacataacttttgatttagtgttattcataaaattaggttagcagtttattaaccttttgtatttgctctggcaatgtttaatatctcataagctatacacacctcgaagccatcaatgacaaccttttcttgctgaatagaacagtgattgatgtcatgaagacaattttatctccttttgccttncataattttgtacctgccccgggcggccgctctagaactagtnggatccccccggcctgcangaaattcgatatcaagctttatcgattccgncgaccctgaggggggggcccggtnccaacttttggtccctttanngangggtaaatgcgcncctgggggtaacaanggcatagncgggttcccgggggaaatggtttcccctccaaattcncacnanataccancccggggcntnaagngngaaagccnggggg

SEQ ID NO: 8100 - DNA, 607 bp, Homo sapiens
  misc_feature 4, 9, 13, 16, 19, 22, 32, 44, 58, 452, 489, 497, 529, 536,550, 558, 563, 580, 582, 584, 586, 587, 595, 603: n = A,T,C or G
tcgnacctnctgnttnttnccncccctgtttncccgtcctgaanaaacaagccacagnttgatgctgaaatggaactctactcctgttggctatcagtacggtcaaggaatctgatgtcacatccaaaagctttccagaattcaccaggcatgtaaactcatctgcagaaaaatgtaaacgtcatgtgacagatctaacagggcaagtggtacaggagggaaccaggcgctacagactgtgtaatgagtgtcttgcagaatttggcatagacagcctccccattgacttggaagctgaacaacatcttatgtccccatcagatggagataaggattccagatggcacttgagtgaagatgagaatagatcctatgtggagattgtagaagatgggtctgctgatctggtcatccaacaggttgatgatagtgaagaagaagaagaaaagaanttagccccacattaggtagctgtatgggaaccaacanagctggcntgtctgcatttacattggcctcccggatctcnctcttcnatggccggggctanttaccaanttatnccctgactttaagaaangncngnnttacctgnatgccttntgac

SEQ ID NO: 8101 - DNA, 647 bp, Homo sapiens
  misc_feature 1, 7, 23, 628, 630: n = A,T,C or G
nactcantatagggcgaattggnactccaccgcggtggcggccgagtacgcgggggagcggtgagtgatcctttcagcaaagtcagtcctgggcaggagacggcttcaggaatactgtcagctttactggattccaccatcgctttccaggactgtttaggccctgggcccttgaagggtttgcgtgcctcttgtctccattcatacctcaagaactttgttcatgttaattttttttcactctatcatatggaattgagcaaaaaaaaaaaaaaaaaaaaaaagtacctgcccgggcggccgctctagaactagtggatcccccgggctgcaggaattcgatatcaagcttatcgataccgtcgacctcgagggggggcccggtacccagcttttgttccctttagtgagggttaattgcgcgcttggcgtaatcatggtcatagctgtttcctgtgtgaaattgttatccgctcacaattccacacaacatacgagccgggagcataaagtgtaaagcctggggtgcctaatgagtgagctaactcacattaattgcgttgcgctcactgcccgctttccagtcgggaaacctgtcgtgccagctgcattaatgaatcggccaacncncggggagaggcggtttg

SEQ ID NO: 8102 - DNA, 687 bp, Homo sapiens
  misc_feature 1, 9, 11, 12, 13, 567, 574, 583, 594, 616, 633, 669, 673,677, 687: n = A,T,C or G
ngggagtanannncaggtctggcatcctgcacttgctgccctctgacacctgggaagatggccggcccgtggaccttcacccttctctgtggtttgctggcagccaccttgatccaagccaccctcagtcccactgcagttctcatcctcggcccaaaagtcatcaaagaaaagctgacacaggagctgaaggaccacaacgccaccagcatcctgcagcagctgccgctgctcagtgccatgcgggaaaagccagccggaggcatccctgtgctgggcagcctggtgaacaccgtcctgaagcacatcatctggctgaaggtcatcacagctaacatcctccagctgcaggtgaagccctcggccaatgaccaggagctgctagtcaagatccccctggacatggtggctggattcaacacgcccctggtcaagaccatcgtggagttccacatgacgactgaggcccaagccaccatccgcatggacaccagtgcaagtgggcccacccgctggtcctcagtgactgtgccaccagccatgggagcctgcgcatccaactgttgnataactntcttctggngaacgcctttnctaacaggtatgaacctctagngcatccttgcccatctntgaaaacaactgtgtccgtgacgagcttcttaatgnatgntganacctcttgan

SEQ ID NO: 8103 - DNA, 647 bp, Homo sapiens
  misc_feature 23, 479, 510, 537, 571, 574, 586, 594, 596, 597, 598, 599,609, 611, 613, 615, 625, 639, 643, 646: n = A,T,C or G
gcgcattaaccctcactaagggnaacaaagctgggtaccgggccccccctcgggtcgacggtatcgataagcttgatatcgaattcctgcagcccgggggatccactagttctagagcggccgcccgggcaggtacttggtcatctcactttgaatattgtcccttccttcagtttctacttacagaatacatatgtgagactctcatcccactaacatgtttctttattcccttcatgttttccttttttttctctctctctcttcttggctacaatgagggtattaagttctagcctccaaccaattcattaattctcttctcctgtatgtctcatttccttcataatatgtctgctgagtttgtcatttcctatctaaattatatttgattctttttaaaaatatgcctcctcaacacccgcgtacttctacagccatgtcctatttccttgatcatccaaagcacctgcagagtncagtgaaaatgatatattcttggctggggcncagtggctcacacctgtaattctaacnctttggggaggccaaggcgggggatcacctgagncanaaatttaaaacnaccctgantnnnnggggaaactncntntntctaaaagancttcggcccccccncggnggng

SEQ ID NO: 8104 - DNA, 615 bp, Homo sapiens
  misc_feature 2, 4, 5, 8, 13, 55, 84, 93, 615: n = A,T,C or G
tntnnggngtcgncccacgcgtccggtaaagtaggtttggggtgactatacaganaagcatggcaagtactgcagaaacagtanaaatcgggnaacttcagttctggccgctgccaccgtggcagccgtctacacttcacagcgggaggggaggagtcacgttgtctaccacttacctgagacattctgatttggatgatgctagagcacagtaaaataggtgagctgcatgggatcccaaagctgctgagggatagagcctgagcctggtggccacagcatatgccctttctgttccatgcagctggggctgttagtagtcattgcccttgtcagcagaccttctaccctggtggcaaacacatgaaagctgtggccctgggagtggcctcctaaaacaagccacttaggtcatctgccatctacccttaacctctgtctctcgcctgaggggaatctgcaagctgtgcattgggcttacctcctgcttttgtagaaataaccatcctttggtatacatggaggatagttccagaacgcctgagtatacaaaaacccaatgcatactcaagtcccacagtgggccctacagaacccacgtatgtgataaatcan

SEQ ID NO: 8105 - DNA, 646 bp, Homo sapiens
  misc_feature 2, 21, 43, 54, 355, 360, 392, 394, 402, 407, 418, 419, 433,437, 445, 446, 459, 462, 492, 495, 502, 503, 504, 510, 517,519, 524, 525, 533, 534, 540, 547, 548, 552, 572, 579, 586,591, 601, 606, 607, 609, 611, 617, 618, 619, 622, 623: n = A,T,C or G
  misc_feature 630, 631, 643, 646: n = A,T,C or G
gnactccttagggcgaatggngctccaccgcggtggcggccgngtacactgagnatgattattccctctttttttaaaatttgaagtttcctttgattccccttttcttttacaaaatggagtcatgacacgatccccgtgtcccgtgttgagaactgaaaggtttctgtagctttcctttgacatgaaatttcaaaaatatactactctgtttcactctggcctgtaattgttgcactctggcctttaattgttgcaactgattagacatttttccttccagcattatggtagactcgatgcccctgaccaagcaccctttaagcatgctcaagtaattatttctcagtctaanaatgnagagttcccttaagtagcctttcaggaatggngnggggaaanagatnttttttagaannaatttggggaaccnaacnaaatttgnnttcaccaaaggcntgnggaaaattggggcccaaaattccaaggggngcnccccccnnncccaanaaacccnanggaannaaaaaccnnccaaanggcaagnnaggnttttggccccgggggcttcncaggggnccccttnttttnaagccccttnttggnntncncccctnnnaanntttgagnnaaaaattttgtnggn

SEQ ID NO: 8106 - DNA, 863 bp, Homo sapiens
  misc_feature 4, 5, 8, 11, 89, 91, 99, 556, 580, 648, 698, 726, 792, 807,810, 816, 838, 840: n = A,T,C or G
gtannccnttncgaatgcccctctagatgcatgctcgagcggccgccagtgtgatggatatctgcagaattcgccctttcgagcggccntncgggcttntacgcgggggcagcgggaagctcgcagcagctggggaggagccaaagcctcggcgctcacctaagccgcagggagatacacccaactgggagatgaggaaacagcaacccagagaggagaactaacccacacaggatcatttcgcgaaggagcaaggctgaagaaccagacctggactttcttaggacaaacttactgcagcttgaaggagccaaccatggatttgaggcgtgtgaaggaatatttctcctggctctactatcaataccaaatcattagctgctgtgctgttttagagccctgggagcgatctatgtttaacaccatcttactaaccattattgctatggtggtatacactgcctatgtctttattccaatccacattcgcctggcttgggaatttttctcaaaaatatgtggatatcacaagtacctcggccgcgaccacgctaanggcgaattcagcacactggccggncggtactaagtggatccgagctcggtaccaaagcttggcgtaatcaatggtcatagcttgtttcctgnggtgaaaatggtattccgctcacaaattccacacaacataccaacccggnaagcataaagtggtaaaagcctgggggngccttaatgaggtgagcttaactcacattaaattgcgttgggcctactggcccgcttttcaagtcngggaaacctggccgngcnacctgnaattaaaggaaatcggccaccncnccggggagaaggcggtttgcctt

SEQ ID NO: 8107 - DNA, 656 bp, Homo sapiens
  misc_feature 333, 396, 422, 425, 427, 435, 447, 468, 489, 494, 500, 506,507, 508, 515, 516, 520, 521, 528, 530, 534, 536, 542, 549,559, 563, 574, 575, 576, 579, 581, 583, 587, 594, 598, 599,600, 602, 606, 614, 617, 620, 621, 630, 633, 635, 638: n = A,T,C or G
  misc_feature 642, 646, 648, 649, 653, 656: n = A,T,C or G
ggagctccaccgcggtggcggccgaggtacgcgggagaatttgttgcattgagttattaaagtagattatacacatttagcatggttagaaactagatgttaccactgagtgttttctccttaataagttagtttaagaggctggggataatttcacggtaaaatggcagcttaaccccagtttcaaacattgaaacttgaaaattttcctttttgaaaaattacatatacacctggcactctctatctgtgggtttcacatcccaggagtcaaccaacctcagaaacaaccaatcgtggattgaaaatacttttggggggggaaaaaaattnaaaaaaaaaaaaaaaaaaaaaaaagtaccctgcccggggcggccgctctagaactagtggatnccccccgggcttgcaggaattcgatnttnangccttatnggatcccgtcgnacttggagggggggcccggtncccagcttttggttccctttnagggnggggtnattggnnnccttggnngaanncatgggnanagcngnttcctngggaaantgtttttccntctnaaattcccccnnnaancnancccngggcctnaaannntnaaanccgggggnccnaanngggggcctnacncnctnattngggngnncccnccn

SEQ ID NO: 8108 - DNA, 663 bp, Homo sapiens
  misc_feature 5, 11, 15, 26, 35, 60, 72, 481, 483, 498, 517, 521, 526,538, 540, 544, 546, 571, 580, 585, 590, 593, 596, 601, 606,612, 616, 622, 625, 628, 631, 636, 642, 643, 645, 650, 652,656: n = A,T,C or G
gcgtnatacgnactncactatagggncgaattggnatctccaccgcggtggcggccgcangtacgcgggggnacaaggggcttgagcgttctgtggagtagagtgcgaggtcaggccatgaacttgggagatggtttaaagcttgaaactgaattactggatggaaaaaccaagctaatattgtctccatatgaacataaatcaaaaatttctgtgaagatgggaaataaggccaagattgcaaaatgtcctttaagaacaaaaactgggcacattctaaaatcaacacaagatacttgtattgggagtgaaaaacttttgcaaaagaagccagttggttcagaaacatcacaggcaaaagaaagagatttcacctgcaactcctaatatgcagaagactagaaacaccgtaaatacatctctagtaggtaaacagaagcctcacaaaaaacacatcacagtctgaaaacatgaagagcantnttggtgtgtctaacncaagaccaactacagcagnattnttgangactgttaaccncnggananagatctcttttccctgacttggcantggaaaagnaggcncaaantcnatnttagnctatntttaancagnattgcnaancanccnaaagnttgganncnttatngnattnttccaaa

SEQ ID NO: 8109 - DNA, 435 bp, Homo sapiens
  misc_feature 4: n = A,T,C or G
actnctatagggcgaattggagctccccgcggtggcggccgcccgggcaggtacgcgggatacctgagtctatatatcaaaaagtaatggagataaatagagaagtagaagagcctcctaagaagccatctgccttcaagcctgccattgaaatgcaaaactctgttccaaataaagcctttgaattgaagaatgaacaaacattgagagcagatccgatgttcccaccagaatccaaacaaaaggactatgaagaaaattcttgggattctgagagtctctgtgagactgtttcacagaaggatgtgtgtttacccaaggctacacatcaaaaagaaatagataaaataaatggaaaattagaagagtctcctaataaaagatggccttcttgaaggctacctgcggaatggaaaggtttcttattcccaacta

SEQ ID NO: 8110 - DNA, 656 bp, Homo sapiens
  misc_feature 5, 11, 15, 22, 27, 31, 36, 38, 69, 72, 79, 568, 569, 571,572, 573, 574, 575, 576, 577, 578, 579, 580, 581, 582, 583,584, 585, 586, 587, 588, 589, 590, 614, 626, 643, 646, 652,654: n = A,T,C or G
gcgtnatacgnactncactctnagggncganttggnanctccaccgcggtggcggccgagtacgcgggnagnaattggnaaactataaaaaagtcactgcagatttgttaaaaaaaaaaagccaaatataaatttgaaaacttgaaaaaccaaacagtgaaaattaagaactccaaatgtgttagttatctattgctgtgtaacatactgctcaaacttgacttaacatacgtttattatctcagtttttgttggtcaggaatccaagcatggcctaagtgggttctctgctttaggctgcaatcaaagcattggtcggggtagggtctcctctggaggctgagctggggaaggatctgcttcagatttatgtagttgctagcaggttcttggactgaggacctcagtagcttcctggctgttggatgaaagcattcttcagttccttgtcccatggacctctcctttaggacagcttacaacctggcagcttgccagagggaacctatagagcccatagagtgagtctgctaacaagacaactgaagagagaaataaccaaactgannannnnnnnnnnnnnnnnnnnnaaaagtacctgcccgggcggccgntctaaaactagnggatccccccgggctgnagnaattcnanat

SEQ ID NO: 8111 - DNA, 617 bp, Homo sapiens
  misc_feature 84, 149, 168, 262, 415, 419, 432, 475, 477, 482, 504, 511,550, 554, 563, 567, 590, 592, 599, 608, 615: n = A,T,C or G
tccaccgcggtggcggccgcccgggcaggtacttttttttttttttttttttttttttttttgacatgaactaatttaatcctnttaacaaatttacaaggaacatattcccctcacttcattatgtaaataataaaacaaaagcctanaagggttagtaacttgcanatcatatagtcactttgcagcaggtctgagatttgggtcccagagaggcagctccagccaccatgcaaccgaatcctgcgcagcacagttcggngtcattcaacaagacggtatccatgttgattaaggaatcttagctcttaaaaggttctacgaattacattttttccacccaagcctatgatcactcagttggctgtgtaaggtagtttgataggagctcgcattatttttctgattcaaaganagtnttttcaagcgctncttaattcaggatgagaggtcaatgatttccccgagtccaggngngcttntacagactcctccttgtccttnagctctnacgagccatcacccttgcttccaaaaagttggtttattngtgngctctaaanctgnggaaatcagagacggtccatttntngggaacnagttttttnatccaanag

SEQ ID NO: 8112 - DNA, 643 bp, Homo sapiens
  misc_feature 19, 41: n = A,T,C or G
tcctatagggcgaattggngctccaccgcggtggcggccgngtactaaaaaaaaagaagtgtttatttgaaattcaaatataatttgacatcatcccttattatcatttgcttaatctagtaatcctaactaggaagaaagcaaaaaaaaaggcttctgtatattcatattagatgctaaaatgtattcaaattagatgctaaaattcatgcacttaccttgcagaaggctcactctctcaggacctacaaactggcaactctcacgccaaatttacctcactgatatattttatttgctaagcaaaatattttaatttcaattagttaccatcattaaaatgaatagagtagacataaaaaaatgatttcatattctggcttaaaaaaatttgccagcctgggtaacatagcaagatcctgtctctacaaagaaaaaaatgttagccaggcctggtggtgtgtcctgcagtcctacctacttggaaggctaaggctggatgatcacttgagcctaggagttcggggttgctgtgagttacgaatgggccactgcaccccagcctgggcaacagagcaagaccctgactctaaaaaaattaaataaagtaaaataaaataatataaattaaaaattaaaaatc

SEQ ID NO: 8113 - DNA, 665 bp, Homo sapiens
  misc_feature 499, 503, 520, 547, 564, 566, 593, 596, 599, 602, 607, 612,613, 637, 654, 657, 659: n = A,T,C or G
taaagggaacaaaagctgggtaccgggccccccctcggggtcgacggtatcgataagcttgatatcgaattcctgcagcccgggggatccactagttctagagcggccgaggtactaaaaattagccaagcgtcgtggcacgcacctgtagtcttagatactcgggaggatctcttgagcccaggagttaaggctgcagtgagccatgattgtgccattgtattccagcctaggtgacagacagcaagaccctgtctcaaaaacaacaacactgctttattccattttccaaataattatttctataagctgtatgtttaatagattgaacttcaaaaaaaaattctttcttaatttctggattaaaaagtatgcctgtgtcttctagacctttaccagaagatgatagtattgaagcagatatactagctataactggaccaggaggaccagcctggtaagagcttgacacttactttcattgaattatggactttgngttnttttttaaacacgtttnttggtcaaaaaaaaaaaaaaaaaagtncctgccggggcggccgncncgggggggggctcccatttcccctttnggngtngtntaccnccccnnccctggccggggttttacaaccgnggggacggggaaaaccnggngntcccac

SEQ ID NO: 8114 - DNA, 478 bp, Homo sapiens
  misc_feature 2: n = A,T,C or G
gngcccgtatcactactatagggcgaattggagctccccgcggtggcggccgcccgggcaggtacgcggggaggagatgctgccacctaggttacttgtaggaccctatacggcaacctcctttgccaggaactatttataaacatcctgcaggaaaatgagtctatatgtcagaatacacatttcccaccttgcccaacagtagaaaaacataagaagagaaaaacattaaaaaatgacaaggaagttaatggaagtcagcaatgtgatggtgtttggaggtggagccttcagaaggtaattaatgcccttgtaagaagaggccagagagcttgcgcaccttcttcctgccatgtgaggagccaagaagccggctgtctgcaacctgcaagaggaccctcactagaagctagccatactggcatcctcatcttggctttccaacttccagaactgtgagaagtatatgtttgtggtt

SEQ ID NO: 8115 - DNA, 861 bp, Homo sapiens
  misc_feature 541, 649, 661, 683, 701, 709, 726, 730, 731, 744, 757, 758,760, 770, 771, 774, 775, 776, 783, 785, 794, 795, 796, 798,799, 812, 817, 818, 829, 833, 837, 844, 857, 860: n = A,T,C or G
atgacgcgcgtaatacgactactatagggcgaattggagctccaccgcggtggcggcccgcccgggcaggtacccgggaggctcgcatgtgtgggtgcatgccgtggcaggagaaggcttccgaagagccatgcatgcgtcctctggctgctccaggtgtaaaaaatgcctgtaaaaagatgggactatgggccatatttaccacgtttatccagagagttgattctccttaataccaggaaactaggcaacagcagggaggggacaatcatgagtcctaggcaggaaaggtcctctggagagaggaaatggcacacgcgcaagcacggaggcatgaggggccagggtcctggaggacactcccgcgtcctcggccgctctagaactagtggatcccccgggctgcaggaattcgatatcaagcttatcgataccgtcgacctcgagggggggcccggtacccagcttttgttccctttagtgagggttaattgcgcgcttggcgtaatcatggtcatagctgtttcctgtgtgaaattgntatccgctcacaattccacacaacatacgagccgggagcataaagtgtaaagcctggggtgcctaatgagtgagctaacttacattaattgcgtttgcgctcacttgnccgcttttccantccgggaaaccttgtcgtgccncttcattaatgaatcggnccaacgcnccggggagaaggccggnttgnnttttgggcgcttnttccgctttcttnntnaattgactcnnttnnncttcggncntttcggttnnngnnaaccgggatttanttcanntcaaaggcggnaatncggntttccanaaaatcagggganaanc

SEQ ID NO: 8116 - DNA, 581 bp, Homo sapiens
  misc_feature 15, 27, 28, 39, 581: n = A,T,C or G
atcctagagggcganttgggccctctnnagcatgctcgnccggccgccagtgtgatggatatctgcagaattcgcccttagcgtggtcgcggccgaggtaccgatcatttcctcgtggacatctccaaccatcatttgcccatcttcccttccaccggggagagtaactatctctgtcaattctaccaaatgatgaactcttactttttgttctacatcttgagggggacctagaatgagatctggacctagaccactttctggttctcctttctctctctctcctctgcccatctctatcactttctcgttctctgctctgggacctggatttttctcctggggaagaatctttcactcttggctgagatcttttgttctctctagaagtttctcttcttggggacagtgattcagatcttctgctttccctagtagtatccctttttggagaccgagactgagattgcctcctttctcttgcaatatccttttttggggactgagaacgggattttttccggcctctggctgactcattcttaggagatggtgattgagacttcctgctttctttcccn

SEQ ID NO: 8117 - DNA, 610 bp, Homo sapiens
  misc_feature 2, 3, 6, 14, 369, 422, 459, 466, 473, 497, 500, 518, 544,545, 609: n = A,T,C or G
gnnttnttactttnggcgaattggagctccccgcggtggcggccgaggtactgtgatatccacatatttttgagaaaaattcccaagccaggcgaatgtggattggaataaagacataggcagtgtataccaccatagcaataatggttagtaagatggtgttaaacatagatcgctcccagggctctaaaacagcacagcagctaatgatttggtattgatagtagagccaggagaaatattccttcacacgcctcaaatccatggttggctccttcaagctgcagtaagtttgtcctaagaaagtccaggtctggttcttcagccttgctccttcgcgaaatgatcctgtgtgggttagttctcctntctgggttgctgtttcctcatctcccagttgggtgtatctccctgcggcttangtgagcgccgaggctttggctcctccccagctgctgngagcttnccactgnccccgcgtacctgcccgggcgggncgntctaaaactagggggatncccccgggctgcaggaattcgatatnnagcttatcgatcccgtcgacctttgagggggggccccgtacccaccttttgttccctttagggng

SEQ ID NO: 8118 - DNA, 653 bp, Homo sapiens
  misc_feature 1, 21, 68, 304, 321, 356, 416, 433, 525, 617, 618, 620, 625,633: n = A,T,C or G
ncattaaccctcactaagggnaacaaagctgggtaccgggccccccctcgggtcgacggtatcgatangcttgatatcgaattcctgcagcccgggggatccactagttctagagcggccgaggtacttttttttttttttttttttttttgcttcactttcatcttaagtcctccttccccaggtctttggatttctcttggttcactcgaattctcctttctttcagcttcagtttcattttgcaaaaaacatctccgctcagcccacgatcattccaggaaggctcccaagactggtcagngggagttaccaaagggngtctcgccacaaaatgactgagtcatcttccccanaaacattttcctccagcactggctggacaactaattttttctttttgctgttgttactgnggaacttcttgcatganaatatttgcatatcccgcgtacgcgggagttcccttctctgtaaaagaataaaatatttcagtcttatcgtgtagatgatatacagagggcncataacaaatgttagatctctcaaatgtttttctgtaacccaaatatgcttacaactgattaaaagaatgttctcccttccccaaaaaaaannanaaaanaaaaaagnccctgccccggccgccgccc

SEQ ID NO: 8119 - DNA, 679 bp, Homo sapiens
  misc_feature 19, 21, 316, 385, 409, 412, 430, 431, 445, 458, 465, 467,470, 472, 487, 488, 490, 498, 500, 508, 515, 517, 518, 519,533, 535, 537, 540, 550, 552, 557, 559, 570, 572, 584, 585,590, 592, 598, 599, 604, 605, 609, 612, 619, 620, 630: n = A,T,C or G
  misc_feature 636, 637, 638, 639, 640, 642, 643, 644, 645, 648, 649, 650,651, 652, 654, 655, 656, 657, 658, 659, 660, 663, 664, 671,675, 676, 677, 678: n = A,T,C or G
cactatagggcgaattggnanctccaccgcggtggcggccgatgtactttttttttttttttttttttgtagggatgggtttttgccatgttgtgccagctggtcttgaactcctgggctcaagccagcctcccaccaacatcattaacttaatcagagcagcaagtgtcacatatggtaacacagtcacaactcccaggattaagatgtggacagtggacatctttggggggccattattcagcctgaccctgactcaaggtctggaccaacaagaaaaatgggcagccagcacttttttcctccttttcctctnctttcatcccatttttctacattcagtcagagattggtcagaacaccatttaaaaagaagccaagaatnggggcttggggacttgaaaaaggnccnttgcttgccaggaaaatnngctttttaaaaatnaagggctggggantgggccngngancnaaaaaaaccctggtnnanagcctttntnggggttgnaaatggncnnnccctaacccttttncncnatntttaaaaccnanttggngngaaaaggggcncnaacctgcctttnnccaananaaggcnnccaannaaanaanccccccnnagggcccccncccccnnnnnannnntannnnnannnnnnnttnnggggggnggcnnnnc

SEQ ID NO: 8120 - DNA, 647 bp, Homo sapiens
  misc_feature 3, 4, 7, 9, 10, 13, 16, 22, 23, 44, 45, 52, 66, 132, 422,435, 455, 459, 489, 501, 507, 509, 518, 561, 563, 564, 566,567, 572, 581, 584, 585, 592, 593, 596, 602, 620, 636, 641,645, 646, 647: n = A,T,C or G
ctnnctntnnggncgnattggnnctccaccgcggtggcggccgnngtacagnttgtgtccactggnaaggtaaatgattgcttttttatattgcatcaaacttggaacatcaaggcatccaaaacactaagnaattctatcatcacaaaaataattcgtctttctaggttatgaagagataattatttgtctggtaagcatttttataaacccactcattttatatttagaaaaatcctaaatgtgtggtgactgctttgtagtgaactttcatatactataaactagttgtgagataacattctggtagctcagttaataaaacaatttcagaattaaagaaattttctatgcaaggtttacttctcagatgaacagtaggactttgtagttttatttccactaagtgaaaaaagaactgngtttttaaactgnaggagaatttaataaatcancaanggtattttagctaataggaataaaagtgcnacagaagaattngattangnctatgaaangttctcttaaaaattctatcggaaataatctttcatgccaaananntnnagggnttgggattngcnntgggaannaangagatnggccattgggttcccccnataaatgtggctggtntttanaacnnn

SEQ ID NO: 8121 - DNA, 611 bp, Homo sapiens
cctcctaagggaacaaagctgggtaccgggccccccctcgggtcgacggtatcgataagcttgatatcgaattcctgcagcccgggggatccactagttctagagcggccgaggtactttttttttttttttttttgagtaacatcctcagacaagtagatagacaagcctccagcaaacaatgggaggaagaatgccatgattcctccttaaattgtagaagctctctggcctctgctgtgcataatctgcctacccatcaaatcacaaaatttgtttgtttatataatatcatcctttctcacagcttttatcagtagagttcttaagttctcaagggaactgtctatttgaggaactataaggattggtcaaatatgctggaatactgcaaaggctaaaaaatgagattctttataagactatgaatccagtgaactaaatattaggcaagacaacattgttttatccagatggctaatttgcatgactccgtttaacacttgatttttttccacacacatctccttattataaagactgttataagaaacacattacctcgtttggagagaaaaataccttgcagaaatctggcagccagatttgag

SEQ ID NO: 8122 - DNA, 562 bp, Homo sapiens
  misc_feature 438: n = A,T,C or G
ggccgcccgggcaggtacgcggggtccctgaattccatctgactctaattttatgagaattgcagaactctgatggcaataaatatatgtattatgaaaaaataaagttgtaatttctgatgactctaagtccctttctttggttaataataaaatgcctttgtatatattgatgttgaagagttcaattatttgatgtcgccaacaaaattctcagagggcaaaaatctggaagacttttggaaacacactctgatcaactcttctctgccgacagtcattttgctgaatttcagccaaaaatattatgcattttgatgctttattcaaggctatacctcaaactttttcttctcagaatccaggatttcacaggatacttgtatatatggaaaacaagcaagtttatatttttggacagggaaatgtgtgtaaganagtatattaacaaatcaatgcctccgtcaagcaaacaatcatatgtatactttttttctacgttatctcatctccttgttttcagtgtgcttcaataatgcaggttaaatattaaagatggaac

SEQ ID NO: 8123 - DNA, 675 bp, Homo sapiens
  misc_feature 460, 535, 542, 546, 550, 572, 573, 574, 578, 588, 601, 603,613, 614, 616, 635, 639, 644, 645, 650, 651, 652, 673, 674: n = A,T,C or G
cctcactaagggaacaaaagctgggtaccgggccccccctcgggtcgacggtatcgataagcttgatatcgaattcctgcagcccgggggatccactagttctagagcggccgcccgggcaggtacatggggtttgtcaagacagtggttcatggctctgaccctgagcatgtcagatttcaggggctttatgcaaaatatccataccagttggggtcatttcccatcagtattgctcacaatggagcctacaaacccctagttcccatccaacacatctccaaggcagactctcagaccagctcccagaaatgaggtgagtttagatcaagcagcagagaggtggcctaggaaggagtccttggagctcatgcacctgtgtctgggcaccaacaggaagatggtggctttttgctctttggggagatatctttggagccagtctctgaccacatgtccnacaggacaggcatccttgggggtttccatggcagtctactgacagtcagggggtgaggattaaatgggtacctcngcccccncccncggnggagctccaattcgccctttannngagncgattacccnccctcattggccngngttttaaacnncnggactgggaaaaccctggntttnccaanntaatnnnctttgaaaaaatacccttttnnc

SEQ ID NO: 8124 - DNA, 607 bp, Homo sapiens
  misc_feature 2, 16, 23, 43, 84, 404, 405, 406, 407, 408, 409, 410, 411,412, 413, 414, 415, 416, 417, 422, 426, 427, 428, 431, 432,433, 434, 435, 436, 437, 438, 439, 440, 441, 442, 443, 444,445, 446, 447, 448, 449, 450, 451, 452, 453, 454, 455: n = A,T,C or G
  misc_feature 456, 457, 458, 459, 460, 461, 462, 463, 464, 465, 466, 467,468, 469, 470, 471, 472, 473, 474, 475, 476, 477, 478, 479,480, 481, 482, 483, 484, 485, 486, 487, 488, 489, 490, 491,492, 493, 494, 495, 496, 497, 498, 499, 500, 501, 502: n = A,T,C or G
  misc_feature 503, 504, 505, 506, 507, 508, 509, 510, 511, 512, 513, 514,515, 516, 517, 518, 519, 520, 521, 522, 523, 524, 525, 526,527, 528, 529, 530, 531, 532, 533, 534, 535, 536, 537, 538,539, 540, 541, 542, 543, 544, 545, 546, 547, 548, 549: n = A,T,C or G
  misc_feature 550, 551, 552, 553, 554, 555, 556, 557, 558, 559, 560, 561,562, 563, 564, 565, 566, 567, 568, 569, 570, 571, 572, 573,574, 575, 576, 577, 578, 579, 580, 581, 582, 583, 584, 585,586, 587, 588, 589, 590, 591, 592, 593, 594, 595, 596: n = A,T,C or G
  misc_feature 597, 598, 599, 600, 601, 602, 603, 604, 605, 606, 607: n = A,T,C or G
tnactttcggggcganattgggnccctctatagcatgctcganccggccgccagtgtgatggatatctgcagaattcggcttcnagcggccgcccgggcaggtaccgcggccgttaaacatgtgtcactgggcaggcggtgcctctaatactggtgatgctagaggtgatgtttttggtaaacaggcggggtaagatttgccgagttccttttacttttttttaacctttccttatgagcatgcctgtgttgggttgacagtgagggtaataatgacttgttggttgattgtagacctcggccgcgaccacgctaagccgaattccagcacactggcggccgttactagtggatccgagctcggtaccaagcttggcgtaatcatggtcatagctgtttcctgnnnnnnnnnnnnnnagggnggannnaannnnnnnnnnnnnnnnnnnnnnnnnnnnnnnnnnnnnnnnnnnnnnnnnnnnnnnnnnnnnnnnnnnnnnnnnnnnnnnnnnnnnnnnnnnnnnnnnnnnnnnnnnnnnnnnnnnnnnnnnnnnnnnnnnnnnnnnnnnnnnnnnnnnnnnnnnnnnnnnnnnnnnnnnnnnnnnnn

SEQ ID NO: 8125 - DNA, 649 bp, Homo sapiens
  misc_feature 496, 582, 610, 611, 616, 619, 622, 633, 638, 649: n = A,T,C or G
tccttagggcgattggactccaccgcggtggcggccgcccgggcaggtactcatttaattagggttgcagaggagatggaaaaacaagctgtttgattatgaaggcaacacttctgtcagtagaattgctttggattgtaaatatgtttacttcagaggaaatcagtcagagtggatggctcagcaaaacccatcacaactgcggaaaaaggaagtgactggctagaggtaaggaaatagattttctctaagttaactggcctacgtgtgaatcgaaccctgcaccctggcctcattagcaccaacactgtgaagaacagctgtggcagagaaagtgccacggccccaccccatcaccagattcagtagaaaggcccttggaatttcctacaaggttcagttctgaacagctccacttcaaatcagtatagaatcctcacagtgactctgtgagggaggtaaatgtcactgctccccgttggtgggggaaacagangccagagtgggtaaagattttgcctgaagttaaaaacaaaaaatgaaaagtccttgggactgcagggaagaatacttacattacanggcaattaaaaaaaaaaaaggaaaaagnnccttnggnccntttaaacttgnggatncccccgggctn

SEQ ID NO: 8126 - DNA, 689 bp, Homo sapiens
  misc_feature 189, 271, 287, 319, 321, 330, 370, 374, 389, 400, 403, 406,407, 425, 438, 440, 451, 462, 465, 477, 481, 482, 486, 493,496, 497, 501, 510, 513, 514, 515, 524, 531, 551, 576, 577,585, 586, 589, 600, 604, 609, 615, 616, 617, 629, 631: n = A,T,C or G
  misc_feature 632, 642, 645, 646, 659, 661, 667, 681, 683, 687: n = A,T,C or G
tatagggcgaattggagctccaccgcggtggcggccgaggtacgcgggtttcctcaacatggctgcgcccttgtcagtggaggtggagttcgggtgagtcacagagctggggcgccgtggggatggattgaagtcgtcgggcccagaattcctttccttctgccgtggggcctgacacggccgctctanaactagtggatcccccgggctgcaggaattcgatatcaagcttatcgataccgtcgacctcgagggggggcccggtacccancttttgttccctttantgagggttaattgcgcgcttggcgtaatcatngncatagctgntttcctgtgtgaaaatgttattccgctcacaatttccccnaaanataccaaacccgggnagcataaaagngtnaanncctggggtgccctaatgngggaacctaactnanatttaatttgngttgcgcctanctngcccccttttcnaatnngggnaaacctntcnngccnacttgcatnaannnaatcggccnacccccngggggaaaggcggttttggnatttggggcctttttccctttcttnntaaatgannccntggcctcgggngttngggtngggggnnngggttaaatctntnntaaggggggnatnnggttttcccaaanangggganacccccgaaaaaananttgnct

SEQ ID NO: 8127 - DNA, 638 bp, Homo sapiens
  misc_feature 581, 595, 633: n = A,T,C or G
cctcctaagggaacaaagctgggtaccgggccccccctcgggtcgacggtatcgataagcttgatatcgaattcctgcagcccgggggatccactagttctagagcggccgcccgggcaggtacgtaggggccctttgctgcaagcttaggccagtgtcagctcctgagccactcctgactcagttggaggagactcagtgtcctctgccccctgcctggtggagcttggcagcaagtcccaagttttacagtgttgagaccaagtgggcagccatcaccattgaggggtgcccttttgctccccctcgagtccaagttatagtattgcttacttcctacctgaaatagtttatgggtcatgggtctggcttacatcgagccccatagccagtctggttgccccacctaaggtcttggtgctctttgataatagccacagctaaatgtattagtcctgtcctaggaaatgcatgatcttctccccaaaaaaaaaaaaaaaaaaaaaagtacctcggccgccaccgcggtggagctccaattcgccctatagtgagtcgtattacgcgcgctcactggccgncgttttacaacgtngagactgggaaaaccctggcgttacccaacttaatcgncttgc

SEQ ID NO: 8128 - DNA, 607 bp, Homo sapiens
  misc_feature 10, 503: n = A,T,C or G
tgctcctccncacatataccattgtttttagttccgaaggttactactttccttatatctgtcagtagttacttaactcttattttgattactaccttatttctttgatttatttttcattttgatgctattactgaataactctttctgagatggttgttgtatagtaaaccatgagtctggcatgtctaaaattgtcttcatttctttccataaatttgaatgttttgctgtgtaagtcattcaaagttgaagacaatgtcccatcttttgacagaaagggaaggaaggatatgtgctcagcctgccagtttgacccacttttgaaaagggctttgtggtctctaccaatgagaagtctggtgtcaatgtgattttcttaactttataggaattgtttgtttccctcttttctgaaaacttgtgctttcatcaggctctaccagccttgatactctgtcactcactgggcatggtatttgcaccatcctttcatccttaangctgctaactgtcttcacattgtggaaattatctttactatttccccaaatttaagaacataggcttgggagacaaacagcctaagttcaaatctccacatcat

SEQ ID NO: 8129 - DNA, 868 bp, Homo sapiens
  misc_feature 1, 2, 3, 4, 5, 6, 8, 602, 604, 609, 622, 625, 635, 645, 663,665, 669, 671, 672, 680, 695, 709, 711, 734, 748, 750, 762,772, 773, 780, 790, 791, 792, 794, 795, 796, 799, 808, 809,811, 813, 815, 816, 825, 826, 832, 839, 840, 841: n = A,T,C or G
  misc_feature 842, 845, 848, 849, 850, 851, 858: n = A,T,C or G
nnnnnntntcgactactatagggcgaattggagctccaccgcggtggcggccgggagcacccaagggtgcgagggcccagtctgtgggcgctgtgtggcaccattcacagcaagtccatcttgggtctgtagtgcagcaggagcggcgccttcttgaatctccacctagtgacaaccacgaacttgagtgtgtggtccttgcccaggatctcctcgttgcataaaatgtccagctcgttaaaggatgcccgcgtacctcggccgctctagaactagtggatcccccgggctgcaggaattcgatatcaagcttatcgataccgtcgacctcgagggggggcccggtacccagcttttgttccctttagtgagggttaattgcgcgcttggcgtaatcatggtcatagctgtttcctgtgtgaaattgttatccgctcacaattccacacaacatacgagccgggagcataaagtgtaaagcctggggtgcctaatgaatgagctaactcacattaattgcgttgcgctcactgccgctttccagtcgggaaacctgtcgtgccagctgcattaatgaatcggccaacccccggggagaggcngnttgcntatttgggcgctnttncctttcttgnttacttactngcttggcttcggcgttcngnttcngnnagccggtnttaacttacttaaangcgggaataccggntnttcacagaatcaggggatacccnggaaaaaacctttnanccaaaaggccancaaaagggcnngaacccnaaaaaggccnnntnnntgntttttcatnngntncnncccctgacnngcatanaaaaatnnnnctnaannnnaaggggnaaaacccact

SEQ ID NO: 8130 - DNA, 673 bp, Homo sapiens
  misc_feature 87, 366, 369, 467, 473, 475, 481, 493, 496, 511, 512, 516,520, 525, 531, 532, 534, 535, 545, 550, 564, 574, 578, 590,591, 601, 604, 609, 612, 621, 623, 625, 637, 638, 644, 651,655, 664, 667, 672: n = A,T,C or G
tcacttttagggcgaattggaaactccaccgcggtggcggccgagtactctggcagggccagtggcaggaagggagggacaagtggnacagtggtgtgtctgaattgtagagtgttagattccaggtcattcccatctgctcaattccatcagccgcagagttcaagctgtcatctaagcccagggaggtgtaaggaacaggccacatctggttcttggaagtatatgcccaggcatttaaagcggatctttcctctttgggccatgggtggatttcctgctcaagcaaccttcatctcttaagctgtgttgctggaatctggactttccattcaagctggggcccatcaatcactcggcgggctnctncacatgacatcgaaaacgctttcctgcagctcatctgggacggagtggccattcactgtccccgcacagccagaaccctggcaggactggcttctttnttggangngggctnaggccttccgangangactttccacccacnnacanaccnatttncagctnntnntacctttttnttttnaaaaaacctttaanccctttttcnaggnaggcttttaaanngaaccctttnttnttggnatncccccgttncntntcccgggggggnncttttnaaaaaangggnaccccccgnctntgagng

SEQ ID NO: 8131 - DNA, 668 bp, Homo sapiens
  misc_feature 16, 452, 457, 467, 483, 494, 496, 506, 517, 523, 530, 534,551, 552, 561, 563, 579, 597, 598, 600, 609, 610, 613, 615,617, 619, 621, 625, 632, 636, 655, 656, 660, 662: n = A,T,C or G
tatagggcgaattggnagctccaccgcggtggcggccgaggtacagtctggggctgaggtgaagaagcctggggcctcagtgaaggtctcctgcaaggtttccggatacaccctcactgaattatccatgcactgggtgcgacaggctcctggaaaagggcttgagtggaagggaggttttgatcctgaagatggtgaaacaatcaacgcacagaagttccagggcagagtcaccatgaccgaggacacatctacagacacagcctacatggagctgagcagcctgagatctgaggacacggccgctctagaactagtggatcccccgggctgcaggaattcgatatcaagcttatcgataccgtcgacctcgagggggggcccggtacccagcttttggttccctttagtgagggttaattggcgcgctttggcgtaatcatgggtcatangctgntttcctgtgngaaaattgttttccgntacaatttccncnccacataccnagccgggagcnttaagnggtaaancctnggggggcctaatgaggnncctaactcnanttaattggggtggccntactgccccttttcaatnngnaaacctttnnggncncntngnttangaatcgnccanccccgggggagggggttgnntttngngctttt

SEQ ID NO: 8132 - DNA, 628 bp, Homo sapiens
  misc_feature 10, 20, 64, 65, 67, 224, 225, 431, 453, 461, 470, 471, 474,483, 485, 487, 499, 501, 513, 515, 516, 518, 521, 523, 526,528, 532, 533, 534, 538, 540, 541, 542, 543, 545, 546, 550,552, 553, 554, 557, 558, 559, 563, 570, 574, 575, 584: n = A,T,C or G
  misc_feature 586, 591, 594, 602, 603, 611, 613, 614, 615, 616, 617, 619,620, 623, 624, 625, 627, 628: n = A,T,C or G
tcacctgtancaccaaggcnttgtattttcatgcccagttaacttatttacaatatttaagttnngntgcttctgcatttggttggtttcctgaagcgcagcccctgtgaataacaggtggcttttcatggatgtctctagtcagagaaaaatgataaaggcttaaattgaggattaacagaagcagattaacctcataaatcctgtctggctggcagatttcnngtaaaaaaaaaaaaaggtgggttggggggacccttttctttctagttgtctttaaggaaaattaattttactttttttttgttctggccgaaatttttatgagatatctctcacttgtcttccactttgaaccggttaaagctcatagctgtcagctctgaatgaggaggggagaagcccctgggtctttctttgaaaggaatccnctgcttgagggctgcctccctnatggtgtncgtgccgtnngtnttcctgacncntnctgtgatatcgnangttactattcanannanccntnccngntttnnntgtnannnntnnttcnannngannnctgnatccttntttnntcctcatanantcctngtnttttgtcnnccggttgngnnnnntnngcnnncnn

SEQ ID NO: 8133 - DNA, 663 bp, Homo sapiens
  misc_feature 43, 336, 371, 382, 393, 406, 419, 423, 426, 434, 436, 444,461, 462, 465, 466, 469, 471, 475, 478, 480, 486, 489, 492,493, 497, 502, 505, 506, 509, 512, 514, 515, 521, 524, 527,533, 538, 539, 542, 543, 545, 547, 550, 554, 555, 559: n = A,T,C or G
  misc_feature 560, 561, 563, 567, 570, 573, 576, 577, 580, 588, 589, 592,594, 598, 599, 601, 602, 607, 608, 610, 612, 613, 616, 617,619, 620, 622, 624, 626, 627, 631, 634, 639, 646, 647, 648,649, 651, 652, 653, 659, 662, 663: n = A,T,C or G
cctcactaagggaacaaaagctgggtaccgggccccccctcgngtcgacggtatcgataagcttgatatcgaattcctgcagcccgggggatccactagttctagagcggccgcccgggcaggtacacttcactttctcgtgctcttcctaagagagtagtgttttcttcctccccaccgagaaaaaaaataaaagcaacaactgggaacttcttccttaccctgccttgtctgcagaccctggaggccccttccatttccccttgtccttttccttgtctttttggttcccgccgcagtggtcgagtcgccctcgaacacgctgaacagctcatntcccgaatgcgtccgccatttttgggagcagtganagccccgcgtnccttggagcgncaccgggggggangcctccaatgagncctnttngtgagagngntttacgcngcgctcaattggcccannaannagnancagngangngctganggnagnncctngcganggnnccnatngnnagaagnagnagnggagangggcnngtnngngnagnaggnnagannntngggnggnganggnncangaaggggnnggncnaganngnnagganngngnnggnngnnanangnngganganaagcncaggaannnntnnnagaaanaann

SEQ ID NO: 8134 - DNA, 680 bp, Homo sapiens
  misc_feature 7, 11, 15, 26, 35, 36, 37, 99, 150, 159, 168, 171, 200, 216,237, 262, 284, 293, 296, 300, 316, 322, 328, 329, 336, 342,345, 346, 349, 355, 356, 361, 366, 368, 376, 378, 379, 383,386, 389, 390, 391, 393, 396, 397, 398, 399, 401: n = A,T,C or G
  misc_feature 406, 408, 411, 413, 416, 418, 423, 431, 432, 433, 434, 435,442, 445, 446, 451, 454, 455, 456, 457, 461, 465, 466, 469,471, 473, 477, 482, 483, 485, 486, 489, 491, 492, 493, 494,495, 496, 497, 502, 503, 504, 505, 506, 507, 509, 511: n = A,T,C or G
  misc_feature 512, 514, 515, 516, 518, 519, 531, 536, 541, 544, 550, 551,557, 562, 569, 570, 572, 576, 577, 582, 583, 585, 587, 596,598, 601, 607, 608, 615, 617, 621, 623, 624, 625, 626, 629,630, 631, 638, 641, 643, 647, 650, 652, 654, 662, 664: n = A,T,C or G
  misc_feature 666, 668, 673, 674, 675: n = A,T,C or G
gcgtganacgnactncactatagggncgaattggnnnctccaccgcggtggcggccgcccgggcaggtacttttttttttttttttttttttttttttnactctcctgttgcttttcttcttctttccctttcaggcatctcctcgtttnattttctgnaactcacanagngctgcaaaataatgttagggctttgcagnttattccttgcgattnaactgcataaatataaaaagngcctgagcaataatgcacgatgggntattcaataacacaaggaatgnaaagcgatnacntatntgccttgaatgaggancattantgaatnngtatgangacaangcnncgngctatnnaccanggctnanaagcagangnnaaanttngannnanccnnnnanaaaangncantnaanantcatnaaaattannnnnatacccnaannataanccnnnncttntatnncanananaaantttannannaanannnnnnncccannnnnnananntnnngnnccttaccatctnttttnttccncancccccnncttccnccctncaagaannanatannaaagnnananaaaaaacgnantanatcacnngaagatnanaaanannnnacnnnacattanatntnccangtntntntatctatnantncnacagnnnaaagt

SEQ ID NO: 8135 - DNA, 628 bp, Homo sapiens
  misc_feature 467, 497, 502, 513, 526, 530, 531, 535, 544, 563, 568, 585,594, 596, 598, 601, 604, 605, 617, 625, 627: n = A,T,C or G
cctcctaagggaacaaagctgggtaccgggccccccctcgggtcgacggtatcgataagcttgatatcgaattcctgcagcccgggggatccactagttctagagcggccgcccgggcaggtacttttttttttttttttttttttttttatgcaataccagctttcaccccgtcctctgcactgcttagccttggctctgctgagttgtgcaacacattctgagagatgccatacaatgctccaggcaaacttatagaaaaacaggaatgagtgattttatacgggatgtgtttcagctgtccaattcaaaataaatcacgtccaggtgcattctttcctaatttgcgacccaaactgcttgcactttatacattaatgaattattttttaaaaaagaaattagctctatcatgaagacagtgctatctaaccctttgtggtctttctcccttaaaaagcaattgnttccattttatagggggttagggttaaacnaacantttggaatgangctgaaatgaaantacnntttntcaaccccntaaagccgggccccttaanataangcctcccagaaaaaatnacttgggcntntngangcnntttttggcatancaaattgncng

SEQ ID NO: 8136 - DNA, 693 bp, Homo sapiens
  misc_feature 21, 409, 417, 434, 475, 478, 484, 489, 494, 496, 499, 502,529, 559, 560, 566, 571, 580, 587, 592, 596, 599, 604, 607,609, 611, 612, 614, 622, 626, 630, 631, 642, 643, 646, 648,650, 651, 654, 657, 658, 660, 663, 666, 670, 671, 672: n = A,T,C or G
  misc_feature 673, 679, 683, 686, 689, 691, 693: n = A,T,C or G
gctcctatagggcgaattggngctccaccgcggtggcggccgggtacttttttttttttttttttttttttttttactactttcttctttcttattttctcattggcctcaggtcttggaatatcttgaattcaaactaataattcacctccttctcagcactctcaatatagtcttttgccaacacctgatgagacatataacttatgaccattgcacttctctttttttccatggtttgcatttaggaggtaattttcttcagctattagagcatatccttcctcatcattttagagaaatacttggtcaaatgaccttttaaataaaagatggttcttaccttctaattttccacttattttatccatttctttttggatgtgtagcctttgggtaaacacacatnccttctgngaaacagtctcacagangacctctgttaaaaggtaatagcaataaaataattttcaanggnaaaatnccttngaagngnagnggnttcaaaattttccctaattaaaattcntttttaaaaaacacaaaattccctcctttnncaaacnaattngacctaaanagcaaancccgngggnctngcccnggnananngngggggggngggngggnnggggggggggnnagngngnntanatnngncgnggngggnnnnggaggngggngangananan

SEQ ID NO: 8137 - DNA, 619 bp, Homo sapiens
  misc_feature 78, 134, 178, 235, 246, 320, 341, 353, 365, 369, 406, 468,475, 491, 504, 518, 527, 533, 542, 546, 552, 553, 554, 559,560, 561, 562, 564, 565, 567, 568, 570, 572, 573, 574, 575,576, 577, 578, 579, 580, 581, 582, 583, 584, 585, 586: n = A,T,C or G
  misc_feature 587, 589, 590, 591, 592, 595, 597, 600, 601, 604, 605, 606,607, 608, 611, 614, 617: n = A,T,C or G
tcactatagggcgaattggagctccaccgcggtggcggccgagtactttttttttttttttttttttttttcaaatgngacaggcatttattttaacagagaggaaggggaagacaaaatatcataaaatgtgngggttttccccagatgactctgttgaaaaaaccaggaaatgcanagcggggggacaaatggaggagagatattaactagaacattgctgactcaaggccgnccagcttcagngggagttctgattaggccccatgtctgcctgatgccacctgcaacatgggctccgcatgtgccaagacactganaactgtttgccgacacttggngtatttgtcagngatcttactttncagngtatttatgtgctaatcttttattattggatttgctnctacaaatatgtttttaccataaaacaaagggaaaaggaaagatgttggctctgtggcaatngttttgnctggattttctaaggnagccccagttganaagagctggatatncatggaggngggagnctggaaagngggnggaaannnttgcnnnntnngnntncnnnnnnnnnnnnnnnntnnnnagnangcnnagnnnnntgnggnggngg

SEQ ID NO: 8138 - DNA, 611 bp, Homo sapiens
  misc_feature 20, 27, 30, 38, 508, 552, 564, 581, 586, 587, 590, 593, 596,598, 601, 607, 608, 609, 610: n = A,T,C or G
gccagcgcgcattaaccctncactaanggnaacaaagnctgggtaccgggccccccctcgggtcgacggtatcgataagcttgatatcgaattcctgcagcccgggggatccactagttctagagcggccgaggtactgtgatatccacatatttttgagaaaaattcccaagccaggcgaatgtggattggaataaagacataggcagtgtataccaccatagcaataatggttagtaagatggtgttaaacatagatcgctcccagggctctaaaacagcacagcagctaatgatttggtattgatagtagagccaggagaaatattccttcacacgcctcaaatccatggttggctccttcaagctgcagtaagtttgtcctaagaaagtccaggtctggttcttcagccttgctccttcacgaaatgatcctgtgtgggttagttctcctctctgggttgctgtttcctcatctcccagttgggtgtatctccctgcggcttangtgagcgccgaggctttggctcctccccagctgctgcgagcttnccactgccccgngtacctgcccgggcggncgccnncgnggnggnanctncaattnnnnc

SEQ ID NO: 8139 - DNA, 653 bp, Homo sapiens
  misc_feature 20, 28: n = A,T,C or G
gcattaccctcactaagggnaacaaagnctgggtaccgggccccccctcgggtcgacggtatcgataagcttgatatcgaattcctgcagcccgggggatccactagttctagagcggccgcccgggcaggtactaccagagtaaggcaaccaacccaaaaactacttgacagggagaggagtctaccaaaaagaaacaaaacaaacaaattccctcccaaacaaggtaagctttgaagaaaaattacaaagcacacaagaatattttctggcatgaggatagtcaacagacccaagaatctgtggagtccattcatgaagaaccagacataatggtgcaatattaaatgttaaaataaggattcttgaatcatcaaataagtaaaagagggaaggggaacaaagaattcttaagaatagatagggattaaaatatagaaaccttggaagtgaaaagtgtagtcattgaaatagaaattgcaagtgataaggtgaactgtagactagacatctgggccagtctagggtgaggcaaggaaggtatccagggtgcaaaatgtaagaaggcactcactgtcgctgccaaccctgaactagcgcatgcccaagagtgagtgacttcttacattgtgcactctgagtacctcggccgc

SEQ ID NO: 8140 - DNA, 626 bp, Homo sapiens
  misc_feature 38, 52: n = A,T,C or G
ctccccgcggtggcggccgcccgggcaggtacgcgggnattgcatacatggnatgaggagactggcaacctgaaaaggctgtcattctacagggctctaatgatgttgaacttgttgctgagggcaacagcaggttcacttacactgttcttgtagatggctgctctaaaaagacgaatgaatggggaaagacaatcattgaatacaaaacaaataagccatcacgcctgcccttccttgatattgcacctttggacatcggtggtgctgaccaggaattctttgtggacattggcccagtctgtttcaaataaatgaactcaatctaaattaaaaaagaaagaaatttgaaaaaactttctctttgccatttcttcttcttcttttttaactgaaagctgaatccttccatttcttctgcacatctacttgcttaaattgtgggcaaaagagaaaaagaaggattgatcagagcattgtgcaatacagtttcattaactccttcccccgctccccccaaaattttgaattttttttttcaacactcttacacctgtatgggaaaagtcaacctttgtagaaaccaaataaaattggaaaataaaacaaaaaaaaaaaaaaaaaac

SEQ ID NO: 8141 - DNA, 629 bp, Homo sapiens
  misc_feature 5, 21, 44, 175, 402, 470, 478, 507, 591: n = A,T,C or G
gctcntatagggcgaattggngctccaccgcggtggcggccgangtacttttttttttttttttttttttgatgtgtagccttgggtaaacacacatccttctgtgaaacagtctcacaggagactctcagaatcccaagaattttcttcaacgttcttttgttttgattctgangggaacatctgatctataaaaggttaatcacagatacattcatgagaacatttctccactatacattttaaaaacatatacaaatctactttcattcacgaatctgtggttcctcctctgtagcccgtatattctttttgttgattacaatgactacttcctatagtcaatccgttagaattgaaatctgaaaagtctgaaaattaacattatttcattagaatgcncaaaaatataaatttgactaacttctatgaattatttcttcacaaagcagtcacatactcttctactntgaaacanggtatatcctatatttcctgttcattcanaaaactttaattacctaccatctctcatttctttgtaaatttttatttggtagtattacttacgttgattgactcagcaatctnttttacacagttcttcaaaaaagatgatttatcaatga

SEQ ID NO: 8142 - DNA, 640 bp, Homo sapiens
  misc_feature 120, 198, 201, 224, 244, 297, 331, 364, 379, 385, 392, 437,439, 477, 522, 527, 616: n = A,T,C or G
tatagggcgaattggagctccaccgcggtggcggccgaggtactttttttttttttttttttttttttttcgcaaagaaccacaaaccacctttgaagccaagaaaaagacgtgattagngggaaacacatcagtacctttaatcctccactgactttggaaaaacaacaaaatgccagcttccaccagaatcatttnttnttaattaaaagttagccagattnttttggagcactcaattttntggtcaggtcaacaaaaaagtaataaacatcacacacacctccctcccctgtnttcctagccccattcctggagttatgcaaccctngggggcggcatacacttcagctatttgctctgngttcataattagatngtctanacagganatgttgctggagcaataggaaaatattttacaagatgttccgcananccacacttataacagtgattaggacacactgacagacncgaagccagcagaattggcccgggccacgagccggtttcacccanagcanaagccctttcaagctctcatttcaggaagaggtgccaaattagagctctgagggcatggagcagcaactttttggcctttggatccganaaagcaaggttgagataatagaat

SEQ ID NO: 8143 - DNA, 680 bp, Homo sapiens
  misc_feature 642, 665: n = A,T,C or G
tatagggcgaattggagctccaccgcggtggcggccgtgctccgtgggtttcattagcttacttcttgtgtaggaggcaaaaggtatctgcagggctctgggcttgctaaccaaaccgttaatcgcttagaaacagcaagaagttcactagtgagatgtttatcacatacctggaacacgagttgactttctgtgagacatcattctggaatgaaagccaaaatctctctgctattcagttgaggctgaaaaaacaatcacatcagaattagtaaggcaaaagacaaagagagagaaatgaaaacaagccagtattcaatggggctagggggaaaattacctgggcttcaggaattacaggagagttggggttttgagaaggtaaaaaagtgggccaagtgcggtggctcaagcttgtaatcccagcactttggaacgccaaggcaggtggatcacgagctcaagagattgagaccagcctggccaacatggtgaaaccctgtctctactaaaaacacaaaaattagccgggcgtggtggcgggcgcctgtagtcccagctactccagaaaaaaaaaaaaaaaaaaaaaaagtacctcggccgctctaaactagtggatcccccgggctgcaggaattcganatcaagcttatcgataccgtcgnctcgagggggggcca

SEQ ID NO: 8144 - DNA, 690 bp, Homo sapiens
  misc_feature 365, 374, 391, 393, 394, 395, 396, 397, 398, 400, 456, 459,461, 467, 470, 471, 474, 478, 486, 499, 520, 526, 529, 544,549, 557, 561, 567, 599, 612, 623, 625, 639, 643, 644, 651,656, 660, 670, 673, 676, 679, 680, 688: n = A,T,C or G
gactttttatagggcgaattggcgctccaccgcggtggcggcctttgggcaggtacgcgggggcggcttcttagctttacgatggcaacaagtatggcggctgctagtggtagatttgaaagtgcgaagagtatcgaagagcggaaagaacagacccggaatgccagggccgaggtgttgcgccaggctaaagccaattttgaaaaagaagaaaggcgtaaagaacttaagcgacttcggggtgaggatacatggatgctacctgatgtgaatgagagaattgaacagttctcacaggaacactctgtgaagaaaaagaagaaaaaagacaagcattcaaaaaaagccaaggaagaaaagaaaanaaagagccnggaacctaataaaaaantnnnnnnantaaaagtcccttggcccgttttaaactagggattccccgggcttgaaggaattcanttnancttttngannccngccnaccttganggggggcccgggncccacctttggtcccttttangagggntantggccccttgggggnaacanggcaaagngggnttcctngggaaatgtttttcctttaaatttcccacaanaattcaaaccggngaattaaaagntnaacccgggggggcntaannggggctnccccnattntttggggggnccnatnggnnctttaaangg

SEQ ID NO: 8145 - DNA, 645 bp, Homo sapiens
  misc_feature 16, 19, 496: n = A,T,C or G
gcattaccctcctaanggnaacaaagctgggtaccgggccccccctcgggtcgacggtatcgataagcttgatatcgaattcctgcagcccgggggatccactagttctagagcggccgcccgggcaggtacatgtgtccttcttctcagtttggtttgtttggttttgaaaaagtaggttttttttttagtatgtgatgagcttattcttaagtgaattaataaatactttttagtatctgttttaatttctaacagtatgagtgttggtagttatattccaaataaacaaaaactcttagagtcctcagtaatttttaagactgtaaaggggtcctgaaaatgattaaatgtttgagaataactgcctcagaacattgttcttcaaccctaatcaaacccagcacggcatttatataaaaaatgattttataatgtcccatttgctaatcctgaaataaaatacataggtaatagaatgacttagcaatttcanaaatatcaatggaggaatactagtgtttggagacctaactatacaggagaaataaaaggaaagtcattttttataacattatgcatgcatgtataaagcactcagatctgatgacattgggagacacggtggcatagccagatccttac

SEQ ID NO: 8146 - DNA, 635 bp, Homo sapiens
  misc_feature 21, 30, 507, 582, 585, 597, 599, 608, 610, 615, 623, 630: n = A,T,C or G
gtatacgactcactatagggncgaattggnactccaccgcggtggcggccgcccgggcaggtacatctgagccaccgtcatctgtagtctagatgagtgtcatagacttggaattgatagtcctggtttttaaaaacttccccttttgtcaattcttaactcagtggatgtatttaaaacataagtcaaattgtgtcattcctctgccccagcccttctgattgcctcccatttcactctgagtatgtgccagagttcctcctaataactgaaaggcagtaaaccatctggcatgttacctctcctgcttaaacttctgtttcttatgtcttttgctctgtttcagccacactgaacttgttgctattccttacctaccctactgcttaaagattccaggcacacctctgcacttagcagttccatgtgtctgggatgctttttccccagatattcttctagcttactctttccattacttcagttctttacttaaaatcccctttncaagaagaagaaaaagggtaaaaagaaacacattaaggaattaccactttttgaggaagaaccatgtacctgggncgntctagaactagngnatccccccngnactgnaggaatgngatatgnagctt

SEQ ID NO: 8147 - DNA, 646 bp, Homo sapiens
  misc_feature 11, 24, 427, 429, 518, 522, 552, 554, 562, 563, 566, 571,577, 583, 589, 591, 597, 601, 610, 617, 622, 628, 630, 633,634, 637, 639, 640: n = A,T,C or G
gactcactatnagggcgaattggnaactccaccgcggtggcggccgcccgggcaggtacttggccactttcctgagccaagcacttcattatcttcttgtcctgtgagtcctaatagatatatttagaaacacttctatgaaatatggaatccaggcttaaccagctgtttgaaatcacaacccacaaccactttgctggtgtgtgctcacacacacacacacactgacacatgcttgctatacatacatacacacagtttccatcttttttttttttttttgagacagagtcttgctctttcgcccaggctggagtacacttggctcactgcaacctctgcctcccaggttcaagcaattctcctgcctcagcctcccaagtagctgggactacaggcacgtgccactacacccggctaatttttngnatttttagtaaagactgagttttgccgtgttggccaggctgatcttgaactcctgaccttgggatccacctgcctgggcctcccaaagngctnggattacaggcatgagccaacacgcctggncnggtgccannttntttanggggcntggccntccttntntcttcnttanatgtagcantggccanatttntgggangnaannccngnntgggtt

SEQ ID NO: 8148 - DNA, 660 bp, Homo sapiens
  misc_feature 2, 3, 4, 6, 7, 8, 9, 10, 12, 13, 19, 20, 24, 25, 26, 27,33, 51, 80, 87, 88, 101, 118, 125, 177, 186, 200, 215, 224,233, 246, 291, 296, 298, 307, 337, 338, 345, 347, 348, 351,353, 360, 365, 375, 381, 382, 390, 398, 399, 401, 414: n = A,T,C or G
  misc_feature 417, 421, 422, 429, 431, 435, 441, 442, 452, 456, 459, 467,470, 472, 473, 474, 475, 476, 477, 479, 482, 487, 493, 496,505, 508, 510, 514, 515, 516, 517, 518, 523, 524, 526, 530,534, 535, 537, 539, 549, 550, 551, 552, 558, 560, 570: n = A,T,C or G
  misc_feature 573, 574, 575, 576, 577, 578, 579, 580, 581, 583, 588, 590,592, 595, 611, 613, 618, 619, 621, 623, 625, 626, 627, 628,630, 632, 633, 634, 637, 641, 642, 643, 645, 647, 649, 651,652, 653, 654, 656, 659, 660: n = A,T,C or G
cnnntnnnnntnngtttgnnttgnnnncttccnccgcggtggcggccgagnctttttttttttttctttttttttttttnggattgnngatcacacctttntcttgcttaatatgtgnccaggancacaaaaatatctacatccttctgatgtatcattttagggtatgatctcagnaatcaggcngggaattttctatngatttgttggaagtntaggacaanatgcatatnggtggcatgctgnatacttcagaatgcttagtttattaatcaacaaaggagtcatatnttttngncactaatgncctcaaaacaatcccaaccaattttaccgnntaaaatngnnttngnttatttnattcncatttttttnctttgnngcaatcanagacaatnngngtgttatatagtntangggnnagctatntnttgnactaannacaaactacntgtnatntccaggcncanannnnnngnccngtganctgcangtngggaacaangangntggnnnnnaattnngncagngggnnancngggacccaannnnaacttntngtaggccccnaannnnnnnnnantgagnantnagngtaaccgcttggaaancncctgnntnantnnnntngnnntgncggnnnantngncnnnnancann

SEQ ID NO: 8149 - DNA, 624 bp, Homo sapiens
  misc_feature 8, 419, 491, 558, 564, 575, 587, 600, 603, 609, 617: n = A,T,C or G
gaattggnagctccaccgcggtggccggccgcccgggcaggtactttttttttttttttttttttgcctggagagagagagatgttttatttttgccaaagcatgtgagagtaagtagcaaacatcatgacacttcacccctcaaatattttcccacgtatcacttaagaacaagggcattcattctgttacatgaccacaatacaatcagcacagatagatattaacattgagacaatgctctgatgtattggtatctactatgcagttcataatcaaataagggttttggtaacttgggatccataaatggtctgcaaggtcagcccctgtagacctgcacttagtgggtgccatttccctgtctcaggtgcctgctctactggtgatatttttcactggctctgttgctcacttanaattttttccccagctgttgacattttattttctgcatagttctgaagctgcagcaggtgttcttatgcctncttgattgtaaatttcatagaagctgtcaatttctaagggatttcatctcctttgatgcagccaggncaatanctacaaacctntctgagaatgtntgccatcggcctnctntttgtntaaaaggnggtcttc

SEQ ID NO: 8150 - DNA, 653 bp, Homo sapiens
  misc_feature 20, 31, 55, 597, 626, 636: n = A,T,C or G
gcgcatttaccctcactaanggaaacaaagnctgggtaccgggccccccctcggngtcgacggtatcgataagcttgatatcgaattcctgcagcccgggggatccactagttctagagcggccgaggtacaccccctttttaccttggacagttttcagagagaagccatagctgcctccttccttcacgagtatagcagagccggggctgggtccaagtttgcacacctccattcatcacaggggaaagtatattatcactcaaaccttgctccttctgactttgacccaactctttcaagtccacccgtgttttcactgctttctcataggaatccccatccagaactagtaaagtcactgaattcccactctttctgaccagatccacaacctgcatatgttcttctttgtccacaaagacaccattgatcctaagaactctgtctccatcttgaaggccagccttctctgctgggctacacttctcaaccacccggaccaggtggccctcggtgtccttctcatttcgcaggaagaagccatagttttgccctttcttgcttggacagtttacattctcgggggttgaaggnggaggtcatttctggagatggaagaaganctgctctgtncgttcactcagggaatt

SEQ ID NO: 8151 - DNA, 380 bp, Homo sapiens
  misc_feature 56, 214, 215, 216: n = A,T,C or G
ttgggccctctagatgcatgctcgagcggccgccagtgtgatggatatctgcaganggggcccttagcgtggtcgcggccgaggtacaatgccaggaagatgaatgtgcgttaatgttgctggaacatggcactgatccaaacattccagatgagtatggaaataccactctacactacgctatctacaatgaagataaattaatggccaaagnnntgctcttatacggtgctgatatcgaatcaaaaaacaagcatggcctcacaccactgctacttggtgtacctgcccgggcggccgctcgaaagggcgaattccagcacactggcggccgttactagtggatccgagctcggtaccaagcttggcgtaatcatggt

SEQ ID NO: 8152 - DNA, 656 bp, Homo sapiens
  misc_feature 654: n = A,T,C or G
gactcactatagggcgaattgggaactccaccgcggtggcggccgcccgggcaggtacgcggggtcagttacatgaaaatcccctttggtcactgagatccaaaccttgccggtgtgtcattgagccaggtcaagtcttcgatatgactgtgctcctaccctcaacccagcctttggcgtttgtgccttagtgactgcagaagcctcttagtcttcccatctccaccttgctctatacccctgccttgaccctagctggccaatagtaaaaatcccctcccaaaatatttttaagtaaacaaacaaacaatacaaaataacgtttaaaaaaaaaaaaaaaaaaaaaagtacctcggccgctctagaactagtggatcccccgggctgcaggaattcgatatcaagcttatcgataccgtcgacctcgagggggggcccggtacccagcttttgttccctttagtgagggttaattgcgcgcttggcgtaatcatggtcatagctgtttcctgtgtgaaattgttatccgctcacaattccacacaacatacgagccgggagcataaagtgtaaagcctggggtgcctaatgagtgagctaactcacattaattgcgttgcgctcactggccgctttccagtcgggaaacctgtnga

SEQ ID NO: 8153 - DNA, 677 bp, Homo sapiens
  misc_feature 623, 628, 642, 646, 666: n = A,T,C or G
tcctatagggcgaattggagctccaccgcggtggcggccgcccgggcaggtacgcggggagtcaacacacccgtgggtaattaacctggtcatccccaccctggagagccatcctgcccatgggtgatcaaagaaggaacatctgcaggaacacctgatgaggctgcacccttggcggaaagaacacctgacacagctgaaagcttggtggaaaaaacacctgatgaggctgcacccttggtggaaagaacacctgacacggctgaaagcttggtggaaaaaacacctgatgaggctgcatccttggtggagggaacatctgacaaaattcaatgtttggagaaagcgacatctggaaagttcgaacagtcagcagaagaaacacctagggaaattacgagtcctgcaaaagaaacatctgagaaatttacgtggccagcaaaaggaagacctaggaagatcgcatgggagaaaaaagaagacacacctagggaaattatgagtcccgcaaaagaaacatctgagaaatttacgtgggcagcaaaaggaagacctaggaagatcgcatgggagaaaaaagaacacctgtaaagactggatgcgtggcaagagtaacatctatnaactnaagttttggaaaangaanatctaagatgattgcctgtnctacaaaaaat

SEQ ID NO: 8154 - DNA, 680 bp, Homo sapiens
  misc_feature 3, 9, 13, 18, 19, 20, 34, 36, 85, 560, 585, 596, 598, 610,611, 613, 617, 619, 625, 626, 627, 632, 633, 639, 641, 646,647, 654, 655, 656, 657, 658, 659, 660, 661, 662, 663, 664,665, 666, 667, 668, 669, 670, 671, 672, 673, 674, 675: n = A,T,C or G
  misc_feature 676, 677, 678, 679: n = A,T,C or G
gtnatacgnactncactnnnagggccgaattggnanctccaccgcggtggcggccgcccgggcaggtacgcgggtgacccaaggnaggaccattttaaacttctaagttttcaccgagattaacatgcatttgttgaaagacaaacctcttttaccctactcccccagctgcaaatgctttcagggttcacatcatgttggaacatttggttacagtgtttcctaaactttgcgggtaaaaattgttcaagtaggtaaaaatggagcacatacaaaaaaaaaaaaaaaaaaaaaaaaaaaaaggtccctcggccgctctagaactagtggatcccccgggctgcaggaattcgatatcaagcttatcgataccgtcgacctcgagggggggcccggtacccagcttttgttccctttagtgagggttaattgcgcgcttggcgtaatcatggtcatagctgtttcctgtgtgaaattgttatccgctcacaattccacacaacatacgagccgggagcataaagtgtaaagcctggggtgcctaatgagtgagctaactnacattaattgcgttgcgctcactgnccgctttgcangncgggaaacctgnngngccngntgggtnnntggannggccancncccgnntgaggcnnnnnnnnnnnnnnnnnnnnnnnnnnc

SEQ ID NO: 8155 - DNA, 706 bp, Homo sapiens
  misc_feature 2, 4, 5, 7, 8, 9, 17, 350, 366, 367, 371, 403, 438, 469,494, 514, 565, 588, 606, 610, 622, 626, 630, 649, 662, 670,672, 683, 689: n = A,T,C or G
gncnnannntatcgcancccgtccgaggaactatattgcctctgtaggcaataattatagagtagtatacgatggtttttcttttttatccatctgcctatctccaggaggatggggtgtgcacttttagaaatgtatataaatgttcttgctcctttttcctgttacttcattgtgtgccaaggcctttccatggatacttaggtacgtaatgaaaattgaggttcattctatgaaaaaatctccccttctccccttcccttattgcctgtcttggcaatggccagtagagtagttatttaagggattttgtttttttgtttttttgttttttttttggtaggggaggngggggaatttctgggnnttgncttttttttaatgtatataaaagtttgctagntgttgttattggtgttctttcactctcaacacagntttttgtttggagttgtaggaatcaaatgtnatgagggacccaaacccgagagtgnggtaaatattctttgccttnctcaaagcctgtatacacaagcaagtagtatgtgagcactacaaggcttgngtttggttttttgctttgagggnttaatgagagtggattgntganaggaaaagcaanaaanaaantttttaaggatataaaagnttgctccttttgntgtaactncntttgaactggnccttgnttacccctaggcctaaa

SEQ ID NO: 8156 - DNA, 652 bp, Homo sapiens
  misc_feature 42, 171, 474, 529, 558, 592, 595, 597, 605, 613, 617, 639,643, 647: n = A,T,C or G
cctcctaagggaacaaaagctgggtaccgggccccccctcgnggtcgacggtatcgataagcttgatatcgaattcctgcagcccgggggatccactagttctagagcggccgaggtactttttttttttttttttttttttttttggcccttggaaataatacatgtcanaactttttttggaatagttggcacatgcctttaaatttcaaattctaaaatatgatgtaggggcttatttttttatttctattttattataaacgaacgacaatcaagagagttgtttccaataacagcaagactgagtagggcaaaagccatactttctcactatgtgaatagctgcttatcaggaatggaggttttactgaccttctgtgggatctgggcaagggctgaagcaatattagccttttcttctgtaacgttttgaaacagtgacctcagagaaaagaacccaatatcctcttnccctgaactctggacaacattttccatttctgacttcaaaatatatcacctaganggctcccgttccagatggctgaatagttnccagctccggtctgcagctcccccatgattggcncananatggctgntttctgcnttanaactggaggacctggccgggcnggcngccnccggg

SEQ ID NO: 8157 - DNA, 944 bp, Homo sapiens
  misc_feature 3, 8, 29, 560, 571, 614, 623, 640, 654, 673, 676, 688, 708,728, 733, 737, 755, 756, 759, 773, 781, 808, 813, 821, 835,857, 861, 862, 863, 865, 866, 869, 870, 881, 884, 887, 895,898, 907, 912, 914, 916, 920, 926: n = A,T,C or G
gtnttacncctttcaactcactatagggntaattggagctccaccgcggtggcggccgaggtaccaggtgaacaaagtttaccagaaagcagttgagacaagaaaataagagctcaggatgagggaaaagaaaaagattgagagaatttgtgcccccaaccatttcctcagactctaagaaagaacacactctctccaggcaggtctgaagctcaactctcttattgcctcacttcaggtatacctcactttacacaatagaattataactggaaagaagttggggacacatgtatttggtgattacattttaaacacattaggaaaagttgctatttgaactttttattgatttttggggggagtaaagaattattttgtgatgcaaataaatatcctttaattgatcgacttgccaaatttagatttgtgtgcatcaggctttcttttttttctttttttagagaagttcaatataaagcttttcttttcttttggttctttctttctttattttgagatgggagtcttgcttctggccgcccatgctggaagtgcantgggcgccganctcggcttcactggcaaccctccacccttcctgggttcaagcngaattcttntttggcctcaacccttnccaaagccaggttnggggaccttacaggccgtngangcccaccattgnccccgggctaaaattttttngtattttttaaggtaagaanaacangggnttttcaacccatggttannccnagggcttggtcttnaaaacttnttgccctcaaggcaatttttggccccnccttngggcttcntaaaagtacctggncccgggggggggccgcttttanaacnnngnnggnntccccccgggnctngcngggaattngantttaaggcnttttngnancccnggcgcncctcgggggggggggccc

SEQ ID NO: 8158 - DNA, 658 bp, Homo sapiens
  misc_feature 42, 509, 580, 581, 595, 615, 628, 630: n = A,T,C or G
ctcctatagggcgaattggagctccaccgcggtggcggccgngtactttacagtttatatgatctcatttgattcttaacatgagcctgtgagtgaaaaattccttcccctcttctacagattaggacgttgagattcagggaggttcagagggattcagggaaagtcaagtggcacctggagtcccgtggctaatttgaggccggtaggggattcgaacccaggatttgtgcttcttatgcctgggcttctgctctctggggcatggtcttccccctagctttcccattcactactttagcctaggggtcctaccctttattaaactgccagtgcctcactgcttttctcccccaaagacaaaaaaaaagtgtttttgcttttgttttgtttttcatgggcagagacctggaatttcagcttgagaatttgtgccatatgataaataaatcaacagatggctttttccccaaaaaaaaaaaaaaaaaaaaagtacctgcccgggcggncgctctagaactagtggatccccccggctgcaggaattcgatatcaagcttatcgataccgtcgacctcgnnggggggccccggtnccagcttttgttcctttagngaggttaattgcncncttggcgtaatcatggcatagctgtttc

SEQ ID NO: 8159 - DNA, 667 bp, Homo sapiens
  misc_feature 538, 650, 667: n = A,T,C or G
tatagggcgaattggagctccaccgcggtggcggccgcccgggcaggtacttttgccgatggggagggggatacagaggaagatgattacgatgacattattgagccccttctctcccttgaccaagcttctcactgtgagctagggcctgcacccagcctgggtcaggcctctcacagtgactccgaaatgacatcacagcgattttcgtcagttgatgaacaagcaaaacttcataagactatgtctcaaggagagattaccaagttggcagtgagacagaaggcttcggattcagatataagacctcagagagctaagatgagattctgggccaaagggaaacaaggggagaagaagactaccagagtgaaacctactacccagtcagaggtttcgccactctttgcaggcacagatgtgattccagctcatcagtttccagatgaattagctgcatatcacccaacacctcctttgagcccagaactgcccggcagttgccggaaggaattcaaagagaacaaagaaccttctncaaaggctaagcgcaagcgaagtgtgaagattagcaccgtggctttggattctatgcattggcaaaatgactctgtccagatcatagcaggtgtcagtgatttaaaaagctnggatgaattttcttttn

SEQ ID NO: 8160 - DNA, 680 bp, Homo sapiens
  misc_feature 5, 11, 15, 20, 22, 27, 31, 36, 37, 38, 87, 642: n = A,T,C or G
gcgtnatacgnactncactntnagggncganttggnnnctccaccgcggtggcggccgaggtactttttttttttttttttttgagnaagcacatcattacctgtatatgccccctcttctcagttccctcaatggacattggcattgatgagcccataagtacatgataagcctacaaggacaatagtgagtttatatttttatgtaatgattttagaacatgggataatatccagagtgatggaggtaaaactattcacatttccatattccaaactacttcaagaatcactagagtgcagaagttataactctaaatgctgaatggagaaatcatctgtcccaagaactacacccatatgactttccaataaatctatctcaaaaggcctaccatttaacaacaacagcaacaacaaaactttaaaagaacccaaatgaagttttgtataagttggtgtctttttttctatacattttgaatgacaaaaagctgctgtgagctacactgtttttattttattataaaccattcttattttataaaacacagccctactcccagaaaaaatatttttgtgaactaatgagggtcaagacatatatctgaggctaccatatgaccctaagaagaacccaangaatgcagtattaggactgcctcattgtttgaatattg

SEQ ID NO: 8161 - DNA, 678 bp, Homo sapiens
tcactatagggcgaattggagctccaccgcggtggcggccgcccgggcaggtacgcggggtggctggcgagcagcggcctccccgcagggccaggcaggtgggccagagcttttggtttgctgaggtttgtcagattttccagctcagggcccagccagctggcaggaagcaggacagaggtcacttgaattcagaccacatgtccctgttaaatacattagcttttaaatcaatctttgttcaaagtccagtgagttgcaagcctaatgctcacctgcagagacagaattcctgagtgaacgaacagagcagctcctcttccatctccagaaatgacctccaccttcaacccccgagaatgtaaactgtccaagcaagaagggcaaaactatggcttcttcctgcgaattgagaaggacaccgagggccacctggtccgggtggttgagaagtgtagcccagcagagaaggctggccttcaagatggagacagagttcttaggatcaatggtgtctttgtggacaaagaagaacatatgcaggttgtggatctggtcagaaagagtgggaattcagtgactttactagttctggatggggattcctatgagaaagcagtgaaaacacgggtggacttgaaagagttgggtcaaagtcagaaggagcaaggtttgagt

SEQ ID NO: 8162 - DNA, 653 bp, Homo sapiens
  misc_feature 500, 574, 597, 612, 615, 629, 647, 653: n = A,T,C or G
tatagggcgaattggagctccaccgcggtggcggccgagtacagtggatttgccagatcatagcgagactgcttctttaagtgggaccctgatacatttctgctcactgggtgaaacctcccagccaggccccccagccatgtccacctgcacttattagggacagagctctgatctctccctgggaaggagtgcctgggggcagggagggtggccacctgggttggttggatgactcagttcttccaaccaacctcctccccaacaggggcagaggcagttccccaccatgacacggttcccccaccacaatacagctcttttcttgaggcatggacagactgctcctttaagtgatttactccttctcgtggattggtttctcccggccaggtcctcccagtcggggcttccagccacctgacctgtattctgtggggcagacagagctcgtgtttctctctgggatgaagcatttgaggagcagggaaggccacctnctggaccacttgggctttttcaacctgttaagcctgtgggccttggagaatccaaactgatgggggagatgaangaatccccaaacagtaaagccgntctaccaaaaactgncanaataccttttaagngggttacaaatcctgttnttcaan

SEQ ID NO: 8163 - DNA, 648 bp, Homo sapiens
  misc_feature 22, 96, 514, 515, 516, 517, 518, 519, 520, 521, 522, 523,524, 525, 526, 527, 528, 529, 530, 531, 532, 533, 534, 535,536, 537, 538, 539, 540, 541, 542, 543, 544, 545, 546, 547,548, 549, 550, 551, 552, 553, 554, 555, 556, 557, 558: n = A,T,C or G
  misc_feature 559, 560, 561, 562, 563, 564, 565, 566, 567, 568, 569, 570,571, 572, 573, 574, 575, 576, 577, 578, 579, 580, 581, 582,583, 584, 585, 586, 587, 588, 589, 590, 591, 592, 593, 594,595, 596, 597, 598, 599, 600, 601, 602, 603, 604, 605: n = A,T,C or G
  misc_feature 606, 607, 608, 609, 610, 611, 612, 613, 614, 615, 616, 617,618, 619, 620, 621, 622, 623, 624, 625, 626, 627, 629, 630,631, 632, 633, 634, 635, 636, 637, 638, 639, 640, 641, 642,643, 644, 645, 646, 647, 648: n = A,T,C or G
gactcctatagggcgaattggnactccaccgcggtggcggccgagtaccttggttttcaggttatctgacaaaggcagctttgattgggacatggnaggcatgggcaggttctcctttctttggaaacacatccatgctgggatgcacagttcttttcctaaggattgtgtttactcctgactgcaacgtcttggccactgtttggagcagtttggtctgaaggtcattaaggatctgcttgcatcttgtttcatgtcctccgtgacagactgcagaccatgttagaagagaaggaaggtttgtggatcaagagggttgacattaggtttggtgagatgagttgcttggcacagatcagcagaacaggaccctggtgataaggcatctggctttgctaaccacttatcatcttccattattctctttcttaactaagtagacccgaaagtgcacttttgaagtctggtttagatggcgagattccgaatctacaatgatcgagtacctgcccgnnnnnnnnnnnnnnnnnnnnnnnnnnnnnnnnnnnnnnnnnnnnnnnnnnnnnnnnnnnnnnnnnnnnnnnnnnnnnnnnnnnnnnnnnnnnnnnnnnnnnnnnnnnnnnnnnntnnnnnnnnnnnnnnnnnnnn

SEQ ID NO: 8164 - DNA, 643 bp, Homo sapiens
  misc_feature 1, 6, 22, 23, 513, 549, 592, 596, 599, 624: n = A,T,C or G
nactcntatagggcgaattggnnctccaccgcggtggcggccgcccgggcaggtactttttttttttttttttttttttttttggaggactgggaaatagaggactgggaatttgagcaaattttgaggaatcttaaattgctattaggacaccaatatgacgcagcaatcaatcattattttctaggactctggttaccaaagttatagacagcgagccaattctccattattttggcaaaagataatgcaaatttatgttactgtttgctagttgatttgattcactgcctaaaataaactgattccttctgttttaaaaaatccattttgaagtcacacacaacaaaaatcattcagttagttgaatttgctttataattagactatgagtgaagacaccagatattttaaaaagcaatccaaatgactgagtttagaaaataaaatgagattacagcacctcttgagagtgtctgaggaggcctcttttccttttttattgcaatggcnaggttggaagaaactgtgacgagtaagaggcagaanacccaaagctgaggggtagcatcatgtcttctaagagactctntcanaanaagctgacttggccagggctcttgntgggaaatgattcctggat

SEQ ID NO: 8165 - DNA, 663 bp, Homo sapiens
  misc_feature 23, 25, 69, 87, 97, 501, 517, 534, 575, 628: n = A,T,C or G
gactcactatagggcgaattggnanctccaccgcggtggcggccgcccgggcaggtacatagccccagnaagggcggactggccggnagtccagggnatggcagccaacgccccataacagagatcagcattggactacaagaagaggcaaggagaaatcaaggatcaaaatttaagtaaaagaaaagccaagtcattaaaaatagacccctcattgaagagtgggaacgtaggtgtgatgttctggcataaggagtgaaaaagaaaaagctctattacttgaagcttttcaccaggggcagagggaatggccggaagtgagaaacgtgtgtgtggatgcttacaccgatgccgtctcctaatattggaacatggctccagaaaggagaaccaattattcctaattccacgggcggcattctctgactcccaaactcccaaagtggagggcaggagctgcccttaccttgaggaagctcagagtgttgtggtaaaactctnccggggtgcgacatangatgcttttcagagctncctggacaatggtacctcggccgctctagaactagtggatncccccgggctgcaggaattcgatatcaagcttatcgataccgtcgacctcgangggggggcccggtacccagcttttgttccctttta

SEQ ID NO: 8166 - DNA, 652 bp, Homo sapiens
tcactatagggcgaattggactccaccgcggtggcggccgcccgggcaggtacatacagtaagcttctgccttcccagctgctgtctggttagtggaactaacaatttccttgatggaaattgaataaggtaatccaaaaagaaggctcttttagatgaaaaaacatggatagattattaagcgccaagttttctcttcaacctactgctcaccagtgctccctcctcagctccaaggctgtggagggctcatgaagtcacaatgttctactgagaatttagctttttttttttttggagtgggtataccattttgtaattccacttgataatggcatctgattatttgatcatgacatcattatttgtatacaatgcagcaagaattttgtttttaatgtaggcttttaaatgggctttgatggaacttggttccatagaaggaatcccagataaggctttttaaaagccgagcccagccatggattcataccatcaaatacctatgagttaggtgaattcctctcgaggttccaagaatctatacaaagaatgtgtttattttgtatgggttcagcacaactcagttcctctttctcattttctgaaacttgaactgctctagtcttacccgtgtgtatagacctggact

SEQ ID NO: 8167 - DNA, 678 bp, Homo sapiens
  misc_feature 4, 13, 18, 20, 34, 35, 36, 303, 526, 541, 576, 593, 595,605, 608, 644, 661, 672: n = A,T,C or G
cgtnatacgactncactntnagggtcgaattggnnnctccaccgcggtggcggccgaggtacttttttttttttttttttttttttttttggaggactgggcaaatagaaggactgggaatttgagcaaattttgaggaatcttaaattgctattaggacaccaatatgacgcagcaatcaatcattattttctaggactctggttaccaaagttatagacagcgagccaattctccattattttggcaaaagataatgcaaatttatgttactgtttgctagttgatttgattcactgcctnaaataaactgattccttctgttttaaaaaatccattttgaagtcacacacaacaaaaatccattcagttagttgaatttgctttataattagactatgggtgaagacaccagatattttaaaaagcaatccaaatgactgagtttagaaaataaaatgagattacagcacctcttgagagtgtctctaagaggcctcttttccttttttattgcaatggcaanggtggaagaaactgngacgaggtaagaagcagagacccaaagctgagtgnagcatcatgtcttctananactctctcanaanaagctagatgacagaaagggattctcaaaatccagngaattaccttcaggctnttatttagaanaatttc

SEQ ID NO: 8168 - DNA, 628 bp, Homo sapiens
  misc_feature 576, 591, 603: n = A,T,C or G
cctcactaagggaacaaaagctgggtaccgggccccccctcgggtcgacggtatcgataagcttgatatcgaattcctgcagcccgggggatccactagttctagagcggccgaggtacaaagctgcccaggaaaatggcgataccataaaaataaagtgtgctacagacagatgtgttggcagaaggtggaagttcagccatggctgatggtggtgagtgcatcaagatacgcttgtggctctgactgaagttttggaaacattcactagtatttcccagacagaatacaggtgtcatcaatagcagaggtatcaggcttgagaaaacaaaggccatttgaccaactcgacaagtataatctatcaccagtggagatgtgctctgtccactctgggtgtgtttcatcctcagctctgtgtacctgcccgggcggccgctcgaaatagacgttgaaaactattcccgttacgccatctctgcgcgcctcacgtcagggccaagagcctagcgcgtagctttatggctgactcggctctggcgctctagccaattccgaggctgcaaactccgcttnttcgctcgcagtctncccgcgtacctnggccgcacccgcgggggggctccat

SEQ ID NO: 8169 - DNA, 910 bp, Homo sapiens
  misc_feature 596, 614, 640, 645, 649, 673, 677, 696, 714, 715, 742, 748,758, 759, 760, 761, 781, 782, 787, 788, 793, 794, 821, 830,842, 879, 884, 885, 892, 894, 896, 901, 906: n = A,T,C or G
gccgcgtatcgactactatagggcgaattggagctccccgcggtggcggccgggggccattgagactgccatggaagacttgaaaggtcacgtagctgagacttctggagagaccattcaaggcttctggctcttgacaaagatagaccactggaacaatgagaaggagagaattctactggtcacagacaagactctcttgatctgcaaatacgacttcatcatgctgagttgtgtgcagctgcagcggattcctctgagcgctgtctatcgcatctgcctgggcaagttcaccttccctgggatgtccctggacaagagacaaggagaaggccttaggatctactgggggagtccggaggagcagtctcttctgtcccgctggaacccatggtccactgaagttccttatgctactttcactgagcatcctatgaaatacaccagtgagaaattccttgaaatttgcaagttgtctgggttcatgtctaagcttgttccaactatccagaatgcccacaaagaattcaactggatctggaagaaggaaagaaactgatggtgttaactgaacccattttgaatggagacctacncagggcttgatgtcattnattggaaacccgcacaaacttggctnttccnttgnccgggggaatatttggtttttganagtnttttggtaccttgggccgntctagaaactaagtggannccccggctgcaggaattcgatattaancttatngaatcccgtnnnncttgagggggggggcccggnnccaannttttnntccctttaagggggggtaaatggcgcncttggcgtnaatatgggccangctggtatcttgtgtggaaaatggtattccgtttcanattcnncaacatnanangccgngagcntaag

SEQ ID NO: 8170 - DNA, 811 bp, Homo sapiens
  misc_feature 531, 608, 652, 653, 654, 661, 662, 663, 664, 665, 666, 667,668, 669, 670, 671, 673, 674, 675, 676, 677, 678, 679, 680,681, 683, 684, 685, 686, 687, 688, 689, 690, 691, 692, 693,694, 695, 696, 697, 698, 699, 700, 701, 702, 703, 704: n = A,T,C or G
  misc_feature 705, 706, 707, 708, 709, 710, 711, 712, 713, 714, 715, 716,720, 722, 723, 726, 727, 729, 730, 731, 732, 733, 734, 735,736, 737, 738, 739, 740, 741, 742, 743, 744, 745, 746, 747,748, 749, 750, 751, 752, 754, 755, 760, 761, 762, 768: n = A,T,C or G
  misc_feature 769, 770, 773, 774, 775, 778, 779, 781, 782, 785, 786, 787,794, 795, 796, 797, 800, 801: n = A,T,C or G
attgggccctctagatgcatgctcgagcggccgccagtgtgatggatatctgcagaattcgccctttcgagcggccgcccgggcaggtaccctactggcctatgccgaaagcacaggaactgtgagggtgtttgatctcatgggaagtgaactctttgtcatttccccggcatctagttttataggtgacttaagctatgccattgctgggttgatatttttagaatataaagcaagtgcacagtggtctgcagaactcctggtcatcaattaccgaggagaacttagaagttaccttgtaagtgttggaacaaatcagagctaccaagaaagtcactgtttcagcttcagtagtcattatcctcatggaatcaacacagctgtttaccaccctggtcacagacttttacttgttggtggatgtgaaactgctgaagtaggcatgtcaaaagcttctagctgtggcctttctgtctggagagttctttcaggatcaccgtattataagcaggttactaatggtgggagacngggttactgcagtacctttggccgcgaccacgcttagggcgaattccagcacactggcggcccgttactagtggatnccagctcgggaccaaagcttggcgtaatcatgggcataacttgnnnttttcgnnnnnnnnnnntnnnnnnnnncnnnnnnnnnnnnnnnnnnnnnnnnnnnnnnnnnngggngnnggnncnnnnnnnnnnnnnnnnnnnnnnnngnntgggnnnaaaaannnttnnnccnngnnggnnnaaggttnnnnggnncaaaaattgc

SEQ ID NO: 8171 - DNA, 667 bp, Homo sapiens
  misc_feature 49, 67, 451, 480, 494, 524, 531, 545, 567, 569, 574, 589,591, 594, 608, 614, 631, 651, 656, 658, 665: n = A,T,C or G
tatagggcgaattggagctccaccgcggtggcggccgagtacgcggggnacacgtttcccgtcaagnatggcggatactctcccttcggagtttgatgtgatcgtaatagggacgggtttgcctgaatccatcactgcagctgcatgttcaagaagtggccggagagttctgcatgttgattcaagaagctactatggaggaaactgggccagttttagcttttcaggactattgtcctggctaaaggaataccaggaaaacagtgacattgtaagtgacagtccagtgtggcaagaccagatccttgaaaatgaagaagccattgctcttagcaggaaggacaaaactattcaacatgtggaagtattttgttatgccagtcaggatttgcatgaagatgtcgaagaagctggtgcgctgcaaaaaaaaaaaaaaaaaaaaagtacctgnccgggcggccgctctagaactagtggatncccccgggctgcangaattcgatttcaagcttatcgatacccgncgacctngagggggggcccgnacccacttttgttccctttagngngggtnattgccccctggcgnanaangggcatagctgttnctgggngaaattgtttcccttanaatttcccacaaaaacaagnccggngnataaaangt

SEQ ID NO: 8172 - DNA, 433 bp, Homo sapiens
  misc_feature 2, 381, 399, 415, 429: n = A,T,C or G
tnctatagggcgaattggagctccaccgcggtggccggccgcccgggcaggtaccactcagaagccttcactgtcaacttcggggacaccgaagaggccaagaaacagatcaacgattacgtggagaagggtacattggacatcctggactgattctgtaattttcgtatcttttttctcccatgttccctttatttgtcttttggttctgctttttgggagattttcttaacttgatctacctgaggctcagtcctcatctgtaaaatgctgataaaaggacctaccacctagcgttgctgtgaggtgtcagtgaaataaaatgtaaaatgcttagcacagtgaactttaataaatggtagttgtggttgcacataaaanaaaaaaaaaaaaaaaggnaaaaaaaaaaaaaaanaaaaaaaaaaaaanggtt

SEQ ID NO: 8173 - DNA, 674 bp, Homo sapiens
  misc_feature 522, 564, 575, 576, 597, 600, 615, 617, 626, 631, 637, 642,650, 661, 668: n = A,T,C or G
cctcactaaagggaacaaaagctgggtaccgggccccccctcgaggtcgacggtatcgataagcttgatatcgaattcctgcagcccgggggatccactagttctagagcggccgaggtacccgtatgtgtgatagggcaggcagagggctccacctgctctgcccttggcaaaggcccttggctacactggtgaaaatgccagctcggcttctgcacggatacactatgttgtgccatccaactggagtgccggtggaccccaaaggcagggcagggcagggggagggggtattttgaaatgttttcaggagctctgtccagctgtctctgtcttccagcccggaactgctgcacaaagctacaaggacactgatgagaccatggatctgctgctgttctctagggaagacttggcttggagtgtggctgcctggattcgaaagtgtgtccttgactccatgggagtaatttcttgtagttttgcctggaattgagcagcgaaatacacacatgaagctgnctgctcccagagatgcttttcctcctgtttgagctgtattancccgccaccgnngtggagctcaattcgccctanaangagtcgtttaccccncnctcactggncggcnttttanaacgntctgactnggaaaaccccngggcgtncccaat

SEQ ID NO: 8174 - DNA, 650 bp, Homo sapiens
  misc_feature 3, 42, 503, 625, 628: n = A,T,C or G
ctnactaagggaacaaaagctgggtaccgggccccccctcgnggtcgacggtatcgataagcttgatatcgaattcctgcagcccgggggatccactagttctagagcggccgcccggcaggtacctaggccagaatactggcttgtactgcatgctgcaaacctcaatggctcactgacaagcaggccttgtcctgcctcacagagatacatacgtgggctgaaaagctctgtgatctgctaatgtcagtgtcagtgttgaacgctctccagtgacagacaggctgccaggcctcagggtggtgagtgctcaccactgtccagtgggcgccaaggttcaaaccccacacagtcacctttagaacatgagagcagttttgggtggccctagattttgtgccacactaggacatccttgttctctgtgcatcaggccaggggtgtagactctcagggcaaatctgcctgctcactccctcctaatgggtttccaccccttcttnctttcctagtgggtttttaagggggtagggagggtgcagtacctcggccgccaccgcggtggagctccaattcgccctatagtgagtcgtattacccccgctcactggccgtcgtttacacntcntgactgggaaaaccctggcgtt

SEQ ID NO: 8175 - DNA, 1036 bp, Homo sapiens
  misc_feature 2, 3, 5, 7, 10, 11, 13, 14, 15, 16, 18, 19, 20, 21, 22, 23,24, 25, 26, 27, 28, 29, 30, 31, 32, 33, 34, 35, 36, 37,38, 39, 40, 41, 42, 43, 44, 47, 48, 50, 51, 53, 54, 55,56, 57, 58, 59, 60, 61, 62, 63, 64, 67, 68, 69, 70, 71,72: n = A,T,C or G
  misc_feature 73, 74, 75, 76, 77, 78, 80, 81, 82, 83, 84, 85, 86, 87, 88,89, 90, 91, 92, 93, 94, 95, 96, 98, 99, 101, 102, 103, 104,105, 106, 107, 108, 109, 110, 111, 112, 113, 115, 116, 121,127, 132, 138, 140, 141, 143, 148, 164, 277, 422, 438: n = A,T,C or G
  misc_feature 442, 460, 489, 516, 531, 534, 553, 561, 566, 619, 638, 680,704, 727, 880, 884, 966, 973, 982, 985, 1017, 1024, 1032,1034: n = A,T,C or G
anntnanatnntnnnntnnnnnnnnnnnnnnnnnnnnnnnnnnnttnntnntnnnnnnnnnnnnttnnnnnnnnnnnnannnnnnnnnnnnnnnnnanntnnnnnnnnnnnnngnngtttntgattngccantttccntnngnaggantccgacctggacccanggcagggcacattatgcaggccctgccccccaggcaccttctcagctgcatggggctccagcccatgccagccccatgcccgttgcagcctttggaggaggctggaggcccangtgggcatggcaactcgagatacactctgtggagactgctggcctgggtggtttgggccttggggggttccccgcgttccatgtcaaaccatgttcctgggcacctctgggtactcatgggctgtgatgaagtggggggccgggnggggcccgacgtgggngtgngaggtgggcaacaagggngccagcaagctgggtgggtgagaacacgngtagcctggggaaacgggttacccggngcaggtgggcccaanaangaagacaagcccgcccagngcaagcangccgngatcccgaaagcccgaaattccaagccacactgggccgggacgttactaagtnggaatcccgaagctcgggntacccaaagccttgggccgataaattcaatgggtcaataagntggtttcccttgtgtggaaaattngtttattcccgcttcacaaattncacaacaaacaatactaagcccggaaaagcaataaaaagtggtaaaagcctggggggttgccctaaatggaagtggaacctaaacttaacaattaaattggcggttgcggcttcaacttggcccggtttttcaagttccggggaaaaccttgntccntgcccaggcttgcaattaaatgaaatcgggcccaaaccccgccgggggagaaggccggttttgccgtaattggggccgcttntttccgnttttccttngcnttaaattgaacttcggttggtggcttcgggtncggttcngggattgncngg

SEQ ID NO: 8176 - DNA, 649 bp, Homo sapiens
  misc_feature 609: n = A,T,C or G
gactccttagggcgaattgggctccaccgcggtggcggccgcccgggcaggtacttttttttttttttttttttttttttatgtatacatcactcaaattttattaaaggcagcacaatagcccgctcattttttgattcagaaataaacttgtaactaaaccatctctcttcaaatagtaccgcagactgtcttttaaagtagctcatctttatttgatgcaatctaaaaggcccaaactctgaaagaaaataagaaactattgttaactattattaacaaagtaatatatcaaataattcactcaaactcctacttaagaaacgtgtcatcaccaataagatagtaaaggctcttctaatattgctttgttgagacaattcatttcatcttatggcaggttgtaccagtttcacagacatgagacaagtgggaagaaggaaaagcagggccacagcaaaaattcccagtgaccaccatgatctgtctgaatcacagtagaggtgaaacatacaaaattgaatacaggacaatcacagcacttcaacgagttttaccctaacacgtatacattaaaatgttggtttttataatgaatcctaatactgnaagattagcaataaatttataaacaatggtcccagaaatc

SEQ ID NO: 8177 - DNA, 669 bp, Homo sapiens
  misc_feature 22, 549, 552: n = A,T,C or G
actcactatagggcgaattggnagctccaccgcggtggcggccgagtacgcgggggggcactttacttgttccaggaactggagcaggattaaactggtcgagcttcttggaagaaattttattttgtttatcatctttggcaccatggaagaaatgcagaacaaagctgtggttttctttgtgttttatttgtggagtgcaattgaaattttcaggtgggtagaaatgccaggatggtgtttgaatgctgctccctgtttgcagcagctctgttcttgagggagttgttatcttagccagagtctcatttggtttgggactaagattacatatgtggagaattctggttgcacctatgtgctctgcaaagttgagacagatttttttaaagccgtcattggatcataataccagactggatactagggagcagaagaggagaaccagagaaagggaagactcatcttaccatgacttcaggatcttgcagtcttggaaagagaggacccatccacatggaaaaattcttgaaagggctgaagaaacangangttgaaggagcaatccaggttggatagaactaatttaagactaaattctacaagggatgatagaaatgaatcttataccacaagattattgaagtttgaaatggcctctaacccaat

SEQ ID NO: 8178 - DNA, 481 bp, Homo sapiens
  misc_feature 2, 5, 8, 11, 14, 17, 24, 34, 38: n = A,T,C or G
gngangtnaanagnagnaagcccnaccccggatncctngtaaccggccgcccgtgtgctggaattcggcttagcgtggtcgcggccgaggtactgtctgtagtatcagctagagctgagggtagctgctctgtctggatagctaggcaggcacaaaatgggagaaggaaattattcagcagccttgaagcttcaaagactcagagaaaggaaactgaaactcagtgtgcccagcccacttgacagcatgccaacttctctcaacaaaggagcataagctgatccagcttttagacagtaaatttatattaaaaaaattgaaagaatcaaggaattgaagtcagagggaagaaaacataacagctcactgacttttaaaaaatctttttatttaaggaaaatgcaaccaatttctgtatatggacatacaaaaagtattgcacattctacctctagaatatgtatctcaaattcattttacc

SEQ ID NO: 8179 - DNA, 840 bp, Homo sapiens
  misc_feature 6, 594, 630, 665, 670, 687, 689, 692, 774, 778, 784, 792,796, 802, 805, 811: n = A,T,C or G
agcgcncgcgtatacgactactatagggcgaattggagctccaccgcggtggcggccgcccgggcaggtacaggaggagtggcattgtccagtatagccaggccagtctgcggtgggctcaggctgtttctgctggcttggtcctgctgtcctggaccctagcatgtgtgcagtccccgcgtacctcggccgctctagaactagtggatcccccgggctgcaggaattcgatatcaagcttatcgataccgtcgacctcgagggggggcccggtacccagcttttgttccctttagtgagggttaattgcgcgcttggcgtaatcatggtcatagctgtttcctgtgtgaaattgttatccgctcacaattccacacaacatacgagccgggagcataaagtgtaaagcctggggtgcctaatgagtgagctaactcacattaattgcgttgcgctcactgcccgctttccagtcgggaaacctgtcgtgccagctgcattaatgaatcggccaacgcgcggggagaggccggtttgcgtattgggcgctctttcgctttctcgctcactgactcgctggcgctcgggcgttcngctgcggcgagcggtattaacttacttaaaagcggnaatacggttattcacagaatcaggggataacgcangaaanaacatgtgaaccaaaangncancaaaaggccaggaaccctaaaaaaggccccgttgctggcgtttttcattaagctccgcccccctgacagcattacaaaaatngacncttaantaaaaggngggnaaaccnccnggactntaaaaaaaccaggcgtttcccctggaaat

SEQ ID NO: 8180 - DNA, 641 bp, Homo sapiens
gcgcgcattaaccctcactaaggggaacaaagctgggtaccgggccccccctcgggtcgacggtatcgataagcttgatatcgaattcctgcagcccgggggatccactagttctagagcggccgaggtacagcctccttcccatcttatcccagaaggcctctcccttcttgtccagcccttcatgctacacctggctggcctctcacccctatttctagagcctcagaggacccatccaccattcattcattcattcattcattcattcattcatcaacataaatcataacttgcatgcatgtgccaggcacaggggataccctctagagacaatctcctcctagggcccatggcctagtggaggagacagattaaaactttagaaaaactggctgggattacaggcatgagccactgcgtctggccttctataattttctggtagtcacgatggaaacaaacaaaacaccctagaaccagagatcgaccccctcaagcaatacatcaattcccttcacaagaaacgtcggggctacatgagtatctgtgttgaatgcggtctgaaatgatcctatggattttcccggctggttgccactactgtacctgcccgggcggccgccaccgcggtggagctc

SEQ ID NO: 8181 - DNA, 853 bp, Homo sapiens
  misc_feature 2, 4, 5, 7, 8, 9, 10, 41, 532, 538, 563, 587, 605, 622, 633,638, 672, 673, 681, 682, 683, 684, 685, 686, 687, 688, 690,691, 692, 693, 694, 695, 696, 697, 698, 699, 700, 701, 702,703, 704, 705, 706, 707, 708, 709, 710, 711, 712: n = A,T,C or G
  misc_feature 713, 714, 715, 716, 717, 718, 719, 720, 721, 722, 723, 724,725, 726, 727, 728, 729, 730, 731, 732, 733, 734, 735, 736,737, 738, 739, 740, 741, 742, 743, 744, 745, 746, 747, 748,749, 750, 751, 752, 753, 754, 755, 756, 757, 758, 759: n = A,T,C or G
  misc_feature 760, 761, 762, 763, 764, 765, 766, 767, 768, 769, 770, 771,772, 773, 774, 775, 776, 777, 778, 779, 780, 781, 782, 783,784, 785, 786, 787, 788, 789, 790, 791, 792, 793, 794, 795,796, 797, 798, 799, 800, 801, 802, 803, 804, 805, 806: n = A,T,C or G
  misc_feature 807, 808, 809, 810, 811, 812, 813, 814, 815, 816, 817, 818,819, 820, 821, 822, 823, 824, 825, 826, 827, 828, 829, 830,831, 832, 833, 834, 835, 836, 837, 838, 839, 840, 841, 842,843, 844, 845, 846, 847, 848, 849, 850, 851, 852: n = A,T,C or G
gncnntnnnngaccgcgcgttatacgactcactatagggcnagattggagctccccgcggtggcggcccgtagtcctcacaaacacagagggctccgcactccgcatgtaggtccacattttatcaaacactgcaattttagatctcctgaaaaactctttagtggagccagagtctaatgttccataagcaatttctgtttgcttagaaagatcctcagcactttcgatgggagacaccatcctctctacagtcaggaaggcagctaagttagccgtgtaggaggagattatgatcagggtaaagaaccaccacacacctccaacaatgcgcccagagagggatctaataacaagtatgaaatggatttgtaaagtgaaatgaatgacctaataaaaaaacaagttagcagtattatgcaaatattgacttataggggaatatttaattttatatttttcaatgtatctactagttaatgaaactggaaatcattaaacattttgggcaaggagtacctcggccgctctanaactantggatcccccggctgcaggaattcnatatcaagcttatcgatcccgtcnacctcgagggggggcccngtccccaacttttgttncctttaatgangggtnattgcgcgcttggcgtaatcatgggcaatagctnntttttcgnnnnnnnnannnnnnnnnnnnnnnnnnnnnnnnnnnnnnnnnnnnnnnnnnnnnnnnnnnnnnnnnnnnnnnnnnnnnnnnnnnnnnnnnnnnnnnnnnnnnnnnnnnnnnnnnnnnnnnnnnnnnnnnnnnnnnnnnnnnnnnnnnnnnnnnnnnnnnnnnnnnnnnnnnnc

SEQ ID NO: 8182 - DNA, 669 bp, Homo sapiens
  misc_feature 43, 511, 543, 546, 612, 617, 619, 626, 641, 647, 662: n = A,T,C or G
cctcactaagggaacaaaagctgggtaccgggccccccctcgnggtcgacggtatcgataagcttgatatcgaattcctgcagcccgggggatccactagttctagagcggccgcccgggcaggtacttttttttttttttttttttggtagagacagggtttcaccatgttggccaggatggccttgatctcccagcctcatgatctgcccaccttggcttcccaaattgctaggattacaggcgtgaaccaccgcgcctggcctatttttaattactttctgccattacttttagtggcaaaaattgtgattatttttgcatcaacccaataaatttcaaaatgacaaaactgcagatccagcaccacccacactgccttattatatttctacaaaagagtgttttttcctggattagacaatgcccagtaatcaccaagacaactacatttgggtctggcttcagagacgacgactgtggagcatttgagacgtctgacaaacttgangccattgctgcgccatgttttcccaaatgatnaangcagcacaagtgtccaagccgtgatgcgtgaatgaaagtcaggatagacatggagtggaagaacanggaangncacaganaaaagtgggtagctntgatanaaggctgtcccaaanccgctga

SEQ ID NO: 8183 - DNA, 662 bp, Homo sapiens
  misc_feature 20, 23, 31, 562, 587, 626, 629, 640, 649: n = A,T,C or G
gcgcattaaccctcactaanggnaacaaagnctgggtaccgggccccccctcgggtcgacggtatcgataagcttgatatcgaattcctgcagcccgggggatccactagttctagagcggccgaggtacttctggtatttctgctaaaaggcttcgctccccaaagtgaagacctgaggtgtgaatgtcaggaacaaaatgatagcagcattctggtttctcattgcaggctttcgttccattctccctgcctgagctgtttcaaactgttccagaatgttccaaacagcctcttctctctcttgctgttttgccttcctcctttccttcactaccctcttcttcaagcaagaaacaaaattcagtagaaagcagcagaagctctagggagacagaaaagtgaaaggggagaagagtacctgcccgggcggccgccaccgcggtggagctccaattcgccctatagtgagtcgtattacgcgcgctcactggccgtcgttttacaacgtcgtgactgggaaaaccctggcgttacccaacttaatcgccttgcagcacatncccctttcgccagctggcgtaatancgaaaaggcccgcaccgatcgccctttccaacagttgcncancctgaatggcnaatgggacncgcccttgtaccg

SEQ ID NO: 8184 - DNA, 659 bp, Homo sapiens
  misc_feature 53, 508, 562, 571, 605, 608, 611, 615, 617, 620, 642, 648: n = A,T,C or G
ctatagggcgaattggagctccaccgcggtggcggccgagtactgaccctagnacataggcatggcctttgacttggtttgtggcactatactgcgttctgccaggggttttgtcttagtctcaaccatgactctagtcttagttgtatcttccaccttgatcacttcccttgtcacagccatagcctccctgtaggtcactgtatgtgtcctggtcattgctccatcaccagctttggcctgggtcactgattctgttttcagttctgcctcagccactgcctcggcctgggttttaccattcactctagcagtggcaggaccactgattccatcttgcaggccagcctcagcctttcctctagcccttgcttctgtcccagagtcaaccatgttccaagtttaacgtaaggacaagttatatacccccacccgtctcagccttgactgaagttttgtcccggttggtgttttcacacaaagtccagtagtcactctgtcccctttncaactacaggctctgccagtgatatagaaaacatgcagaggaagctcactcaangtagggaangatggctgtgcatgggcccagccctgtggagggnggnggncttnanccnctccaaggccccagatctgccnctgaantaggaccttgc

SEQ ID NO: 8185 - DNA, 439 bp, Homo sapiens
  misc_feature 6, 7, 8, 43, 52, 69, 74, 88, 392: n = A,T,C or G
gatccnnncttagggcgaattgggccctctagatgcatgctcnagcgggccnccagtgtgatggatatntgcanaattcgccctttcnagcggccgcccgggcaggtacagacaggcttctctgctatcctccaggcagtgtaatagtcaaggaaaagggcaacagtattggatcattccttagacactaatcagctggggaaagagttcattggcaaaagtgtcctcccaagaatggtttacaccaagcagagaggacatgtcactgaatggggaaagggaacccccgtatccacagtcactgtaagcatccagtaggcaggaagatggctttgggcagtggctggatgaaagcagatttgagatacccagctccgggaacgaggtcattnttctacaggttcttccttcactggagacaatggaattcaggggtgga

SEQ ID NO: 8186 - DNA, 645 bp, Homo sapiens
  misc_feature 21, 645: n = A,T,C or G
gcattaaccctcactaagggnaacaaagctgggtaccgggccccccctcgggtcgacggtatcgataagcttgatatcgaattcctgcagcccgggggatccactagttctagagcggccgaggtaccacaagagagaaatgaacaaaattctgtgccaggggttgaaaacagagcaaatcaggctgcatttggccagcaaatgttttatttggcccacacggtgttttgtttttttttcagagtggatgctaacatttaaaaattaggccatttcacataaaaacccagattcctagcttctggtaaaaacaggaagagctgagcacactaggccaaattcctgcatggtggtaattggcaggagctgagcagcagctgccccttttaggcggagcatgagctctgcagtttgccacactctattactctgacattgaagccaaatgttcagttgccagctatcatcagcttgtgctataggtacctgcccgggcggccgccaccgcggtggagctccaattcgccctatagtgagtcgtattacgcgcgctcactggccgtcgttttacaacgtcgtgactgggaaaaccctggcgttacccaacttaatcgccttgcagcacatccccctttcgcagctggn

SEQ ID NO: 8187 - DNA, 882 bp, Homo sapiens
  misc_feature 10, 18, 24, 28, 40, 41, 267, 268, 269, 270, 271, 272, 275,276, 278, 281, 289, 290, 293, 294, 295, 307, 310, 312, 317,321, 322, 325, 326, 327, 330, 334, 335, 338, 342, 347, 349,358, 361, 362, 364, 371, 377, 382, 391, 394, 402, 409: n = A,T,C or G
  misc_feature 411, 419, 439, 444, 450, 452, 453, 454, 455, 456, 457, 458,459, 460, 461, 462, 463, 464, 465, 466, 467, 468, 469, 470,471, 472, 473, 474, 475, 476, 477, 478, 479, 480, 481, 482,483, 484, 485, 486, 487, 488, 489, 490, 491, 492, 493: n = A,T,C or G
  misc_feature 494, 495, 496, 497, 498, 499, 500, 501, 502, 503, 504, 505,506, 507, 508, 509, 510, 511, 512, 513, 514, 515, 516, 517,518, 519, 520, 521, 522, 523, 524, 525, 526, 527, 528, 529,530, 531, 532, 533, 534, 535, 536, 537, 538, 539, 540: n = A,T,C or G
  misc_feature 541, 542, 543, 544, 545, 546, 547, 548, 549, 550, 551, 552,553, 554, 555, 556, 557, 558, 559, 560, 561, 562, 563, 564,565, 566, 567, 568, 569, 570, 571, 572, 573, 574, 575, 576,577, 578, 579, 580, 581, 582, 583, 584, 585, 586, 587: n = A,T,C or G
  misc_feature 588, 589, 590, 591, 592, 593, 594, 595, 596, 597, 598, 599,600, 601, 602, 603, 604, 605, 606, 607, 608, 609, 610, 611,612, 613, 614, 615, 616, 617, 618, 619, 620, 621, 622, 623,624, 625, 626, 627, 628, 629, 630, 631, 632, 633, 634: n = A,T,C or G
  misc_feature 635, 636, 637, 638, 639, 640, 641, 642, 643, 644, 645, 646,647, 648, 649, 650, 651, 652, 653, 654, 655, 656, 657, 658,659, 660, 661, 662, 663, 664, 665, 666, 667, 668, 669, 670,671, 672, 673, 674, 675, 676, 677, 678, 679, 680-842, 844-881: n = A,T,C or G
agcgcgtatngacgcgcnttatangacntactatagggcnnattggagctccaccgcggtggcggccgggggatgcgaggctcggagcacccttgcccggctgtgattgctgccaggcactgttcatctcagcttttctgtccctttgctcccggcaagcgcttctgctgaaagttcatatctggagcctgatgtcttaacgaataaaggtcccatgctccacccgaggacagttcttcgtgcctgaaaaaaaaaaaaaaaaaaaannnnnntcnntnccngggggggnnttnnntttaaaaaaaanggnanccccngggnnggnnnaantttnnttnaacnttttnanacccccccnccnngnggggggncccggnccccnatttttttnccntttaaagngggtaantnggcccctngggaaaaaaaggggaaaaanttttnccgggnannnnnnnnnnnnnnnnnnnnnnnnnnnnnnnnnnnnnnnnnnnnnnnnnnnnnnnnnnnnnnnnnnnnnnnnnnnnnnnnnnnnnnnnnnnnnnnnnnnnnnnnnnnnnnnnnnnnnnnnnnnnnnnnnnnnnnnnnnnnnnnnnnnnnnnnnnnnnnnnnnnnnnnnnnnnnnnnnnnnnnnnnnnnnnnnnnnnnnnnnnnnnnnnnnnnnnnnnnnnnnnnnnnnnnnnnnnnnnnnnnnnnnnnnnnnnnnnnnnnnnnnnnnnnnnnnnnnnnnnnnnnnnnnnnnnnnnnnnnnnnnnnnnnnnnnnnnnnnnnnnnnnnnnnnnnnnnnnnnnnnnnnnnnnnnnnnnnnnnnnnnnnnnnnnnnnnnnnnnnnnnnnnnnnnnannnnnnnnnnnnnnnnnnnnnnnnnnnnnnnnnnnnnnc

SEQ ID NO: 8188 - DNA, 462 bp, Homo sapiens
  misc_feature 2, 3, 4, 35, 37, 41: n = A,T,C or G
gnnnatatccctaacactactatatggcgaattgnanctcnccgcggtggcggccgaggtacgcgggacctcagagctgagctgggcatgagtagatgctcagtaagtggtgcacagggttggtccctatggtggaggccccctaacaccgcccaacccccctccatgttctcacagctccacgcactgagcacgggcatgaaggccatgatgtcagaattctgcacccagggagctgagatgtgccgcagggcctgtggcggacatggctactcaaagctgagtggcctgccatcactggtcaccaaattgtcggcctcctgtacctgcccgggcggccgctctagaactagtggatcccccgggctgcaggaattcgatatcaagcttatcgatacccgtcgacctcgaggggggggcccggtacccagcttttgttccctttagtggagggttaattgc

SEQ ID NO: 8189 - DNA, 625 bp, Homo sapiens
  misc_feature 12, 23, 24, 25, 26, 32, 35, 37, 58: n = A,T,C or G
tgggtaccgggnccccccctcgnnnntacttnctngnattaattaacgcgggtcgggnacatagtaaggaagcccatgtctagtctggtacctttaaaccaggccatctccaacttttcaaaatgactcaaaagttgagctagccttattttaaaaactaaaagttcaaaatcagtggtgacatgaggacttatttatttaaagtgcttaagccttggttttagagtttctaagagacctagtggaatttgctattatgaaaagcatgaaaagattaagaaacctggctaaaggtcaggtgcccagcttcgaggaaaagttgggcttttagggaccgggaagcattaaaggcacagaaactttacattttgggggtcattttgttgagtaggtgaagtgagggatttgggcttgatatttggctgccccatctctatgtgggaactcaaagttaaaaacccactgtaggtaaattagaagggcagctcttgaatctgggccagtctatatcccttctgtgaagtgctaacagccaggctatctgtagcctgggtgggagcccagataatgtgagctggtaaagggtattggaaaagtgccaagaaatgccaagcttttggttcgt

SEQ ID NO: 8190 - DNA, 672 bp, Homo sapiens
  misc_feature 3, 13, 18, 20, 25, 36, 94, 444, 496, 517, 521, 546, 551,563, 569, 574, 576, 578, 586, 587, 591, 596, 598, 599, 603,605, 612, 613, 614, 616, 620, 623, 626, 628, 633, 651, 653,658, 659, 660, 662, 664, 670, 671: n = A,T,C or G
gtnatacgcactncactntnagggncgaattggganctccaccgcggtggcggccgaggtacttttttttttttttttttttttggtctctgancatttgcaatttgaactgtggttccctggccacagttgtcttcaggagttgaaatggccagaaagggaaatatctacatggtttatccttgagatggcaaagacatctgcaccaatgcacaacccaccgggagcatgcattgctagcaggtgaaattcacatggaaaagtaggattgtgggttagggtaagagatacagcaatggttacaagtgcagaatttggaggcaagtagtccttgattagaatcccaatactagcatttgctagctgcataatcttgggcatgtcactcagcttctctctgagccaccctctctttacctttaaatggagttgatggtacctgcnccgggcggccgcctctagaactagtggatcccccgggcctgcaggaattccntatcaaacttatcgataccgncganctcgagggggggcccggtaccccanttttngttcccttttangagagntaaantncnccctagcnnaatnatggncnntagntntttccgnnngnaaantgntantnccctncaattccccacataatcnancccgnnngntnaaatgnna

SEQ ID NO: 8191 - DNA, 508 bp, Homo sapiens
  misc_feature 494: n = A,T,C or G
actactatagggcgaattggagctccaccgcggtggcggccggtatgacctcagcattcctaaagtgctgggataaagtgtctcacaagggcaagtggaccctagagagacagccatccctgacctctgggctccacatcacctgacttgctgctccaccactttgcttgtttcctgggtgctccatcccagagacaagtgagttagcaatcacttagtgtaatcagcccaggatggagggtctgtgctgtgggcccaagccagggttccctgtctggtgatgagtagtggagggtgtgtggtacctcggccgctctagaactagtggatcccccgggctgcaggaattcgatatcaagcttatcgataccgtcgacctcgagggggggcccggtacccagcttttgttccctttagtgagggttaattgcgcgcttggcgtaatcatggtcataactgtttcctgtgtgaaatttgttatccgctcacaattncacacaacatacga

SEQ ID NO: 8192 - DNA, 597 bp, Homo sapiens
  misc_feature 571, 597: n = A,T,C or G
gggaaaacccaaaaacaacaacaaaaaaactctcttacagaattttccttaacattaaaaaaaacttgtcgtatttttcaaaggcacatttgatactcagaattgctaaaagtatatttaaagacatctagccttccatatgtaaaaaatattttagataaagacagttacaggactcagaataatatattgggtgattcactgtatcctccacttttacatttaaagaaattcaaaatacgtgattaaatttttttttttttaatggatgggttggttctcgcttaaccacttgggtgctagtggtcttgaactgtgatacagtgtagacagtatttgtaaccttgcacagcctctgggggtaactgtcaaactgtcagatttaacttagactaatagaatatattgctgtacagtgtgtgtatatgtttatatatgagggcggaaggggagaggttttgattagactaatgctttgctgctaatcaaacttatagtatttttagagcattttgaagagtttatagaatctatgaaaaagatgcaatattcctcatcctaaatccctccntattacattacctaaattggttatgn

SEQ ID NO: 8193 - DNA, 824 bp, Homo sapiens
  misc_feature 2, 625, 644, 656, 673, 682, 710, 724, 733, 748, 763, 767,779, 781, 784, 819, 823, 824: n = A,T,C or G
gncgtttgcctccgggtgtcgccccgcgtccgcaatttcttttgaatttcgatcacttctacattcccagcttgccacactcttttttgatgaagttgtgaagcagatggtagctgcctttgaaagaagagcatgtaagctgtatggtccagaaacaaatatacctcgggagttaatgcttcatgaagtccatcacacataaaggcaaaaaagaactggtgccacctgcttctgactttagtttgttcacttttaggaagtattttcatgacatgttttcagaagccagaaagcatttgttaaacgcagctttggttataaacctgcaccattgaaaatttgcacatagaatatagactcacttgtacatagaattatttcttcaagtataattcaaaataatatggacattatcatgttctgcattacaataatgggatgtcatcaccattgctagaatactggcatgattcttctgagcagaagttgaaactgtaaatttaaaccttttaattatcaccttacctgaaagaggttagttaagatattcacacagtatgtattatattaaccatatcacacttaagttattaaattcaagactatttgtaacttattggtatanggcctgccgtatggcttangatatttgagtnatcatatatttaaaggnaaaactttnggctgggcacagggctcaccctgtaatnccagcacttggggnagctgaggnggcaaaacaagtganggcaggagtctagancagnctggcacatggngnaancccattttcttaaaatccaaaatttcttggcgggnggcnn

SEQ ID NO: 8194 - DNA, 664 bp, Homo sapiens
  misc_feature 661: n = A,T,C or G
tatagggcgaattggagctccaccgcggtggcggccgaggtacgcggggtccttccaccatgtgaggacacagcaagaaggggctgactctgaaccaggaagctgtgctgtgctcaccagacactttgatcttggacttctcagcctctagaactatggggttctgctcttgtcacccagactggagtgaagtggcacaatctcggctcactgcaacctccgcctcccgggttcaagcgattcccctgcctcagcctccagagtagctggactgcaggcgcacgccaccactcctggctaatttttgtatttttagtagagacggggtttcaccatgttggccaagatgttcttgatcttctcaccttgtgatccgcccacctcaacctcccaaagtgctgagagactaagacacctttctagacagagaggaggccgatggcagacattctcagataggtttgtagctattgacctggctgcatcaaaggagatgaaatcccttagaaattgacagcttctatgaaatttacaatcaagaaggcataagaacaactgctgcagcttcagaactatgcagaaaataaaatgtcaacagctgggagaaaaaattctaagtgagcaacagagccagtgaaaaatatcaccagtagagcaggcncct

SEQ ID NO: 8195 - DNA, 887 bp, Homo sapiens
  misc_feature 4, 5, 7, 8, 9, 13, 24, 28, 31, 35, 444, 445, 446, 447, 448,449, 450, 451, 452, 453, 454, 455, 456, 457, 458, 459, 460,461, 462, 463, 464, 465, 466, 467, 468, 469, 470, 471, 472,473, 474, 475, 476, 477, 478, 479, 480, 481, 482, 483: n = A,T,C or G
  misc_feature 484, 485, 486, 487, 488, 489, 490, 491, 492, 493, 494, 495,496, 497, 498, 499, 500, 501, 502, 503, 504, 505, 506, 507,508, 509, 510, 511, 512, 513, 514, 515, 516, 517, 518, 519,520, 521, 522, 523, 524, 525, 526, 527, 528, 529, 530: n = A,T,C or G
  misc_feature 531, 532, 533, 534, 535, 536, 537, 538, 539, 540, 541, 542,543, 544, 545, 546, 547, 548, 549, 550, 551, 552, 553, 554,555, 556, 557, 558, 559, 560, 561, 562, 563, 564, 565, 566,567, 568, 569, 570, 571, 572, 573, 574, 575, 576, 577: n = A,T,C or G
  misc_feature 578, 579, 580, 581, 582, 583, 584, 585, 586, 587, 588, 589,590, 591, 592, 593, 594, 595, 596, 597, 598, 599, 600, 601,602, 603, 604, 605, 606, 607, 608, 609, 610, 611, 612, 613,614, 615, 616, 617, 618, 619, 620, 621, 622, 623, 624: n = A,T,C or G
  misc_feature 625, 626, 627, 628, 629, 630, 631, 632, 633, 634, 635, 636,637, 638, 639, 640, 641, 642, 643, 644, 645, 646, 647, 648,649, 650, 651, 652, 653, 654, 655, 656, 657, 658, 659, 660,661, 662, 663, 664, 665, 666, 667, 668, 669, 670, 671: n = A,T,C or G
  misc_feature 672, 673, 674, 675, 676, 677, 678, 679, 680, 681, 682, 683,684, 685, 686, 687, 688, 689, 690, 691, 692, 693, 694, 695,696, 697, 698, 699, 700, 701, 702, 703, 704, 705, 706, 707,708, 709, 710, 711, 712, 713, 714, 715, 716, 717, 718-887: n = A,T,C or G
atgnncnnnggangcgcgttattngacntantatngggctgattggagctccccgcggtggcggcccgaggtacaactgaagcaaagaggaaagcagacccatggctcaggacacatgggagtcccaccagcttgaaaaaaatttcacagagctggcatttccatcagtgcagacacggctctgaaaacagtaattgctgccttatgggcatgatacgcccatttctactctgacctcctcccaggagaaactcttctgcaaatgaccacagtacctgcccgggcggccgctctagaactagtggatcccccgggctgcaggaattcgatatcaagcttatcgataccgtcgacctcgagggggggcccggtacccagcttttgttccctttagtgagggttaattgcgcgcttggcgtaatcatggtcatagctgtttctgannnnnnnnnnnnnnnnnnnnnnnnnnnnnnnnnnnnnnnnnnnnnnnnnnnnnnnnnnnnnnnnnnnnnnnnnnnnnnnnnnnnnnnnnnnnnnnnnnnnnnnnnnnnnnnnnnnnnnnnnnnnnnnnnnnnnnnnnnnnnnnnnnnnnnnnnnnnnnnnnnnnnnnnnnnnnnnnnnnnnnnnnnnnnnnnnnnnnnnnnnnnnnnnnnnnnnnnnnnnnnnnnnnnnnnnnnnnnnnnnnnnnnnnnnnnnnnnnnnnnnnnnnnnnnnnnnnnnnnnnnnnnnnnnnnnnnnnnnnnnnnnnnnnnnnnnnnnnnnnnnnnnnnnnnnnnnnnnnnnnnnnnnnnnnnnnnnnnnnnnnnnnnnnnnnnnnnnnnnnnnnnnnnnnnnnnnnnnnnnnnnnnnnnnnnnnnnnnnnnnnnnnnnnnnnnnnnnnnnnnnng

SEQ ID NO: 8196 - DNA, 672 bp, Homo sapiens
  misc_feature 19, 22, 659, 672: n = A,T,C or G
gcaattaaccctcactaanggnaacaaagctgggtaccgggccccccctcgggtcgacggtatcgataagcttgatatcgaattcctgcagcccgggggatccactagttctagagcggccgaggtacactgatttccgatcaaaagaatcatcatctttaccttgacttttcagggaattactgaactttcttctcagaagatagggcacagccattgccttggcctcacttgaagggtctgcatttgggtcctctggtctcttgccaagtttcccagccactcgagggagaaatatcgggaggtttgacttcctccggggctttcccgagggcttcaccgtgagccctgcggccctcagggctgcaatcctggattcaatgtctgaaacctgcgagaggacagcagacagaaggcccgtcagacagacgctcgagatcccgcctcaaagtcatggacagaaagagcagctgcccccagctcagtcctggagccaattttacttgtgttttcccttaagattggcatcacagccccatgcccatgttggtggtccccttggcatttatcttctgtggttgttgagaaggggggggtgttccttatgggtcaccccaggcaggaggaacgcaggacgggtgcccccgcgttcctgcccnggcgggcggcacn

SEQ ID NO: 8197 - DNA, 673 bp, Homo sapiens
  misc_feature 642, 648, 650, 653: n = A,T,C or G
gcaattaaccctcactaagggaacaaagctgggtaccgggccccccctcgggtcgacggtatcgataagcttgatatcgaattcctgcagcccgggggatccactagttctagagcggccgcccgggcaggtacctggggggccttacagacctgggaaaagattgccccttcctgggcagtcttagtgaggggttccactgagaatatgtctttcatatacataccaatgaatcccaagtataaagccacaatcagctccttttctcactctcacacactaagccagtatttccctgttttaaatcatctcagagctgggaccagacaactagatacctgtgccccagggcccactggaattattcaaactagccaataataagctgttaactgtgacctgccttgcatttcctgcagaaaccccaataaaggatttctaagcttttccctggttttggtctctcctacccaaccaaaacctagtacctcggccgccaccgcggtggagctccaattcgccctatagtgagtcgtattacgcgcgctcactggccgtcgttttacaacgtcgtgactgggaaaaccctggcgttacccaacttaatcgccttgcagcacatccccctttcgccagctggcntaatancnaanaagcccccaccgatcgccct

SEQ ID NO: 8198 - DNA, 467 bp, Homo sapiens
  misc_feature 2, 3, 4, 5, 6, 7, 8, 9, 11, 12, 25, 39, 40, 139, 395, 451: n = A,T,C or G
gnnnnnnnngnnggcgcgctaatcncttactatagggcnnattggagctccccgcggtggcggccgaggtactttgttacagcagcctgaaaggactaagacaccgacctagtctccctgatgaaaaagtttctctcanacttctaccctttccaatgtggccaaagcttttcattccgaagaagtttcctttctgagaacactcattgtgtcgtttggctttccccgtctctgcttgacacatgaaccaaaacagaggcagccaaagcagggaaaaaaaaatcctaggatcagagtccactctatgcccttttgagcttcaaaaggagaaagagacaaaagccaaaagcaatggaggtcaagctgcccggtacctgcccgggcggccgctctanaactagtggatcccccgggctgcaggaattcgatatcaagcttatcgataccgtcnacctcgagggggggcc

SEQ ID NO: 8199 - DNA, 639 bp, Homo sapiens
  misc_feature 3, 8, 11, 13, 18, 37, 83, 544, 545, 546, 547, 548, 549, 550,551, 552, 553, 554, 555, 556, 557, 558, 559, 560, 561, 562,585, 592: n = A,T,C or G
gtntgctnccngncttgnctgcctgcggccgggagancacgcatccccaccaggaggaaagcaatctgtgcaacacatccgancatcagcaaggaacaaactctagacatgccgcctttaagtaactgcaacactcactgcgagtgtccgcggcttcattcttgaagtcagtgagacgaagaacccaccaattccaggacacattttggcgacctaggatgggacaatcgcctatcaccgagtggtgagaccatcgcctatagctgagcggcgagacaatcacctatcgccaagcaaatgagcaaacagttgtcttcaccatcccagacaagcagatgaatggtgaaacgatacagcagagaaagagagaagaggaacatttgaacgccgagaggagttcagccgagggtggtcggagaggtttggccacccagcaggaagattatcttcccgtgccatccccgcttccagctctgcatccatccttcagagaaccacctccaccactcaataaaaccctgcattcaaccctaaaaaaaaaaannnnnnnnnnnnnnnnnnnggtacctcggccgccaccgcggnggagctncaattcgccctatagtgagtcgtattacgcgcgctcactggccgtcg

SEQ ID NO: 8200 - DNA, 405 bp, Homo sapiens
  misc_feature 405: n = A,T,C or G
cgcgtaatacgactcactatagggcgaattggagctccaccgcggtggcggccgcccgggcaggtaccaagaaaactccatccacaagtccttgctgaataatcaatcgctgagcctcatctctagaaattttgtggtgaaaccatggctgggaccggtggatagccatgtttgtggcagagctctgtgaagaggcagtggggctaccgtgagtgcccaggcgtaaacatccttttttcctccaagcgagtccttcttcaaccgcaactgaaagggcttcagtgggattttctataactctgcttttctggcctgagaagtccattgctaccagggaattctctgatatacttctcataggtgatatgctctgtgaactgcagccacttctaccttgatatggan

SEQ ID NO: 8201 - DNA, 645 bp, Homo sapiens
  misc_feature 17, 478, 531, 536, 552, 574, 575, 576, 577, 578, 594, 596,597, 629, 635, 638: n = A,T,C or G
ctatagggcgaattggnagctccaccgcggtggcggccgagtacgcgggggaacttgtgtgcttagacctgacgctgggaggagatgctgccacctaggttacttgtaggaccctatacggcaacctcctttgccaggaactatttataaacatcctgcaggaaaatgagtctatatgtcagaatacacatttcccaccttgcccaacagtagaaaaacataagaagagaaaaacattaaaaaatgacaaggaagttaatggaagcaatgtgatggtgtttggaggtggagccttcagaaggtaattaatgcccttgtaagaagaggccagagagcttgcgcaccttcttcctgccatgtgaggagccaagaagccggctgtctgcaacctgcaagaggaccctcactagaagctagccatactggcatcctcatcttggctttccaacttccagaactgtgagaagtatatgtttgnggtttagtcaatggtctatgggaattttttatagcagtcccagccaagacagngcctnatttactacataccanttttattattattgggctcctnnnnnaacccatgttcaaatnannaataagatactggaacacttacaccttcgctngggtgngtntacaaat

SEQ ID NO: 8202 - DNA, 451 bp, Homo sapiens
  misc_feature 2, 3, 4, 7, 15, 23, 418, 451: n = A,T,C or G
gnnnagnttgaaacnctacttanggcgaattgggccctctagatgcatgctcgagcggccgccagtgtgatggatatctgcagaattcggcttagcgtggtcgcggccgaggtaccagaccttccctgtgttcagcacctccatgacagtatttctgttttctgagcccttgctctaaacagagtattttgaccactgaaaacatcccagaaccctgctgcagaaggccagtgagggtggtcccactgcacagtgatcccctctgtgcatctgctcagccgaggctgccagcgatctgaataaacctccctactagcggtcaggtcttgaattgaagcgtgtgagtcgcagcatcactgggtctgatggaagacagaccttttgtacctgcccgggccggccgctcgagccctatagntgagtccgtatttagaaagcccgaattccagcn

SEQ ID NO: 8203 - DNA, 469 bp, Homo sapiens
  misc_feature 2, 3, 4, 5, 6, 7, 8, 11, 12, 25, 28, 38: n = A,T,C or G
gnnnnnnnggnngacgcgctaaacnctnctatagggcnaattggagctccccgcggtggcggccgaggtacgcggggaacagaaagcagcccaacttgctactgaaattgcagatataaagtcaaagtatgatgaagaaaggagtcttcgagaagctgctgaacaaaaagtgacacgtctgacagaagaattaaacaaagaggcaactgtaattcaagatctgaagacggaactgcttcagagacctggtatagaagatgttgccgtgctaaagaaagaactggtccaagttcaaacactaatggataacatgaccttggaacgtgagcgagaatctgaaaaactcaaagatgaatgcaaaaaattgcagtcacaatatgctagctcagaggccacaataagccagctaaggagtgaacttgccaaaggcccccagggaagttgctgtatattgtacctgcccgggcgg

SEQ ID NO: 8204 - DNA, 669 bp, Homo sapiens
  misc_feature 3, 9, 33, 174, 251, 320, 414, 503, 553, 592, 604: n = A,T,C or G
gtnatacgnactcactataggggcgaattgggnctccaccgcggtggcggccgagtactttttttttttttttttttttttttgaggagtactttcacatgctataccacatttaattaattctaacaacagcactggaaaataagtataattatgctctttagttccttctanacagaaagctttcatggggatgaaagactgttccttagctcagagtagggaatcaaagtaggcggggcttagttcanagtgggcggggcttagctcaaaattggccatcaatttgtagaattgaagtgtgaactctgaggatgaanaaacagggctgcaggggtgtgtaacttgcaccaagtcaccctactttacattgcgccacaccgcccagctaagtcttcgaaatgttcataaggngcttgagcactgattcctttgcctgttcaatgtttgaattccactgtcactggcttttcttttttcctcgtaatgaagcaaaacctggngggttaattaatccttcttgatgctgggcagcagtaataggatcaagaanaaagcctttctcctcctgtgctcccaaggatgcccagcnggagactgtgangagatggaacacacccttcactctgttaattgttcaagagcaaatcacctgccgggaggaccatg

SEQ ID NO: 8205 - DNA, 403 bp, Homo sapiens
  misc_feature 2, 7, 12, 131, 134, 191, 196, 250, 335, 373: n = A,T,C or G
tnctctngggcnaattggagctccaccgcggtggcggccgcccgggcaggtacagaagggcggtcctgctgacttggctgggctagaggatgaggatgtcatcattgaagtgaatggggtgaatgtgctanatnaaccctatgagaaggtggtggatagaatccagagcagtgggaagaatgtcacacttntagtnttgtggaaagaaggcctatgattatttccaagctaagaaaatccctattgtttnctccctggctgatccacttgacacccctccagattctaaagaaggaatagtggtggagtcaaaccatgactcgcacatggcaaangaacgggcccacagtacctcggccgctctagaactagnggatcccccgggctgcaggaattcgatatc

SEQ ID NO: 8206 - DNA, 683 bp, Homo sapiens
  misc_feature 1, 45, 463, 562, 574, 583, 596, 614, 634, 647, 650, 652,654, 662, 665, 671, 675, 682: n = A,T,C or G
nactcactatagggcgaattggagctccaccgcggtggcggccgngtacgcggggggctttttctctgaagcaaacgtgtgtcttttacaccagggctttctccccaccccagggggtgtcttccatccttttgtggctcagttgaaggcgaaaagggctccaaaccactaactaaccagaggagagccccttcttccacctccagggagaatttcagatttaatttgtccgaagatagcgtgctctcttcttactcatttgccatcattacgaggaaaacaaaccaccaccttggcttcaagatcctgggtagaggctcacggtcttttcaaccatctttggcgaggccttgcttccttccactcgagcctgttgactggggctgcttttaaccctttcctatttgctgagaatgcagccgtgtgacagtaactgaacattggtctaaagtctttccaaaangtcaaggttcacaagaacatctgctcaaattaatgaccatgggggatatgaagaccccagactttgatgacctcctggcagcatttgacattccagatntggtcgatcctnaagcagctnttgagtctggacncgatgaccatgaaagccncatgaagcagaatgctcacngggaggatgactnccncncnccatcatnttntgatgngggngtcagcng

SEQ ID NO: 8207 - DNA, 650 bp, Homo sapiens
  misc_feature 53, 530, 623: n = A,T,C or G
tcactatagggcgaattggagctccaccgcggtggcggccgaggtaccaaagnaattaggcacagaaaactgttttaattagggtaacagaaagcagctgcaatacagagtgatgaatgtgagctttgaaagtaaatttggtgggtttcaggatttctgaggagggaagtcaaacagttctaaagagttggcaaggccaattgagagggtggtaagctatcctaagccctttcttctacattaactctgctttccagttagtcttcaggtgctttagaatttgagatccttttttctcattgtgtggtccatggactagaagtattagcactacctggaaacttgttcaaaatgcagaattctgggccccaaaacagacctactaaataaaagtctccattttaaagagattgctaaatgattcataacttgttaaagtttgagaggcattaccttagattctgtcttcttcttacctttcaaacccagctgaaagtgggtttgtatttccctttactttcgacctttanggaagtacctgcccgggcggccgctctagaactagtggatcccccgggctgcaggaattcgatatcaagcttatcgataccgtcgacctcganggggggcccggtacccagcttttgttc

SEQ ID NO: 8208 - DNA, 675 bp, Homo sapiens
  misc_feature 675: n = A,T,C or G
gcgaattggagctccaccgcggtggcggccgcccgggcaggtacgcgggctttgaccaaagagtgctctgacacactgcattccctttcccctaggggtagcccatgttgagggcaagacctccagaaatcctgcagcacctccgggtcttgacagttcccctgtagttgccacggtctcagtgggttctaccgggttgtttgcaggaaatcaactcacgtggagacattaagggctgagattctctgggcagaatggcagcacacagccaataaagtgcccacctcctcagcttgggtttgacgtgagggtgaatgaaactttgcgaactggcctcctgatgctctgctcccaaggactcctcaaatggccaccagcagcagttcctgggcttgggggtgcagaggagctcaccaccattttggcagtcagcaatctggggcaggtggaaggggagcaaagaaacacccaacctactcttttcatgggattacaagttcctcagggggcattagcttccaaactcttgctgccttctttttctgcgccccagattcatcccatgggttctctgacaggttcggaaactcttccttcagtattctactctggccatgatcatttacctgtaactttggtttttatttctgagaagaaccagtaactagtgtcttn

SEQ ID NO: 8209 - DNA, 623 bp, Homo sapiens
  misc_feature 529, 554, 607: n = A,T,C or G
ccctcactaagggaacaaaagctgggtaccgggccccccctcgggtcgacggtatcgataagcttgatatcgaattcctgcagcccgggggatccactagttctagagcggccgaggtacgcgggggactcagtctcaggcaggtgacaggagtggagcaatgaacgccaagacacagctcctgctctcctggcgcttacactctggtgtgcaggctgcagggatgcagatacggtgacaaaacagtctggtccccaaacttctccttatccctgagaccgccccagccatcctctgctctgtgcccacccacatgactcagaactttgatccctacctccatgtcctgaacaggcagtttcctccacttcagaagtcccctccgccctggaaagctcctactttaccccgtgttccagctcacgaagctttctctggctctccagccaaagttcattgctgccctctccacgcactcctgctctacacagctccgctgcacgcataagtccaagctagtgtgtgtctncctttatccagacaagactcctcanggcgctgaccaggtcttagttatcctagcgtctccaagctgggccctgcttgngcgtacctgccgggcg

SEQ ID NO: 8210 - DNA, 676 bp, Homo sapiens
  misc_feature 20, 93, 626: n = A,T,C or G
tcactatagggcgaattggnagctccaccgcggtggcggccgagtacgcggggtgctcctctgagaaccatctgttggtctgatggtgctagnatctgaagctggtgagcctcttggggcggcctcaagggctaacaagatctcaaatgcccttctctccatcatttgtggtatcctggattattgtgaaaatgtatagggattcctggggaagagttaaggattaaaatataaaggtttaaatataaataactttatatatatatgttttttcttgtaaaccaatatgttatatagtaggaagtttaattccttaactttggtttttctccctagcctttttatagccaacaagagcaaaagcacactgcaatgtccaaacgaattgcaggcgttttctgctccctgaagcctgggaattaatttatatactcagtcccttttcccttggctggccattgaagtagttgaaccacaggattggactgtccagaatcattagccagagttcactgtgagtggacgtcttttagttctgcttcaacgctataaccaacctttaccaaaagcaacaacaaaacaaaaaactgcagaaaccaatgagttctgttcacaaaggatggctnctcatgtcatcacaccggcaaggaatggacgagcctctgatttttctctt

SEQ ID NO: 8211 - DNA, 541 bp, Homo sapiens
  misc_feature 2, 11, 466, 485, 531: n = A,T,C or G
gnagcgcactncttagggcgaattggagctccccgcggtggcggccgaggtaccaaatgaagtgtgaagacaacggccatccaccactttatagagggtgtaaaaataaaccagaaatcaagggagaaagaaaagatgaaagacaaactgcaaaaaattgccaaaatgcgactttctaaaaatggagcagattctgaggctttgcatgtcttggcattccttcaggagctgaatgaaaaaatgcaacaagcagatgaagactctgagaggggtttggagtctggaagcctcatcccttcagcatcaagctggaatggggaatgaagaatagagatgtggtgcccactaggctactgctgaaagggagctgaaattcctccaccaaggttggtattcaaaatatgtaatgactggtatggcaaaagattgggactaaggacacttggccataccactgggacagggnttattgttaacacctgaantgctggggtcttgggagagcccaaagggaggttttgggagaggganccagatgggg

SEQ ID NO: 8212 - DNA, 651 bp, Homo sapiens
  misc_feature 16: n = A,T,C or G
tatagggcgaattggnagctccaccgcggtggcggccgcccgggcaggtacttgtgacaggcagacgtgattgcagccacgaacacgatgaactcactgaagtccacctgggcatctccattgacgtccaggtccttgagcaatttatccacggcatccttgtcttttccactctcagggacacagctcctggggagggcggcagagaccctgacagtctcgcctcgcaggcgtctttctccaggctagaaaccaatgactcatctctcaggctctctagcaaacagcggggcccacacaccacagttgtggtcgaatgtttccctgagggctacggagtctggtcttgccgaatacccccgcgtacctcggccgctctagaactagtggatcccccgggctgcaggaattcgatatcaagcttatcgataccgtcgacctcgagggggggcccggtacccagcttttgttccctttagtgagggttaattgcgcgcttggcgtaatcatggtcatagctgtttcctgtgtgaaattgttatccgctcacaattccacacaacatacgagccgggagcataaagtgtaaagcctggggtgcctaatgagtgagctaactcacattaattgcgttgcgctcactgcccgctt

SEQ ID NO: 8213 - DNA, 885 bp, Homo sapiens
  misc_feature 7, 9, 348, 360, 399, 413, 424, 478, 480, 483, 490, 491, 493,501, 504, 506, 508, 509, 511, 513, 515, 517, 535, 536, 537,540, 544, 546, 549, 552, 553, 557, 569, 575, 578, 584, 585,591, 592, 604, 605, 614, 620, 628, 632, 634, 635: n = A,T,C or G
  misc_feature 637, 642, 649, 651, 662, 670, 672, 675, 678, 699, 701, 713,721, 722, 729, 750, 758, 781, 783, 784, 792, 794, 804, 810,811, 816, 819, 822, 826, 832, 838, 840, 855, 857, 859, 867,871, 873, 877, 881: n = A,T,C or G
tgttaangnatacgactactatagggcgaattgggccctctagatgcatgctcgagcggccgccagtgtgatggatatctgcagaattcgcccttagcgtggtcgcggccgaggtacagtggccccccgtgaaagacagaattgtggttttcctggtgtcacgccctcccagtgtgcaaataagggctgctgtttcgacgacaccgttcgtggggtcccctggtgcttctatcctaataccatcgacgtccctccagaagaggagtgtgaattttagacacttctgcagggatctgcctgcatcctgacgcggtgccgtccccagcacggtgattagtcccagagctnggctgccacctncaccggacacctcagacacgcttctgcaagctgtgcctnggctcacaacacanattgactgctntgactttgactactcaaaattggcctaaaaaattaaaaagagatccgatatttnanaantaataannanatatcttnatntntnntncnantntttattaaccataagatnnnatntatnanatnatnnaatntgttttattttntaaaantgntcttanngggatnngaaaccaccctnngttataatncgtganaccccccnaaancnntngggtnaattccntnaaccctttttnccaaaatncnctnccntttgttaacaattaaaaaaangnaaacgtgctttntttaatannccaacanttctttaaaatgttttttttnttatgatnaaccttataaaaagggccatacntnnttttatangnttttgtgganaataannttatnaanccnccangagatngtgttnancctggtgtgatgaanananctatatgntgananttanaagncatt

SEQ ID NO: 8214 - DNA, 638 bp, Homo sapiens
  misc_feature 21: n = A,T,C or G
gactccttagggcgaattggngctccaccgcggtggcggccgggtacttttttttttttttttttttgttttctcattgtcctcaggtcttggaatatcttgaattcaaactaataattcacctccttctcagcactctcaatatagtcttttgccaacacctgatgagacatataacttatgaccattgcacttctctttttttccatggtttgcatttaggaggtaattttcttcagctattagagcatatccttcctcatcattttagagaaatacttggtcaaatgaccttttaaataaaagatggttcttaccttctaattttccacttattttatccatttctttttgatgtgtagccttgggtacacacacatccttctgtgaaacagtctcacggagactctcagaatcccaagaattttcttcaacgttcttttgttttgattctgaagggaacatctgatctgctctcaatgtttgttcattcttcaattccaaggctttatttggaacagacttttgcatttcaatggcaggctcgaaggcagatggcttctcgggaggctctgctttgaaggtttgcatgtccatcaattctaaggctttagttggaatagaaactttcattctgc

SEQ ID NO: 8215 - DNA, 631 bp, Homo sapiens
  misc_feature 161, 336, 388, 437, 464, 468, 472, 475, 533, 548, 554, 577,579, 624: n = A,T,C or G
tccaccgcggtggcggccgcccgggcaggtactttttttttttttttttttttttttttttaagtgacagaaaacaggttatacgtaacgttaaaaataataaaatggaagactatgccttcggggctcatttctatagtttgttgttagagaagtttctntgaacgtgtggagcacagggaaaaaattggtctataggttgttgggttatagacccttccttttatattcatatgtatttatatgagaataaacatgacccaaatattctacacttaatattttgcaatcaggaaaaaatgacttgatagaagtatttaccctgccaggcgtggnggctcacacctgtaatcccagcactttgggaggccgaaccaggaggatcatntgaggacaggagttcgaggacagcctggccaacatcatgaaaccccatntctaccaaaaatacaaaaaattagccnggcntggnggngcacacctgtaatcccagctactcaggaagctgaggcaggaaaattgtttgaacccangaggcggagtgagancgcatnattgcactccagcctgggcgatnanagcgaaaggctctgtctcagaaaaatgaaataaaataaaatacangtcaggc

SEQ ID NO: 8216 - DNA, 351 bp, Homo sapiens
  misc_feature 11: n = A,T,C or G
tacttagggcnaattggagctccaccgcggtggcggccgcccgggcaggtactccgtgtgggtcggtggctccatcctggcctcgctgtccaccttccagcagatgtggatcagcaagcaggagtatgatgagtcaggcccctccattgtccaccgcaaatgcttgtaggtggactctgacttagttgcgttacaccctttcttgacaaaaccaaacttctcagaaaacaacatgagattggcatggctttatttgttttcttgtttcattttttgttttgttttttattggcttgactcaggatttaaaaaccggaatggtgaaggtgacagcagtcggttggaggaagc

SEQ ID NO: 8217 - DNA, 679 bp, Homo sapiens
  misc_feature 23, 609, 610, 611, 612, 613, 614, 618, 619, 622, 623, 624,626, 628, 629, 630, 631, 632, 633, 634, 635, 636, 637, 638,639, 640, 641, 642, 643, 644, 646, 648, 650, 651, 652, 653,654, 655, 656, 657, 658, 659, 660, 661, 663, 666, 668: n = A,T,C or G
  misc_feature 669, 671, 672, 673, 674, 677, 678, 679: n = A,T,C or G
gactcactatagggcgaattggnactccaccgcggtggcggccgggtacttgaaaatgtaaccgatacagcacaaggacatccccaccactgtggataccaaagatttacctccaacggccatgccaaagccacagcatacattttctgactcacagtcccctgctgagtcatctcctgggccttctctttcactgtctgcacccgctcctggggatgttcccaaagacacatgtgttcaatcacccataagcagtttcccatgcactgatctaaaagtgtcagaaaaccataaaggatgtgttttgcctgtgtctcgttagaacaatgagaaaatgccacttttagaacttggaggagaaacaacccctcctttgtccacagagcgtagtccagaagctgtgggaagtgagtgtccatccagagtcctcgtccaggtcaggtccttcgtgctccccgtggagagcacccaggatgtgagctcccaggtcatcccagagagctctgaagttagagaagtgcagttgccaacttgtcacagtaatgaacctgaagtggtttccgttgcaagttgtgctcccccacaagaggaagtacctgcccgggcggnnnnnngggnnccnnncngnnnnnnnnnnnnnnnnngngntnnnnnnnnnnnntnggngnntnnnnaannn

SEQ ID NO: 8218 - DNA, 633 bp, Homo sapiens
  misc_feature 8, 90, 298, 301, 315, 319, 324, 360, 361, 367, 368, 370,373, 382, 387, 402, 412, 415, 419, 422, 423, 424, 440, 450,455, 460, 462, 463, 484, 489, 491, 492, 493, 494, 495, 496,501, 502, 506, 508, 514, 522, 523, 526, 529, 532, 533: n = A,T,C or G
  misc_feature 536, 538, 543, 544, 547, 554, 559, 564, 566, 568, 572, 574,575, 580, 582, 585, 586, 588, 589, 597, 599, 600, 602, 608,612, 615, 616, 618, 621, 622, 627, 629: n = A,T,C or G
tattcagnaatgattcagtaggcaaagaattcctcctggtaacgaatctgtgtgtcaaggtccttaccttggctctcactgtcctcaggnattatggaggggaagatgatgcagaattcgcacatgtcttctggatcatgggggactttgctgagtgtgcctgccatggtccgatctctgattgataggagtgactgctgagatcctggatctgaccactgagatatgtggcccagtgccattcaccctcgcagggtaacattctggctccatgggcaaagcccattgacctaattgncanaactcccatctcangagnccctnacacacatgcttgcctctccattctgaccctaactnnaacagnnanaancttggcctnccctncgggtaacacacacnggtggggtgnatngtgntgnnnaccctgcccatgccanggggagcctngtagngcctntnncacccatggaggggcgcgtgnaatgngnnnnnnctctnncccntngggctngcttgttnnatnggnatnnaananccttnnaanaaccctnataancctancnangaantnntaaanantannanntgccctananntnaagttngtanaanncnttnncttgnanatac

SEQ ID NO: 8219 - DNA, 865 bp, Homo sapiens
  misc_feature 2, 3, 4, 5, 6, 7, 11, 21, 28, 38, 515, 589, 712, 728, 736,740, 760, 765, 771, 778, 780, 810, 825: n = A,T,C or G
gnnnnnnggangcgcgttatngacttantatagggctnattggagctccaccgcggtggcggcccgaggtacttgtgcaggattgttgtggctactagagaacaagagggaaagtagggcagaaactggatacagttctgaggcacagccagacttgctcagggtggccctgccacaggctgcagctacctaggaacattccttgcagaccccgcattgccctttgggggtgctctgggatccctggggtagtccagctcttcttcatttcccagcgtggccctggttggaagaagcagctgtcacagctgctgtagacagctgtgttcctacaattggcccagcaccctggggcacgggagaagggtggggaccgttgctgtcactactcaggctgactggggcctggtcagattacgtatgcccttggtggtttagagataatccaaaatcagggtttggtttggggaagaaaatcctcccccttcctcccccgccccgttccctaccgcctncactcctgccagctcatttccttcaatttcctttgacctataggctaaaaaaaaaaggctcattccagccacanggcaaccttcctgggcctttgcttctctagcacaattatgggttacttcctttttcttaacaaaaaagaatgtttgatttcctctgggtgacttattgtctgtaattgaaaccctattgggangtgatgtctgtgttanccaatganccangtgagctgctcgggcttttnttggnattgtnttggttngnaaaatgggatttcattcattttttaatggnccagttaagtgatcncccaaggacttgaaaatttggaaggccaaaaaaaaaaaat

SEQ ID NO: 8220 - DNA, 713 bp, Homo sapiens
  misc_feature 3, 645, 711: n = A,T,C or G
atnctatagggcgaatggggccctctagatgcatgctcgagcggccgccagtgtgatggatatctgcagaattcgcccttgagcggccgcccgggcaggtactttcatccataaaggcctgcagctgtttcactgatccttgcagttcatccatcaccaactccatacagtcaaagactttgctctggttctgtaatattttctggtagtcaggttttgtattaagaacttcattctgagaagacccaagatatgtcataggttccactttgacctcagtaattttggcctcagttgatcctctggacaatatctctttagcctcctgctggtagtgaagcaagagctgatcccaagtctgacgttctaaagaaaactttgttatgtattccttcatctcagccacagatgcttccaaagaaaaatctgatgcttttccatttgaatcttcaaaacatttttgtagagttccatcagtttccagtccgtctgcaaaatgtttcaattcttcagaaagagaagatgctttggctctaaaactttcaagactgaagcccttagtgtcccttaggaaaggttcaagtttctgaatagagaactggaaactggaaagcaggaaacagcccagccgtttgctttctgctnaatcgacactgatagacccggctgagctctgtgatgccctggtgaaggggatgcaacgactttcgncc

SEQ ID NO: 8221 - DNA, 536 bp, Homo sapiens
  misc_feature 2, 3, 4, 5, 19, 352, 368, 379, 409, 418, 419, 445, 471, 484,489, 494, 498, 499, 506, 508, 521, 529, 530, 536: n = A,T,C or G
gnnnngggctcccgtaacnactactatagggcgaattggagctccaccgcggtggcggccggtatgacctcagcattcctaaagtgctgggataaagtgtctcacaagggcaagtggaccctagagagacagccatccctgacctctgggctccacatcacctgacttgctgctccaccactttgcttgtttcctgggtgctccatcccagagacaagtgagttagcaatcacttagtgtaatcagcccaggatggagggtctgtgctgtgggcccaagccagggttccctgtctggtgatgagtagtggagggtgtgtggtacctcggccgctctagaactaagtggatcncccgggcttgcaggantttcgatattnaaagctttatcgatacccgtcgaccctctnggggggggnnccggtaccccaacttttttggttccnttttattgaagggggttaaatttgcncccctttggcggnaaaancaatngggnnattagcntngttttcctttttntgaaaaanntgaaan

SEQ ID NO: 8222 - DNA, 860 bp, Homo sapiens
  misc_feature 22, 26, 453, 556, 590, 594, 633, 634, 635, 636, 637, 641,642, 643, 644, 645, 646, 647, 648, 649, 650, 651, 652, 653,654, 655, 656, 657, 658, 659, 660, 661, 662, 663, 664, 665,666, 667, 668, 669, 670, 671, 672, 673, 674, 675, 676: n = A,T,C or G
  misc_feature 677, 678, 679, 680, 681, 682, 683, 684, 685, 686, 687, 688,689, 690, 691, 692, 693, 694, 695, 696, 697, 698, 699, 700,701, 702, 703, 704, 705, 706, 707, 708, 709, 710, 711, 712,713, 714, 715, 716, 717, 718, 719, 720, 721, 722, 723: n = A,T,C or G
  misc_feature 724, 725, 726, 727, 728, 729, 730, 731, 732, 733, 734, 735,736, 737, 738, 739, 740, 741, 742, 743, 744, 745, 746, 747,748, 749, 750, 751, 752, 753, 754, 755, 756, 757, 758, 759,760, 761, 762, 763, 764, 765, 766, 767, 768, 769, 770: n = A,T,C or G
  misc_feature 771, 772, 773, 774, 775, 776, 777, 778, 779, 780, 781, 782,783, 784, 785, 786, 787, 788, 789, 790, 791, 792, 793, 794,795, 796, 797, 798, 799, 800, 801, 802, 803, 804, 805, 806,807, 808, 809, 810, 811, 812, 813, 814, 815, 816, 817: n = A,T,C or G
  misc_feature 818, 819, 820, 821, 822, 823, 824, 825, 826, 827, 828, 829,830, 831, 832, 833, 834, 835, 836, 837, 838, 839, 840, 841,842, 843, 844, 845, 846, 847, 848, 849, 850, 851, 852, 853,854, 855, 856, 857, 858, 859, 860: n = A,T,C or G
agtcgcgtatcgactactatanggcnaattggagctccccgcggtggcggcccgaggtacatcatttccagagcaggcactggcagcgagatagggttggaggagaagtagcgccgggacttccggatggcaaacttctctgtgggtagagatttcccagcaatcttgagcttcaggcctggacagctcgaaataattccacttcgtcgtccccgaacggcttgtggtcctccttcccaaacatgctgaggtaggcggccttcatgtaaatgtaggtggcctttttaagtcagatcatgtcagttccttctggaaatctggttatattccatcacactcaggagacatctcctacaatttccttgacacctgcagcactccagccacacgacggcctcagggcggttcccaggacacatcaaacacactcctgccctgctgtgccctgcccanctccctctccccgcgtacctgcccgggcggccgctctagaactagtggatcccccgggctgcaggaattcgatatcaagcttatcgataccgtcgacctcganggggggcccggtacccaacttttgttccctttantganggttaattgcgcccttggcgtaatcatgggcataactgnnnnnccgnnnnnnnnnnnnnnnnnnnnnnnnnnnnnnnnnnnnnnnnnnnnnnnnnnnnnnnnnnnnnnnnnnnnnnnnnnnnnnnnnnnnnnnnnnnnnnnnnnnnnnnnnnnnnnnnnnnnnnnnnnnnnnnnnnnnnnnnnnnnnnnnnnnnnnnnnnnnnnnnnnnnnnnnnnnnnnnnnnnnnnnnnnnnnnnnnnnnnnnnnnnnnnnnnnnnnnnnnnnn

SEQ ID NO: 8223 - DNA, 673 bp, Homo sapiens
  misc_feature 3, 6, 9, 12, 17, 19, 24, 33, 34, 35: n = A,T,C or G
gtnatncgnctncactntnagggncgaattggnnnctccaccgcggtggcggccgaggtacccctcccattgtggtagtcccagcagtttaccaaacactagttcccctagtagagccagcctatgagaagaaaagctttgttggccaagttcttacattaatgacttcatagtaagaaactgatttcaaagtgaattaaggaaatcatcacagagaatattttcaaacagatgtttctctttttaaaaagtgatagtaagatgaacttgtaaaaaatttcctctgatgttaattgtagagttgtgggggacggcctatttttctctaccgttgggactggcagggcattgcccaccatataccatagtggtcaccaaaaaagaaacctcttcaacttgaaaagggaagtgaacatgagccatgagagagatttaaaagacccctgtgcttgcagttaatgccacgttgattgattatctgtgcttcaaaggtcacagaaatcttaaaggatttttagcaccatgtagatattgtcttttgtcctgctttataaaaagcgttgctataatgtattagtgggttctcgtgtctccaaattaccaccgtggctaggctgctggaaaaaagcactgttctgttcactccaatctcctggtagactctgttggtctc

SEQ ID NO: 8224 - DNA, 656 bp, Homo sapiens
  misc_feature 29, 475, 517, 530, 545, 550, 551, 559, 562, 564, 600, 624,627, 633, 645, 648, 651, 653: n = A,T,C or G
gtatacgactcactatagggcgaattggnaactccaccgcggtggcggccgcccgggcaggtaccacacaccctccactactcatcaccaggacaggggaaccctggcttgggcccacagcacagaccctccatcctgggccgattacactaagtgattgctaactcacatgtctctgggatggagcacccaggagacaagcaaagtgttggagcagcaagtcaggtgatgtggagcccagagggctgggacagctatctctctagggtctacttgcccttgtgagacactttatcccagcactttaggagtgctgaggtcataccagccacatctcatgtgcaagattgcccaacagagatcaggtccaagagttcctgttttaagaaaggggacttgtttgataagggaagtctggccatgtttgtgtggagcagctgtgctgtgctgggggttcacttttgagagagttctnctctgagacctgatctctggaggctgggcagtcttgcacatnagatggggctggnctgatggcagcactncttannctgcttgnctntnccatggccctagcctggcacacatgcttacagggcnctcttaaatcccacactatactgncgngctagnggactggacctnggncgntntaa

SEQ ID NO: 8225 - DNA, 835 bp, Homo sapiens
  misc_feature 3, 4, 5, 6, 7, 8, 9, 14, 48, 557, 586, 633, 679, 693, 703,735, 736, 742, 791, 806, 815, 824, 826, 834: n = A,T,C or G
ggnnnnnnnttacnccgtatactactactatagggcgaattggagctncccgcggtggcggccgggggccattgagactgccatggaagacttgaaaggtcacgtagctgagacttctggagagaccattcaaggcttctggctcttgacaaagagacaaggagaaggccttaggatctactgggggagtccggaggagcagtctcttctgtcccgctggaacccatggtccactgaagttccttatgctactttcactgagcatcctatgaaatacaccagtgagaaattccttgaaatttgcaagttgtctgggttcatgtctaagcttgttccagctatccagaatgcccacaagaattcaactggatctggaagaggaaagaaactgatggtgttaactgaacccattttgattgagacctacacagggctgatgtcattcattggaaaccgcaacaaacttggctattcccttgcccgtgggagtattggtttttgagaagtctttttggtacctcggccgctctagaactagtggatcccccgggctgcangaattcgatatcaagcttatcgataccgncgacctcgagggggggcccggtacccaacttttgttcctttaatganggttaattgcgcccttggcgtaatcatgggcataacttgtttctgngtgaaaatggtatncccttacaanttcacacaacatacgaaccgggagcataaaanngtaaancccggggtgcctaagagggagctactccattaatgcgttgcctacttgnccgttttcatcgggnaaactgtcngccacttcntnatgaatcng

SEQ ID NO: 8226 - DNA, 632 bp, Homo sapiens
  misc_feature 518, 575, 618, 623, 628: n = A,T,C or G
gaattggagctccaccgcggtggccggccgcccgggcaggtactgaagtcctcagcctagtgcctcccgatgcgttattttcacacaagcgatcgggttaacgccacagttccacatggctggggtggcctcacaatcatggcggaaggtgaaggaggagcagaggcaggtcttacatggtggcaggcaagagagcctgtgcagggaaattccttcccaggccacagaaatggaaaagccagacacgctgaaaatgaactcagtccttcagttctggaggctggaagtctggggtcaaggttgtggccaatcctgtgtctggcaaggctgcttcctggtttgcagacaccatcttcctccctgtccttcagcccacagcagtgcccttggtcctaccccttcctctcctagacttcctccacaggagttcggcaggcactcctggtcttcctttatcttcttgcagaaagatggcccggcaggtccgtccaaacacaaagactggacgcagagacccngagaacagcaaaacggagattttcaatgacagtcttgcaagactgggtgtctggctngcatgcagccacccccgcgtacctcggccgctctagaactagnggatnccccnggct

SEQ ID NO: 8227 - DNA, 668 bp, Homo sapiens
  misc_feature 24, 557, 571, 627: n = A,T,C or G
ggtgtgggaggttttttctctagnctagtctagcggccgcccttttttttttttttttatgagaagacatcattacctgtatatgccccctcttctcagttccctcaatggacattggcattgatgagcccataagtacatgataagcctacaaggacaatagtgagtttatatttttatgtaatgattttagaacatgggataatatccagagtgatggaggtaaaactattcacatttccatattccaaactacttcaagaatcactagagtgcagaagttataactctaaatgctgaatggagaaatcatctgtcccaagaactacacccatatgactttccaataaatctatctcaaaaggcctaccatttaacaacaacagcaacaacaaaactttaaaagaacccaaatgaagttttgtataagttggtgtctttttttctatacattttgaatgacaaaaagctgctgtgagctacactgtttttattttattataaaccattcttattttataaaacacagccctactcccagaaaaaatatttttggngaactaatgggggncaagacatatatctgaggctaccatatgaccctaagaagaacccaaggaatgcagnatttaggactgcctcattggttggaaatattggttttaagg

SEQ ID NO: 8228 - DNA, 645 bp, Homo sapiens
  misc_feature 3, 9, 25, 34, 541, 567, 592, 607, 638, 644, 645: n = A,T,C or G
gtnatacgnacttcacttttagggncgaattggnatcttccaccgcggtggcggccgcccgggcaggtacgcgggggaggaggtggatttgagagatacctcccctccttctgctcagctgccttgcagtaattaaactctttctctgctgcaacacccctactgttctccgtgtattggcttttctgggcagcagaaaaaagcttggccagaccacaagcgggaatgcaaatgccttaaaagctgcaaacccagatatcctccagactccgttcgacttcttggcagagttgtcttcaaacttatggatggagcaccttcagaatcagagaagctttactcattttatgatctggagtcaaatattaacaaactgactgaagataagaaagagggcctcaggcaactcgtaatgacatttcaacatttcatgagagaagaaatacaggatgcctctcagctgccacctgcctttgacctttttgaagcctttgcaaaagtgatctgcaactctttcaccatctgtaatgcggagatgcangaagttggtgttggcctatatcccantatctctttgctcaatcacagctgngaccccaactgttcnattgtgttcaatgggccccacctcttactgnaagcann

SEQ ID NO: 8229 - DNA, 597 bp, Homo sapiens
  misc_feature 6, 8, 14, 15, 515, 525, 528, 558: n = A,T,C or G
ggtagntngactcnntcggaaccctcttcttacagacatccctgaaaggaagcccctttggggcagggaggtgaggacttcatctcaacatcggctggtggttggtaggggagctttttcttttctttccttttttttttgtttttgtttttgtttttgtttttggtaacatgttaggaagttaatgttgcaaagagtagtttacatcttcactttctgaagacacttgaatttaggaccgatgtatctgtgacaagcatgccagaagtggcaggggccatcagggctaaccacttcacacctaccatcgtcccatggggatccaagacctgagataaagcaacagcctgcccagatccctctgttcatcctatcccttccaaggttggtccatgccaacataacctctgggcatcagacatcagcaggtctgtgtgcctcagccctgttaaggggcaggtttctctttagccctcttcctgcacttgggagcaaaggcactaccagtagagaanggccatccangcncgtgccccagcctggacccctggggctcanatagaggtgctgaacccctgtgtcaaagttgttaaaatg

SEQ ID NO: 8230 - DNA, 625 bp, Homo sapiens
  misc_feature 7, 14, 15, 71, 238, 342, 370, 377, 378, 424, 439, 505, 510,551, 566, 579, 580, 594, 595, 600, 602, 608, 610, 625: n = A,T,C or G
gggagcncaccagnnccccgcgtccgggctacaaaagccatagtcacttgtcctcttttgttcttaatatngttaatttatatcttctcttttgttcattgctttagttaggggtttgtaatttttattgatcatttaaaggagcaacttttcggttttactaattttctctatttgcttattttctatcgcattgatttctgcagttatctttatttctttccttctactttgagtntgcttttcttctagcttttttaaggtagaagtttatattagtaattttagaacttttctctctccaagcactgttttagctgcatttcacaagttttgatgtgnttacatgaacgcgtagttcaaaataggngtcaganntcccttgtaatttaattttgatctatgacttttctagaaatgtgtnaattttcaaacattngggggagttttcagttatcttttggctatcgatttcttaaaattattgtggttagagaattttgcntctgnaattttcaatcctaaatggttttatgggcccaaaaattatngggttaatctttggnaaatgatccttgnnatattttggaaaannctggncnattctncntattttcggggaaan

SEQ ID NO: 8231 - DNA, 758 bp, Homo sapiens
  misc_feature 2, 3, 7, 8, 9, 11, 13, 26, 48, 70, 74, 79, 96, 107, 139,153, 156, 165, 191, 216, 219, 228, 229, 230, 234, 251, 269,273, 277, 281, 315, 327, 396, 407, 427, 430, 456, 465, 480,495, 500, 542, 543, 577, 600, 614, 645, 649, 650, 657: n = A,T,C or G
  misc_feature 660, 669, 671, 672, 700, 708, 709, 719, 727, 733, 738, 745,749, 755, 756: n = A,T,C or G
gnnatannncncntaatacgactcantattgggcgaattgtagctgcnccgccgtggcggcgcgccgggncagngctgntttggggcacaaggaanccttagggtanggggaaaggctgttattacctaaagtttactnccaggccagggggntgncattttctncacagacatccctgaaaggaagcccntttggggcagggaggtgaggacttnatntcaacatcnnntggnggttggtaggggagctntttcttttctttcctttntttngatnttgnttttgtttttgtttttggtaacatgttaggagtnaatgttgcaaanagtagtttacatcttcactttctgaagacacttgaatttaagaccgattgtatctgtgacaagcatgcnaaaagtggcangggccatcagggctaaccanttnacacctaccattgtcccatggggatncaagacctnagataaagcaacagnctgcccaaatccctntgttnatcctatcccttccaaggttggtccattgccaacataacctnngggcatcagacatcaaaaggtttgtgtgcctcanccctgttaaggggcaggtttttntttagccctctttnctgcacttgggagcaaaggccctaccagtanatannggccatncanccttgcccnanncctggacccctggggctcaaaataagangtgcttanncccctgtgtnaaaagttnttaaancgagntttggtngtgntccatnnga

SEQ ID NO: 8232 - DNA, 646 bp, Homo sapiens
  misc_feature 2, 11, 523, 596: n = A,T,C or G
gnagagggccncgcgtccgaggagctccaggacaagaaacacgtctggctaggagaaactatcaatgctggcagccagtttgaatataatgtagaaggagtgacttccaaggaaatggctacccaacttgccttcatgcgcctgctggccaactatgcctctcagaacatcacctaccactgcaagaacagcattgcatacatggatgaggagactggcaacctgaaaaaggctgtcattctacagggctctaatgatgttgaacttgttgctgagggcaacagcaggttcacttacactgttcttgtagatggctgctctaaaaagacaaatgaatggggaaagacaatcattgaatacaaaacaaataagccatcacgcctgcccttccttgatattgcacctttggacatcggtggtgctgaccaggaattctttgtggacattggcccagtctgtttcaaataaatgaactcaatctaaattaaaaaagaaaggaaatttgaaaaaactttctctttgncatttcttcttcttcttttttaactgaaagctgaatccttcatttcttttgcacatctacttgcttaaattgngggcaaaagagaaaaagaaggattgatcagagcattgtgcaataccagtt

SEQ ID NO: 8233 - DNA, 568 bp, Homo sapiens
  misc_feature 2, 3, 11, 13, 17, 314, 339, 345, 360, 372, 376, 377, 387,392, 399, 410, 419, 426, 431, 432, 443, 444, 449, 463, 464,465, 472, 476, 479, 495, 498, 499, 506, 543, 544, 551, 561,564: n = A,T,C or G
gnngtttcggncnactnctatagggcgaattggagctccccgcggtggcggccgaggtacatggctgacgtcaccgtccagtgcaaaatcaaaaaagaaagaaagaaaaaccccaaagaaagaggatttttcagtggagaacatggtgggctgattaggcttctattagattacattcatttcacatctgtgtgcaattctcccataaattggtctttaaaatatatatatatatttaaagatattagaaatatatatttaagtatatttaaaatatatatatttttaaagagaccggggtcttggtatgttgnccaagctgggctttgacctctgggnttaaanaaacccccccccttnggcccccaaagngggnnaacacccacnttttntgccccncccccctgggnggggggggnggaaaanccccnnggggggggggnntttanaaaaaaatgggggnnncccccgncgcnggnggggattttttttttnaannctttttnttttccccccccccccccccgggggggggggggcccnnccccccncttttttttnttntttt

SEQ ID NO: 8234 - DNA, 801 bp, Homo sapiens
  misc_feature 3, 4, 6, 13, 676, 720, 735, 746, 752, 756, 774, 788: n = A,T,C or G
gcnncntttgaancctttaaataccggtgtcgaccccgcgtccggttatataagcgctatgccttcctgcgctgtgatgacgagaaggagcagttcctctatcacctcctgtctttcaatgccgtcgattacttttgcttcaccaatgtcttcacaactatcctgatcccgtaccacattctgatcgtaccaagcaagaagctggggggctccatgttcactgccaacccatggatctgtatatcaggagaattgggtgagacacagatcatgcagattcccaggaatgtgctagagatgaccttcgagtgccagaacttggggaagcttactactgtccagattggccatgataactctgggctgtatgccaaatggctggtggagtatgtgatggtcaggaatgagatcacaggacatacctacaagttcccgtgtggccggtggttagggaagggcatggatgatggaagcctggagcggatcctagttggggagctgctcacatcccagcctgaggtggatgagaggccatgccggaccccgccgctgcagcagtcccccagtgtcatccggaggcttgttaccatctcacccaacaacaagcccaagctgaacactgggcagatccaggagtccatcggggaggcaagtcaatggcattgtgaagcacttncataagcctgaagaaagagcgaggcaagtctgacgctgttgctntgtggagagtgtggncttgtcttggncttggnacangcttttcaacatggattnaaatcgccccgctnttcaaaatgtctt

SEQ ID NO: 8235 - DNA, 639 bp, Homo sapiens
  misc_feature 7, 46: n = A,T,C or G
tcgggcnattggagcctccccgcggtggcggccgcccgggcaggtnccaacatttattaatcctcacaacacccctgtgaggtaggtcagtatgtcctttagagtcgagaactgaggcagaggtcaagcaaacctgccctgggccacagagcagcagatgaagggcctagacctggatccagaagctagggctctcggtccagcattcatccactggtggacatcacatgggcttatttttaccagcgaaggttacgtgaaggacaaaacgcactcagccagcaacggaaactcaacagttcaaacagcactggggaacatgtcagttaaagagacgaaacgctgaccagctcatgaatgaggcaagacaacatgcggctgaggaagtgtggaatcatcacgactggggattagaccaagaacgggcgctcaggagggttcaggaaaatgtaaacaaactaggaacccatccaaggggtgacaggcccaaatgcctacggtctccaaatggtagaaaaattagaaaaagatagtggaaaaatccaaccacgcaaccttaactttaaactaggaatgacaataatgtgtctaatgttcattcacactagaaaggccgataatggttgtaatataactact

SEQ ID NO: 8236 - DNA, 647 bp, Homo sapiens
  misc_feature 3, 28, 571: n = A,T,C or G
tgntcgccagcttggtaccgagctcggntccactagtaacggccgccagtgtgctggaattcggctttcgagcggccgcccgggcaggtactagtaaacatggtgtgtatgataaactaaaaagtaaatggacaagaagtaaaataccagtgagattatgctgggtcagatccaaagccagcacggcaccgggtttcttgcctaaggtccatggtgaccactccttggctattgccaatgttcactcaaggcccaagcactctttattcagctggtggcaaatccagccaggcttgtgtttttcccttcagtatgacgagctccccctaagcccaagacaagtcctaaaatgtcatctgggagccaggacctggaatcaggatccttaggaatttacttggtgctgtattctactatggctgagctggcaatcaagtgcaagattaagccctttattttctttgttctcctttcctcaagcagatggatgctctccctgtggtcaccgacaccccaggcctgaggcaagtacctcggccgcgaccacgctaagccgaattctgcagatatncatcacactgggcgggccgctcgagcatgcatctagagggcccaattcgccctatagtgagtcgattacaattcac

SEQ ID NO: 8237 - DNA, 649 bp, Homo sapiens
  misc_feature 3, 78, 90, 101, 106, 128, 230, 243, 458, 552, 573, 589, 590,591, 645, 648: n = A,T,C or G
ctnctatcgggcgaattggagctccaccgcggtggcggccgcccgggcaggtgcagttaatcattttgactgtgtcantaatataatcanaatacgtgtanctggnaagagaaaaatacttttttttnttttgagactgggtctcgctctgtcgcccaagctggaatgcagtggcgcaatcacacctcactgcagcctcaacctcctgggctcaaggatcctctagcctnagcctcctgagtngctggaactacatgcatgcaccaccacactcagctaattttttttaaatttatttttagtagagacagggtctcactatgttgcctaggctagtcttgaactcctgggctcaagtgatcctcctgcctcagcctcccaaagtgctgcgattacaagcgtgagccaccgcctggcccgaaaaataccttgtttttaatcattcccattcagcaatngtgaaaatgctctatgtacctcggccgctctagaactagtggatcccccgggctgcaggaattcgatatcaagcttatcgataccgtcgacctngagggggggcccggtacccancttttgttccctttannngagggttaattgcgcccttggcgaatcatgggcatagctggttcctgtgtgaantgna

SEQ ID NO: 8238 - DNA, 640 bp, Homo sapiens
  misc_feature 1, 7: n = A,T,C or G
nctatcnggccaattggagctccaccgcggtggcggccgaggtactacctgggggggtttgctttcctgccttttctctggttggtcaacatcttctggttcttccgagaggccttccttgtcccagcctacacagaacagagccaaatcaaaggctagctggagatggccaaagcccggaaccaactggatgctgtcttgcagtgtctgctggagaagagtcacatggacagggagcgtctggatgaggaagctgggaaaacaccctcagacacccacaataaggactgctccatcgcagccactggcaaaaggccatctgcccgcttcccccaccagcggaggaagaagaggagggagatggatgatgggctggctgagggagggccgcagcgatccaacacatatgtgatcaagctgttcgaccggagcgtggacttggcccagttcagcgagaacacgccactgtacctgcccgggcggccgctctagaactagtggatcccccgggctgcaggaattcgatatcaagcttatcgataccgtcgacctcgagggggggcccggtacccagcttttgttccctttagtgagggttaattgcgcgcttggcgtaatcatgggcatagctggttcctgg

SEQ ID NO: 8239 - DNA, 573 bp, Homo sapiens
  misc_feature 5, 23, 341, 414, 479, 523, 573: n = A,T,C or G
gtagngcgaacactactataggncgaattggagctccccgcggtggcggccgaggtacgtgtggcttggtcacttcgtggctaaggtaagaacgtgcttgtggaagacaagtctgtggcttggtgagtctgtgtggccagcagcctctgatctgtgcagggtattaacgtgtcagggctgagtgttctgggatttctctagaggctggcaagaaccagttgttttgtcttgcgggtctgtcagggttggaaagtccaagccgtaggacccagtttcctttcttagctgatgtctttggccagaacaccgtgggctgttacttgctttgagttggaagcggnttgcatttacgcctgtaaatgtattcattcttaatttatgcaaggttttttttgtacctgcccgggcggccgntctagaactagtggatcccccgggctgcaggaatttcgatatcaaagcttatcgatacccgtccnacctcgagggggggcccggtacccagctttttgttccctttagnggaggggttaatttgcgcgcttgggcgtaatcatggtcataagctgtttn

SEQ ID NO: 8240 - DNA, 616 bp, Homo sapiens
actatcgggccaattggagctccaccgcggtggcggccgaggtacatgaacatacacacacacacacacacacacacacacacagaggccaatttccagtgaggaacaggctccacagaagaagctgataggcaggggggatcaaacgctgctcccctgctcaccgatctacttctccaaatacaatatcttgggtacttacaactataaaaagatacaataactctaccaattataaataatgtagcatttcatattaaagacattatcgtacctgcccgggcggccgctctagaactagtggatcccccgggctgcaggaattcgatatcaagcttatcgataccgtcgacctcgagggggggcccggtacccagcttttgttccctttagtgagggttaattgcgcgcttggcgtaatcatggtcatagctgtttcctgtgtgaaattgttatccgctcacaattccacacaacatacgagccgggagcataaagtgtaaagcctggggtgcctaatgagtgagctaactcacattaattgcgttgcgctcactgcccgctttccagtcgggaaacctgtcgtgccagctgcattaatgaatcggccaacgcg

SEQ ID NO: 8241 - DNA, 613 bp, Homo sapiens
  misc_feature 4, 580: n = A,T,C or G
ggcnattggagctccaccgcggtggcggccgaggtacattcagaatcccacgagcaattcagatagaccagtcaccaggcctctagctaaaagagcactgaaatacacagatgaaaaagagacggagggttctaagccaacaaaaactcctaccactacaccacctgaaactcagcagtcacctcatcttagcctgaaggatatcaccaatgtctccttgtatcctgttgtgaaaatcagaagactttctctttctccaaaaaagaataaagcaagcccagcagtggctctgcctaaacgtaggtgcacagccagcgtgaactataaggagcccaccctcgcttcgaaactgagaagaggggacccttttacagatttgtgttttttgaattctcctattttcaagcagaaaaaggatttgagacgttctaaaaaaagtatgaaacaaatacaatgaaggtttcgttggatattgtttaaattcaatctacacctctttctgttgcttcaggagaggatctgtaagagtacctgcccgggcggccgaggtacatgttctttttgcatttttaattattgnaatccttttagataatgatgtgttcatttgaac

SEQ ID NO: 8242 - DNA, 883 bp, Homo sapiens
  misc_feature 2, 5, 7, 10, 684, 695, 700, 703, 735, 785, 786, 825, 832,833, 834, 843, 845, 850, 858, 865, 869, 875: n = A,T,C or G
gnagntnggntgggcgcgcgtaatacgactcactatagggcgaattggagctccaccgcggtggcggccgaggtacagagaaggcactgaataaattcacaaaggccgattggttcacccattcttttagagacaacagacacgcaattctgacgaggactcctgttactaaaagacacagcctctgatacaagagagatatccctttgactaaagcattaccagggtccccagggccccctcccactggggcggtaacactacgggtctccccaccatatattccatgtcaaagtatctacacaaatacagaggaaattaagcaagtaaatacggtatgtaattgttatcatttgtatttctttaaggcatatttataaatattttaaagtaaacaatatgagtgagtgcctttcattagctatgatctttcatactgatatattttgactgatctgaataagcaggttactgtggaagcatataacataaaacagctaatatgattccagtgggtacctgcccgggcggccgctctagaactagtggatcccccgggctgcaggaattcgatatcaagcttatcgataccgtcgacctcgagggggggcccggtacccagcttttgttccctttagtgagggttaattgcgcgcttggcgtaatcatgggcatagctggttnctggtggtggnaatgntantcccgctcacaatttccacaccaacatacgancccggggagccttaaagtggtaaagccctggggggtggcctaaatggagnngagctaacctcaccatttaaattggcgttggcgcctcantggcccnnntttttccantncgggnaaacccgngcggggnccancttggnattaatga

SEQ ID NO: 8243 - DNA, 859 bp, Homo sapiens
  misc_feature 841: n = A,T,C or G
gtcaccccgcgtccggccggtcggccgccgcctccagccgtgtgccgctatgggagtcccggcgttcttccgctggctcagccgcaagtacccgtccatcatagtcaactgcgtggaagagaagccaaaagaatgcaatggtgtaaagattccagttgatgccagtaaacctaatccaaatgatgtggagtttgataatctgtatttggatatgaatggaatcatccatccctgtactcatcctgaagacaaaccagcaccaaaaaatgaagatgaaatgatggttgcaatttttgagtacattgacagacttttcagtattgtaagaccaagaagacttctctacatggcaatagatggagtggcaccacgtgctaaaatgaaccagcagcgttcaaggaggttcagggcatcaaaagaaggaatggaagcagcagtcgagaagcagcgagtcagggaagaaatattggcaaaaggtggctttcttcctccagaagaaataaaagaaagatttgacagcaactgtattacaccaggaactgaattcatggacaatcttgctaaatgccttcgctattacatagctgatcgtttaaataatgaccctgggtggaaaaatttgacagttattttatctgatgctagtgctcctggtgaaggagaacataaaatcatggattacattagaaggcaaagagcccagcctaaccatgacccaaatactcatcattggttatgtggagcagatgctgatctcattatgcttggccttgccacacatgaaccgaactttaccattattagagaagaattcaaaccaaacaagcccaaaccatgtggnctttgtaatcaggtttgg

SEQ ID NO: 8244 - DNA, 627 bp, Homo sapiens
  misc_feature 3, 4, 7, 32, 43, 599, 611, 620: n = A,T,C or G
ttnnggngtcgccccgcgtccggtaattaatnctaaatatagnaaacagtagtaatacagctgacattaccatttaattttatattatgaaagcaaatcatctgcatgtgcatcaaggccagtcctattcaacctagctttcgaatgctgatatctggttagtatgtcattttgaagttggcacataacttttctaaaaaaaagcagtctttgttgtttgcttcttccctacggatgacttctaaaaatatatgacgggtataaaaaaattagctatattgatcatatcaacactgtaactgctgaaatggcattctaatgtttgctttttattcggacaggccacatgatgcatagagcctctttcatgtgacttgtgtctactgcttaaatctttatgctgtgttgatgatattatattgacatatgaagctgtatatgtgtatgtattttgtggagaaagggattacaagatgtatgagtataatgacttgctaacctttcaggattcagagaaagatgaagaaagaccatatctaaataatacacttcatcattttcatgtgtataaatgcttaaagtaccatctttgttgaggnggttcatgtatncagtttatncagtacc

SEQ ID NO: 8245 - DNA, 548 bp, Homo sapiens
  misc_feature 441, 482, 484, 487, 489, 490, 492, 493, 494, 501, 502, 503,510, 518, 519, 524, 527, 534, 536, 547: n = A,T,C or G
gagacttagggagtcgccccgcgtccggggacaacctggccattcagacccggggtggcccagaaaagcatgaagtaactggctgggtgctggtatctcctctaagtaaggaagatgctggagaatatgagtgccatgcatccaattcccaaggacaggcttcagcatcagcaaaaattacagtggttgatgccttacatgaaataccagtgaaaaaaggtgaaggtgccgagctataaacctccagaatattattagtctgcatggttaaaagtagtcatggataactacattacctgttcttgcctaataagtttcttttaatccaatccactaacactttagttatattcactggttttacacagagaaatacaaaataaagatcacacatcaagactatctacaaaaatttattatatatttaccgaagaaaaagcntgcctatcattaaacaaataaaatactttttatcacacacnanaananntnnnaaaaaannnggggggncccttttnnttttnaanaaaaaananccccccccccnc

SEQ ID NO: 8246 - DNA, 392 bp, Homo sapiens
gagcgcgcgtaataccgactcactatagggcgaattggagctccaccgcggtggcggccgcccgggcaggtacagcactgggctttataaagactgcactcagaaccacactgcacagtccagttttttaaaaagctgctacatgacagacaggtaatcccactgagtgagttttgagaaacaaatcaaacgaagtaaacaagaaacataaaaaccaaatagcaaatgaataaaagcctgttcttgtaacttattcaacttttgccaaattcctaccaatcacttgctttttaaaagaaatgtataatagccaaaagagaaattatgtccctgttgtacctcggccgcccgggcaggtacacagagatgcggtccagctgcaggtcgctgtc

SEQ ID NO: 8247 - DNA, 717 bp, Homo sapiens
  misc_feature 3, 4: n = A,T,C or G
tanntgttggctgattggagctccccgcggtggcggccgaggtacagaattgctttcctacaatgaactgtccttcttaaggcccctctccacccaaatgttaaagatgtatttacacaaagcaccgatcaacagtgcagtttaattcttcgtttactaaactcttggctagacattaactttaaagatactatttccccttatttaaaaggtatatgatcataacatggcacgagccaaagaaaatgttcaaggactttgccccccttccctcccccttgtaacaccttctagagttttagtgaaaagaaggaaagtcttgaagtgaaagcaattcctcacattcattttggaaaggccctaatgtcaaatggaaaataatgacatgccaagcacaaagcagtaaagatccttcccaatgcactaatgctgaatttaaaatgtagtgcttttcctagtcagtgaactgttccctggcaaaatcctaggcacagaattgactataaggattaatgcatttataatgcttccctaaatcccacagaggccgagaattcttaagagattcagacctatggacttgccttaaaatatttagtgctctgtatgtcagctgagaaaagcattctgaatcagattcattcttgtggataaaaatcaaacatgctggcacatccatactcattttcataaggagggctgatcaatattaatgtt

SEQ ID NO: 8248 - DNA, 540 bp, Homo sapiens
  misc_feature 2, 4, 413: n = A,T,C or G
gnanttttgaccgtatcgactactatagggcgaattggagctccaccgcggtggcggccgaggtactgtcctcggtaacgggccgacttaatgggcagatcaacgcgaaatccttggaaatatataacaacagcaaacacaaaaactgtagcaatgaggttcatgagattgggtaagttctgccgataaaaagcctcccgtaaagctcggactttgtccgtcctggtggccaacaaatggaacagagctatgactgcaccctcaaactcagtacctgcccgggcggccgctctagaactagtggatcccccgggctgcaggaattcgatatcaagcttatcgataccgtcgacctcgagggggggcccggtacccagcttttgttccctttagtgagggttaattgcgcgctnggcgtaatcatggtcatagctgtttcctgtgtgaaattgttatccgctcacaattccacacaacatacgagccgggagcataaagtgtaaagcctggggtgcctaatgagtgagctaactcacatta

SEQ ID NO: 8249 - DNA, 835 bp, Homo sapiens
  misc_feature 77, 97, 109, 168, 193, 234, 239, 244, 271, 276, 303, 304,312, 315, 327, 328, 336, 362, 376, 386, 395, 408, 414, 416,419, 423, 426, 439, 447, 451, 459, 460, 461, 466, 468, 470,473, 491, 501, 514, 519, 520, 521, 523, 531, 534, 543: n = A,T,C or G
  misc_feature 545, 551, 556, 557, 570, 574, 576, 577, 588, 592, 593, 595,598, 599, 600, 602, 603, 624, 626, 627, 639, 642, 660, 676,690, 691, 692, 694, 696, 700, 704, 705, 710, 716, 732, 746,750, 754, 756, 765, 781, 786, 789, 793, 794, 795, 796: n = A,T,C or G
  misc_feature 798, 799, 802, 820, 821, 825, 827, 829, 832: n = A,T,C or G
aattggagctccaccgcggtggcggccgcccgggcaggtacaagcttttttttttttttttttttttttttggctgngtaaaaaggctttatttgcnggggagcaggantttaatcaaaaaggccaaatcccatgtcatcatctgactcttcagactcctccttcttntaatctttcttctcctctgctgcanaggggcagaaccagcatcaggggctgcaaagcctggggcancatanacggntacagccccaccagcaggtacctaggncgctntaaaactagtggatcccccggggctgnnggaattcnatntcaagcttatcnntaccgtcnaccttgagggggggcccgggtcccantttttgttcccttngtgagggttnaattgcgcncttggcgtaaaanatggtnanagnctgnttnctgggggaaattntttcccgnttanaaattccnnnaaaantncnaanccggggagcaataaaagngttaaaagcntgggggtggcctnatagnnngncccaaccncanatttaattngngttggngcccnntgccccctttttncaananngggaaaacctntcgnngnccnnntnnatttaattaattcggcccaancnnccgggggaaganggnggttttgttttttggggnctttttccttttctcncataaaatgaactnnntngnctcnggannattcngtttgnggaaaaggggtttaantttccttaaagggnggtntttngntttttcccntatattttgggttttnccccnggnaaannnntnngtncaaaagggccttaaaagnnccgnancncanaat

SEQ ID NO: 8250 - DNA, 681 bp, Homo sapiens
  misc_feature 5, 6, 8, 26, 45, 47, 82, 114, 121, 126, 208, 213, 214, 226,244, 245, 263, 264, 298, 338, 358, 422, 461, 484, 497, 499,548, 553, 554, 556, 559, 560, 561, 562, 563, 564, 565, 566,567, 568, 569, 570, 571, 572, 573, 574, 575, 576, 577: n = A,T,C or G
  misc_feature 578, 579, 580, 615, 634, 652, 656, 662, 667, 669, 670, 671,676, 680: n = A,T,C or G
aaggnngntgggagccgacccacgcngcctcttgcagggcaccancntgaacgacaccgtaactatccgcactagaattttnatgaccaaccgactacttcagaggaaacaaanggccatngacgnccttcaccctgggaaggcaacagtgcctaagacagaaattcgggaaaaactagccaaaatgtacaagaccacacccggatgncatcnntggatttggatncagaactcattttgtttnntggcaagacaactggctnnggcatgatttatgactccctggattatgcaaagnaaaatgaacccaaacatagacttgcaagacatggcctgtntgagaagaaaaagacctcangaaagcaacgaaaggaacgcaagaacagaatgaagaaagtcagggggactgcaaaggccaatgntggtgctggcaaaaagggagctggagattggatcacagncgaaagagtaaaggtgctgcagnaaaggctacctgngnccattttggatttttcacaagcagattaataaactaaaaaccttcatgngaaannanaannnnnnnnnnnnnnnnnnnnnngggcggccgctagactagtctagagaaaaaacctnccacacctcccctggaccngaacataaaagaagcaantggngggggnaactngnnnattgnagcna

SEQ ID NO: 8251 - DNA, 577 bp, Homo sapiens
  misc_feature 8, 498: n = A,T,C or G
ggagctcnccgcggtggcggccgcccgggcaggtcaataaaagttcacccaccctgcactttggcccttagatcaatcctaagtagccattgccagtaggccaagtttaatcagaggacagtgcctaccagtaaatactgaatagttacaatagttatgtccatccaaccagtagcagatgaacagctaatacatcatgatgctatgctctcctaacagggtcccctcagatcctcagtgagcacataaagaaagggaggtcatatcccttacatctctaccaggtattaacacctaactactctctagccagaggcaattccctttatttccttactctcgtcgtcttctctttagcccaatctcctgacaatagttaaaacaaaaagacccccaaaatatctcttgctaaaacagagtagtccctaaactctctcatcttagactactgtcaggtacctcggccgctctagaactaggtggatccccccgggctgnagggaattcgattcaaagcttatcgatacccgtcgaactcgagggggggccccggacccaactttttggttcccttagg

SEQ ID NO: 8252 - DNA, 568 bp, Homo sapiens
  misc_feature 2, 3, 4, 6, 7, 10, 13, 14, 344, 360, 391, 393, 394, 396,415, 416, 433, 450, 455, 459, 465, 482, 487, 488, 492, 494,498, 508, 509, 520, 524, 525, 530, 532, 540, 547, 553, 554,556, 557, 558, 559, 564, 568: n = A,T,C or G
gnnnannagntcnnccctatacgactactatagggcgaattggagctccaccgcggtggcggccgcccgggcaggtacaattagaaaacctgcatctttaatacagtgagatttgtatgcatacactctggtgtcttcattttgcagcccattatattggcttaaaagccagaaaggtgctcatgcatgtaatttatactggagcaacgaatgcagtgtatgtggacgcgtgtgtgtgcactttgaaaggcagtagttttagaagaatgagaagaaaattacttcctgggcattcattaataattcaggtgatatcctgtacctcggccgctctagaactagtnggatcccccgggctgnaggaattcgatttcaagcttatcgataccgncnnancttgagggggggccccggnncccaacttttttgttcntttaagggggggggttnaattncccnttgggngaaaaaaaagggaaaanaggtnntttncncgtngggaaaaatnntttttcctttnaaanntttcnanaaaaaaanaaaaagngggggnnannnnaaagntttn

SEQ ID NO: 8253 - DNA, 439 bp, Homo sapiens
  misc_feature 1, 94, 97, 252, 400, 436: n = A,T,C or G
naattggtaataccgactcactatagggcgaattgggccctctagatgcatgctcgagcggccgccagtgtgatggatatctgcagaattcggnttngagcggccgcccgggcaggtacattattgtttatctgaaattttaattgaactaacaatcctagtttgatactcccagtcttgtcattgccagctgtgttggtagtgctgtgttgaattacggaataatgagttagaactattaaaacagccaanactccacagtcaatattagtaatttcttgctggttgaaacttgtttattatgtacctcggccgcgaccaccctaagcccgaatttcaacacactggccggccgttactagtggttccgagctccggaccaaagcttggcgtaatcatnggcattagcttgttcctgtgtgaaaatggtatcccntca

SEQ ID NO: 8254 - DNA, 639 bp, Homo sapiens
  misc_feature 49, 59, 489, 538, 611, 617, 619, 621, 626, 631, 638: n = A,T,C or G
gtcgcccacgcgtccgcccacacatagccaacatcgggcgcctggtagnaggacatggnaaaataaaatcagaagtacgctgaacgagatctactttggaaaaacaaaggatatcgtcaatgggctgaggtctgtgcagacttttgcagacaaatcaaaacaagaagctctgaagaatgacctggtggaggctttgaagagaaagcagcaatgctaaacctctgtttcatgctaaccagacacgccgtgcactcgttagattcctttcttagaaaactcgttttctgctcccttccctcgtcccttccctccccgacaggtcacataacagctgcatcattgaccgcacagcgccatctctccctgagaataaagccgatagccaccctcctccggctccgagcctgcttctgccacacctcgctctcagttctctccacatttccatagagaccgtgtggtttttgttcacccgggccccccgtcttnctccctgtccccccatttataggcataaaatccactgtctgccagcctncctttccttcccacctttttggtacatttggtgtaaaaaatgtaaaacaaaaaaattttatgaactaacctgngggggngngnaaganagaanaaaaacng

SEQ ID NO: 8255 - DNA, 628 bp, Homo sapiens
  misc_feature 3, 7, 8, 28, 35, 45, 46, 404, 423, 477, 482, 489, 499, 509,516, 517, 526, 533, 543, 548, 551, 562, 566, 571, 577, 579,582, 585, 595, 596, 598, 599, 622: n = A,T,C or G
tgntatnngccaacgcgcattaaccctncactaanggaaacaaannctggaactccaccgcggtggcggccgaggtcgcggtgcgacgaaggagtaggtggtgggatctcaccgtgggtccgattagccttttctctgccttgcttgcttgagcttcagcggaattcgaaatggctggcggtaaggctggaaaggactccggaaaggccaagacaaaggcggtttcccgctcgcagagagccggcttgcagttcccagtgggccgtattcatcgacacctaaaatctaggacgaccagtcatggacgtgtgggcgcgactgccgctgtgtacctgcccgggcggccgaggtctgaatcagcctgctgaacttttacctcagttttctagcattgaatattgtangttctgccgtggtcctcanatgcctttgatattcctctatgtgggttgatacttggcatgggaagaatgaaanttacnaaccctnaaagaatccntgccaatgtnattaaanntttttaacnccctacnagcttttggntgganttnattactttttngganaaatnggtcangntcnttnaactttgganntnnaaagggctttttaaaaaaacctntttttt

SEQ ID NO: 8256 - DNA, 490 bp, Homo sapiens
  misc_feature 2, 3, 4, 16, 227: n = A,T,C or G
gnnnagaggattgacncgctactatagggcgaattgggccctctagatgcatgctcgagcggccgccagtgtgatggatatctgcagaattcggctttcgagcggccgcccgggcaggtacatgggctggaagtggggatgtccatggcccaagagacccctccagcttccagcccctggcaacagcgggagagcaaacccagcaccagggacttggcgtgagccanggccgggaggcccccaatcaggctctggggtatcagagcaaccaagttgacgtagtgtgaaaaaatagtattcctttgataaaaaatactgtcccttggtcttctctaagtttgaaacaccctgggagcttatttttagcaaagcaattccccatacccacccaaaaattatacatacaagtttaggtaaacagcagattaaacgtaaaaacttaaccttaacttctgaaagtcctttgaatttaatctttagttactgtttt

SEQ ID NO: 8257 - DNA, 537 bp, Homo sapiens
actacttagggcgaattgggccctctagatgcatgctcgagcggccgccagtgtgatggatatctgcagaattcggcttagcgtggtcgcggccgaggtacctggcctgctggcatagttctttgacccgttcatatttgactgttcctgttggccgagtggagactggtgttctcaaacccggtatggtggtcacctttgctccagtcaacgttacaacggaagtaaaatctgtcgaaatgcaccatgaagctttgagtgaagctcttcctggggacaatgtgggcttcaatgtcaagaatgtgtctgtcaaggatgttcgtcgtggcaacgttgctggtgacagcaaaaatgacccaccaatggaagcagctggcttcactgctcaggtgattatcctgaaccatccaggccaaataagcgccggctatgcccctgtattggattgccacacggctcacattgcatgcaagttttgcttgagctgaaaggaaaagaattgatccgccgttctggtaaaaagctgggaaagatggg

SEQ ID NO: 8258 - DNA, 886 bp, Homo sapiens
  misc_feature 562, 602, 638, 654, 670, 691, 693, 776, 783, 799, 801, 803,808, 848, 850, 853, 865, 871, 880, 882: n = A,T,C or G
acgcgcgtatacgactcactatagggcgaattggagctccaccgcggtggcggcccgcccgggcaggtacctgaaactgccgccacatgcactcctccaccgctgagagttgaatagcttttcttctgcaatgggagttgggagtgatgcgtttgattctgcccacagggcctgtgccaaggcaatcagatctttatgagagcagtattttctgtgttttctttttaatttacagcctttcttattttgatatttttttaatgttgtggatgaatgccagctttcagacagagcccacttagcttgtccacatggatctcaatgccaatcctccattcttcctctccagatattttgggaagtgacaaacattctctcatcctacttagcctacctagatttctcatgacgagttaatgcatgtccgtggttgggtgcacctgtagttctgtttattggtcagtggaaatgaaaaaaaaaaaaaaaaaaaaacctcggccgctctaaaactagtggatcccccgggctgcaggaattcgatatcaagcttatcgatcccgcnacctcgagggggggcccgggacccacttttggtcccttantgagggttaattggcgcgcttggccgtaatcatggncatagctggttcctgnggaaattggtatccgnttacaattcccacaacatacnanccgggagcattaagtggtaaagccctggggtgcctaatgagtgagctaactcacattaattggggttgcgcctcactggccgntttcaantcgggaaaacctttcngncnactgnattaatgaatcggccaccccccggggaaaaggcggtttgntnttnggcccttttccntttctngttaatgantngtgg

SEQ ID NO: 8259 - DNA, 594 bp, Homo sapiens
  misc_feature 3: n = A,T,C or G
ggngaggctcgctacttagggcgaattggagctccccgcggtggcggccgcccgggcaggtacacaagtcagtccaacagttagtgttaattactaataatatatgaaaaccctgccaacacaattgctgctacatcaccaatataattattaaccactgtcggaaaaacacacataaattcaggtaagactaaaagctgtctcacaaaaagaaaaaagaaatccaatggatccactaatgctatcaaaagggacatgcaggaatgtaacatgacatttttagaaatgtgtgtttctaaaaagaaaaaaaaatacactaaaatgccagtggactataattcattcaaaacatctttagtgttccttcccaaagatcttgatctgctcagtaattgcttcacaagatctatcacagccatcttttggagcgtatggttaggctggtcctcctgtggtggtaggggcagtctttttgaagctttaagtatctggtggtacctcggccgctctagaactagtggatcccccgggctgcaggaattcgatatcaagcttatcgatacccgtcgacctcgagggggggcccggtcccag

SEQ ID NO: 8260 - DNA, 620 bp, Homo sapiens
  misc_feature 2, 3, 6, 8, 12, 17, 26, 32, 34, 39, 40, 45, 50, 55, 69, 80,82, 479, 519, 569, 572, 575, 584, 587, 590, 593, 602: n = A,T,C or G
tnnccncntggnccggncttcacctnaccttnanccaanntgtanccagnacagnacagtgccccctgnacctcaaaaangnaggtcaagctgaaatggccctgaccctgaccgtgtgtccaaaaccccagcgtgagagccagggctgcttcttgacagctgctctcctctgccctgcgtggcactgaaccaggagtaagggcttctctgttctagcctcccagggaagggaaaaagcaggggctgcgattgtcaagactcacaaccatgtggagaggccgaatcacacaggagagccacgcattggagtacctcggccgccaccgcggtggagctccaattcgccctatagtgagtcgtattacgcgcgctcactggccgtcgttttacaacgtcgtgactgggaaaaccctggcgttacccaacttaatcgccttgcagcacatccccctttcgccagctggcgtaatagcgaagangcccgcaccgatcgccctttccaacagttgcgcagcctgnatggcgaatgggacgcgccctgtagcggcgcattaagcgcggcgggtgtnggnggntacccccancgnganccnttcacttgncagcgcccttaccccccc

SEQ ID NO: 8261 - DNA, 562 bp, Homo sapiens
  misc_feature 2, 3, 13, 14, 340, 438, 471, 505, 508, 509, 510, 540, 543,545, 554, 556, 561: n = A,T,C or G
gnntgatcgcttnnaccctaatcgactactatagggcgaattggagctccccgcggtggcggccgaggtgaaaagttttattccttttgaggacaaacaattaaaccacatccaaggtcttaacttacagacagaaaccaaagtagccatttaaagcgttagatatcggatacaagacatacactggggagaatgcttcaccatctgaagctcacaccacaatggcccagtggacagctgtgcactctgcttgtgcttaagtgcctgggtgtggctgaggggaaggcgtgtctgcagaacagaagaacagctgtgtttcacaagtacctgcccgggcggncgctctagaactagtggatcccccgggcttgcaggaattcgatatcaagcttatcgataccgtcgaccttgagggggggcccggcacccagcttttgntcccttttagtgaggggttaatttgcgcgcttnggcgtaatcatgggtcataagcttgtttttcttnggnnnaaatttggtattccggttaaaaaatttccnacnanatttacgangncgggng

SEQ ID NO: 8262 - DNA, 612 bp, Homo sapiens
  misc_feature 2, 447, 503, 530, 563, 572, 575, 589, 597, 598, 605, 611: n = A,T,C or G
gnacaaagctgggtccgggccccccctcgaggtcgacggtatcgataagcttgatatcgaattcctgcagcccgggggatccactagttctagagcggccgcccgggcaggtactttgctgctttggcgtaatttttcttgaatttgtggtaataccatcccaggccattgactgcctgatgcaatcccttggaagctgctttcttcatcagctctaaggcaagccgtctgttcttttttactccttgacccttgaatagcacaatggcatagtcatagattaacgcaggatcctccgtctccagggcgcccttggcgtacctcggccgaggtacatattgcttaagtatttggctgtttttattttttaaaaggtataaacaccaaaaaaaaaattaacattgtatgtagatggaaaataagaagatgcactttctgtaactttgnctaaggatttaaattactaacttatgaactccaatttgaattgaacttaactatcnggctttcttactggtaaaaattatatngggttattttaaatgcgtacctgcccgggcggncgccaccgnggnggagctccaattcnccctatannggggccnattacng

SEQ ID NO: 8263 - DNA, 621 bp, Homo sapiens
  misc_feature 1, 2: n = A,T,C or G
nnccctcgggggcggccgaggtaccaataacaatgaagtctgtgtttgatctgatcgatactttccagtcccgaatcaaagatatggagaagcagaagaaggagggcattgtttgcaaagaggacaaaaagcagtccctggagaacttcctatccaggttccggtggaggaggaggttgctggtgatctctgctcctaacgatgaagactgggcctattcacagcagctctctgccctcagtggtcaggcgtgcaattttggtctgcgccacataaccattctgaagcttttaggcgttggagaggaagttgggggagtgttagaactgttcccaattaatgggagctctgttgttgagcgagaagacgtacctgcccgggcggccgctctagaactagtggatcccccgggctgcaggaattcgatatcaagcttatcgataccgtcgacctcgagggggggcccggtacccagcttttgttccctttagtgagggttaattgcgcgcttggcgtaatcatggtcatagctggttcctgtgtgaaattgttatccgctcacaattcccacaacataccagccgggagcataaaagtgtaaaagcctggggtgcctaatga

SEQ ID NO: 8264 - DNA, 751 bp, Homo sapiens
  misc_feature 1, 2, 3, 5, 6, 8, 18, 19, 22, 204, 570, 586, 592, 637, 649,655, 661, 672, 696, 733, 750: n = A,T,C or G
nnngnncngatccccgcnnccnactggttggtaacaaatcagatttagaagataaaagacaggtttctgtagaagaggcaaaaaacagagctgagcagtggaatgttaactacgtggaaacatctgctaaaacacgagctaatgttgacaaggtattttttgatttaatgagagaaattcgagcgagaaagatggaagacagcnaagaaaaagaatggaaaaaagaagaggaaaagtttagccaagagaatcagagaaagatgctgcattttataatcaaagcccaaactcctttcttatcttgaccatactaataaatataatttataagcattgccattgaaggcttaattgactgaaattactttaacattttggaaattgttgtatatcactaaaagcatgaattgggaactgcaatgaaagtcaaatttactttaaaaagaaattaatatggcttcaccaagaagcaaagttcaacttatttcataattgcctacatttatcatggtcctgaatgtagccgtgtaagcttgtgtttcttgggcagtctttcttgaaattgaagangtgaaatgggggtggnggagtnggaaaggaaaggcttctctctggggttattataaagcttaaattntatatcattttnaaaagncttggnctctactggcntgaaaatgacattggggaacatgntgttaactcccttttttaccctattatgccaaatttnaaaaaggttttggctgnt

SEQ ID NO: 8265 - DNA, 606 bp, Homo sapiens
  misc_feature 15, 530, 606: n = A,T,C or G
ccacgcgtccgctgntggggtcaaatgaaggtgaattcaaggctgaaggaaatagcaaattcacctacacagttctggaggatggttgcacgaaacacactggggaatggagcaaaacagtctttgaatatcgaacacgcaaggctgtgagactacctattgtagatattgcaccctatgacattggtggtcctgatcaagaatttggtgtggacgttggccctgtttgctttttataaaccaaactctatctgaaatcccaacaaaaaaaatttaactccatatgtgttcctcttgttctaatcttgtcaaccagtgcaagtgaccgacaaaattccagttatttatttccaaaatgtttggaaacagtataatttgacaaagaaaaatgatacttctcttttttttgctgttccaccaaatacaattcaaatgctttttgttttatttttttaccaattccaatttcaaaatgtctcaatggtgctataataaataaacttcaacactctttatgataacaacactgngttatattctttgaatcctagcccatctgcagagcaatgactgtgctcaccagtaaaagatacctttctttctgan

SEQ ID NO: 8266 - DNA, 642 bp, Homo sapiens
  misc_feature 442, 446, 447, 450, 451, 452, 454, 457, 460, 462, 464, 465,466, 467, 469, 470, 471, 472, 473, 474, 475, 476, 480, 482,483, 484, 485, 486, 487, 488, 489, 490, 491, 492, 493, 494,496, 497, 498, 499, 500, 501, 502, 503, 504, 505, 506: n = A,T,C or G
  misc_feature 507, 509, 510, 511, 512, 513, 514, 515, 516, 517, 518, 520,521, 522, 523, 524, 525, 526, 527, 528, 529, 530, 531, 532,533, 534, 535, 536, 537, 538, 539, 540, 541, 542, 543, 544,545, 546, 547, 548, 549, 550, 551, 552, 553, 554, 555: n = A,T,C or G
  misc_feature 556, 557, 558, 559, 560, 561, 562, 563, 564, 565, 566, 567,568, 569, 570, 571, 572, 573, 574, 575, 576, 577, 578, 579,580, 581, 582, 583, 584, 585, 586, 587, 588, 589, 590, 591,592, 593, 594, 595, 596, 597, 598, 599, 600, 601, 602: n = A,T,C or G
  misc_feature 603, 604, 605, 606, 607, 608, 609, 610, 611, 612, 613, 614,615, 616, 617, 618, 619, 620, 621, 622, 623, 624, 625, 626,627, 628, 629, 630, 631, 632, 633, 634, 635, 636, 637, 638,639, 640, 641, 642: n = A,T,C or G
actactatagggcgaattggagctccaccgcggtggcggccgaggtacaatctcagctcactgcaacctccgcctcccaggttcaagtgattctcctgactcagcctcccgagtagctgggattacaggcatgcaccaccatgcctggctaatttttgtattttttgtagagacagggtttcaccatgttgcccaggctaatcttgagttcctgagctcaagtgatccaaccacatcttggcctcccaaggtgctgggattccaggtgtgagccaccgcccccagccaacaataatttttaaggagaaataccaaatccagaatactgattacctctggggaagaaaacaaaagaacagaatgagagagagatacacagggaacttcaactgtttgtctaatattttactttctaagctaggtggagggtaccctgcccggncggnnggnnntnaanacntnannnngnnnnnnnngccntnnnnnnnnnnnnngnnnnnnnnnnnncnnnnnnnnnngnnnnnnnnnnnnnnnnnnnnnnnnnnnnnnnnnnnnnnnnnnnnnnnnnnnnnnnnnnnnnnnnnnnnnnnnnnnnnnnnnnnnnnnnnnnnnnnnnnnnnnnnnnnnnnnnnnnnnnnnnnn

SEQ ID NO: 8267 - DNA, 639 bp, Homo sapiens
  misc_feature 2, 3, 564: n = A,T,C or G
gnngttttgaaccgagttgccccgcgtccgggactgtttaatgtctttcaacttacccgtaatcctcttgtagggatcacatctttctttatgatattgtatttctctacctctaacagtaaaaattccattcaacccttaaagctcacttcaaattcttctttgagaagtttttcctttctccgcaaccagatgtacatatttgaactctctttgtacttggagggcacttctttcgtggtagttcttttatttttattaatctctgtatccttagatagtcctccaacaaccaaaggttgggactctgtcttacatatctgggtgcccctcatagtgcagtaataagtaagttgattatatacgagctatgtaacttatattttttaatggttggatatcactgagtttttttttttaaagaattttttttattgaggtaaacttcacataacataaaattaactattttaaagtgagaaggttcagtgccacttagtattgttacaatggttgcataaccccaccctttatttaaaggtccaaaaaaaaagttcttctttnaaagggaaaccccatcccattaagcagatactcttcattcctttctttcttccagcccccagcaacccccaatct

SEQ ID NO: 8268 - DNA, 638 bp, Homo sapiens
  misc_feature 288, 290, 291, 330, 342, 361, 368, 373, 379, 389, 393, 394,400, 402, 403, 405, 411, 414, 415, 416, 422, 423, 425, 427,430, 433, 434, 437, 438, 439, 440, 442, 446, 449, 450, 451,455, 459, 462, 463, 466, 469, 473, 474, 476, 477, 478: n = A,T,C or G
  misc_feature 481, 482, 483, 490, 491, 492, 495, 497, 498, 499, 500, 502,503, 505, 507, 508, 512, 514, 520, 530, 535, 537, 539, 540,541, 543, 544, 545, 547, 549, 550, 556, 557, 559, 563, 564,565, 569, 570, 572, 573, 574, 576, 580, 581, 582, 583: n = A,T,C or G
  misc_feature 585, 589, 593, 594, 595, 596, 597, 601, 605, 609, 610, 614,618, 621, 625, 628, 629, 632, 634, 635, 638: n = A,T,C or G
ggagctccaccgcggtggcggccgcccgggcaggtactactttgagggcattaaacagacctttggctatggcgcacgcttattttagggccagcggcaggggactccagcctgctggacacttcagtccagctctctcctgactggggcttgcgactcacaggattgcatcgtcccagctgctaacttggggccggggcccctcccttccacatataccttgggtttgtgcatgttttctgctgggtgggttcagagggcaggggactccagcctgctggacacttnannccagctctctcctgactggggcttgcgactcacaggatngcatcgacccanctgctaacttggggccggngcccctnccttncacatntaccttgggnatgnnccatgnanncnactggnggnnnatatanncnanaangtnntannnntngtcntgnnntgangaanccnnaanaantttnnannntcnnnttcgttnnnacnannnntnntnanntttngntctgtntcaggcgggnaacanantnnnannncnannacaccnncnctcnnntcanncnnntntaannnntnctgncctnnnnnaaangctnttanntcanttantgntttntcnngtncnnatn

SEQ ID NO: 8269 - DNA, 590 bp, Homo sapiens
  misc_feature 27, 32, 49: n = A,T,C or G
ccgcgtccgcagtctcagtcccacggnacagnaatgggcgaggcatggnattctgggttgcagtaccgttctgattagaaataggaagtctccccacccccgccctggccaagaacgtgcaataaattggaagtttgccccggggcagcaagaatttatgctgccattgaaaagcaggtaccagtgccccttttcagacagtttttgattcgctctagacttttttttttttaatagggaaaaaatttgataattttcttttttctacatgcacttaagactaaaacacaggtttggattaattttatttgcttcctttttccgcttttcttcccgcagagcctgatgggagaatgtccagggcagggaaaccacattttttgtaggtgataactcaatgaaaattggtgcttattttttacacttctctcttgtggctctcttgtggtgctatctatctgttttaaggtctccttgaaggcgcactggggaccctggccatgcctcgttctccctgctttctttatcctgttattgcctccacagtctgttgccaaggactctaagatcaatgcacgtcactttccttt

SEQ ID NO: 8270 - DNA, 535 bp, Homo sapiens
  misc_feature 2, 3, 7, 8, 10, 405, 447: n = A,T,C or G
gnnaagnncnctacttagggcgaattggagctccccgcggtggcggccgaggtactctgaaggtaggatgtgcagctttttcttaggcaggatagatgtaacatagatgactgcataaaaaagaggcagaaaggcaggaagcccattttttttttaacacttctccatgtgtctctgcctcaccataatgctgtttattcaattattcatatattccgattgtgttttcaacacaggtctacacagcaccagctacaaggcaaggtcaatcgtgtaaaaaataaaactggataatggaggccttgcagtaactaaattagccaagttcagagtatgtggttcaacaatttttatatgtgccaatcattgatatacttattaaaccttggatgtcacttctactgngtagacatttttatacaggtccagaacaggaaatagggaagngatgatctgtgtaaattcaaaaaaaacaaaattcctcatttggaaagtaaaagaggatagatccttgggggattctatctgccaattt

SEQ ID NO: 8271 - DNA, 494 bp, Homo sapiens
  misc_feature 2, 3, 4, 5, 6, 18, 21, 23, 30: n = A,T,C or G
gnnnnnaagaacgcgcgntcntngacttantttgttggctgattggagctccaccgcggtggcggccgcccgggcaggtaccgtcgcccggctctccgccgctctcccgggggttcggggcacttgggtcccacagtctggtcctgcttcaccttcccctgacctgagtagtcgccatggcacaggttctcagaggcactgtgactgacttccctggatttgatgagcgggctgatgcagaaactcttcggaaggctatgaaaggcttgggcacagatgaggagagcatcctgactctgttgacatcccgaagtaatgctcagcgccaggaaatctctgcagcttttaagactctgtttggcagggatcttctggatgacctgaaatcagaactaactggaaaatttgaaaaattaattgtggctctgatgaaaccctctcggctttatgatgcttatgaactgaaacatgccttgaagggagctggaacaaat

SEQ ID NO: 8272 - DNA, 660 bp, Homo sapiens
  misc_feature 632: n = A,T,C or G
tatagggcgaattggagctccaccgcggtggcggccgcccgggcaggtaccgggtcggagattatgtctactttgagaattcctccagcaacccatacctaataagaaggatagaagaactcaacaagactgcaagtggcaacgtggaagcaaaagtagtatgcttttatagacgacgtgatatttccaacacacttataatgctcgcagataagcatactaaagaaattgaggaagaatctgaaacaacagttgaggctgacttgaccgataagcagaaacatcagttgaaacatagggaactctttttgtcacgccagtatgaatctctgcccgcaacacatatcaggggaaagtgcagtgttgcccttctgaatgagacagaatcagtattgtcatatcttgataaggaggataccttcttctactcattggtctatgacccctcattgaaaacactattagctgacaaaggtgaaatcagagtgggacctagatatcaagcagacattccagaaatgctgttagaaggagaatcagatgagagggaacaatcaaaattggaagtaaagtttgggatccaaatagcccacttacggatcgacagattgaccagtttttagtttgtagcncgtgctggtgggacattcgccagaacct

SEQ ID NO: 8273 - DNA, 410 bp, Homo sapiens
gtatacgactcactatagggcgaattgggccctctagatgcatgctcgagcggccgccagtgtgatggatatctgcagaattcggcttcgagcggccgcccgggcaggtacaaagctataaaggaacgtttttagagaaagcactgaagacacacattttgctgacctaaaagattttaaaatgaattagaataatttacatcatataaagaggtatttagtctttaagtggagaaagttgctagtcacatgtaagaaaaacaagtattatgggccttcctaagacaaatggaataaattccatcacttttggcttttttataaaccagacttctaacaaataaccatattaattttccagtaatcaaacatatcctaaaagaggaaaaagagaatgtctacttttaaat

SEQ ID NO: 8274 - DNA, 549 bp, Homo sapiens
  misc_feature 3, 5, 9, 12, 15: n = A,T,C or G
ggngnttcnggngcnccccgcgtccggcccggcctccagttgcttttgaagagggtaaagtcaagtttctatttctagaaaacattttttagaaatttgttgcgatgtttgtacaatttacctcataagagaaccacacccttctccaaaagtgctggtactgcatcagtgagatgagtagggtttttgtttgggattgtaagactattaagatcctagtaagtcagtggtagtttactgtgatgtgagcattgtagattcccccgttgtcactaatcacacaaataacaattttgagaagtaggctataaaacaaaaaaaggttgctgttttctatttttaaataaaccaaaaaaaaacagaaaagatgtgaattttccccagttatgtgggaaaggtaaagcacaccaaataaaagcccacagcagcttcatctttacgatactcagtgcatatgtgaaagagaatgatgccattaactgaaatacctcattgaatattatctactactggtaaaatgcagaagacagtgtttatgtgtttgggttg

SEQ ID NO: 8275 - DNA, 593 bp, Homo sapiens
  misc_feature 23, 25, 113, 138, 167: n = A,T,C or G
gactcactatagggcgaattggnanctccaccgcggtggcggccgcccgggcaggtacatgtacattataaaaaaaaagttcaactagtatgaaagggttataaagtaacagnaaaaaaaaaaaaaaaaaaaaaaaangaattaatcacagtggaagcttgcacggngggccacggccgctctagaactagtggatcccccgggctgcaggaattcgatatcaagcttatcgataccgtcgacctcgagggggggcccggtacccagcttttgttccctttagtgagggttaattgcgcgcttggcgtaatcatggtcatagctgtttcctgtgtgaaattgttatccgctcacaattccacacaacatacgagccgggagcataaagtgtaaagcctggggtgcctaatgagtgagctaactcacattaattgcgttgcgctcactgcccgctttccagtcgggaaacctgtcgtgccagctgcattaatgaatcggccaacgcgcggggagaggcggtttgcgtattgggcgctcttccgcttcctcgctcactgactcgctgcgctcggtcgttcggctgcggcgagcgg

SEQ ID NO: 8276 - DNA, 489 bp, Homo sapiens
  misc_feature 1, 2, 7: n = A,T,C or G
nncgttncccagcttgtccgagctcggatccctagtaacggccgccagtgtgctggaatttcgagcggccgcccgggcaggtacatttcgagcagcggaagaaggaggaagaggagctggttgccttgaaggagcgcattgagcggcgccagtcagagagagccgagcaacagcgcttcagaactgagaaggaacgcgaacgtcaggctaagctggcggaggagaagatgaggaaggaagaggaagaggccaagaagcgggcagaggatgatgccaagaaaaagaaggtgctgtccaacatgggggcccattttggcggctacctggtcaaggcagaacagaagcgtggtaagcggcagacggggcgggagatgaaggtgcgcatcctctccgagcgtaagaagcctctggacattgactacatgggggaggaacagctccgggagaaagcccaggagctgtcggactggatccaccagctggagtctg

SEQ ID NO: 8277 - DNA, 886 bp, Homo sapiens
  misc_feature 2, 7, 8, 11, 13, 15, 16, 19, 23, 30, 624, 727, 745, 757,765, 798, 805, 812, 813, 819, 828, 832, 836, 837, 838, 839,840, 841, 842, 843, 844, 845, 846, 847, 848, 850, 854, 855,856, 857, 858, 859, 860, 861, 862, 863, 864, 865, 866: n = A,T,C or G
  misc_feature 867, 868, 869, 870, 871, 872, 873, 874, 875, 876, 877, 878,879, 880, 881, 882, 883, 884, 885, 886: n = A,T,C or G
gngatcnnatncnanncantatntggcgantggggccctctagatgcatgctcgagcggccgccagtgtgatggatatctgcagaattcgccctttcgagcggccgcccgggcaggtacctgaggatcgataaaagaggcaaagtaaaagggacccaagagatgaagaataattacaatatcatggaaatcaggacagtggcagttggaattgtggcaatcaaaggggtggaaagtgaattctatcttgcaatgaacaaggaaggaaaactctatgcaaagaaagaatgcaatgaagattgtaacttcaaagaactaattctggaaaaccattacaacacatatgcatcagctaaatggacacacaacggaggggaaatgtttgttgccttaaatcaaaaggggattcctgtaagaggaaaaaaaacgaagaaagaacaaaaaacagcccactttcttcctatggcaataacttaattgcatatggtatataaagaaccagttccagcagggagatttctttaagtggactgttttctttcttctcaaaattttctttccttttattttttagtaatcaagaaaggctggaaaactactgaaaaactgatcaagctggacttgngcatttatgtttgttttaagacacttgcttaaagaaagatttgaaaagttttcccaaaaatcagatttagtaactaaaggttgtaaaaaattgtaaaactggntgtcctcggccgcgaacncccctaaggcgnattccaanccacttggcgggcggtacttagtgggattcccngctcggnacccaanncttggngtaataatnggcnttannnnnnnnnnnnncngcgnnnnnnnnnnnnnnnnnnnnnnnnnnnnnnnnn

SEQ ID NO: 8278 - DNA, 363 bp, Homo sapiens
  misc_feature 7, 30, 33, 168, 169, 186, 192, 193, 212, 217, 229, 232, 236,238, 247, 248, 251, 255, 280, 281, 283, 296, 298, 299, 300,301, 303, 304, 305, 307, 315, 316, 317, 323, 328, 335, 339,340, 342, 344, 345, 346, 347, 357: n = A,T,C or G
gcgaatnatacgtacatcaccagagggccnganaggaaactccaccgcggtggcggccgaggtacttttttttttttttttttttttttttttttttttttttttttttttttttttttttttttttttttttttttttttttttttttttttttttttttttggggnnaaaaaaaaaaaaaaaangggggnncccccccgggggggggggnccccnaaaaaaaaaaanccncccntnaaaaaaaannggngggngggggggcccccccccccccccccnntnaaaaaaaaaaaanannnncnnncncccccccnnnaaaaanaaaanaaaaatntttnncncnnnnaaaaaaaaanggggcg

SEQ ID NO: 8279 - DNA, 627 bp, Homo sapiens
  misc_feature 2, 3, 8, 9, 11, 576, 611: n = A,T,C or G
gnnttganncncattacttagggcgaattgggccctctagatgcatgctcgagcggccgccagtgtgatggatatctgcagaattcggcttagcgtggtcgcggccgaggtactctagtcggttaatttacactttatttttttaaaaagttgatttaaaaaagaaacaacacaagtttagaatccataaaatgtcagcaatgctgatgtgcactggactgaaacatcttgatcatcttctgatagaagtaatattccatacaaaaagattcttagattccattttttgcttcattattgtttgtggcttgctttctttgagcaataaaggggtacctgcccgggcggccgctcgaaagccgaattccagcacactggcggccgttactagtggatccgagctcggtaccaagcttggcgtaatcatggtcatagctgtttcctgtgtgaaattgttatccgctcacaattccacacaacatacgagccggaagcataaagtgtaaagcctgggggtgcctaatgagtgagctaactcacattattgcgttgcgctcactgcccgcttttcagtcnggaacctgtcgtgccagctgcattaatgaatcggncaacgcgcggggagag

SEQ ID NO: 8280 - DNA, 546 bp, Homo sapiens
  misc_feature 9: n = A,T,C or G
gcccgaacnctacttagggcgaattggagctccccgcggtggcggccgcccgggcaggtactaaacacagatgggcacactctagatatagaacacgtttcttgctgtggttgtgtgacaaatggctagaattttaggaggctctgggactgcacactgtatatgcaatccatctcagactttgggatgggaatccatttcatcatccagcatggcgaaacttggttcattcgccccaatgtgagtccttcctgggtaaaattaaaggcagaccggttgggtgctaaggatccctggtgtggagaggccattccgttgagcagctgactgtgaaatcaataccaaagggatgtgggtcctggcgttgggaattctttgacaacttcttgtccttccttagccatggctgtatccccggaggtctttccggctgtgttcttgggcctggggggtcccgacaagcacagtcaccttgtaggtcacaggacatagggaatggggtgaccttttttggtcttcactgtgggaggtgcagcaatccccacc

SEQ ID NO: 8281 - DNA, 647 bp, Homo sapiens
  misc_feature 7, 11, 23, 28, 32, 33, 53, 128, 179, 217, 359, 427, 490,526, 548, 561, 571, 583, 618, 628, 639, 646, 647: n = A,T,C or G
ggaggtngttnaagttatccctnttaancccnncggcctttcaagtgctgggnttacacggcatgagccccgtgcccggccaaagtcagctttcaaaatccaagccataattggtgaggggggagttncagaattacatagaaaaattaatatttgaaaaaataattctgaaattccgnatttaaaaacagatgtgctgcttctgggtgtaggtagnaaaagtataggaaaagaactgtttccttagaagcggactgtggaagggctatgtagaatgtcaaagggcaacaagagcctgtgtttttaatgtcatcctgtactcggcacaaatcaaaggccaatacaagtctgaaaagcanaaataaatatttttccaggtttttgcttgggcacatactaactgctttgggcattctaatctggtctncaaacaccaaagacccatttcgagcctgctattagcctgctgctgactctatcacttggagcnataatgtggggttatggaggtggaatcttgaatatngacgtcaaaaataaaaaccttnagttaaagggatngatttagatngaaaaattcacnaataaataccgtatgaaaacacatggaaatggtgnctttgccaanatgaatcattnttacatnn

SEQ ID NO: 8282 - DNA, 444 bp, Homo sapiens
  misc_feature 2, 3, 13, 14, 95, 169, 179, 272, 273, 282, 287, 349, 350,359, 364, 387, 392, 393, 398, 400, 401, 405, 406, 412, 418,419, 420, 421, 422, 423, 424, 426, 428, 433, 435, 437, 438,439, 440: n = A,T,C or G
gnnatcttggggnnccccgcgtccgtatgttttcttagaacatgtggaagaaggaaaaagacaaaaaaggaaatctggattctgaggaccacgtntcacccagggtgacatcaggaatggtgctagcctctgcaacacgacacccagtctgaagagctctatacaggtnctaagactancaggggacaccaagactctgcacaaccagattgcttgtgcagagggccacaataagtgtatgttttatattttattgtattatttattcaaanntaaataatncactnacatgtttccacacccaaaaaaaaaagcgccctaaaaaaaaaaaaaaaaaattggggggggnnctttttttnggggnaaaaaaaaaaccccccctttttnccccnngaaangnnaaannaaaaangccccnnnnnnngntntttangngnnnncccc

SEQ ID NO: 8283 - DNA, 633 bp, Homo sapiens
  misc_feature 77, 90, 542, 560, 569, 571, 575, 576, 584, 589, 599, 601,602, 603, 611, 619, 627, 628, 629, 632: n = A,T,C or G
ggagctccaccgcggtggcggccgaggtgtagggtgttatccctgtgacattgtctctttagtttgctctttcaagnagatacttacagnatgttgagatggctgccctgcatttccagctaatctcttctgctctaaatatttaaaaacagttcttctcaaacattttcattcagatagctttctgaaagttccctatccctctttaccataattttttaaatgtagccacattgtaatagtaaacttcatatataatgagtgcttcatatttttgttatgggaaagcaatatattatgcagccagtctgtagaaacattcagatccctcttcctttactcaaatacagtttcaaaaggaagactcatgagaaatttcataaaatacaagtttttagatgtttatgctttgcctttctttttaaaggtgttttcctgctttgtagtctctaactctgaaatttaaaatatgtaaactaaagtggttttatttgtgcttaacccaatttaaactcaatgtaaaatgttatatatgcatcagnacctgcccgggcggccgntctagaatngngganncccccggnctgcnggaattcganannnagccttancgataccntagcccannnggng

SEQ ID NO: 8284 - DNA, 919 bp, Homo sapiens
  misc_feature 8, 641, 652, 671, 727, 731, 752, 755, 765, 772, 775, 791,813, 842, 846, 857, 868, 871, 879, 884, 906, 907, 911, 919: n = A,T,C or G
gaggtatncgactcctatagggcgaattgggccctctagatgcatgctcgagcggccgccagtgtgatggatatctgcagaattcgccctttcgagcggcccgcccgggcaggtactgctatacatgcaaaactcttagcacctgaatttgtaaacatttacacgtatccgtgtattccagaatatgaagaaaaggaccatgaagttgcactcatttttcctggacctcagtctatctcaataaaagatatttcttttcatctgcaaaaaaggattcaaaataatgttagaggcaaaaatgatgaccctgacaagccatcttttaaacgcaaaagaactgaagaacaagagttctgtgatttgaatgacagcaagtgcaaaggcacaacactgaaaaaaattatatttatagatagcacctggaaccaaacaaacaaaatattcactgatgagcgacttcaagggttgttacaagttgagttgaaaacaagaaaaacttgcttttggcgccatcaaaaaggaaagccagatactttcctttctacaatttgaagccatttactactttctggtagactaccatactgatatattaaaaggagaaatacagagggcaatatgacaatcttttatttttctanaggtttatggnccctcgggccgggaacacncttaagggcgaatttccagcacactggcggccggtacttagtggaatccgagcttngganccaagcctgggcgtaatcatnggncatagcttgnttcctgnggngaaattggttttccgntcacaattcccaccacataccnaacccggaagcattaaagtgtaaaacccngggngccgaatgggngggccaactcncanttaattgngttgngctcacttgccccttttccagnngggnaaactggn

SEQ ID NO: 8285 - DNA, 655 bp, Homo sapiens
  misc_feature 3, 4, 11, 12, 17, 24, 34, 37, 39, 43, 49, 56, 78, 80, 126: n = A,T,C or G
ggnngaagggnnaatancccactnccatacactnctnancctncttgtncctatgncaagggggtcagggggccctgnanagcatgtgtgaagttcacagttcagtggtacaagctcactaaaagnattgagacccctcctaggactatagaacccttcctctccctccatattttatcaccacattactaaaggcctgtttgcagcagttcctcttaacttgtgtgtcatgtccagttatcaagaaaaaaattacaagacatattaaaggcaagaaaaaacagtttgacgagaaagagcaagtatcagaaccagagtcagatatggcagggatgttagaattatacaccaagtgggatttatcccaggtattcaaggctggttcagcattcattcaaaagtcaattaaggtagtccatcatcacatcagcaggctaaagaagaaaaatcatgatcatagcagtagatgcagaaaaagcatttgacaaaatctaacacccacttatgatctcagcaaactaggaagagaggggaacatcctcaacttgataaagaatatctacaaaaacacctatagctaacatcacacttgatgaaaaacttaaaagctatcccactaagatgaggaacaaggcatgctctcactactgctttc

SEQ ID NO: 8286 - DNA, 556 bp, Homo sapiens
  misc_feature 2, 3, 4, 13, 18, 26, 227, 331, 351, 353, 358, 359, 366, 369,388, 404, 409, 412, 433, 453, 464, 473, 482, 489, 495, 499,500, 506, 516, 523, 524, 532, 541, 546, 552, 555: n = A,T,C or G
gnnnagtttactncgggngtcgaccncgcgtccggctggggctcttcatcttcagcatcgtcttcttgcacatgaaggagaaggagaagtccgactgaggggctagagccctctccgcacagcgtggagacggggcagggaggggggttattaggattggtggttttgttttgctttgtttaaagccgtgggaaaatggcacaactttacctctgtgggagatgcancactgagagccaaggggtgggagttgggataatttttatataaaagaagtttttccactttgaattgctaaaagtggcatttttcctatgtgcagtcactcctntcatttctaaaatagggacntngccanncactggnggntcatgcctgtaatcccagnactttgtgaggccgangcatngcngctcacgaggtcaggagatcnagactatccttgctaacacngtaaaaccctntctctactnaaagtactnaaaattntcttcncgtnntggtgngcacctgtanttcccanncttcttcngaggctttngcaanaataanagnc

SEQ ID NO: 8287 - DNA, 664 bp, Homo sapiens
  misc_feature 2, 6, 27, 29, 596, 651: n = A,T,C or G
gntttngccagcttggtaccgagcttngntccctagtaacggccgccagtgtgctggaattcggcttagcgtggtcgcggccgaggtaccaatttactgtattagtccgttttcacgctgctgataaagacatacccgagactgggaagaaaaagaggtttacttggacttacagttccacatggctggggaggcctcagaatcatggcgggaggtgaaaggcacttcttacatggcagcaagagaaaatgaggaagaagcaaaagtggaaacccctgataagccatcagatcttgtgaaacttattcactatcacaagaatagcatgggaaagactggcccccatgattcaattacctccccttgggtctctcccacaacacgtgggaattctggtagatacaatttcaagttgagatttgggtggggacatagccaaaccatatcattctacccctggcccctccaaatctcatgtcctcactattcaaaaccaatcatgccttcctaacagtcccccaaagtcttaactcttttcagcattaacgcaaaaatccacagtccaaagtctcatctgagacaaggcaagtcccttncacctatgagcctgtaaaatcaaaagcaagctagttactttctagataccaacangggtacctgcccg

SEQ ID NO: 8288 - DNA, 657 bp, Homo sapiens
  misc_feature 505, 573, 581, 582, 585, 586, 590, 596, 597, 621, 626, 636,637, 638, 639, 640, 641, 642, 645, 647, 657: n = A,T,C or G
ggcgaattggagctccaccgcggtggcggccgaggtacaggagcttgaagccgaaagggtgaggatcacttctacagagaaggagcctcggtccacaaagtcaccattaaatatataggggttggtctccgagggtaaaccgttgagctcgaatatgttgaggaggtcatagaactggccatgggtgtccccacatactgtaatcttctctgtctctttgagtgtggtttccacgagcgtgctcagcttggagaggacctctttgacctgtactgagttttattatctccaataataatggtctggaactcaggaggatcatagtaaaacctccagtgaaggttaaaattcaggcctgttgattttttcttcgttttatgttttccagcaaggatatcataaggaccaactaattgaagtccaaggcttgcagaaagtgaatcagatggcttttcaggatcaagttcttcacagaacttccagaagtgatagaaatcttcaggtnaagaaagcttataatgatttttctacttcttttcgaaggtcactggagacatctgcttcacaagaatntacttttnnttnncatnagatgnntttttacactgaggcccctccccnccggncctgcccttnnnnnnnccnancctgcccagn

SEQ ID NO: 8289 - DNA, 609 bp, Homo sapiens
  misc_feature 3, 8, 240, 412, 459, 513: n = A,T,C or G
ctnctaanggaataagcttgcggccgcggtttttttttttttttttttctgtgcatatttatttattatccacaaagatggaggtgcggaaaagaagagggagacaggagggaaccgtactctcccactggaactctggggcccactgaggcaccattattggggatttcagggtggctgggcactgcaaactgctccctcctctgtggtccatgaaagagccccacacgcctgcttcanacgtgtccacgcacaccagtcctcacagacacacacacacatgcatggaggcaataaatatgttccgtaccagactgcccccagcctgacgcttcagggggccccctccaaaagggaggggtttaagtgctcaatttttttcggggggggggggcaaggggggggcaagganatggggattggaaaggccaaactctgttatctccatttgctgactanaggccaatcgtggggtcttccccgggaaagggtaggggaaaccagctgtttctntataagccccaggctacccctgtgtccctcgtgccgaattcttggcctcgagggccaaattccctatagtgagtcgtattaaattcgtaatcatgc

SEQ ID NO: 8290 - DNA, 588 bp, Homo sapiens
  misc_feature 16, 23, 467, 532, 535, 546, 553, 556, 559, 569, 574, 578,583, 584, 585: n = A,T,C or G
ggggggttggaattgngtcaccnggcgtccgccccgcgtccgcccacgcgtccggccggctggagtctgggatgcagaacatgagtattcatacgaagaccaccagcggctatgcaggtggtctgagctcggcctatgggggcctcacaagccccggcctcagctacagcctgggctccagctttggctctggcgcgggctccagctccttcagccgcaccagctcctccagggccgtggttgtgaagaagatcgagacacgtgatgggaagctggtgtctgagtcctctgacgtcctgcccaagtgaacagctgcggcagcccctcccagcctacccctcctgcgctgccccagagcctgggaaggaggccgctatgcagggtagcactgggaacaggagacccacctgaggctcaccctagccctcacccacctggggagtttactacctggggaccccccttgnccatgccttcaagcttccaaaaacaaattcaattgcttttttttttttggtcccaaaataaaaanctnagcttagcttnttgccangtnaanaaaatttttnttaanagcnagttnnnttt

SEQ ID NO: 8291 - DNA, 674 bp, Homo sapiens
  misc_feature 4, 6, 237, 258, 266, 288, 289, 293, 295, 302, 318, 327, 337,361, 366, 367, 376, 381, 382, 384, 389, 390, 396, 399, 400,404, 405, 411, 417, 423, 426, 428, 430, 432, 433, 435, 438,447, 448, 449, 451, 452, 455, 457, 462, 463, 466: n = A,T,C or G
  misc_feature 468, 469, 471, 474, 480, 481, 489, 490, 491, 493, 497, 498,510, 518, 520, 522, 523, 525, 526, 527, 537, 538, 540, 545,546, 549, 550, 553, 554, 562, 565, 570, 571, 572, 575, 576,578, 581, 583, 587, 590, 591, 594, 595, 600, 602, 605: n = A,T,C or G
  misc_feature 607, 608, 609, 611, 614, 616, 618, 620, 628, 632, 636, 637,638, 647, 650, 653, 654, 662, 664, 669, 671, 672, 674: n = A,T,C or G
actncnatagggcgaattggagctccaccgcggtggcggccgcccgggcaggttttttttttttttttttttttttttttttttaacaggaggaaaaaaaatttaataatatatgtttgcacaggagttccacgaaatatgagactccaagaagggtcagatgattgacactcatacaccatcgtgagctatcgaaaagaacggcagtttgggagttctgcagggagttgaccacanaagtgggagagtgaagggaanaagtgtgncgtgaataaagcttggctggtnntcananaaaaggncttgcgagtggccagntgcgggggntcactcccgnacgtccccacactttgggaggccnagggnngcgggctcntgagnncnaggannaattgnccnnactnnccaacntatacnaaaccnccntncncnncnganaattccaannncnnaancntgganncgnannanagntcacannaatacccnnnanactnntgtaggttaatncctgactnananncnnnacaaacaaanngncaatnnaannctnnttgcgtcnctntcctnnncanntnaancntacnttnnaannttatnanttnannncnctntntntnttatcatntacntcannntcaatccgnccnccnncgatctcntnccatntnncn

SEQ ID NO: 8292 - DNA, 607 bp, Homo sapiens
  misc_feature 4, 24, 34, 47, 54, 64, 86, 96, 463, 464, 466, 481, 482, 490,492, 493, 494, 495, 496, 497, 499, 500, 502, 504, 507, 534,536: n = A,T,C or G
tcgnccagcgtccggcgagtgggnagcaccaggntctcgggctcggnaacgagnactgcacggnattgttttaagaaaatggcagnacaaaccagnacatgggggaaatcgccagcttcgataaggccaagctgaagaaaacggagacgcaggagaagaacaccctgccgaccaaagagaccattgagcaggagaagcggagtgaaatttcctaagatcctggaggatttcctacccccgtcctcttcgagaccccagtcgtgatgtggaggaagagccacctgcaagatggacacgagccacaagctgcactgtgaacctgggcactccgcgccgatgccaccggcctgtgggtctctgaagggacccccccccaatcggactgccaaattctccggtttgccccgggatattatagaaaattatttgtatgaataatgaaaataaaacacacctcgtggcnnanaaaaaaaaaaaaaannaaaaaaanannnnnnannananaanaaaagggcggccgctagactagtctananaaaaaacctcccacacctccccctgaacctgaaacataaaatgaatgcaattgttgttgttaacttgttat

SEQ ID NO: 8293 - DNA, 523 bp, Homo sapiens
  misc_feature 5, 382: n = A,T,C or G
gagtntgactctgtgtcgccccgcgtccgattcctttatggtagtggagtcagtgatttgaacgaagtactttcagtttcatattactctaaatccattacaaatctgcttagcttctaaatatttcatcaatgaggaaatcccagccctacaacttcggaacagtgaaatattagtccagggatccagtgagagacacagaagtgctagaagccagtgctcgtgaactaaggagaaaaagaacagacaagggaacagcctggacatggcatcagagatccacatgacaggcccaatgtgcctcattgagaacactaatgggcgactgatggcgaatccagaagctctggaagatcctttctgccattacacagccatggtngggttggtggcaattgtgggcctctaccgcacaggcaaatcctacctgatgaacaagctggctgggaaagaaaaagggcttctctctgggctccagggtgcagtctcacactaaaggaatttgatgtgggtgttgtgcccc

SEQ ID NO: 8294 - DNA, 393 bp, Homo sapiens
cgcgtaatacgactcactatagggcgaattggagctccaccgcggtggcggccgaggtgcctcctcgggaccaggacttcagggccacaggtgctgccaagatgctccagggcacctgctccgtgctcccgctctggggaatcctgggggccatccaggcccagcagcaggaggtcatctcgccggacactaccgagagaaacaacaactgcccagagaagaccgactgccccatccacgtgtacctgcccgggcggccgctctagaactagtggatcccccgggctgcaggaattcgatatcaagcttatcgataccgtcgacctcgagggggggcccggtacccagcttttgttccctttagtgagggttaattgcgcgcttggcgtaatc

SEQ ID NO: 8295 - DNA, 874 bp, Homo sapiens
  misc_feature 2, 3, 8, 10, 38, 735, 738, 765, 770, 782, 793, 794, 834,838, 846, 872, 873: n = A,T,C or G
tnnatagncngaatacgactcactatagggcgaatagngccctctagatgcatgctcgagcggcccgccagtgtgatggatatctgcagaattcgcccttagcgtggtcgcggccgaggtacgcgggggactcgctttccgtgcggtgcggcgagtgaggccccggtcttcctcctcgtcctgccgcagggccagaacccctgacggtattcagctgcgcgtaagtctggccggtgccatctgtctccgcaatgccccccaagaaacaggctcaggccgggggcagcaaaaaggcggagcaaaaaaagaaggagaagattatcgaagacaaaactttcggtttgaagaataagaaaggagcaaagcaacagaagtttatcaaggctgtcacacatcaagttaaatttggtcaacaaaatccacgtcaggtagcacagagtgaagctgaaaagaaattgaagaaggatgacaagaagaaagaattgcaggagctaaatgagctgttcaaacctgtagttgctgctcaaaaaataagtaaaggtgcagatcccaagtctgtagtatgtgcattcttcaagcaaggacagtgtactaaaggagataagtgtaagtttctcccatgacttgactctggagagaaaatgtgaaaagcgaagtgtttacatttgatgcaagagatgaagaacttgaaaaaagatactatggataattgggatgaagaaaaagctggaagangtnttgaacaaagaaaccccgtgaggcggnaaaanaaaaaaaccaanaacttcaattnntgtgcaagcattttcctggaagcttttgaaacaccaagtnttgntggttttnggtttccctggaaggggtgatatttnnt

SEQ ID NO: 8296 - DNA, 611 bp, Homo sapiens
  misc_feature 11, 212, 270, 300, 308, 549, 551, 569, 594, 600, 601, 611: n = A,T,C or G
gggccctctanatgcatgctcgagcggccgccagtgtgatggatatctgcagaattcggcttagcgtggtcgcggccgaggtacccctgttggtatctaggaagtaactagcttgcttttgattttacaggctcataggtggaagggacttgccttgtctcagatgagactttggactgtggatttttgcgttaatgctgaaaagagttaanactttgggggactgttaggaaggcatgattggttttgaatagtgaggacatgagattnggaggggccaggggtagaatgatatggttnggctatgnccccacccaaatctcaacttgaaattgtatctaccagaattcccacgtgttgtgggagagacccaaggggaggtaattgaatcatgggggccagtctttcccatgctattcttgtgatagtgaataagtttcacaagatctgatggcttatcaggggtttccacttttgcttcttcctcattttctcttgctgccatgtaaagaagtgcctttcacctcccgccatgattctgaggccttncnaacccatgtggaactgtnaattttaaaaaaccccattttcttnccaaanncgggttcccn

SEQ ID NO: 8297 - DNA, 627 bp, Homo sapiens
  misc_feature 236, 238, 241, 244, 245, 251, 254, 255, 256, 258, 262, 263,265, 266, 271, 275, 279, 280, 285, 286, 294, 299, 300, 303,308, 314, 317, 323, 326, 332, 333, 338, 339, 346, 347, 348,349, 353, 362, 365, 367, 369, 371, 377, 378, 381, 385: n = A,T,C or G
  misc_feature 386, 388, 392, 393, 401, 402, 408, 409, 410, 413, 418, 420,421, 422, 424, 425, 427, 432, 433, 439, 443, 449, 450, 460,462, 464, 466, 467, 469, 472, 475, 481, 484, 491, 492, 494,501, 502, 507, 511, 512, 513, 520, 528, 529, 534, 552: n = A,T,C or G
  misc_feature 562, 565, 567, 573, 575, 577, 580, 605, 606, 610, 614, 624: n = A,T,C or G
tcactatagggcgaattggagctccaccgcggtggcggccgaggtaccttttgggaatctaatgtattgtaaggtattttacacgtgtcctgattttgccacaacctggatattgaagctatccaagcttttgaaataaaatttaaaaacccccaaaaaaaaaaaaaaaaaaaaaaaaaaaaaaaaaaaaaaaaaaaaaaaaaaaaaaaaaaaaaaaaaaaaaaaaaaaaaaaccntnccnggnnggccgnggnnnangggnntnnggggncctnggannagggnngaaatcanccccnnaancccantttttnccnaggggnatntaaacnnggccnngggtttnnnncccnattttttanggntntncnggaccnnggnaaannangggnntttttaanngggggnnnggnccaantnnntnntnaaggnngggggnaaancccccnnaaagggtttnancncnncnttnttnggaaanggncccgggnncnacttaanncggtngggnnngggaaangccctttnnttaancggccaggggaaaattcntttcccggantcnanaacccncngnggntttttccaaaaaaaaaagggaaaanntgtntttnggcccataanggt

SEQ ID NO: 8298 - DNA, 582 bp, Homo sapiens
  misc_feature 2, 3, 4, 5, 6, 13, 15, 17, 20, 28, 546, 558: n = A,T,C or G
gnnnnntttgccnancnctnctataggncgaattggagctccccgcggtggcggccgaggttttgctttttttgaaaaaggtaagttgctgattaagtctaattggaattgataattccatagtcttagattaaaatgaggatattttctcctagattttctcatgttatgccatgcatttatatatctaaccattaatttcacactaaggatgcttcaccatataataaaaggagcaagatggaagcactttgaattttctttcattgagaataactgttttatgtaagaatctgtatttataacaccagatattaagataggcttccattttttaatgcaagccacttacttaatcttgtattctttttcaggactcaaataactagctttgaacataatattaaaacactacttatagaatagatttattaatgttaatacctaagtgaatatccatgtggcatcctgggtatgtaatcggttcagcgttaatcctatagaaaaaggtggtttggggggattgggggataagtgggaccaggntagaatttaatncatcaggagccattagatattgtt

SEQ ID NO: 8299 - DNA, 843 bp, Homo sapiens
  misc_feature 13, 572, 618, 684, 719, 727, 738, 758, 813, 820, 825, 831: n = A,T,C or G
tatatggcgaatngggccctctagatgcatgctcgagcggccgccagtgtgatggatatctgcagaattcgccctttcgagcggccgcccgggcaggtacaaacatgtgccacgtcaccacacaaaaccaaagtctgctcagagaggtgggctatggtgtgcaggctgcaacctttctctgcaattgttaagtcttcaaaaatctgagttcctcacataaaattctgtgctgtggccagagctcgttttaccattttcttagattggatcacttttaggatcagcttcgttgttctttgcgtagacaatgactctcacagctttctccaagtgtcccagaagcactaacttactgaaaatagaatctcatcaaagcttaacatattcactctgaaaacagcggagctgctgggtcgcttaaggaaagctgagaacctcaaaccttgtggaaggaaaaccagtgaccacttgtggccttataaagttgattggcaggtgaggaagggggatctcaagaggagaatccgaatttcaaagacatgggagatttgtccctaatgttttcatactantgctcttggtaaatggaaaacccttcctgaatggggaagatctgangctaaatctggatcctgggactctcattcttgcccaccaccatcttcctgggggctggcattcttncctggaaagggaatggaatactggaaaccccagtnagaagganggtgggcacancttgactttacaaaagcccnaatggaggttaagtttggtcaaaaaatttaaaaaagtaaacccccccaaatcccncaaaatnggaanactggnggaaaaataacc

SEQ ID NO: 8300 - DNA, 631 bp, Homo sapiens
  misc_feature 8, 524, 534: n = A,T,C or G
gcgcaatnaccctcactaaagggaacaaaagctgggtaccgggccccccctcgaggtcgacggtatcgataagcttgatatcgaattcctgcagcccgggggatccactagttctagagcggccgcccgggcaggtactcagttgccagttgtgtaaaataagaagttcccccactgttctgaattggtaattagactgcatggaccaagagctcaatcaaagagataacacttgttgccatttgggagtaagagaagaagctgccaaaaagaggttcaggtggtttttactcccattgcagtagggcaggaagtctgaatttcagactgtaaaagtcggattcaaaaatcaccttgtgatgtcagtgaagattcctccaccccaattttttttagtatagtatctgctatatgggaaaagactataacccaaagggctgtgaatggagaataaaattatatatgtgtttctttcctattgcagttatttattctacaacaaaaggatccaggccacacagcanaaagcagtancctgcctggttccatgcaagccataaagacttacactagcatagccttaactatctttcctggagacctgaaaaaaaaaaaaaaaaaaaaaagtccc

SEQ ID NO: 8301 - DNA, 606 bp, Homo sapiens
  misc_feature 2, 3, 4, 5, 6, 11, 13, 14, 15, 16, 18: n = A,T,C or G
gnnnnnagaangnnnntncttctccaatcgggcgaattgggccctctagatgcatgctcgagcggccgccagtgtgatggatatctgcagaattcggcttagcgtggtcgcggccgaggtacattgtcagttgcttccctcggttcacctgcagtcggcggtccaccaggttctgaactttttccagtccagcagtggtgaaaagcgtgtccagttcctcttgtgtgaagaagtaaactctggttccatcacctctcacgtagaaatttccagatagacactgaccttttttaaaccgaagctgagccatgtcatagcggccgtaatctcgcagaagcatcatcccgccaggtttcagaagcctgctcagcctgttgatagccttctgcatcttgtctggaacaattgctgaaagaacaaatatgagaatgataatatcaagactgcccttgggcactgggtaactcttctcttcatcacacaggtcgtgaacaaaggcaaaacaccgagaaggatcatattctgaatttgtctggaccagttctatagctgtggaagaaaaatcacagcaataaacaaagagtctgggtcattgttcgtttgtaa

SEQ ID NO: 8302 - DNA, 387 bp, Homo sapiens
  misc_feature 374: n = A,T,C or G
cgtatacgactcactatagggcgaattggagctccaccgcggtggcggccgaggtacttaatgaggctgtattaaggagagtaacaagttctaattcttgacccatcaaattcttaaggtgaagctgaggaccaggaagagaaagaagatgctgagaaagaaaacattgaaaaagatgaagatgatgtagatcaggaacttgcgaacatagaccctacgtggatagaatcacctaaaaccaatggccatattgagaatggcccattctcactggagcagcaactggacgatgaagatgatgatgaagaagactgcccaaatcctgaggaatataatcttgatgagccaaatgcagaaagtgattacacatatancagctcctatgaa

SEQ ID NO: 8303 - DNA, 412 bp, Homo sapiens
  misc_feature 3, 5, 412: n = A,T,C or G
gcncnccgtaatacgactcactatagggcgaattggagctccaccgcggtggcggccgcccgggcaggtactttggcctctctgggatagaagttattcagcaggcacacaacagaggcagttccagatttcaactgctcatcagatggcgggaagatgaagacagatggtgcagccacagttcgtttgatatccactttggtcccagggccgaaagtgaatataggatgaggccagttggtacctcggccgctctagaactagtggatcccccgggctgcaggaattcgatatcaagcttatcgataccgtcgacctcgagggggggcccggtacccagcttttgttccctttagtgagggttaattgcgcgcttggcgtaatcatggtcatagctgtttcctgtgtgaan

SEQ ID NO: 8304 - DNA, 657 bp, Homo sapiens
  misc_feature 5, 15, 19, 26, 29, 36, 53, 483, 484, 485, 486, 487, 488,489, 490, 491, 492, 493, 494, 495, 496, 497, 498, 499, 500,501, 502, 503, 504, 505, 506, 507, 508, 509, 510, 511, 512,513, 514, 515, 516, 517, 518, 519, 520, 521, 522, 523: n = A,T,C or G
  misc_feature 524, 525, 526, 527, 528, 529, 530, 531, 532, 533, 534, 535,536, 537, 538, 539, 540, 541, 542, 543, 544, 545, 546, 547,548, 549, 550, 551, 552, 553, 554, 555, 556, 557, 558, 559,560, 561, 562, 563, 564, 565, 566, 567, 568, 569, 570: n = A,T,C or G
  misc_feature 571, 572, 573, 574, 575, 576, 577, 578, 579, 580, 581, 582,583, 584, 585, 586, 587, 588, 589, 590, 591, 592, 593, 594,595, 596, 597, 598, 599, 600, 601, 602, 603, 604, 605, 606,607, 608, 609, 610, 611, 612, 613, 614, 615, 616, 617: n = A,T,C or G
  misc_feature 618, 619, 620, 621, 622, 623, 624, 625, 626, 627, 628, 629,630, 631, 632, 633, 634, 635, 636, 637, 638, 639, 640, 641,642, 643, 644, 645, 646, 647, 648, 649, 650, 651, 652, 653,654, 655, 656, 657: n = A,T,C or G
caacncgctttttancctncactaanggnaacaaanctgggtaccgggccccncctcgggtcgacggtatcgataagcttgatatcgaattcctgcagcccgggggatccactagttctagagcggccgaggtacgcgggtagccagacgggcaccaaagccaaggaagcagagatccagccttctggaaaaaggcctagacggagcaaaaaaagctgtggggggactcggaaaactaggaaaagatgcagtcgaagatctagaaagcgtgggtaaaggagccgtccatgacgttaaagacgtccttgactcagtactatagctgtaaggagaagctgagaaatgatacccaggagcagcaggctttacgtcttcagcctaaaacctaaaaaaaaaaaaaaaaaaaaaatttaaaacagctattaaactgaaagcatctgtaaaaaaaaaaaaaaaaaaaaaaaaaagtccttgccccggggnnnnnnnnnnnnnnnnnnnnnnnnnnnnnnnnnnnnnnnnnnnnnnnnnnnnnnnnnnnnnnnnnnnnnnnnnnnnnnnnnnnnnnnnnnnnnnnnnnnnnnnnnnnnnnnnnnnnnnnnnnnnnnnnnnnnnnnnnnnnnnnnnnnnnnnnnnnnnnnnnnnnnnnnnnnnnnn

SEQ ID NO: 8305 - DNA, 587 bp, Homo sapiens
  misc_feature 61: n = A,T,C or G
gtcgccccgcgtccggcctctcttgttcctgttaagtcttcaaataatgtggcttcaaagnattttaaaaacttttgtagataggaaaaatttgggagataatactataaatatgccaccattgagtaccatcgatcctagtgggacgcgatccaaaaatatgcctattaaagataatgctttggttatgtttaatgggaaagtctatctgttggctaaaaaggggacagatgttctgccatcacaaattgaccaacagaattctgtttctcctgatactccagtaagaaaagacacgttacagacagtgagttcaagtccagtcacagaaatatccagagaggttgtaaatattgttttggctaaaagtaaatcttcccagatggagacaaaatcactttccaatacccagcttgcttccatggccaatctaagggcagagaagaataaagtggagaaaccatctccttctaccacaaatccacatatgaaccaatccagtaactacttaaaacagagtaagactttattcacaaatccaatctttccagttggatttagtacaggacacaatgcccccagaaaac

SEQ ID NO: 8306 - DNA, 594 bp, Homo sapiens
  misc_feature 1, 2, 3, 4, 5, 6, 8, 25, 29, 461, 488, 522, 523, 524, 525,526, 528, 531, 533, 534, 535, 540, 541, 544, 545, 549, 552,553, 554, 556, 557, 558, 561, 562, 567, 569, 570, 580, 581,589, 591, 593: n = A,T,C or G
nnnnnncncttatcgacgcccgttngaanccctggaaaaacaaacaatggaactcccctccgctgacttcaaccaactgcctgctgatgcggcctgactcccagccctttttgcagttttgaagtgacaaactgactaggctacaaagtattcaaccatgggctggttctggctggttcaccgaggctgtgtacaaagtgtcttcgtgtcctgtgtttcaccttttaacatacagaacctaattttactgcattttaatgttaattctccactcgaaggtgaacatgggatgtatgtaacacatatgtttgcttatcaagcacacatatgaccccctttcatgaatattcatagttccccctgtgacctgttgaatatgtctgtttagccaacctgtttggcataaaactcctatcccaccctatctccctcaaagtacctgtttgtggtctcagctggangtgtcacttcccagcctgcagtttgcnacccttcctcaagaaataaaattttcctttcccnnnnntnacnannnccttnnaanntttntcnnnannnacnnctcananngcggatccannccgcctcncncnt

SEQ ID NO: 8307 - DNA, 605 bp, Homo sapiens
cctcactaagggaacaaagctgggtaccgggccccccctcgggtcgacggtatcgataagcttgatatcgaattcctgcagcccgggggatccactagttctagagcggccgcccgggcaggtacaatactattgcccaatctagcaatttaatacaatattattgcttagttgctcaatctagagacgatattcaaatttcatcagtaacacttttttccaatgcagaacgcagcccgcagtcatgcgttgcagttacagttggagcgtgtcccttcgtctcttttaatctgaactcattcctcagtcattctttgtctttcatttttaaagagtgctgatcagttgtttactagaatgtcactccatttgtgtttgcctgatatttcctccttgttaaattcaggttatagttctgtcaaggatagcacagcagcaatggctgattccagggctggagcaggcaaagtgtacctcggccgccaccgcggtggagctccaattcgccctatagtgagtcgtattacgcgcgctcactggccgtcgttttacaacgtcgtgactgggaaaaccctggcgttacccaacttaatcgccttgcagca

SEQ ID NO: 8308 - DNA, 509 bp, Homo sapiens
  misc_feature 6, 10: n = A,T,C or G
gtagantgcncgcgtccgcgggggctccgtaactttctatccgtccgcgtcagcgccttgccaccctcatctccaatatgcctggtccgacccccagtggcactaacgtgggatcctcagggcgctctcccagcaaagcagtggccgcccgggcggcgggatccactgtccggcagaggaaaaatgccagctgtgggacaaggagtgcaggccgcacaacctcggcaggcaccggggggatgtggcgattctacacagaagattcacctgggctcaaagttggccctgttccagtattggttatgagtcttctgttcatcgcttctgtatttatgttgcacatttggggcaagtacactcgttcgtagattcagttacatccatctgtcatctgaagaaggaggaaaaaacccaacatttcttggaccaaaagtattagtgactatctgttcatgagagaaattttctgtaagcttgctgttttacaggggatttatcaataattgatt

SEQ ID NO: 8309 - DNA, 640 bp, Homo sapiens
  misc_feature 5, 48, 325, 437, 503, 519, 542, 544, 550, 551, 554, 555,556, 565, 568, 569, 574, 576, 578, 583, 590, 594, 596, 598,599, 601, 604, 608, 609, 612, 613, 617, 618, 619, 627, 628,629, 631, 634, 638, 640: n = A,T,C or G
ttttnattgggaaccccaccgcggtggcggccgcccgggcaggtaccnttttccaggccttgactcttggatggcatttctggacttgccctgggccagaaggaagctcactgccctgaatggagagttccaggcctggcagcattcaccacaaactgactaaagaggccctgggcctgaagtgaacatcagtggtagtctggcattattccttatggacctgtggtggtggtggccatagggtgaggctcctctgccagtggaagggggagggaagagtaggaaggactgcatcttgtagtttaagttccagctcagatgcagnaaaatagagcatgccggtagatttctaatatttttcacttcagtccctggctcctggaaagacccacttggggcatgggggaattcactgccataaagggaaagacaggagnctagctgactttgccacttgcctgattgtagagccctgggggtcttgaacataggtggtagcccangtagtggttatagcgngccttgggtgaaacccattctancnggcctnnagnnngactccaancanncttantncntgtangtcaaangggngntnnantgnaatnnaanncccnnngtcagaannntnatnaaanan

SEQ ID NO: 8310 - DNA, 634 bp, Homo sapiens
  misc_feature 6: n = A,T,C or G
gcaatnaccctcactaaagggaacaaaagctgggtaccgggccccccctcgaggtcgacggtatcgataagcttgatatcgaattcctgcagcccgggggatccactagttctagagcggccgaggtactgaaagctcaaaggatcagctacagctttatctaagtatttactaaatgctacatgagggtgtccctgtccagctttctggcacatgagtcctgtgtggagagttacctcctcttccagggactgtgctgttgggaactttgggcaagtcacttacctctttgtgcctcaatttctgtataataatatttctaagctacctcactgaggtggtatgaagattcactaatgtatgtagcgtgtttgtcaatcctccagtgaaaagcactatctagatcacattttggatcacattagccaaatgcagtaaatggccaaattagatgtgtgctgaagacaatcagtcactgggtctatattaaacagcaaccagagcaacaaatggcaaacaatttctattttcaagtttctttgcatatttttttggtgcaaaaccatttataaacttttttttctaacactagtgtctacagcagcattcaaaaaaattctgttaccttttctgt

SEQ ID NO: 8311 - DNA, 617 bp, Homo sapiens
  misc_feature 606, 617: n = A,T,C or G
cctcctaagggaacaaaagctgggtaccgggccccccctcgggtcgacggtatcgataagcttgatatcgaattcctgcagcccgggggatccactagttctagagcggccgaggtaccagaagcgggacttggcgacgacatgattaggcgcaaagattcgcatgcggtagaggggcggcgtgtggcatttgggggtgggcaggcagcgacccactaccttgtactatgttaatagacaccagagatgcacaaagaaacacagtaaataaaagtttgcttgtataagcatggctgactcaggatcttgaaatattgcaagaaataacctataaagagatttaggcaattataaaatctggattaaatatttactaaccaagaatttctcatgaatcattctaatctgctgaatgtaacttcttttagtgagagtaactgccaaaatatcaaaagatcctttaattatcaggtatttgaatccaggagttccctgcttaaaaagaataccagttaccagactattgtatgagtagttaaaaaatcaggaaaagcagcaaaaaaaaaaaaaaaaaaaaaaaaaagtacctgcccgggcggccggccnccgcggtggan

SEQ ID NO: 8312 - DNA, 824 bp, Homo sapiens
  misc_feature 2, 6, 9, 10, 11, 12, 13, 19, 26, 34, 38, 43, 48, 52, 53,68, 70, 75, 76, 77, 78, 83, 84, 87, 89, 91, 98, 99, 104,111, 115, 116, 117, 119, 126, 128, 131, 195, 322, 329, 376,395, 396, 402, 413, 418, 425, 438, 445, 449, 455, 457, 461: n = A,T,C or G
  misc_feature 471, 481, 483, 487, 494, 503, 528, 530, 537, 549, 552, 567,590, 604, 606, 619, 639, 643, 647, 649, 661, 666, 668, 672,681, 690, 695, 700, 702, 704, 711, 715, 740, 741, 750, 766,769, 791, 793, 803: n = A,T,C or G
cncttnctnnnnntaatantttattntgcttttnatantgctntaatnttannttaataattcactantnattannnntatannatntnantggatcnnatatnaatctcntatnnntncagatgngntanacgatcactatagggcgaattggagctccaccgcggtggcggccgcccgggcaggtaccacctnctggcaggaggccaaccaacacaaaactagtgcaataaacaaaactacaactaaggatcctcacaagagcccatttcactcccctgccacctccacaacagcaggtgcttgtatccatggtctgganagacctnaaagaacttttttatcatttacaagggacttcttaatgcaggaactncctccccaagatacactanntgaccngcatcttaagnaaacntatgatngggattcccctcncgggggncttngaaagngnaaantttactgaantaatacaaangncctntcattcngtattatcnccgttctgtaacaccttttgtaagngnggggggngtgccaccccgngtntaaccccccaagacntttgtttttggtttttacacccntttttcagaattgnangggggggttttanaaattatgtctggccggccntttngggncnggttaaaaattncaatngngggnttccaattnaggaccttnggttnttttncncnttggttngttnggaaaaaaatttgggtttaaatttnnccggtcttncaacccaaattttttntcnaccaacccaaaccaatttaacngnaaaggccccnggggggtaggaccaattaaaa

SEQ ID NO: 8313 - DNA, 393 bp, Homo sapiens
  misc_feature 5, 7, 9, 325, 364, 370: n = A,T,C or G
gagcncncngtaatacgactcactatagggcgaattggagctccaccgcggtggcggccgaggtacagagtggtgcaggatggaagccattcagagcctgatgaaatggaacagaaaactcccattttctgtcacctgtcaacttcctgtaattcaaatcacccttgaataaaactaaatgtgccttctgtagttcagcatataagtcaggtgcaacctgaggccattgcacagtacctgcccgggcgtcgagcggccgcccgggcaggtacatttgttttgcccagccaatcactcttttttgtgaggagcctaaatacattcntttcttggggtccagagtccccattcaaggggagtcaantttaanacacttaacttgggccccttttc

SEQ ID NO: 8314 - DNA, 905 bp, Homo sapiens
  misc_feature 1, 3, 4, 5, 6, 7, 381, 394, 420, 476, 489, 499, 513, 515,526, 565, 574, 591, 593, 595, 597, 599, 605, 609, 614, 617,622, 623, 629, 633, 635, 639, 645, 654, 679, 701, 718, 723,733, 744, 752, 754, 766, 770, 772, 777, 792, 794, 795: n = A,T,C or G
  misc_feature 803, 804, 806, 807, 824, 825, 828, 831, 835, 840, 841, 850,860, 861, 870, 872, 873, 877, 882, 887, 890, 896, 898, 899,901, 903: n = A,T,C or G
ngnnnnngacgcgcgtaatacgactactatagggcgaattggagctccaccgcggtggcggcccgcccgggcaggtaccccggggctggctcctccagtgtcttctcagtcctgagcaacagtgcagaggtgaaacgggagcgcctggaagatgtggtgggaggctgttgctatcgggtcaacaacagcttggaccatgagtacctcggccgctctagaactagtggatcccccgggctgcaggaattcgatatcaagcttatcgatacccgtcgacctcgagggggggcccggtacccagcttttgttccctttagtgagggttaattgcgcgcttggcgtaatcatggtcatagctgtttcctgtgtgaaattggtatnccgctcacaattncacacaacataccaaccgggagcatnaaatgtaaaacctggggtgcctaatgagtgagctaactcacattaattgcgttggngctcactggcccnttttcaatcnggaaaacctgtctngncacctgcattnatgaaatcgggccaacccccggggaaaaggcggttttcntatttgggngctttttccgctttctngntnantnaaatcncttngcttnggncgttnnggtttngggnancggntttaancttactttnaaagggggggaattaccggttttcncaaaaataagggggataacccncggaaaaaaaaattttnggccnaaaggccccnaaaaaggcccngaaacccntnaaaagggcccgnttgntnggggnttttttcataagggncnncccccctnntnnaaggattaaaaaaaaannaanccnccantaaanngggggggancccccccggnntttttaatnannaccngtttnccccnaangaaccntnngncnct

SEQ ID NO: 8315 - DNA, 799 bp, Homo sapiens
  misc_feature 3, 5, 8, 18, 19, 26, 31, 33, 37, 38, 39, 43, 44, 46, 54,62, 65, 70, 71, 72, 75, 86, 88, 90, 93, 94, 96, 97, 98,99, 101, 104, 137, 161, 176, 228, 236, 284, 331, 333, 390,473, 480, 538, 548, 571, 631, 661, 665, 686, 696, 715, 722: n = A,T,C or G
  misc_feature 726, 730, 741, 743, 752, 753, 755, 759, 766, 775, 782, 788,789, 794, 797, 798: n = A,T,C or G
ccntncanctataatttnnttttttnatttntnttannnctannantatatcanttttcttnttntatcnnngtnttcaattatantnanctnnannnntnggntttgctcttgcgggcggccgacgttggcttatnataatattgctgacagcaataaantgccacatcttcagncttgcaggctgctgatggtgagagtgaaatctgtcccagacccgctgccacngaatcggncagggaccccggattcccgggtagacgcccagtaaatgagcagtttangaggctggccccggtttgtgctggtacctcggccgctctagaactangntggatcccccgggctgcaggaattcgatatcaagcttaatcgatacccgccgacctncgagggggggcccggtacccagctttttgttccctttaagtgaggggtttaatttgccgccgcttggcgtaaatcatggtcanaagcttngttttccctgtggtgaaaaatttgttattcccgcttcaacaaatttcccaccaccaancattaccgangcccggggagccataaaaagtgntaaaaagccttgggggtgccctaaatgaagttgaagcctaaactcaccaattaaattgcngtttgccggctcactgccccgcttttccantccngggaaacctggtcttgcccancctgcaattnaatggaatccggcccaacnccccggnggangagnggcgggttttncntattggggnncntttncgctttntttggttantaaaatncttttnnttggngannt

SEQ ID NO: 8316 - DNA, 421 bp, Homo sapiens
  misc_feature 5: n = A,T,C or G
gagcnccccgtaataccgactcactatagggcgaattggagctccaccgcggtggcggccgaggtaccacaaacagatcgcagatccaggtttctcaaactggagcatctgcttaattttcccataaaatcagtcttattctttctgacagctctgagactcctccggccacgactaggtgctgtcctggaggaaacggtggaggacggccgctctagaactagtggatcccccgggctgcaggaattcgatatcaagcttatcgataccgtcgacctcgagggggggcccggtacccagcttttgttccctttagtgagggttaattgcgcgcttggcgtaatcatggtcatagctgtttcctgtgtgaaattgttatccgctcacaattccacacaacatacgagccgggagcataaag

SEQ ID NO: 8317 - DNA, 880 bp, Homo sapiens
  misc_feature 154, 587, 602, 627, 632, 644, 660, 698, 713, 726, 738, 743,769, 780, 796, 810, 813, 814, 821, 823, 862, 864, 865, 873: n = A,T,C or G
cgactactatagggcgaattgggccctctagatgcatgctcgagcggcccgccagtgtgatggatatctgcagaattcgcccttagcgtggtcgcggcccgaggtaccccttgcttgctcaaatcaatcacgaccctttcatgtgaaattttantgttgtgagctcttaaaagcgacagaaattgtgcactcggggagctcggattttaaggcagtagcttgccaatgctcccagctgaataaagccctttcttctacagctccgtgtctgagaggttttgtctgtggcttgtcctgctacagtccttggttccctgaccaggaagcgaggtgactgacaagccctgtggagcgtccctgcagaggactccggccagcctgagtgacgcaatccaaagagcgctcccgggtaggaaatggccccggtggaatgccttgccagagcagcgcataacaggctcccgagaaggattaacactggctgaacaccgggaaggaactggcactttgaagtccagacatctgaagcttgtcaagactagtctttggaacttgccccactccattgtgaagtggaaagcaatggnctgatcacccacggngtgccctgtatttgacattctttgnatctnggttttgacctnggcttgacttggtaangactagtcttttggaacttgcccaccttccacgtgagnggaaacggtggcctnatcaccccacggngggcccgtattngcacntttgggtctggttttgaactggcttngacttggtaangactagcttttggaanttgccccctccatnttnntggaaangngggctgattacccccagcatgcctggatgggccctttgntnnggtttgancttgacc

SEQ ID NO: 8318 - DNA, 624 bp, Homo sapiens
  misc_feature 6: n = A,T,C or G
gcaatnaccctcactaaagggaacaaaagctgggtaccgggccccccctcgaggtcgacggtatcgataagcttgatatcgaattcctgcagcccgggggatccactagttctagagcggccgcccgggcaggtactctctcccttttcctatggatgtggcttcctgagagctgagctgtagtgattgctctctctcttctgaatctagccacccagcaagtctaccaggctccaggctggtacctcggccgccaccgcggtggagctccaattcgccctatagtgagtcgtattacgcgcgctcactggccgtcgttttacaacgtcgtgactgggaaaaccctggcgttacccaacttaatcgccttgcagcacatccccctttcgccagctggcgtaatagcgaagaggcccgcaccgatcgcccttcccaacagttgcgcagcctgaatggcgaatgggacgcgccctgtagcggcgcattaagcgcggcgggtgtggtggttacgcgcagcgtgaccgctacacttgccagcgccctagcgcccgctcctttcgctttcttcccttcctttctcgccacgttcgccggctttccccgtcaagctctaaatcgggggct

SEQ ID NO: 8319 - DNA, 519 bp, Homo sapiens
  misc_feature 378, 435, 448, 456, 511, 512: n = A,T,C or G
gtgatgagaccacgcgtccgctacaatgaggctccctgctcagctcctggggctgctaatgctctgggtctctggatccaagtggggatattgtgatgactcagtctccactctccctgcccgtcacccctggagagccggcctccatctcctgcaggtctagtcgggagccctcctacatagtaatggatacaactatttggattggtacctgcagaagccagggcagtctccacagctcctgatctatttgggttctaatcgggcctccggggtccctgacaggttcagtgccagtggatcaggcacagattttacactgacaatcagcaagagtggaggctgcggatgttggggtttattactgcatgcaagctntacaaactcccctcactttcggcggagggaccaaggtggggagatcaaaccaactgnggcttgcaccatnctgtcttnatttttccgccattttgatgagcaagttgaaatctggaactgccttttgttgtgnnccctgcc

SEQ ID NO: 8320 - DNA, 864 bp, Homo sapiens
  misc_feature 4, 11, 12, 656, 672, 687, 689, 766, 785, 789, 799, 811, 812,831, 840, 842, 852, 854, 863: n = A,T,C or G
gagnatacggnnatacgactactatagggcgaattgggccctctagatgcatgctcgagcggcccgccagtgtgatggatatctgcagaattcgcccttagcgtggtcgcggccgaggtactgttcctgcagctgttcctggcatctgctttttgtctggtggcatgagtgaagaggatgtcactctcaacctcaatgctatcaacctttgccctctaccaaagccctggaaactaagtttctcttatggacgggccctgcaggccagtgcactggctgcctggggtggcaaggctgcaaacaaggaggcaacccaggaggcttttatgaagcgggccatggctaactgccaggcggccaaaggacagtatgttcacacgggttcttctggggctgcttctacccagtcgctcttcacagcctgctatacctactagggtccaatgcccgccagcctagctccagtgcttctagtaggagggctgaaagggagcaacttttcctccaatcctggaaattcgacacaattagatttgaactgctggaaatacaacacatgttaaatcttaagtacctgcccgggcggcccgctcgaaagggcgaaattccaacacactggcggccgttactaatggatcccagctcggtaccaaacntggcgtaaatcatggncatagcttgtttccngngtgaaaattggttattcccgcttaacaatttccacaccaacataccaagcccggaagcattaaagtggtaaaagccngggggtgcctaaatgaggngagnctaacctcanatttaattgccnntgggggctcaactggcccntttttcaantnggggaaaacntntcctgccant

SEQ ID NO: 8321 - DNA, 521 bp, Homo sapiens
  misc_feature 3, 35, 85, 322, 471, 521: n = A,T,C or G
atnccaattactactatagggcgaattggagctcnccgcggtggcggccgcccgggcaggtactgggcgcagatgggcgaccgtnacaacactacggtccactggacatgtctgttgctgagagaaccactgggtgatgcaggcgttgcagaaagcatgttcacaatgaggtgcctggtaatcgtgagcttctcctcatacttgccccaggatgatacaactgactctggtctggcaaggctgtacctcggccgctctagaactagtggatcccccgggctgcaggaattcgatatcaagcttatcgataccgtcgacctcnagggggggcccggtacccagcttttgttccctttagtgagggttaattgcgcgcttggcgtaatcatggtcatagctgttccttgtgtgaaaattgttattccgcttcacaatttccacacaacatacgagcccgggagcataaaagtntaaaacctgggggggcctaatgaaggtgagcttactcacaattaatttgn

SEQ ID NO: 8322 - DNA, 622 bp, Homo sapiens
  misc_feature 522: n = A,T,C or G
ttggagctccaccgcggtggcggccgaggtacagcagacgctggaggagatggacttcgagaggggaatctggtcggcagccctgaatggagacctgggccgagtgaagcatttaatccagaaggccgaggacccaagtcagcccgactcggccgctctagaactagtggatcccccgggctgcaggaattcgatatcaagcttatcgataccgtcgacctcgagggggggcccggtacccagcttttgttccctttagtgagggttaattgcgcgcttggcgtaatcatggtcatagctgtttcctgtgtgaaattgttatccgctcacaattccacacaacatacgagccgggagcataaagtgtaaagcctggggtgcctaatgagtgagctaactcacattaattgcgttgcgctcactgcccgctttccagtcgggaaacctgtcgtgccagctgcattaatgaatcggccaacgcgcggggagaggcggtttgcgtattgggcgctcttccgcttnctcgctcactgactcgctgcgctcggtcgttcggctgcggcgagcggtatcagctcactcaaaggcggtaataccggttattcacagaatcaggggatac

SEQ ID NO: 8323 - DNA, 611 bp, Homo sapiens
  misc_feature 23, 208, 267, 293, 327, 363, 427, 559: n = A,T,C or G
gactcactatagggcgaattggnactccaccgcggtggcggccgagtacttttttttttttttttttttttttttatcatgaagaacacaaaatattacccaaaggatgaagatttaacaaaattaataatttttactgtttcaccaagggactttatagtgaaaccgactttttttttttttacactgcaagtatgtggcagtcaanaacgcaatggctactaactagcaccgtttcatgccactaatgctgattcacactacagngcaagtaatttaattttacccatggngctcttgcaccatcagcacaaatgtcaacacagnggaagagccaaacaacattttagttttttgttttgngtcattggggggctacatatgtcaagcagtatgctataggtacctgcccgggcggccgctctanaactagtggatcccccgggctgcaggaattcgatatcaagcttatcgataccgtcgacctcgagggggggcccggtacccagcttttgttccctttagtgagggttaattgcgcgcttggcgtaatcatggncatagctgtttcctgtgtgaaattgttatccgctcacaattccacacaacat

SEQ ID NO: 8324 - DNA, 614 bp, Homo sapiens
  misc_feature 8, 333, 342, 343, 344, 345, 346, 347, 348, 349, 350, 351,352, 353, 354, 355, 356, 357, 358, 359, 360, 361, 362, 363,364, 365, 366, 367, 368, 369, 370, 371, 372, 373, 374, 375,376, 377, 378, 379, 380, 381, 382, 383, 384, 385, 386: n = A,T,C or G
  misc_feature 387, 388, 389, 390, 391, 392, 393, 394, 395, 396, 397, 398,399, 400, 401, 402, 403, 404, 405, 406, 407, 408, 409, 410,411, 412, 413, 414, 415, 416, 417, 418, 419, 420, 421, 422,423, 424, 425, 426, 427, 428, 429, 430, 431, 432, 433: n = A,T,C or G
  misc_feature 434, 435, 436, 437, 438, 439, 440, 441, 442, 443, 444, 445,446, 447, 448, 449, 450, 451, 452, 453, 454, 455, 456, 457,458, 459, 460, 461, 462, 463, 464, 465, 466, 467, 468, 469,470, 471, 472, 474, 475, 476, 477, 478, 479, 480, 481: n = A,T,C or G
  misc_feature 482, 483, 484, 485, 486, 487, 488, 489, 490, 491, 492, 493,494, 495, 496, 497, 498, 499, 500, 501, 502, 503, 504, 505,506, 507, 508, 509, 510, 511, 512, 513, 514, 515, 516, 517,518, 519, 520, 521, 522, 523, 524, 525, 526, 527, 528: n = A,T,C or G
  misc_feature 529, 530, 531, 532, 533, 534, 535, 536, 537, 538, 539, 540,541, 542, 543, 544, 545, 546, 547, 548, 549, 550, 551, 552,553, 554, 555, 556, 557, 558, 559, 560, 561, 562, 563, 564,565, 566, 567, 568, 569, 570, 571, 572, 573, 574, 575: n = A,T,C or G
  misc_feature 576, 577, 578, 579, 580, 581, 582, 583, 584, 585, 586, 587,588, 589, 590, 591, 592, 593, 594, 595, 596, 597, 598, 599,600, 601, 602, 603, 604, 605, 606, 607, 608, 609, 610, 611,612, 613, 614: n = A,T,C or G
gcgcaatnaccctcactaaagggaacaaaagctgggtaccgggccccccctcgaggtcgacggtatcgataagcttgatatcgaattcctgcagcccgggggatccactagttctagagcggccgcccgggcaggtactgcataataaggcggatcacatccgaagattcgatttcgatcgacatagccgtatctctccgggagcaggccccagctctccctcaaggccagtcgcgcaacacaccaacgacacctccggcggacacctaacgtcccccgcgtacctcggccggccacccgcgggtgggaagctccaatttcgccctattaatnggagggttnnnnnnnnnnnnnnnnnnnnnnnnnnnnnnnnnnnnnnnnnnnnnnnnnnnnnnnnnnnnnnnnnnnnnnnnnnnnnnnnnnnnnnnnnnnnnnnnnnnnnnnnnnnnnnnnnnnnnnnnnnnnnnnnnnntnnnnnnnnnnnnnnnnnnnnnnnnnnnnnnnnnnnnnnnnnnnnnnnnnnnnnnnnnnnnnnnnnnnnnnnnnnnnnnnnnnnnnnnnnnnnnnnnnnnnnnnnnnnnnnnnnnnnnnnnnnnnnnnnnnnnnnnnnnnnn

SEQ ID NO: 8325 - DNA, 534 bp, Homo sapiens
  misc_feature 213, 215, 224, 230, 232, 235, 236, 237, 253, 258, 261, 263,265, 266, 267, 273, 275, 284, 285, 289, 290, 295, 296, 297,300, 301, 312, 318, 324, 331, 334, 336, 338, 339, 341, 348,350, 354, 356, 363, 364, 367, 372, 373, 382, 385, 387: n = A,T,C or G
  misc_feature 389, 390, 391, 392, 393, 394, 396, 397, 398, 402, 403, 404,406, 410, 426, 429, 431, 440, 443, 445, 449, 454, 456, 457,462, 463, 466, 467, 468, 473, 474, 480, 481, 486, 488, 491,493, 495, 496, 499, 505, 508, 517, 518, 525, 526, 528: n = A,T,C or G
  misc_feature 529, 533: n = A,T,C or G
ggagctccccgcggtggcggccgaggtacgatgttgctacgctgctgacagtaataaactgcaaaatcttcaggctctaggctgctgatggtgagagtgaagtctgtcccagacccactgccactgaacctggctgggatgccagtggccctgttggatgcatcatagatgaggagcctgggagcctggccaggtttctgttggtacctgcantnttttttttntttttntnatnnntctttttttttttttnttctnccncnannngtgatncnttttttatnnctannccacnnncanntgttttgtttntctttnatgttntaacatntgntntnntntttttgntntttnancaagcgnnggntgatnnatttatttnttntntnnnnnngnnnaagnnntntttntttttttatttctttnccncntcgctaacncgnantttnttttncnntcttnnctnnngggtnnagaagnntattntnttntncnnacntcgganacnagcgagtgnngtctttnntnntttnt

SEQ ID NO: 8326 - DNA, 574 bp, Homo sapiens
  misc_feature 5, 6, 7, 8, 28, 35, 259, 271, 298, 310, 337, 343, 385, 386,395, 404, 408, 409, 410, 411, 412, 413, 414, 415, 416, 417,418, 419, 420, 421, 422, 423, 424, 425, 426, 427, 428, 429,430, 431, 432, 433, 434, 435, 436, 437, 438, 439, 440: n = A,T,C or G
  misc_feature 441, 442, 443, 444, 445, 446, 447, 448, 449, 450, 451, 452,453, 454, 455, 456, 457, 458, 459, 460, 461, 462, 463, 464,465, 466, 467, 468, 469, 470, 471, 472, 473, 474, 475, 476,477, 478, 479, 480, 481, 482, 483, 484, 485, 486, 487: n = A,T,C or G
  misc_feature 488, 489, 490, 491, 492, 493, 494, 495, 496, 497, 498, 499,500, 501, 502, 503, 504, 505, 506, 507, 508, 509, 510, 511,512, 513, 514, 515, 516, 517, 518, 519, 520, 521, 522, 523,524, 525, 526, 527, 528, 529, 530, 531, 532, 533, 534: n = A,T,C or G
  misc_feature 535, 536, 537, 538, 539, 540, 541, 542, 543, 544, 545, 546,547, 548, 549, 550, 551, 552, 553, 554, 555, 556, 557, 558,559, 560, 561, 562, 563, 564, 565, 566, 567, 568, 569, 570,571, 572, 573, 574: n = A,T,C or G
gcgtnnnngtacttcactctgatggccnaattggnacctccaccgcggtggcggccgagtgtggctcttctggtgtttcagcttggggagagaggagtggccttcctcttgcagttgaggccggcgccgagccggacttcagccggatctcgtggcggagcccatcttgctccctctcccaggcctttacccgctccctaggattcccgggccctgtaggtggggagttgggaagacgacagtacctcggccgctctanaactagtggatncccccgggctgcaggaattcgatattnaacctatcgaancgtccaacttcaaggggggccccggancccacnttttgttcctttaagaagggttaattggccccttggggtaannatggcatanctgtttccncggnnnnnnnnnnnnnnnnnnnnnnnnnnnnnnnnnnnnnnnnnnnnnnnnnnnnnnnnnnnnnnnnnnnnnnnnnnnnnnnnnnnnnnnnnnnnnnnnnnnnnnnnnnnnnnnnnnnnnnnnnnnnnnnnnnnnnnnnnnnnnnnnnnnnnnnnnnnnnnnnnnnnnnn

SEQ ID NO: 8327 - DNA, 643 bp, Homo sapiens
  misc_feature 613: n = A,T,C or G
tatagggcgaattggagctccaccgcggtggcggccgcccgggcaggtacattctctgaagaggaagcagctggttggacaggatttcttgaagagccaggtgctaagggcatcaggtcgacatccatagtaaccatgtgccataacatctacacatttccacttgttttacagacaaggtaacaggcagaaggaaaatccagagtcctgcagtaagcagatgacaaaacttcaatatgcttgggcaccacttaggtgaccccagggagatttagtgtggccttaggaaagcaaaagagcactttttattggaaatatgagcttgtcactgggaaagatttgtaaaattgatcaagaacttgatttataattatgcctcaaaaaaaaagttctcatttagtagtggagcaatctagaaaacataccttttttgtttgtttggaagatcctctttccctggctgtattgtagtgtttgctatttgatgtggaaataactaataacttaagattttggaacagaacaccctttagatttccaaaacacaattcttatttcaggggaagacagaccaaaaatatctcctgagatcattggtttctttataaattgnggtaccctcggccgctctagaactagtgga

SEQ ID NO: 8328 - DNA, 631 bp, Homo sapiens
  misc_feature 3, 55, 414, 415, 439, 443, 444, 445, 446, 452, 453, 454,455, 456, 458, 459, 460, 461, 462, 463, 464, 465, 466, 471,472, 473, 474, 475, 476, 477, 478, 479, 480, 481, 482, 483,484, 485, 486, 487, 488, 489, 490, 491, 492, 493, 494: n = A,T,C or G
  misc_feature 496, 497, 498, 499, 500, 501, 502, 503, 504, 505, 506, 507,508, 509, 510, 511, 512, 513, 514, 515, 516, 517, 518, 519,520, 521, 522, 523, 524, 525, 526, 527, 528, 529, 530, 531,532, 533, 534, 535, 536, 537, 538, 539, 540, 541, 542: n = A,T,C or G
  misc_feature 543, 544, 545, 546, 547, 548, 549, 550, 551, 552, 553, 554,555, 556, 557, 558, 559, 560, 561, 562, 563, 564, 565, 566,567, 568, 569, 570, 571, 572, 573, 574, 575, 576, 577, 578,579, 580, 581, 582, 583, 584, 585, 586, 587, 588, 589: n = A,T,C or G
  misc_feature 591, 592, 593, 594, 595, 596, 597, 598, 599, 600, 601, 602,603, 604, 605, 606, 607, 608, 609, 610, 611, 612, 613, 614,622, 623, 624, 625, 626, 627, 628, 629, 630, 631: n = A,T,C or G
ggngtcgctcagctcgtgtccctggcattttaggtgtcggttgggtagtcatggnatcaggtaatgcagtttgttgagccaagtcggcagtttgtaaaggactccattcggctggttaaaagatgcactaaacctgatagaaaagaattccagaagattgccatggcaacagcaataggatttgctataatgggattcattggcttctttgtgaaattgatccatattcctattaataacatcattgttggtggctgaatacattttggaagagagtttttcatcttagagattggtgaacaagtgtgagggtgtgagaaactcacagaatacaaatttgcctgtatgttttgtgggtttttttttttcctttcaagatgttttctatttctaaattaaagtaatttcaaagtnnaaaaaaaaaaaaaaaaaaaaaaanaaannnnaaaaannnnnannnnnnnnnaaaannnnnnnnnnnnnnnnnnnnnnnnannnnnnnnnnnnnnnnnnnnnnnnnnnnnnnnnnnnnnnnnnnnnnnnnnnnnnnnnnnnnnnnnnnnnnnnnnnnnnnnnnnnnnnnnnnnnncnnnnnnnnnnnnnnnnnnnnnnnnaaaaaaannnnnnnnnn

SEQ ID NO: 8329 - DNA, 858 bp, Homo sapiens
  misc_feature 464, 476, 531, 556, 575, 612, 615, 654, 658, 688, 706, 737,739, 740, 743, 789, 811, 816, 817, 818, 819, 822, 830, 842,856, 857: n = A,T,C or G
tacgactcactatagggcgaattgggccctctagatgcatgctcgagcggccgccagtgtgatggatatctgcagaattcggcttagcgtggtcgcggccgaggtacatcttcttccggctgataattgcattatggatgaacacaaacgagaaattgcggaagctaagcaaattgttagaaagcttacgatggttgtgttgtcttctgaaaaaatggatgagccgagagaaagaaaaggaaaaagaagaggagaaagtagagaaaccacctgataaccaaaaacttggcttgttggaagccttattaaagattggtgattggcaacatgcacagaacattatggatcagatgcctccatactatgcagcttcacacaagctaatagcccttgctatttgcaagctcattcatataactattgagcctctctaccgaaaagtggagttcctaaaggtgctaaangctcacctgttnatgctttgcaaaacaagaaagcacccaaacaagctgagagctttgaagatttgangaaagacctgttcaatatgttctgnaccttggtcctcacctttntacgatcccatttatttgcaaaaagtggggcgcatangcnagtcattttttaaaggagtttcaatctgattggaagccnaccngaagattaaggaaaaaccgggggttttccntaactggttgcttaacantacttgaccaggtaccttgccgggcggccgntnnaanccaaattccacacacttggcggccgttcttatggatccaactcggncccaacctgggggaataatggnataannnnttnccgggggnaaatgttttccntcccaattcccccnnt

SEQ ID NO: 8330 - DNA, 865 bp, Homo sapiens
  misc_feature 2, 271, 275, 278, 281, 282, 286, 287, 288, 292, 294, 295,299, 300, 304, 306, 307, 312, 314, 316, 319, 322, 323, 324,325, 328, 329, 330, 331, 341, 343, 344, 349, 352, 354, 355,357, 359, 360, 361, 362, 364, 365, 371, 373, 374, 376: n = A,T,C or G
  misc_feature 378, 379, 380, 383, 386, 387, 388, 389, 390, 392, 393, 394,397, 398, 399, 401, 402, 404, 405, 406, 407, 408, 409, 410,411, 412, 414, 415, 416, 417, 421, 423, 424, 425, 427, 428,429, 430, 432, 433, 434, 436, 438, 439, 441, 442, 444: n = A,T,C or G
  misc_feature 445, 446, 447, 448, 449, 451, 452, 453, 456, 457, 459, 460,461, 462, 463, 465, 466, 467, 468, 469, 470, 471, 472, 473,474, 475, 477, 479, 480, 481, 482, 485, 486, 487, 491, 494,497, 498, 502, 505, 507, 514, 515, 516, 527, 528, 530: n = A,T,C or G
  misc_feature 531, 535, 536, 539, 540, 541, 544, 545, 547, 549, 551, 552,553, 555, 556, 561, 562, 563, 573, 575, 577, 580, 582, 583,584, 585, 588, 589, 590, 591, 594, 597, 598, 600, 601, 602,605, 607, 608, 610, 612, 613, 614, 615, 616, 617, 619: n = A,T,C or G
  misc_feature 622, 628, 629, 631, 632, 633, 634, 636, 637, 638, 640, 641,642, 643, 644, 645, 646, 647, 649, 651, 652, 654, 656, 657,658, 661, 662, 664, 666, 668, 669, 670, 671, 672, 675, 676,678, 680, 681, 683, 684, 685, 686, 688, 689, 690, 691: n = A,T,C or G
  misc_feature 692, 693, 694, 695, 696, 700, 703, 705, 706, 707, 708, 709,710, 712, 713, 714, 715, 717, 720, 722, 723, 725, 726, 727,728, 729, 730, 731, 732, 733, 734, 736, 740, 741, 752, 753,757, 763, 765, 766, 768, 772, 773, 774, 781, 788, 796,799: n = A,T,C or G
  misc_feature 803-804, 807, 809, 815-816, 819, 822, 824, 831-832,839-840, 844, 849, 852, 854, 859: n = A,T,C or G
angcgagacgcgcgtaatacgactactatagggcgaattggagctccccgcggtggcggcccgaggtacttgttattatcacaaatcctaaatgttttaccaagtgctgtcttgatgactgctgattttctggaatggaaaattaagttgtttagtgtttatggctttgtgagataaaactctccttttccttaccataccactttgacacgcttcaaggatatactgcagctttactgccttcctccttatcctacagtacctgcccggnctanttnatnncccnnnctgnannaatnngatntnnagctnancnatnccnnnnccnnnngggggggccngnncccanctntnntncnnnnannaagggntnntncnnngcngannnnntnnntgnnnannannnnnnnnngnnnnaaangnnncnnnntnnnantnncnngnnnnnntnnntanncnnnnncnnnnnnnnnnnanannnnggnnnggcnaanganncggnccncnttccaannnagaaaacctgnncnnactnnctnnnttnntngntnnnanncccgnnnggggagaggntntnatnannnnggnnnnccnctnngnnnaantnnanannnnnntnagncagagnntnnnntnnntnnnnnnnntnanngntnnnatnnanantnnnnntgnnananngnnnntnnnnnnnnncagnggngnnnnnncnnnntncanannannnnnnnnnntnaaannggcccgacccnnaaangggccncnngnttgnnntttatanaatggcncccccccnggnaggnnttnanaaaagnngcncancnggggggnnaaacccnngggnttaanaancngggtnttcccc

SEQ ID NO: 8331 - DNA, 764 bp, Homo sapiens
  misc_feature 2, 21, 604, 626, 676, 682, 684, 685, 686, 687, 688, 689,690, 691, 692, 693, 694, 696, 697, 698, 699, 700, 701, 702,703, 706, 707, 708, 709, 710, 711, 712, 716, 717, 718, 719,720, 721, 722, 723, 724, 725, 726, 728, 729, 730, 731: n = A,T,C or G
  misc_feature 732, 733, 736, 737, 742, 743, 744, 745, 746, 747, 748, 749,750, 751, 752, 753, 754, 755, 756, 757, 758, 759, 761, 763: n = A,T,C or G
cnactcactatagggcgaatngggccctctagatgcatgctcgagcggccgccagtgtgatggatatctgcagaattcgccctttcgagcggccgcccgggcaggtacaccaaggcgaccacagcagctgcaacctcagcaatgaagatgaggaggaggatgaagaagaacgtcacgagggcacacttgctctcagtcttagcaccatagcagcccaggaaaccaagagcaaagaccacaacgccggctgcgatgaggaagtagcccacgttgacaaactgcatggcactggacgacagtggcccgaagatcttcagaaaggatgccccatcgattgacacccagatgcccactgccaacagggctgcaccacacagaaagatgagcaaattgaagaggatcatcatggtcttaatgaagctgaagcactgcatggtggctcctgttcagggctcttggtagtgagttctgaaagagggaactgctgaggctccacaaaggacaaaacagctcccgggtgttgccactgagtgggcaggcagagggacgcctggctctcacacaccactgctcccccgcgtacctcggccgcgaccacgctaanggcgaattccagcacactggcngccgttactagtgggatccgagctcggtaccaagcttgcgtaatcatggncataantnnnnnnnnnnngnnnnnnnnctnnnnnnntggnnnnnnnnnnnannnnnnggnnccctnnnnnnnnnnnnnnnnnntncnc

SEQ ID NO: 8332 - DNA, 904 bp, Homo sapiens
  misc_feature 2, 5, 6, 10, 588, 640, 666, 669, 695, 700, 725, 729, 742,750, 752, 755, 774, 778, 798, 804, 813, 819, 821, 824, 837,844, 853, 855, 895, 901, 903, 904: n = A,T,C or G
angtnnttgncgcgcgtaatacgactactatagggcgaattggagctccccgcggtggcggcccgcccgggcaggtacgcgggcaaaacagttttcctaatctcagcagtatccagtgagtgaagaacacttgactgactcttgggccacctctgttacttactgtactatggaagctcctggtgaatgtttacaattatgggatgtagtatttctatttgtactttaagtcaaatgcttatatgaaatatgtgacaacaaatagagaagactggctctgttagtaattatgcagtatgtacctcggccgctctagaactagtggatcccccgggctgcaggaattcgatatcaagcttatcgataccgtcgacctcgagggggggcccggtacccagcttttgttccctttagtgagggttaattgcgcgcttggccgtaatcatggtcatagctgtttctgtgtgaaattgttatccgctcacaattccacacaacatacgaacccgggagcataaagtgtaaaagcctggggtgcctaatgagtgaagctaactcacattaattgcgttgcgcttcactggccgntttccaatcgggaaaacctgtcgtgcccactgcattaatgaatcggccaacnccccggggagaaggcgggtttgcgtnttnggcgcttttttcgctttcttggttanttganttcggttgagcttggtccgttcggnttgncggggaagcggtntttagctnanctnaaaaggcggggaaataccnggtntcccaaagaaattaaggggntaaccncaggaaaanaacatntngancaaaaggccaccnaaagggncaggaaacngntaaaagggccggttggtggggttttttcataaggctcccncccctngnn

SEQ ID NO: 8333 - DNA, 624 bp, Homo sapiens
  misc_feature 14, 36, 37, 130, 133, 157, 158, 159, 164, 165, 170, 171,172, 177, 181, 182, 184, 185, 187, 188, 189, 190, 192, 193,195, 196, 197, 198, 199, 234, 235, 236, 241, 243, 256, 260,262, 266, 267, 277, 279, 281, 291, 299, 301, 302, 307: n = A,T,C or G
  misc_feature 314, 315, 325, 327, 331, 332, 338, 340, 341, 343, 346, 352,353, 354, 363, 364, 375, 382, 383, 385, 386, 390, 400, 403,407, 411, 425, 426, 427, 435, 443, 457, 458, 463, 476, 482,486, 487, 488, 489, 490, 492, 493, 494, 495, 496, 497: n = A,T,C or G
  misc_feature 498, 499, 500, 501, 502, 503, 504, 505, 506, 507, 508, 509,510, 511, 512, 513, 514, 515, 516, 517, 518, 519, 520, 521,522, 523, 524, 525, 526, 527, 528, 529, 530, 531, 532, 533,534, 535, 536, 537, 538, 539, 540, 541, 542, 543, 544: n = A,T,C or G
  misc_feature 545, 546, 547, 548, 549, 550, 551, 552, 553, 554, 555, 556,557, 558, 559, 560, 561, 562, 563, 564, 565, 566, 567, 568,569, 570, 571, 572, 573, 574, 575, 576, 577, 578, 579, 580,581, 582, 583, 584, 585, 586, 587, 588, 589, 590, 591: n = A,T,C or G
  misc_feature 592, 593, 594, 595, 596, 597, 598, 599, 600, 601, 602, 603,604, 605, 606, 607, 608, 609, 610, 611, 612, 613, 614, 615,616, 617, 618, 619, 620, 621, 622, 623, 624: n = A,T,C or G
tacgtacttcctanagggtcgaattgggccctctanngcatgctcgaacggccgccagtgtgatggatatctgcagaattcgcccttagcgtggtcgcggccgaggtacttttttttttttttttttttnggntttttttttttttttttttttttnnnaaaannggggnnnttttngggnnannannnnanngnnnnntgggggggggaaaaaaaaattttaaaaaaaagggnnnccccncnaaaaaaaaaaggntttnanaaannttttgggggngntnccccccccgnaaaaaaananngggcnttttttnnggggggggcncnaaanncccccngnnanaangggggnnnaaaaaaaanncttttttttanacccccnnanncccngggggggggnttnaaanaganaaaaaaaaaaaaannngggggggnttataaanaaaccccccccccnnaaacntggggaaaaaaangaaaantttnnnnngnnnnnnnnnnnnnnnnnnnnnnnnnnnnnnnnnnnnnnnnnnnnnnnnnnnnnnnnnnnnnnnnnnnnnnnnnnnnnnnnnnnnnnnnnnnnnnnnnnnnnnnnnnnnnnnnnnnnnnnnnnnnnnnnnnnnn

SEQ ID NO: 8334 - DNA, 627 bp, Homo sapiens
  misc_feature 5, 7, 11, 16, 35, 63, 71, 256, 257, 258, 259, 260, 261, 262,279, 280, 300, 304, 305, 318, 319, 320, 322, 323, 324, 326,337, 340, 347, 348, 349, 350, 351, 355, 358, 376, 389, 390,391, 392, 393, 394, 395, 403, 404, 405, 406, 412: n = A,T,C or G
  misc_feature 413, 447, 448, 449, 450, 451, 452, 453, 462, 515, 527, 528,529, 530, 531, 532, 533, 534, 535, 536, 537, 538, 539, 540,541, 542, 543, 544, 558, 563, 564, 569, 570, 584, 586, 588,589, 590, 591, 592, 593, 594, 595, 596, 597, 598, 599: n = A,T,C or G
  misc_feature 600, 601, 602, 603, 604, 605, 606, 607, 608, 609, 610, 611,612, 613, 614, 615, 616, 617, 618, 619, 620, 621, 622, 623,624, 625, 626, 627: n = A,T,C or G
tcctntngggngtcgnccccgacgtccggctcagnctgcattctctaactcaaactgtgaagnacaacggngtttttgattaaaaaaaatatatctacatagtcttaatttgtaaaaaataaagaaaattccttaaccttaaaaaaaaaaaaaaaaaaaaaaaaaaaaaaaaaaaaaaaaaaaaaaaaaaaaaaaaaaaaaaaaaaaaaaaaaaaaaaaaaaaaaaaaaaaaaaaaaaaaaaaaaggggggggggnnnnnnnttttttttaaaaaaaanncccccccccccccccccccngggnnaaaaaaaaaaaannngnnncnggggggggggnccnttttttnnnnncccnttngggggggaaaaaaaaaanccccccccccccnnnnnnnaaaaaaannnntttttnnccccccccccgggggggggggggccccccccccnnnnnnnttttttttnttggggggcccccccccccccccccccaaaaaaaattttcccccccccccccnccaaaaaaaaannnnnnnnnnnnnnnnnngggggggggggggnttttnnctccnngggggggggggggngntnnnnnnnnnnnnnnnnnnnnnnnnnnnnnnnnnnnnnnnn

SEQ ID NO: 8335 - DNA, 673 bp, Homo sapiens
  misc_feature 17, 26, 31, 32, 43, 48, 51, 53, 54, 528, 543, 558, 596, 597,598, 617, 622, 623, 624, 625, 628, 633, 641, 642, 644, 645,648, 659, 660, 661, 663, 665, 667, 671, 672: n = A,T,C or G
tagactgtttcctgggngaaaagggncctcnntagcatgctcnacggncgncnntgtgatggatatctgcagcaattcgcccttagcgtggtcgcggccgaggtacagcactggaacttcttgagcaggagcatacccagggcttcataatcaccttctgttcagcactagatgatattcttgggggtggagtgcccttaatgaaaacaacagaaatttgtggtgcaccaggtgttggaaaaacacaattatgtatgcagttggcagtagatgtgcagataccagaatgttttggaggagtggcaggtgaagcagtttttattgatacagagggaagttttatggttgatagagtggtagaccttgctactgcctgcattcagcaccttctgcttatagcagaaaaacacaagggagaggaacaccgaaaagctttggaggatttcactcttgataatattctttctcatatttattattttcgctgtcgtgactacacagagttactggcacaagtttatcttcttncagatttcctttcanaacactcaaaggtcnactagtgatagtggatgggatttgctttttccatttcnnnatgacctaaaagacctgtnttttnnnnccntgccnggcggccnntnnaangggcaattccnnncntngnggcnnt

SEQ ID NO: 8336 - DNA, 631 bp, Homo sapiens
  misc_feature 3, 19, 43, 70, 71, 73, 128, 160, 177, 178, 181, 182, 199,205, 214, 215, 216, 217, 227, 232, 239, 242, 245, 246, 256,257, 258, 259, 260, 267, 273, 292, 297, 298, 326, 327, 328,347, 373, 374, 375, 376, 379, 380, 384, 386, 387, 388: n = A,T,C or G
  misc_feature 390, 394, 405, 406, 407, 408, 409, 410, 411, 412, 413, 414,415, 416, 417, 418, 419, 420, 421, 422, 423, 424, 425, 426,427, 432, 450, 452, 455, 476, 477, 478, 479, 480, 481, 482,483, 484, 485, 486, 487, 488, 489, 490, 491, 492, 493: n = A,T,C or G
  misc_feature 494, 495, 496, 497, 498, 499, 500, 501, 502, 503, 506, 507,510, 511, 512, 513, 514, 515, 516, 517, 518, 519, 520, 522,523, 524, 525, 526, 533, 534, 535, 536, 538, 540, 541, 542,543, 544, 545, 546, 547, 548, 549, 550, 551, 552, 553: n = A,T,C or G
  misc_feature 554, 555, 556, 558, 559, 560, 561, 563, 566, 567, 571, 572,573, 574, 575, 577, 578, 579, 581, 582, 585, 588, 589, 590,591, 592, 594, 595, 596, 597, 598, 599, 600, 601, 602, 603,604, 605, 606, 607, 608, 610, 612, 613, 614, 616, 617: n = A,T,C or G
  misc_feature 618, 619, 620, 621, 622, 623, 624, 625, 628, 629: n = A,T,C or G
tcnccccacctttcttggncaagcctaaaaaaaaaaaaaaaanaaaaaaaaaaaaaaaaaaaaaaaaaanngngggaaaaaaaaaaaaaaaaaaaaaaaaaaaaaaaaaaaaaaaaaaaaaaaaaagncccccccccttttttttttttaaaaaaaaaanccccccccccccccccnntannaaaaaaaaaaaaaaaancccccnttttttttnnnntttttttttnccccnggggggnggnccnnaaaaaaaaannnnnccccccntttttnaaaaaaaaaaatttttttnccccnntttttttgggggggcccccccccccccnnnttttttttttttttttttnccccccccccccccccccccaaaaannnnccnntttncnnntncccncaaaaaaaaannnnnnnnnnnnnnnnnnnnnnngggantttttttttttttttttnanggnttttttttttttttttttccnnnnnnnnnnnnnnnnnnnnnnnnnnnnttnnttnnnnnnnnnnntnnnnnttttttnnnncncnnnnnnnnnnnnnnnnntnnnntnttnntttnnnnntnnncnnttnttnnnnntnnnnnnnnnnnnnnntntnnntnnnnnnnnnntannat

SEQ ID NO: 8337 - DNA, 699 bp, Homo sapiens
  misc_feature 10, 12, 20, 22, 43, 55, 58, 65, 76, 82, 96, 101, 112, 118,146, 163, 167, 174, 181, 183, 185, 188, 203, 208, 217, 230,234, 252, 255, 259, 270, 285, 287, 288, 295, 297, 298, 299,305, 306, 307, 308, 310, 312, 317, 324, 343, 346, 349: n = A,T,C or G
  misc_feature 351, 361, 364, 366, 390, 392, 405, 411, 416, 417, 419, 425,430, 437, 439, 442, 448, 452, 463, 464, 467, 469, 494, 498,501, 505, 508, 509, 512, 514, 517, 525, 531, 532, 536, 540,542, 544, 546, 549, 552, 570, 574, 575, 576, 581, 592: n = A,T,C or G
  misc_feature 597, 602, 605, 606, 607, 611, 617, 620, 627, 632, 635, 636,647, 648, 651, 659, 668, 669, 670, 673, 676, 680, 682, 683,685, 686: n = A,T,C or G
ggcgaattgnanctccaccncngcggcggccgcccgggcaggnacttatgtgaanggnaaaaaanatctcatagangtaganagtggctcatgccnctaanctcggtgcttngggagnctaatcgtgggtagagtatacgctttgncggctctgggagttttngggnaacccantccttgnangnggnccccctaaaaaaatnaaaanttccccccnaaaaaaaaaaatntttnggttttgggggcctttcnaancccnttttttttttnttccccttaaaaaangnnaaaatcngnnnaaaaannnnananctganaaaaaanttttttttttgtataatanttnaantntctatccccnggntnttttgtaaaatcaaaaaaaaattncncccccccaaaaanggtggntctcnntntttatntttantaaattntnaanttgtcnatanatggggaaaannccnanaaaaatatttttcttgtatatattnttanttnattntcnntcncntcnttataaanaatatnnaaanattncntnanacnccntaaaaaaaaactattatncttnnntttantaattcactgntaacnacctnttnnntatntttttntanttttttnatcanaannattttcccccnnccntaaaaaantctgttttnnnttntcngggngnncnnatttttttttttt

SEQ ID NO: 8338 - DNA, 647 bp, Homo sapiens
  misc_feature 4, 6, 80, 85, 118, 125, 126, 130, 152, 171, 172, 173, 174,175, 188, 189, 190, 192, 193, 194, 197, 200, 204, 205, 206,207, 208, 209, 220, 235, 236, 237, 240, 258, 264, 265, 274,285, 286, 287, 288, 317, 318, 319, 336, 337, 359, 367: n = A,T,C or G
  misc_feature 375, 376, 377, 378, 379, 380, 381, 382, 384, 387, 392, 396,404, 405, 408, 410, 411, 442, 450, 458, 459, 463, 464, 465,466, 467, 468, 469, 470, 471, 472, 473, 474, 475, 476, 477,478, 479, 480, 481, 482, 483, 484, 485, 486, 487, 488: n = A,T,C or G
  misc_feature 489, 490, 491, 492, 493, 494, 495, 496, 497, 498, 499, 500,501, 502, 503, 504, 505, 506, 507, 508, 509, 510, 511, 512,513, 514, 515, 516, 517, 518, 519, 520, 521, 522, 523, 524,525, 526, 527, 528, 529, 530, 531, 532, 533, 534, 535: n = A,T,C or G
  misc_feature 536, 537, 538, 539, 540, 541, 542, 543, 544, 545, 546, 547,548, 549, 550, 551, 552, 553, 554, 555, 556, 557, 558, 559,560, 561, 562, 563, 564, 565, 566, 567, 568, 569, 570, 571,572, 573, 574, 575, 576, 577, 578, 579, 580, 581, 582: n = A,T,C or G
  misc_feature 583, 584, 585, 586, 587, 588, 589, 590, 591, 592, 593, 594,595, 596, 597, 598, 599, 600, 601, 602, 603, 604, 605, 606,607, 608, 609, 610, 611, 612, 613, 614, 615, 616, 617, 618,619, 620, 621, 622, 623, 624, 625, 626, 627, 628, 629: n = A,T,C or G
  misc_feature 630, 631, 632, 633, 634, 635, 636, 637, 639, 640, 641, 642,643, 644, 645, 646: n = A,T,C or G
tcgncnccacgcgtccgcataaaaaaaaaaaaaaaaaaaaaaaaaaaaaaaaaaaaaaaaaaaaaaaaaaaaaaaaaaanaaaangggaaaaaaaaaaaaaaaaaaaaaaaaaaaaanggggggnncccnttttttttttttaaaaaaaaanccccccccccccccccccnnnnntaaaaaaaaaaannngnnnccnggngggnnnnnnttttttttttnccctttttttggggnnnaanggggggggcccccccccntttttnnaaaaaaaanttttttttttnnnntttttttggggggggggcccccccccccnnnttttttttttttttttnnggcccccccccccccccccccnaaaaaaantttttttnnnnnnnncnccnaaaanaaancccccccnnggngnngggggggggggggggtttttttttttttttngggggggntttttttnntttnnnnnnnnnnnnnnnnnnnnnnnnnnnnnnnnnnnnnnnnnnnnnnnnnnnnnnnnnnnnnnnnnnnnnnnnnnnnnnnnnnnnnnnnnnnnnnnnnnnnnnnnnnnnnnnnnnnnnnnnnnnnnnnnnnnnnnnnnnnnnnnnnnnnnnnnnnnnnnnnnnnnnnnnnnnnnnntnnnnnnnng

SEQ ID NO: 8339 - DNA, 608 bp, Homo sapiens
  misc_feature 536, 587, 593, 608: n = A,T,C or G
ggagctccaccgcggtggcggccgaggtacgcggggtcttaagaacgaacggcttgggcgcggactggtatccggggactgtgacttgcagggtccgccatggagccagagcagatgctggagggacaaacgcaggttgcagaaaatcctcactctgagtacctgcccgggcggccgctctagaactagtggatcccccgggctgcaggaattcgatatcaagcttatcgataccgtcgacctcgagggggggcccggtacccagcttttgttccctttagtgagggttaattgcgcgcttggcgtaatcatggtcatagctgtttcctgtgtgaaattgttatccgctcacaattccacacaacatacgagccgggagcataaagtgtaaagcctggggtgcctaatgagtgagctaactcacattaattgcgttgcgctcactgcccgctttccagtcgggaaacctgtcgtgccagctgcattaatgaatcggccaacgcgcggggagaggcggtttgcgtatttgggcgctnttccgctttctcgctcactgactcgctgcgctcggtcgttcggctgcggcnagcggnatcagctcactcaan

SEQ ID NO: 8340 - DNA, 592 bp, Homo sapiens
  misc_feature 2, 213, 228, 229, 233, 234, 236, 237, 247, 248, 249, 250,251, 252, 259, 261, 273, 280, 281, 282, 283, 284, 285, 291,292, 293, 294, 296, 304, 306, 307, 308, 313, 314, 315, 316,317, 332, 333, 335, 336, 337, 338, 339, 340, 341, 342: n = A,T,C or G
  misc_feature 343, 344, 345, 346, 347, 349, 350, 353, 354, 355, 356, 357,358, 366, 367, 374, 375, 379, 381, 382, 383, 384, 385, 386,387, 389, 390, 391, 392, 398, 399, 420, 421, 422, 423, 424,425, 427, 428, 429, 433, 443, 457, 463, 464, 472, 473: n = A,T,C or G
  misc_feature 477, 479, 487, 488, 492, 494, 497, 502, 503, 508, 509, 527,547, 549, 550, 559, 562, 582: n = A,T,C or G
gngctatgacgtcgcatgcacgcgtacgtaagcttggatcctctaggagcggccgcccttttttttttttttttttttttttttttttttttttttttttttttttttttttttttttttttttttttttttttttttttttttttttttttttttttttttttttttttttttttttttttttttttttttttttttttttttttttttttnggggggggggggggnncccnntnnaaaaaaaaannnnnnggggggncnaaaaaaaaaaanggggggnnnnnncccccnnnncntttttttnannnccccnnnnnggggggggggggggnnannnnnnnnnnnnntnnggnnnnnngggggggnnaaaaaanngggncnnnnnnncnnnnaaaaannttttttttaaaaaaaaaaaannnnnngnnncccnaaaaaaaaancccccccccccggngggggnncccccccnnaaanangggggggnnaaancnttnggggnnccaannttttttagaagggggggnaaaaaaaaaaaggggggggncnnccccccccnccncccggggggggaaaaaaaangggggggggg

SEQ ID NO: 8341 - DNA, 500 bp, Homo sapiens
  misc_feature 6, 491, 500: n = A,T,C or G
taactnctattgggcgaattgggccctctagatgcatgctcgagcggccgccagtgtgatggatatctgcagaattcgcccttcgagcggccgcccggcaggtactgagaccgggaggtgtgctctttttctgggagcatgtggcagaaccatatggaagctgggccttcatgtggcagcaagttttcgagcccacctggaaacacattggggatggctgctgcctcaccagagagacctggaaggatcttgagaacgcccagttctccgaaatccaaatggaacgacagccccctcccttgaagtggctacctgttgggccccacatcatgggaaaggctgtcaaataatcttttccaagctccaaggcactcatttgctccttccccagcctccaattagaacaagccacccaccagcctatctatcttccactgagagggacctagcagaatgagagaagacattcatgtacctcggccgcgaccacnctaagggcn

SEQ ID NO: 8342 - DNA, 555 bp, Homo sapiens
  misc_feature 419, 510, 531, 543, 550, 555: n = A,T,C or G
agagcccagcttggaccgagctcggatccctagtaagcggccgccagtgtgctggaattcggcttatgcgtggtcgcggccgaggtacctcagtgcaaaagttagttgaactggttcattcatctctatggtaacagcttcctcctctttatcgacattacttgtctgtgacaatttaatgtttccatttccaagttctccacttgcagaaaatttcactccgtcttttgcacaggaaattacaacagcatctccaatatggctgagatctcggcatatacgtgcaaattcaccagaaggcatctttactacacagctgtacctgcccgggcggccgctcgaaagccgaattctgcagatatccatcacactggcggccgctcgagcatgcatctagagggcccaattcgccctatagngagtccgtattacaattcactggccggcgtttacaacggtcgtggactgggaaaaccctgggcgtttacccaacttaaatcgcctttgcancacattcccctttcccagctngcgtaataaacnaaaaggnccccn

SEQ ID NO: 8343 - DNA, 707 bp, Homo sapiens
  misc_feature 3, 32, 392, 393, 394, 395, 396, 397, 398, 399, 400, 401,402, 403, 404, 405, 406, 407, 408, 409, 410, 411, 412, 413,414, 415, 416, 417, 418, 419, 420, 421, 422, 423, 424, 425,426, 427, 428, 429, 430, 431, 432, 433, 434, 435, 436: n = A,T,C or G
  misc_feature 437, 438, 439, 440, 441, 442, 443, 444, 445, 446, 447, 448,449, 450, 451, 452, 453, 454, 455, 456, 457, 458, 459, 460,461, 462, 463, 464, 465, 466, 467, 468, 469, 470, 471, 472,473, 474, 475, 476, 477, 478, 479, 480, 481, 482, 483: n = A,T,C or G
  misc_feature 484, 485, 486, 487, 488, 489, 490, 491, 492, 493, 494, 495,496, 497, 498, 499, 500, 501, 502, 503, 504, 505, 506, 507,508, 509, 510, 511, 512, 513, 514, 515, 516, 517, 518, 519,520, 521, 522, 523, 524, 525, 526, 527, 528, 529, 530: n = A,T,C or G
  misc_feature 531, 532, 533, 534, 535, 536, 537, 538, 539, 540, 541, 542,543, 544, 545, 546, 547, 548, 549, 550, 551, 552, 553, 554,555, 556, 557, 558, 559, 560, 561, 562, 563, 564, 565, 566,567, 568, 569, 570, 571, 572, 573, 574, 575, 576, 577: n = A,T,C or G
  misc_feature 578, 579, 580, 581, 582, 583, 584, 585, 586, 587, 588, 589,590, 591, 592, 593, 594, 595, 596, 597, 598, 599, 600, 601,602, 603, 604, 605, 606, 607, 608, 609, 610, 611, 612, 613,614, 615, 616, 617, 618, 619, 620, 621, 622, 623, 624: n = A,T,C or G
  misc_feature 625, 626, 627, 628, 629, 630, 631, 632, 633, 634, 635, 636,637, 638, 639, 640, 641, 642, 643, 644, 645, 646, 647, 648,649, 650, 651, 652, 653, 654, 655, 656, 657, 658, 659, 660,661, 662, 663, 664, 665, 666, 667, 668, 669, 670, 671-707: n = A,T,C or G
gancgcgcgtaatacgactcactatgagggcnaattggagctccaccgcggtggcggccgcccgggcaggtactggaggagtgagtccctatgctgaccccaatacttgcagaggtgattctggcggccccttgatagttcacaagagaagtcgtttcattcaagttggtgtaatcagctggggagtagtggatgtctgcaaaaaccagaagcggcaaaagcaggtacctcggccgctctagaactagtggatcccccgggctgcaggaattcgatatcaagcttatcgataccgtcgacctcgagggggggcccggtacccagcttttgttccctttagtgagggttaattgcgcgcttggcgtaatcatggtcatagcttttttcctggnnnnnnnnnnnnnnnnnnnnnnnnnnnnnnnnnnnnnnnnnnnnnnnnnnnnnnnnnnnnnnnnnnnnnnnnnnnnnnnnnnnnnnnnnnnnnnnnnnnnnnnnnnnnnnnnnnnnnnnnnnnnnnnnnnnnnnnnnnnnnnnnnnnnnnnnnnnnnnnnnnnnnnnnnnnnnnnnnnnnnnnnnnnnnnnnnnnnnnnnnnnnnnnnnnnnnnnnnnnnnnnnnnnnnnnnnnnnnnnnnnnnnnnnnnnnnnnnnnnnnnnnnnnnnnnnnnnnnnnnnnnnnnnnnnnnnnnnnnnnnnnnnnnnnnnnnnnn

SEQ ID NO: 8344 - DNA, 636 bp, Homo sapiens
  misc_feature 371, 548, 584, 588, 590, 598, 609, 611, 621, 622, 624, 625,629, 633: n = A,T,C or G
tatagggcgaattgggtaccgggccccccctcggggctcgacggtatcgataagcttgatatcgaattcctgcagcccgggggatccactagttctagagggccgcccgggcaggtcgctcgtgatctagatagtgagcggacgcgtgggtcgactcaagacttttaaagatttatcaaaatttggtgagccgaatctcagaaaattggtgaattcggttagttcccaataggccgcagtagtaataagtggagtgttcgggatatagaaaaattttcacgaatggaattaaaatttctaggcgaattcagtgagttcccaatgggacatgattgtatgagtgagcttttcaatatatagcaacattttangttcagaaactaagtatcatggtgaattcagtaggttcccaataggattcgcatgtaataagcatgttgttcaagatagagcaacgttttaacgaactgaaacacagttcctttgttaattcagtgagttccagtagcaggctcttgtaatatgtgtacctcggccgccaccgcggngagctccagcttttgttccctttagggaaggttaantgcncncttggcgnatcatggtcanancctgtttctnngnnaaantgtntcc

SEQ ID NO: 8345 - DNA, 853 bp, Homo sapiens
  misc_feature 2, 13, 161, 254, 277, 560, 609, 628, 651, 662, 685, 689,717, 775, 779, 781, 787, 801, 812, 823, 843: n = A,T,C or G
angcccgtatcgngcgcgtatacgactactatagggcgaattggagctccaccgcggtggcggccgcccgggcaggtacttgggactgtcgtagagtttccagaccccatgtaggcgcccagtcgtggactgtcccactctgctgctctactgctcgtggngctcccgcgcccagactggtatccggggactgtgacttgcagggtccgccatggagccagagcagatgctggagggacaaacgcaggttgcanaaaatcctcactctgagtacctnggccgctctagaactagtggatcccccgggctgcaggaattctatatcaagcttatcgataccgtcgacctcgagggggggcccggtacccagcttttgttccctttagtgagggttaattgcgcgcttggcgtaatcatggtcatagctgtttcctgtgtgaaattgttatccgctcacaattccacacaacatacgagccgggagcataaagtgtaaagcctggggtgcctaatgagtgagctaactcacattaattgcgttgcgctcactgcccgctttncagtcgggaaacctgtcgtgccagctgcattaatgaatcggccaacgcncggggagaggcggattgcntattgggcgctctttcgcttctngttactgactngcttcgctcggtcgtcggctgcnggcnagccggtattaacttacttaaaagcggnaataccggttatccaaagaatcaggggataaccccaggaaaaaacatgtgagccaaanggcngnaaaaanggccaagaaccgtnaaaaaggccgngtttgcttggngtttttacatagggttcaancccctgacat

SEQ ID NO: 8346 - DNA, 429 bp, Homo sapiens
  misc_feature 4, 174, 183, 196, 220, 225, 230, 236, 245, 272, 282, 288,289, 292, 298, 299, 304, 305, 308, 313, 320, 322, 323, 333,335, 336, 337, 341, 342, 346, 353, 356, 358, 365, 366, 371,374, 385, 386, 388, 393, 394, 396, 400, 404, 407, 411: n = A,T,C or G
  misc_feature 415, 416, 420, 422, 423, 424, 428: n = A,T,C or G
gtancgactcactatagggcgaattggagctccccgcggtggcggccgaggtactcaaaaggcatttccgcttacaatttgtagaaacacaaaatgcgttttccatacagcagtgcctatatagtgactgatttttaactttcaatgtccatctttcaaaggaagtaacaccanggtactcanagaaataaaaganggctcgactcacagaagagaatgntagcnaggtnaacagntccacttgntcagcgcttcaattttggaattttacngtaaatgggnactttnncanagactnnctaanngtnctacngaggtcnanncgcacatttngnnntttnnactngtatccnatntnataatcnnttaanatntttttttattnntntattnntntttntttnttnttantttnntttncnnntttnc

SEQ ID NO: 8347 - DNA, 906 bp, Homo sapiens
  misc_feature 15, 18, 28, 30, 44, 61, 65, 93, 97, 112, 125, 146, 161, 176,177, 178, 179, 180, 188, 196, 216, 218, 224, 231, 241, 249,256, 269, 304, 305, 306, 308, 314, 315, 324, 357, 360, 374,384, 385, 404, 441, 462, 467, 490, 492, 493, 499: n = A,T,C or G
  misc_feature 511, 533, 547, 549, 550, 556, 566, 568, 575, 582, 586, 587,588, 592, 593, 594, 602, 623, 626, 627, 628, 632, 633, 635,639, 641, 643, 646, 664, 672, 685, 693, 720, 721, 740, 742,744, 750, 764, 771, 773, 774, 775, 781, 783, 821, 838: n = A,T,C or G
  misc_feature 839, 843, 845, 862, 868, 873, 874, 879, 884, 885, 892, 904,905, 906: n = A,T,C or G
accaaaaacccgacnacnaaggttgaananaagctccccgcggnggcggcccgaggtaccntttnacaacaggacaacaggcgtgggcatcancttnttagcggccccaggnacagagaggatangaggggggggaaggggagctnacttgcaaggggacnccaagggggacactnnnnncttcctcnacaacccncaccggcccgggcggccgcncnagaacnaggggancccccgggcngcaggaanccgacancaagctaaacganaccgcgacctcgagggggggcccggaacccagctnnngncccctnnagggagggnaaacggcgcgccgggcgaaaacagggcaaagcnggncccggggagaaaangggagccgcnnacaaaccacacaacaaacngagcccgggagcaaaaagggaaaagcccggggggccnaaagagggaccaacccacaanaaaanggcggggccgcccaccgcccgcntnnccagancgggaaacccgncggggccagccgggaaaaaaanaaaacggcccaccncnncggggngaaggcgggncngcggaanggggggncccnnncccnnncaaaaaanaaaaaacccgggggcccaggngannncggnngngggnangnggnaaaaagcccaccccaaangggggaanaccgggaaacccnaaaaacanggggaaaccccaggaaaaaaaaagggnnccaaaaggccaacaaaagncngncacccnaaaaaagggccggngggggcnannncaaaangnccccccccgggaaggaaaaaaaaaaacgggccccaaanaaagggggggaaacccnnaggnanaaaaaaaaccccgccgncccccnggaannccccnggggnnccccggncaaccccccggnnn

SEQ ID NO: 8348 - DNA, 406 bp, Homo sapiens
cgcgtaatacgactcactatagggcgaattggagctccaccgcggtggcggccgaggtactgttcccttctgatttggtctagataccagaatccattctcttccgtcaaacggaagacacaaggcacctgaggctgatccttcccagaaattaactccagaggctgccacatctggtatgagcgtccaaacccagcatcgacaatgtagttcctgccatcaatggtcacctgcaggagaaggtgaatcatgccagtgctgtattttttggctggagtgctgtaaacataccctcccaacatcgtggtctcaaaaccaatagtggtcagagcccagtacctgcccgggcggccgctctagaactagtggatcccccgggctgcaggaattcgatatcaagcttata

SEQ ID NO: 8349 - DNA, 634 bp, Homo sapiens
  misc_feature 519, 521, 522, 523, 525, 527, 528, 529, 530, 531, 532, 536,537, 538, 539, 540, 541, 544, 547, 548, 549, 552, 553, 554,555, 557, 558, 559, 562, 563, 565, 566, 567, 570, 571, 572,573, 575, 577, 580, 581, 583, 584, 585, 588, 589, 590: n = A,T,C or G
  misc_feature 591, 596, 598, 602, 604, 606, 610, 611, 612, 618, 622, 624,628, 630, 631, 634: n = A,T,C or G
ctcctaagggaacaaaagctgggtaccgggccccccctcgggtcgacggtatcgataagcttgatatcgaattcctgcagcccgggggatccactagttctagagcggccgaggtacctgccatccaatacggtcattagattgggtcatcttgattagattagattagattagattgtcaacagattgggccatccttactttatgataggcatcattttagtgtgttacaatagtaacagtatgcaaaagcagcattcaggagccgaaagatagtctgaagtcattcagaagtggtttgaggtttctgttttttggtggtttttgtttgtttttttttttcaccttaagggaggatttaatttgctcccaactgattgtcacttaaatgaaaatttaaaaatgaataaaaagacatacttctcagctgcaaatattatggagaattggggcacccacaggaatgaagagagaaagcagctccctaacttcaaaaccatttttggtacctgcccgggntnnnantnnnnnntaannnnnntcncannnttnnnntnnnggnntnnngcnnnnanantgnngnnntannnncccgngngggnananaaannngtgggngggnanagcnannagn

SEQ ID NO: 8350 - DNA, 516 bp, Homo sapiens
  misc_feature 2, 6, 14, 25, 28, 29, 31, 89, 370, 402, 469, 477, 487: n = A,T,C or G
gncganattttttnaaatcgggcgnatnntngctccccgcggtggcggccgaggtactttttcctagtatgtgacccagtaaatatctntgcaacaaacttggctttgctggtgtgcaaagtgtaatataaggaaaattagtgacatttttttgccttttagtgtgtaacttggaatgtatagtatagaaaacagagagatagtatatattttaacaacttgaaattcataggtgttaatagattcctctttttgaaattaaatatctcctaggattttgatcacttacagtgttgtatgcactaccttaatttagataatcagtttttgtcttttttcttagctgagatctgtagagttggcgacaganaatgaatgatttcctggcagggtagaactaangcaagggaggatgtaaccaggaggtgcttcagggaacaagacattgcatcatttgcaaaaatgtaantttttttntattagagcnagattgagaacactgggttcatcagggga

SEQ ID NO: 8351 - DNA, 610 bp, Homo sapiens
  misc_feature 23, 260, 608, 610: n = A,T,C or G
gactcactatagggcgaattggnagctccaccgcggtggcggccgagtacttttttttttttttttttttccaaaagccttgtttttatttatatagagtcctaaccacttcggtggtaggaggggtgggagaggctcctttttcaatccagggacctccatgatgttggtttgttgttaccaaacacacaggtaagtggcatcacggatctggtaaactaacgacaatgtttagtctctctctgctagagcaacaaggngagcatcaatctctgcttctgtaagaatcctgaacttaggattttcaactgtcactactccaacttctatttctgaaggtttgaaatcaattgatagaacagtagacaggcatgtaattgcagtttccactgtctgttcaaatgtccaatcaaatttcttcttcacttttttttcaaggaagctggttgactcagtttgtttaactcccgctgcagtggctttaaacccacagtagtaacctgcaggatcacacttatatacctgagggccttgctcttcatctataccaattaaaatcatacaacaaccaagaggcctcatttcagcattctgtgtgtagacctganan

SEQ ID NO: 8352 - DNA, 384 bp, Homo sapiens
  misc_feature 344, 357, 363, 364, 369, 373, 383, 384: n = A,T,C or G
cgtatcaactcactatagggcgaattggagctccaccgcggtggcggccgaggtacgcgggggacattcagccggcggttcggggcgacggactctccattccagaaccatggcccaatttgtccgtaaccttgtggagaagaccccggcgctggtgaacgctgctgtgacttactcgaagcctcgattggccacattttggtacctgcccgggcggccgctctagaactagtggatcccccgggctgcaggaattcgatatcaagcttatcgataccgtcgacctcgagggggggcccggtacccaacttttggttccctttagtgaagggttaattgccccncttgggcgtaatnatgggnnaaaancttnttttcctttnn

SEQ ID NO: 8353 - DNA, 459 bp, Homo sapiens
  misc_feature 6: n = A,T,C or G
cgctancgactactatagggcgaattggagctccaccgcggtggcggccgcccgggcaggtaccaacatgtcccgtggttccagcgccggttttgaccgccacattaccattttttcacccgagggtcggctctaccaagtagaatatgcttttaaggctattaaccagggtggccttacatcagtagctgtcagagggaaagactgtgcagtaattgtcacacagaagaaagtacctcggccgctctagaactagtggatcccccgggctgcaggaattcgatatcaagcttatcgataccgtcgacctcgagggggggcccggtacccagcttttgttccctttagtgagggttaattgcgcgcttggcgtaatcatggtcatagctgtttcctgtgtgaaattgttatccgctcacaattccacacaacatacgagccgggagcataaagtgtaaa

SEQ ID NO: 8354 - DNA, 853 bp, Homo sapiens
  misc_feature 2, 3, 437, 481, 482, 541, 543, 553, 580, 591, 604, 611, 619,676, 684, 690, 694, 695, 699, 702, 704, 710, 718, 728, 746,791, 813, 825: n = A,T,C or G
gnngacgcgcgtaatacgactactatagggcgaattggagctccaccgcggtggcggcccgaggtaccaggctaagtagctgctaacactctgactggccctgcaggagagggtggctctttcccctggagacaaagacagggtggctggagactgtgtcaacacaatttctccggtggtatctgggagccagagtagcaggaggaagagaagctgagctggggcttccatggttccctctgggtcctaactgagcagttcctccccgcgtacctgcccgggcggccgctctagaactagtggatcccccgggctgcaggaattcgatatcaagcttatcgatccgtcgacctcgagggggggcccggtacccagcttttgttccctttaatgagggttaattgcccgcttggcgtaatcatggtcataactggttncttgtgtgaaattgttatccgcttacaattccacacaacatccnncccggaaccataaagtgtaaaagcctgggggtgcctaatgaggtgagctactccaattnantgcgtttgcncttacttgccccgttttccaatcgggnaaaacttgtcnggccaacttgcanttaatgnaaatcggnccaaccccccggggagaagccggtttgcgtattgggcccctttttcccttttcttgnttaactgnacttcnttgnncttnggncnttcggnttgcgggnaaagcggttntaaactttaacttaaaanggcgggaaataccgggttttcccaaaaaattagggggataacccnccagaaaaaaaaacattttaanccaaaaaggccnacaaaaaggccccgggaacccgttaaat

SEQ ID NO: 8355 - DNA, 382 bp, Homo sapiens
  misc_feature 5, 6, 7, 344: n = A,T,C or G
gagcnnngcgtaatacgactcactatagggcagaattggagctccaccgcggtggcggccgaggtaccgcgggagcttctccttgccagtttctcccagcaggaccctcttcttgttttgaaagatggtcggctgcttttggtaggcacgctcagtctgaatgtccgccatcttcccggccgctctagaactagtggatcccccgggctgcaggaattcgatatcaagcttatcgataccgtcgacctcgagggggggcccggtacccagcttttgttccctttagtgagggttaattgcgccgcttggcgtaatcatggtcatagctgtttcctgtgtgaaantgttatccgctcacaattccacacaacattacgagccg

SEQ ID NO: 8356 - DNA, 832 bp, Homo sapiens
  misc_feature 2, 3, 4, 5, 8, 11, 19, 24, 103, 143, 275, 280, 356, 573,608, 654, 659, 702, 708, 716, 722, 731, 734, 768, 776, 783,828: n = A,T,C or G
gnnnnccnccnttttttancggcnaatggagctccccgcggtggcggccgccggcaggtacatagtaaataaaagctgtaaagataattcagggtgaactttnttttcccgagacacatttaggactgtggggatgttaaaantgtgtcgactgtgcactcactgagttgtgttttactgcctgtcatttaaagtattttactcaagcctgaatattaaagaacacgtgtaaaaaaaaaaaaaaaaaaaaaaaaaggcttgtacacctcggccgntctanaactagtggatcccccgggctgcaggaattcgatatcaagcttatcgataccgtcgacctcgagggggggcccggnacccagcttttgttccctttagtgagggttaattgcgcgcttggcgtaatcatggtcatagctgtttcctgtgtgaaattgttatccgctcacaattccacacaacatacgagcccgggagcataaagtgtaaagcctggggtgcctaatgagtgagctaactcacattaattgcgttgcgctcactgcccgctttccaagtccgggaaacctgtcntgccagcttgcattaaatgaatcggcccaacgccncggggagaggccggtttgccgtattggggcgcctctttccgctttncttgnttaattgactccgttgcgcctcgggccgttccggcttgcggcnagcggntttcaacntcaccncaaaagggnggnaataccgggtatcccccaagaaatcaggggggantaaccccngggaaanaaccatgggggcccaaaaggccaccaaaaaggcccggaacccgtnaaat

SEQ ID NO: 8357 - DNA, 443 bp, Homo sapiens
  misc_feature 400: n = A,T,C or G
ggcgaattggagctccaccgcggtggccggccgcccgggcaaggtaccaaggctaagtagttgctaatactctgactggccctgcaggagagggtggctctttcccctggagacaaagacagggtggctggagactgtgtcaacacaatttctccggtggtatctgggagccagagtagcaggaggaagagaagtggagctggggcttccatggttccctctgggtcctaactgagcagttcctccccgcgtacctcggccgctctagaactagtggatcccccgggctgcaggaattcgatatcaagcttatcgataccgtcgacctcgagggggggcccggtacccagcttttgttccctttagtgagggttaattgcgcgcttggcgtaatcatggncataagctgtttcctgtgtgaaattgttatccgctcacaattc

SEQ ID NO: 8358 - DNA, 652 bp, Homo sapiens
  misc_feature 405, 412, 413, 430, 459, 462, 474, 498, 502, 506, 507, 513,519, 531, 535, 541, 561, 564, 578, 586, 587, 589, 592, 593,594, 598, 609, 615, 618, 619, 621, 622, 625, 629, 631, 632,634, 639, 640, 642, 643, 646: n = A,T,C or G
taagggacaaaagctgggtccgggccccccctcgaggtcgacggtatcgataagcttgatatcgaattcctgcagcccgggggatccactagttctagagcggccgaggtactttttggtggtttttgtttgtttttttttttcaccttaagggaggatttaatttgctcccaactgattgtcacttaaatgaaaatttaaaaatgaataaaaagacatacttctcagctgcaaatattatggagaattggggcacccacaggaatgaagagagaaagcagctccctaacttcaaaaccatttttggtacctgccccgggcggccgccacccgcgggtggagcttccaattccgccctatagtgagtccgtattaccccgccgctcactggcccgtcgttttacnaccgtcnngactgggaaaacccctnggcgttacccaactttaatcgccttgcanganattccccttttnccagcttggcgtaaaaaaccaaanaagncccnncccgancgcccntttcccaacaanttgngccaancctgaattgggaaatggganccncccctgtaaccggnccattaanncnccnnngggngggggggggtntccccncanngnnganccgntnnanttttnnannggnccttat

SEQ ID NO: 8359 - DNA, 612 bp, Homo sapiens
  misc_feature 2, 505, 506, 513, 517, 518, 520, 523, 524, 525, 526, 532,534, 542, 545, 546, 547, 548, 550, 554, 555, 557, 559, 560,562, 567, 568, 569, 573, 576, 577, 578, 581, 582, 586, 588,589, 590, 593, 594, 595, 596, 597, 598, 599, 600, 601: n = A,T,C or G
  misc_feature 602, 603, 607, 610, 611, 612: n = A,T,C or G
cnagcgcgcaattaaccctcactaaagggaacaaaagctgggtaccgggccccccctcgaggtcgacggtatcgataagcttgatatcgaattcctgcagcccgggggatccactagttctagagcggccgaggtaccccgctcactttcggcggagggaccaaggtggagatcaaacgaactgtggctgcaccatctgtcttcatcttcccgccatctgatgagcggttgaaatctggaactgcctctgttgtgtgcctgctgaataacttctatcccagagaggccaaagtacctgcccgggcggccgctcgagccgtcgttttacaacgtcgtgactgggaaaaccctggcgttacccaacttaatcgccttgcagcacatccccctttcgccagctggcgtaatagcgaagaggcccgcaccgatcgcccttcccaacagttgcgcagcctgaatggcgaatgggacgcgccctgtagcggcgcattaagcgcggcggtgnnggtgggntacnncncannnngaccgntncactttgncannnncntaanncncnntnctttnnntttnttnnnttnntttntnnncannnnnnnnnnntttnccnnn

SEQ ID NO: 8360 - DNA, 592 bp, Homo sapiens
  misc_feature 2, 3, 12, 13, 14, 17, 32, 33, 35, 40, 377, 378, 379, 380,381, 382, 383, 384, 385, 386, 387, 388, 389, 390, 391, 392,393, 394, 395, 396, 397, 398, 399, 400, 401, 402, 403, 404,405, 406, 407, 408, 409, 410, 411, 412, 413, 414, 415: n = A,T,C or G
  misc_feature 416, 417, 418, 419, 420, 421, 422, 423, 424, 425, 426, 427,428, 429, 430, 431, 432, 433, 434, 435, 436, 437, 438, 439,440, 441, 442, 443, 444, 445, 446, 447, 448, 449, 450, 451,452, 453, 454, 455, 456, 457, 458, 459, 460, 461, 462: n = A,T,C or G
  misc_feature 463, 464, 465, 466, 467, 468, 469, 470, 471, 472, 473, 474,475, 476, 477, 478, 479, 480, 481, 482, 483, 484, 485, 486,487, 488, 489, 490, 491, 492, 493, 494, 495, 496, 497, 498,499, 500, 501, 502, 503, 504, 505, 506, 507, 508, 509: n = A,T,C or G
  misc_feature 510, 511, 512, 513, 514, 515, 516, 517, 518, 519, 520, 521,522, 523, 524, 525, 526, 527, 528, 529, 530, 531, 532, 533,534, 535, 536, 537, 538, 539, 540, 541, 542, 543, 544, 545,546, 547, 548, 549, 550, 551, 552, 553, 554, 555, 556: n = A,T,C or G
  misc_feature 557, 558, 559, 560, 561, 562, 563, 564, 565, 566, 567, 568,569, 570, 571, 572, 573, 574, 575, 576, 577, 578, 579, 580,581, 582, 583, 584, 585, 586, 587, 588, 589, 590, 591, 592: n = A,T,C or G
gnncgcgcgttnnncgnacttcactagaggcnnantgganctccaccgcggtggcggccgccacgctggttttgcatcttcaggaatatgctcgtagccctcgcgcttctcctcggccagttcgcggaagaagtggctcacgccttccagagccacatcatcgcggtcgaaatagaagcccagagagaggtaggtgtaggaggcctgcaggtacctcggccgctctagaactagtggatcccccgggctgcaggaattcgatatcaagcttatcgataccgtcgacctcgagggggggcccggtacccagcttttgttccctttagtgagggttaattgcgcgcttggcgtaatcatggtcatagctgttttcctgnnnnnnnnnnnnnnnnnnnnnnnnnnnnnnnnnnnnnnnnnnnnnnnnnnnnnnnnnnnnnnnnnnnnnnnnnnnnnnnnnnnnnnnnnnnnnnnnnnnnnnnnnnnnnnnnnnnnnnnnnnnnnnnnnnnnnnnnnnnnnnnnnnnnnnnnnnnnnnnnnnnnnnnnnnnnnnnnnnnnnnnnnnnnnnnnnnnnnnnnnnnnnnnnnnnnnnnn

SEQ ID NO: 8361 - DNA, 500 bp, Homo sapiens
  misc_feature 2, 3, 12, 13, 247, 248, 256, 260, 265, 268, 271, 272, 277,279, 283, 292, 295, 298, 299, 303, 304, 305, 307, 309, 310,324, 329, 333, 334, 338, 348, 357, 359, 361, 374, 377, 380,394, 421, 423, 425, 429, 436, 437, 440, 441, 444, 463: n = A,T,C or G
  misc_feature 466, 469, 473, 482, 484, 485, 493, 496: n = A,T,C or G
gnngagcgcccnntctactactatagggcgaattggagctccccgcggtggcggccgaggtactttggcctctctgggatagaagttattcagcaggcacacaacagaggcagttccagatttcaactgctcatcagatggcgggaagatgaagacagatggtgcagccacagttcgtttgatctccaccttggtcccttggcccgaaacgtccacgttttgaaatcagtacctgcccggctatagnnatgtttgngcanaaaanatntannctgtnangganttgcaaagnatnggnnaccnnntncnntctaaaacttaagnatccncccnnctgnagggaatacnttcttaaancnanttggataccttanacntcnaagggggcgccctncaaccctaatttttgttcccttcactnangngatnatttgcnnctnnctngactttaatttatgcgttnatnagntggngcctctggngnngaaaaaanttnatta

SEQ ID NO: 8362 - DNA, 715 bp, Homo sapiens
  misc_feature 2, 174, 186, 197, 215, 216, 238, 251, 252, 258, 265, 273,276, 281, 298, 304, 305, 306, 320, 337, 339, 346, 349, 358,360, 374, 375, 378, 380, 407, 413, 415, 428, 504, 506, 518,528, 529, 552, 553, 554, 555, 556, 562, 563, 564, 565: n = A,T,C or G
  misc_feature 566, 567, 568, 569, 584, 597, 599, 600, 606, 607, 624, 626,629, 633, 634, 637, 638, 644, 647, 655, 662, 666, 667, 681,682, 683, 684, 687, 689, 695, 708, 709, 712, 713: n = A,T,C or G
gngtgacgccgtaatacactactatagggcgaattggagctccaccgcggtggcggccgaggtacctgcaggcctcctgcacctacctctctctgggcttctatttcgaccgcgatgatgtggctctggaaggcgtgagccacttcttccgcgaattggccgaggagtaagcgncgaggggcctancggaggcgttnttccctggaaaggggggnnaaaaaattttttggggggggtnccccccaaaaatnnaaaatnaaaaaangaaaaaangtnccccntgccccccaaaaaaaangggggnnnccccccggggggtntttttttttttgggggntngggggtnttnccccccccnangggggggggggggnnttntnttcttttttcccccccggggggggganaacccncnatttttttttttnccccccccttttttttttaaaaaaaagggggggggggggaaaaaaaaaaaaaaaaaaaaccccccccctttttttntnaaaaaaaaaaangggggggggnnttttttttttttttggggggggnnnnngggggnnnnnnnnaaaaaaaaaaaaaanttttttttttttntnncccccnngtttccccccccttttnancantggnnggnncccctnttnttcccccngggaggngaannaggggggggggaannnnganantaattnccccccccccccnnttnntt

SEQ ID NO: 8363 - DNA, 617 bp, Homo sapiens
  misc_feature 191, 579, 617: n = A,T,C or G
tatagggcgaattggagctccaccgcggtggcggccgagtactttttttttgtttgttttttttttttttcaccttaagggaggatttaatttgctcccaactgattgtcacttaaatgaaaatttaaaaatgaataaaaagacatacttctcagctgcaaatattatggagaattggggcacccacaggnaatgaagagagaaagcagctccctaacttcaaaaccattttggtacctgcccgggcggccgctctagaactagtggatcccccgggctgcaggaattcgatatcaagcttatcgataccgtcgacctcgagggggggcccggtacccagcttttgttccctttagtgagggttaattgcgcgcttggcgtaatcatggtcatagctgtttcctgtgtgaaattgttatccgctcacaattccacacaacatacgagccgggagcataaagtgtaaagcctggggtgcctaatgagtgagctaactcacattaattgcgttgcgctcactgcccgctttccagtcgggaaacctgtcgtgccagctgcattaatgaatcggccaacgcncggggagaggcggtttgcgtattgggcgctctttcgcn

SEQ ID NO: 8364 - DNA, 618 bp, Homo sapiens
taagggacaaaagctgggtaccgggccccccctcgaggtcgacggtatcgataagcttgatatcgaattcctgcagcccgggggatccactagttctagagcggccgcccgggcaggtaccaaaatggttttgaagttagggagctgctttctctcttcattcctgtgggtgccccaattctccataatatttgcagctgagaagtatgtctttttattcatttttaaattttcatttaagtggcaatcagttgggagcaaattaaatcctcccttaaggtgaaaaaaaaaaaacaaacaaaaaaaagtacctcggccgccaccgcggtggagctccaattcgccctatagtgagtcgtattacgcgcgctcactggccgtcgttttacaacgtcgtgactgggaaaaccctggcgttacccaacttaatcgccttgcagcacatccccctttcgccagctggcgtaatagcgaagaggcccgcaccgatcgcccttcccaacagttgcgcagcctgaatggcgaatgggacgcgccctgtagcggcgcattaagcgcggcgggtgtggtggttacccgcagcgtgaccgctacacttgccagcgccctagcgcccgc

SEQ ID NO: 8365 - DNA, 583 bp, Homo sapiens
  misc_feature 3, 5, 6, 12, 15, 20, 548, 556, 560, 571, 577, 582, 583: n = A,T,C or G
ggngnnttcggntcnccacncgtccgcatgagggtccccgctcagctcctggggctcctgctactctggctccgaggtgccagatgtgacatccagatgacccagtccccatcctccctgtctgcgtctgtgggagacagagtcactatgacttgccgggcaagtcagagcattagcaggaatttaaattggtatcagcagaaaccggggaaagcccctaaactcctgatctctgctgcatccactttgcaaagtggggtcccgtcaaggttcagaggcagtggatctgggacagatttcactctcaccatcagcggtctccaacctgaagatttcgcaacttactactgtcaacagagttacggtacccgggcgttcggccaagggaccaaggtggaaatcaaacgaactgtggctgcaccatctgtcttcatcttcccgccatctgatgagcagttgaaatctggaactgcctctgttgtgtgcctgctgaataacttctatcccagagaggccaaagtacagtggaaggtggataacgcccttcnatcgggtnactnccggaggagtntcacanaagcnn

SEQ ID NO: 8366 - DNA, 406 bp, Homo sapiens
gtaatacagactcactatagggcgaattggagctccaccgcggtggcggccgaggtacctgcacaatgtctacccagagatgtttgttcctgacctgacgcccaccttctatggtgccatcaagaacctcggcaccaaccaatgcctggatgtgggtgagaacaaccgcggggggaagcccctcatcatgtacctgcccgggcggccgctctagaactagtggatcccccgggctgcaggaattcgatatcaagcttatcgataccgtcgacctcgagggggggcccggtacccagcttttgttccctttagtgagggttaattgcgcgcttggcgtaatcatggtcatagctgtttcctgtgtgaaattgttatccgctcacaattccacacaacatacgagccg

SEQ ID NO: 8367 - DNA, 401 bp, Homo sapiens
  misc_feature 392: n = A,T,C or G
gcgtaataccgactcactatagggcgaattggagctccaccgcggtggcggccgatacctcaccgtggctgctgtcttccgtggtcggatgtccatgaaggaggtcgatgagcagatgcttaacgtgcagaacaagaacagcagctactttgtggaatggatccccaacaatgtcaagacagccgtctgtgacatcccacctcgtggcctcaagatggcagtcaccttcattggcaatagcacagccatccaggagctcttcaagcgcatctcggagcagttcactgccatgttccgccggaaggccttcctccactggtacctcggccgctctagaactagtggatcccccgggctgcaggaattcgatatcaagcttatcgataccgtcnacctcgagc

SEQ ID NO: 8368 - DNA, 824 bp, Homo sapiens
  misc_feature 659, 664, 725, 756, 779, 790, 799, 801, 810, 817, 818, 821,823, 824: n = A,T,C or G
agggcgtaatacgactactataggggcgaaattggagctccaccgcggtggcggccgggtcgagaggtggttacattcgttgaaggacaccagctgcggaatttgcggctttggcagattgaaatcatggcaggtccagaaagtgatgcgcaataccagttcactggtattaaaaaatatttcaactcttatactctcacaggtagaatgaactgtgtacctcggcccgctctagaactagtggatcccccgggctgcaggaattcgatatcaagcttatcgatccgtcgacctcgagggggggcccggtacccagcttttgttccctttagtgagggttaattgcgcgcttggcgtaatcatggtcatagctgtttcctgtgtgaaattgttatccgctcacaattccacacaacatacgagccgggagcataaaagtgtaaagcctggggtgcctaatgagtgagctaactcacattaattgcgttgcgctcactgcccgctttccagtcgggaaacctgtcgtgccagctgcattaatgaatcggcaacgcgcggggagaggcggtttgcgtattggggcgctcttccgcttcctcgctcactgactccttgcctcggtcgttcggctgcggcgagcggtatcaactcactcaaangcggnaataccggtattcccagaatcaggggattaaccccaggaaaagaaccatgtgaaccaaaanggccagcaaaaaggcaggaaccgtaaaaaangccccgttggttgggcgtttttncataagctccnccccccggncnagcctttgnaaaaaannttntnn

SEQ ID NO: 8369 - DNA, 635 bp, Homo sapiens
  misc_feature 120, 485, 507, 522, 533, 589, 593, 604, 614, 621, 624: n = A,T,C or G
ctcactaaagggaacaaaagctgggtaccgggccccccctcgaggtcgacggtatcgataagcttgatatcgaattcctgcagcccgggggatccactagttctagagcggccgcccggncaggtaccaaaatggttttgaagttagggagctgctttctctcttcattcctgtgggtgccccaattctccataatatttgcagctgagaagtatgtctttttattcatttttaaattttcatttaagtgacaatcagttgggagcaaattaaatcctcccttaaggtgaaaaaaaaaacaaacaaaaaagaaaaagtacctcggccgccaccgcggtggagctccaattcgccctatagtgagtcgtattacgcgcgctcactggccgtcgttttacaacgtcgtgactgggaaaaccctggcgttacccaacttaatcgccttgcagcacatccccctttcgccagctggcgtaatagcgaanaggcccgcaccgatcgcccttnccaacagttgcgcancctgaatggcnaatgggacgcgccctgtaacaggcgcattaagcgcggcgggtgtggtggttccgcncagngtgaccggtanacttgccagngccctancgncccctcctttt

SEQ ID NO: 8370 - DNA, 474 bp, Homo sapiens
  misc_feature 3, 4, 13, 403: n = A,T,C or G
ggnngccccgaancactactatagggcgaattggagctccaccgcggtggcggccgcccgggcaggtacctgattgccacctcagagcagcccattgctgccctgcaccgggatgagtggctccggccggaggacctgcccatcaagtatgctggcctgtctacctgcttccgtcaggaggtgggctcccatggccgtgacacccgtggcatcttccgagtccatcactttgagaagattgaacagtttgtgtacctcggccgctctagaactagtggatcccccgggctgcaggaattcgatatcaagcttatcgataccgtcgacctcgagggggggcccggtacccagcttttgttccctttagtgagggttaattgcgcgcttggcgtaatcatggtcntagctgtttcctgtgtgaaattgttatccgctcacaattccacacaacatacgagccgggagcataaagtg

SEQ ID NO: 8371 - DNA, 399 bp, Homo sapiens
  misc_feature 274, 275, 276, 277, 281, 283, 286, 288, 289, 290, 291, 292,293, 297, 300, 301, 302, 304, 306, 310, 311, 313, 315, 316,318, 321, 328, 331, 333, 334, 343, 345, 350, 351, 355, 356,361, 362, 363, 369, 373, 375, 384, 387, 399: n = A,T,C or G
gtataccactcactatagggcgaattggagctccccgcggtggcggccgaggtacccaagtgatgtcatctccccatcctcttgagagtgtctgaggaggcctcttttccttttttattgcaatggcaaggttggaagaaactgtgacgagtaagaggcagagacccaaagctgagtgtagcatcatgtcttctagagactctctcagaagaagctgacttggccagtgctcttgttggaaatgtattctggatccccgcgtacctgcccgggnnnntttntnttnannnnnnttcntannnantntttnncntnntnttnttttttnctntnnttctctgtnanttttnncttnntacannntctctntgtnanttttttttngtntatctttttttn

SEQ ID NO: 8372 - DNA, 705 bp, Homo sapiens
  misc_feature 2, 4, 10, 143, 153, 155, 185, 186, 190, 194, 198, 202, 203,204, 206, 208, 218, 220, 222, 226, 228, 231, 233, 234, 236,238, 239, 241, 242, 243, 248, 250, 255, 256, 259, 263, 265,266, 268, 269, 270, 275, 278, 279, 280, 283, 284, 288: n = A,T,C or G
  misc_feature 289, 294, 295, 296, 297, 300, 303, 304, 305, 308, 311, 312,313, 314, 315, 316, 317, 319, 320, 322, 323, 325, 326, 328,329, 331, 332, 334, 335, 338, 339, 341, 345, 347, 350, 351,352, 354, 355, 357, 358, 359, 360, 362, 365, 367, 368: n = A,T,C or G
  misc_feature 373, 374, 375, 379, 380, 381, 383, 386, 389, 393, 394, 395,403, 404, 408, 409, 411, 412, 414, 424, 425, 427, 430, 432,435, 436, 438, 441, 442, 447, 451, 455, 457, 466, 467, 471,472, 473, 477, 479, 480, 483, 492, 494, 495, 496, 498: n = A,T,C or G
  misc_feature 499, 500, 501, 502, 505, 507, 508, 509, 510, 511, 512, 515,518, 519, 521, 522, 524, 526, 527, 529, 530, 532, 533, 536,542, 550, 551, 552, 554, 556, 558, 560, 561, 563, 564, 565,571, 573, 575, 576, 577, 579, 580, 584, 588, 590, 592: n = A,T,C or G
  misc_feature 594, 596, 602, 603, 607, 610, 611, 617, 621, 622, 631, 632,638, 639, 641, 645, 647, 649, 651, 652, 654, 658, 663, 664,667, 670, 671, 672, 673, 675, 676, 679, 685, 686, 687, 689,692, 693, 695, 696, 699, 702, 704, 705: n = A,T,C or G
tntngggccnattggagctccaccgcggtggcggccgaggtaccagcagaaacctggccaggctcccaggctcctcatctatggtgcatccaccagggccactggtatcccagccaggttcagtggcagtgggtctgggacangagttcactntnaccatcagcagcctgtaaggacttgaagannctgnagtnttcnactnnncngnagcttctatncntncgtncnttngnncncnnannnagcantnacgcnnttnatancnncnnnaaagncgnnntgnnggcnncattnnnnggngtnnntangannnnnnnannanntnngnntnngnnggnncntcgnanccnnnannannnnanccnanntaaannnaacnnngnatncgntacnnntgatcgcnnaaanncnntntagttatatnntncgntntannanaannggacnagantgtntncgcaagaannatannntagnannatnttatttttngnnnannnnnatntnnnnnnganagnncnngntnncnncnnaangtcaanaagcacgnnngngngngnntnnntagctncnannnannttcntccntntntntntactannattntgnncagatngatnnccgtgtatnnaactgnnangacncncntnngnagcnagacnncgngannnnanntanccctannnancgnntnnctnagnann

SEQ ID NO: 8373 - DNA, 860 bp, Homo sapiens
  misc_feature 413, 415, 417, 419, 432, 434, 486, 545, 554, 557, 594, 653,663, 667, 709, 717, 727, 731, 745, 764, 767, 771, 781, 798,818, 825, 835, 840, 859: n = A,T,C or G
gttaggccttgtaatacgactcactatagggcgaattgggtaccgggccccccctcgaggtcgacggtatcgataagcttgatatcgaattcctgcagcccgggggatccactagttctagagcggccgcccgggcaggtctagataagcagcacaatgaggaacagagtggtgacgagctattggatgttgtcactgtgccatcaggtgaacttcgtcatgtggaaggcaccattattctacacattgtgtttgccatcaaattggactatgaactaggcagagaactcgtgaaacacttaaaggtagcatcaaacttgtaaggtgatctgggtctcttttgaatgaaagtgtttgaacttaagccactgttatgccagttaatgacaggaaataaatactgtaaaatgacncncnanaaaaaaaaaaaantnaaaaaaaccttggccgccaccgcgggggagctccagcttttgttccctttantgagggttaattgcgcgcttggcgtaatcatggtcatagctgtttcctgtgtgaaaatngttatccgntcncaattccacacaacatacgagccggaaagcataaagngtaaagcctggggtgccctaatggagtgaagctaactcaccatttaatttggcgttggngctcactggnccgntttttcaagttcggggaaaccttgttcggtgccccagcttgnattaaatngaaatcgggnccancccccccggggganaagggcgggttttgcgttnttngggncgcctttttnccgctttccttggtttnaattgacttcgtttgggctngggtcgnttcgggttgnggggnaagccggtttcaggtttant

SEQ ID NO: 8374 - DNA, 1174 bp, Homo sapiens
  misc_feature 1, 2, 3, 4, 5, 6, 8, 9, 10, 11, 14, 15, 17, 18, 19, 23, 24,27, 30, 32, 33, 34, 36, 37, 38, 39, 40, 41, 43, 44, 46,47, 49, 50, 54, 56, 57, 58, 60, 62, 63, 64, 66, 69, 72,73, 74, 75, 77, 78, 80, 81, 82, 83, 84, 86, 87, 88, 90,92: n = A,T,C or G
  misc_feature 94, 102, 111, 112, 368, 490, 537, 560, 604, 613, 614, 615,616, 662, 714, 723, 807, 811, 831, 842, 861, 876, 882, 924,937, 948, 949, 952, 968, 974, 1028, 1046, 1049, 1092, 1095,1098, 1104, 1107, 1108, 1109, 1110, 1117, 1120, 1121: n = A,T,C or G
  misc_feature 1130, 1134, 1148, 1152, 1154, 1159, 1161, 1164: n = A,T,C or G
nnnnnnannnntgnnannntctnnatnttntnnntnnnnnnanntnngnnaaangnnnantnnntnaantannnnanntnnnnntnnngnangnacccgtanacgatcacnnctgactatatggcagaattggagctccaccgcggtggcggccgcccgggcaggttcgcgggggacattttctcggccctgccagcccccaggaggaaggtgggtctgaatctagcaccatgacggaactagagacagccatgggcatgatcatagacgtcttttcccgatattcgggcagcgagggcagcacgcagaccctgaccaagggggagctcaaggtgctgatggagaaggagctaccaggcttcctgcangagtggaaaagacaagggatgcccgtggataaattgctcaagggacctggacgcccaatgggagatgcccaggtgggaccttcagtggagttcatcgtggttccgttggcttgcaatcaccntctggccctgtcacaagttaccttcggcccgcttctaagaaacttantgggatcccccggggcttgcaanggaaatttcggatattcaaagcctttattccgaataccccgttncgaaccttnnnnaggggggggggccccccgggttacccccaagcctttttttggtttncccctttttagttggagggggtttaaattttggccgccgcccttgggccgtnaattcaatnggtccaataagccttggttttcccctgtggttgaaaaatttggtttatttcccgctttcacaaattttccaacaccaaacattnccgnagccccgggggagccatttnaaaggtggttnaaaagcccttgggggggtnggcccctaaattgangtggancctaaacctccaccattttaatttgggcgttttgccgccttnaacttggcccccntttttttccanntcngggggaaaaacccttnttcgtnggcccagccttggcattttaattggaaatttcgggccccaaccccccccggggnaaaaaaggcccggttttnccnctaattttggggccgctttttttccgcttttctttgggttaanttngantttggntgnnnnctcgggntcnnttttcgggntggnggggcgaagccggntttntnaagcntnacntccaaaaagg

SEQ ID NO: 8375 - DNA, 483 bp, Homo sapiens
  misc_feature 3, 7, 18, 414, 425, 427, 436, 460, 473, 476, 482: n = A,T,C or G
ggnccgnaatcgacatantatgttggctgattggagctcccccgcggtggcggcccgaggtaccttctactcatctgccggcagggccagctcccaaagtggatgaagatgaagaagcactaaagcagttggctgagtgggtatcctgataaatctgggcttgtcttcctaatgctacctttgttggtcctttcttccttaagtgccaagtgctgagctaaaggaggataactttttggggaagtcatgctgagggtggtagtgtgaccctgcctgaaaaaagggtctcttaccctcccagccctggctcaactctgaagaaggatcttgctacagaaggagcccttgggctcccttctctttgatagcagttataatgcccttgttcccaataaaactgggcagatggggaanaaaaatttttntnccattaaanagggataattgctcgcttggcgtnatcatggtcttanttnattctnt

SEQ ID NO: 8376 - DNA, 563 bp, Homo sapiens
  misc_feature 2, 3, 4, 10, 12, 13, 14, 475, 486, 489, 494, 495, 535: n = A,T,C or G
gnnngagtcnannnctactatagggcgaattgggtaccgggccccccctcgaggtcgacggtatcgataagcttgatatcgaattcctgcagcccgggggatccactagttctagagcggccgaggtacttcctgtggaactccctggagatgaagccatgttcgtcctggcgctcttcgtgcttgccgtgcacctcaatcacgtctcccagaaccttgactttgagttcctctggagagaagtgcttcacgtccaggttcacagagaacctgtccttctccatacgcatctctgagagcccagtgtcaatccagcctaggtgcccgcaggaagggagggtggccgaaggttagaaggggctcaggggaagtgggctgtaggagaaagagggtcagactccaacaaggtgttctccgaagaactggtcaaagagggcggctggggagtggaaaggaaaagaagggacgcccggancagggggtggnggntgggnntatgtccacctgcccgggcggcccacccgcggtggagctncagcttttggtcctttagggaggggtat

SEQ ID NO: 8377 - DNA, 465 bp, Homo sapiens
aatacactactatagggcgaattgggccctctagatgcatgctcgagcggccgccagtgtgatggatatctgcagaattcggcttagcgtggtcgcggccgaggtaccccagccacatggccttcatccttatgacctagcaggcagaacagggaccaagcagcttctattttgtcaaactcctttggacaaatattcaacattcaacaacaagctttgtaaacctaacgctaaacaagtcatggcaagcaaactggattttcttaagaaatgaggaaaagtgcaagtgatctcagtacctgcccgggcggccgctcgaaagccgaattccagcacactggcggccgttactagtggatccgagctcggtaccaagcttggcgtaatcatggtcatagcttgtttcctgtgtgaaattgttatccgctcacaattccacacaacataccgagccggaagcataaa

SEQ ID NO: 8378 - DNA, 472 bp, Homo sapiens
  misc_feature 35: n = A,T,C or G
aggccctaacactacttagggcgaattggagctcnccgcggtggcggccgaggtaccaggctaagttggtgccaacactctgactggccctgcaggagagggtggctctttcccctggagacacagacagggtggctggagactgcgtcatcactatttctccagtggtatctgggagccagagtagcaggaggaagagaagctgcgctggggcttccatggttccgtctgggtcctaactgagcagttcctccccgcgtacctgcccgggcggccgctctagaactagtggatcccccgggctgcaggaattcgatatcaagcttatcgataccgtcgacctcgagggggggcccggtacccagcttttgttccctttagtgagggttaattgcgcgcttggcgtaatcatggtcataagctgtttcctgtgtgaaattgttatccgctcacaatttccacacaacatacg

SEQ ID NO: 8379 - DNA, 616 bp, Homo sapiens
  misc_feature 12, 37, 209, 271, 276, 408, 433, 460, 492, 504, 517, 522,523, 524, 533, 535, 541, 553, 566, 573, 600, 605, 609, 614: n = A,T,C or G
gcactacactancacgtgcactaaagggaaacaacancctgggtaccgggccccccctcggggtcgacggtatcgataagcttgatatcgaattcctgcagcccgggggatccactagttctagagcggccgcccgggcaggtacgcgggggactttgttaggtagaggtggaggtggagaaaggacgtttcaagggtgaagcttcttnagtaaacactgggaaagacatagaagaactattaagaagatagaattgttttgctgcgcagnacctnggccgccaccgcggtggagctccaattcgccctatagtgagtcgtattacgcgcgctcactggccgtcgttttacaacgtcgtgactgggaaaaccctggcgttacccaacttaatcgccttgcagcacatncccctttcgccagctggcgtaatancgaagaggcccgcaccgatcgcccttnccaacagttgcgcagcctgaatggcgaatggnacgcgccctgtngcggcgcattaancgcgnnnggtgtggtngntacccncagcgtgaccgntacacttgccagngccctancgcccgctcctttcgcttttttccttnctttntcgnacgtnac

SEQ ID NO: 8380 - DNA, 680 bp, Homo sapiens
  misc_feature 2, 3, 4, 5, 7, 8, 12, 14, 18, 21, 22, 23, 24, 25, 46, 600: n = A,T,C or G
gnnnngnngttnancccnttnnnnntttgaatccgggagtcgaccncgcgtccgggtgtgtccactgccagatctgtgtaacccgtctgggtcaggggatgagtgacagcaaaccatcttaaaatttttcatgagtacatttaagcggaagcatacgggaatatgagtgcaaaagtgtggctgagccgcgtatgcccttgattggttttgggaagcctgagggaggcagccttcctggctatgagccatcgcctgcccaatcaggctaagggtggtgactggggtggtgaaggggcagctctgctgagcatggtctgccttatggcctgaattgtcctcaaggggtgtggactgcagatggtgttcacatgaaccggagacatcactctttaggattctactggcagcccctgaattggctcaacgtttgtggaggtggtatttccctgaagtactgagctttgttttataataattaaaatccttatttggtccaatttaatataagtttagaagctattttttttgaggcaaacccgtttttgaaaatgtaaattttgtttttaattaaaaataaaagtcttagttaagaaaactcangatgcacaaaactattcagactggtactttaagcttttcttcccaattaaccctttcaaattttccaaaaaagggttttt

SEQ ID NO: 8381 - DNA, 592 bp, Homo sapiens
  misc_feature 249, 250, 251, 252, 253, 254, 255, 256, 257, 258, 259, 260,261, 262, 263, 264, 265, 266, 267, 268, 269, 270, 271, 272,273, 274, 275, 276, 277, 278, 279, 280, 281, 282, 283, 284,285, 286, 287, 288, 289, 290, 291, 292, 293, 294, 295: n = A,T,C or G
  misc_feature 296, 297, 298, 299, 300, 301, 302, 303, 304, 305, 306, 307,308, 309, 310, 311, 312, 313, 314, 315, 316, 317, 318, 319,320, 321, 322, 323, 324, 325, 326, 327, 328, 329, 330, 331,332, 333, 334, 335, 336, 337, 338, 339, 340, 341, 342: n = A,T,C or G
  misc_feature 343, 344, 345, 346, 347, 348, 349, 350, 351, 352, 353, 354,355, 356, 357, 358, 359, 360, 361, 362, 363, 364, 365, 366,367, 368, 369, 370, 371, 372, 373, 374, 375, 376, 377, 378,379, 380, 381, 382, 383, 384, 385, 386, 387, 388, 389: n = A,T,C or G
  misc_feature 390, 391, 392, 393, 394, 395, 396, 397, 398, 399, 400, 401,402, 403, 404, 405, 406, 407, 408, 409, 410, 411, 412, 413,414, 415, 416, 417, 418, 419, 420, 421, 422, 423, 424, 425,426, 427, 428, 429, 430, 431, 432, 433, 434, 435, 436: n = A,T,C or G
  misc_feature 437, 438, 439, 440, 441, 442, 443, 444, 445, 446, 447, 448,449, 450, 451, 452, 454, 455, 456, 457, 458, 459, 460, 461,462, 463, 464, 465, 466, 467, 468, 469, 470, 471, 472, 473,474, 475, 476, 477, 478, 479, 480, 481, 482, 483, 484: n = A,T,C or G
  misc_feature 485, 486, 487, 488, 489, 490, 491, 492, 494, 495, 496, 497,498, 499, 500, 501, 502, 503, 504, 505, 506, 507, 508, 509,510, 511, 512, 513, 514, 515, 517, 518, 519, 520, 521, 522,523-525, 527-548, 550-563, 565-576, 578-592: n = A,T,C or G
gactcactatagggcgaattgggagctccaccgcggtggcggccgagtactgtggagctgttgggactgggcaggcggcaaagatctgcaacaacatgctgttagctattagtatgattggaactgctgaagctatgaatcttggaatcaggttagggcttgacccaaaactactggctaaaatcctaaatatgagctcagggacggtgttggtcaagtgacacttataatcctggtaccctgcccggnnnnnnnnnnnnnnnnnnnnnnnnnnnnnnnnnnnnnnnnnnnnnnnnnnnnnnnnnnnnnnnnnnnnnnnnnnnnnnnnnnnnnnnnnnnnnnnnnnnnnnnnnnnnnnnnnnnnnnnnnnnnnnnnnnnnnnnnnnnnnnnnnnnnnnnnnnnnnnnnnnnnnnnnnnnnnnnnnnnnnnnnnnnnnnnnnnnnnnnnnnnngnnnnnnnnnnnnnnnnnnnnnnnnnnnnnnnnnnnnnnngnnnnnnnnnnnnnnnnnnnnnngnnnnnnnnnnnnnnnnnnnnnnnnnnnnnnnngnnnnnnnnnnnnnngnnnnnnnnnnnngnnnnnnnnnnnnnnn

SEQ ID NO: 8382 - DNA, 504 bp, Homo sapiens
  misc_feature 7, 14, 440, 441, 444, 461, 482: n = A,T,C or G
gggcgancggtgcnccccgcgtccggcggcggtaccgcctctgtttctgcggcgattgaacagccgagctttgcggccgggatcgcggaaagtgatggctgtcgtcccggcgtctctctcaggacaggacgtgggatcatttgcatatcttacaattaaagacagaataccacagatcttaactaaggttattgatacattgcatcgacataaaagtgaattttttgagaaacacggagaggaaggcgtggaagctgaaaagaaagctatctctctcctttctaaattacggaatgaattgcaaacagataaaccatttatccccttggttgagaaatttgttgatactgatatatggaatcagtacctagaatatcaacagagtcttttaaatgaaagtgatggaaaatcaagatggttctactcaccgtggttgttgnnagnaatgttacatgtatcgnagaattcatgaagcacttatncagagtccaccaatcgattacc

SEQ ID NO: 8383 - DNA, 674 bp, Homo sapiens
  misc_feature 122, 126, 632, 666: n = A,T,C or G
ctcactaaagggaacaaaagctgggtaccgggccccccctcgggtcgacggtatcgataagcttgatatcgaattcctgcagcccgggggatccactagttctagagcggccgaggtacagnggtnaaataatgactcaatgacaaaagtgggattggagtcccaacagtgtggacatgcttgctttggattgaatgtttgtgtcttgccccatatcccaatgttacagccctaaccaccaatgtgatggtattgagattagggccttgagtacctgcccgggcggccgcccgggcaggtacgcggggaatgacattgaaacaaaaaatagaaaagataaacaaaaagctatttttttgaaaagataaacaaaattgatcttagtaagataagtcaagaaaagaaaagagaaaatctaaataagctcagttagaaataaaactggacatattacaaccaataccacaaaaattataaaaaattatttaaggctactgtgaacacctttacacatacagactaggaaatctagagaaaattgatagatccttcaaaatatacaaccgtcttacatcagtaagaaatagaaaccatgaacagcccaataacaagcagctaaatggaattggttntaaaaagaaagttgcaacaacaaaaaaaggctanaccagaag

SEQ ID NO: 8384 - DNA, 629 bp, Homo sapiens
  misc_feature 17, 534, 553, 564: n = A,T,C or G
aattggagctccaccgnggtggcggccgaggtacattttgttccaccaagttatccaaaacaccagtgaggaaatctttgcccagggattccaacaccttaagtggcttttttttgtggttgccttctgccatagggaacagcctccgtccttttttacagcgttggaaaaccccgcgtacctgcccgggcggccgctcgaatcagctcactcaaaggcggtaatacggttatccacagaatcaggggataacgcaggaaagaacatgtgagcaaaaggccagcaaaaggccaggaaccgtaaaaaggccgcgttgctggcgtttttccataggctccgcccccctgacgagcatcacaaaaatcgacgctcaagtcagaggtggcgaaacccgacaggactataaagataccaggcgtttccccctggaagctccctcgtgcgctctcctgttccgaccctgccgcttaccggatacctgtccgcctttctcccttcgggaagcgtggcgctttctcatagctcacgctgtangtatctcagttcggtgtangtcgttcgctncaagctgggctgggtgcacgaaccccccgttcagcccgaccgctgcgccttatccggtaactatc

SEQ ID NO: 8385 - DNA, 398 bp, Homo sapiens
  misc_feature 11, 386: n = A,T,C or G
cgcgtaatacnactcactatagggcgaattggagctccaccgcggtggcggccggcaagcccccgctccccgggctctcgcggtcgcacgaggatgcttggcacgtacgcgggggtgggtccaggaggcagaactctgggtgtctcaccatggcctggatccctctacttctccccctcctcactctctgcacaggctctgaggcctcctatgaactgacacagccaccctcggtgtcagtgtccccaggacagacggccagggtcacctgctctggagatgcattgccaaagcaatatgcttattggtacctcggccgctctagaactagtggatcccccgggctgcaggaattcgatatcaagcttatcgataccgtcgacctngagggggggccc

SEQ ID NO: 8386 - DNA, 636 bp, Homo sapiens
  misc_feature 16, 564, 573, 576: n = A,T,C or G
actcctatagggcganttggactccaccgcggtggcggccgggtacgcggggagtgtaagaaggccatctacaatcaaggattgagagtggctctaacaagtgccatttttccttgttagctttcatttctcagccctttacaagattaaaatagtctgcagtttaatctctccaaagctttacggacagtgattctgtcctaaacaagacagtgactccaggatttctgaagactattgtggaagaagcatccattaaggccaagctataacatcagaaatggtgaatgaagctctagaactagtggatcccccgggctgcaggaattcgatatcaagcttatcgataccgtcgacctcgagggggggcccggtacccagcttttgttccctttagtgagggttaattgcgcgcttggcgtaatcatggtcatagctgtttcctgtgtgaaattgttatccgctcacaattccacacaacatacgagccgggagcataaagtgtaaagcctggggtgcctaatgagtgagctaactcacatttaattgcgttgcgctcactgnccgcttttncangtcgggaaacctgtcgtgcccagctgcattaatgaatcggccaacgcgcggggaggaggc

SEQ ID NO: 8387 - DNA, 389 bp, Homo sapiens
  misc_feature 359: n = A,T,C or G
gtaaccactactatagggcgaattggagctccaccgcggtggcggccgaggtaccaactggcctcatcctatattcactttcggccctgggaccaaagtggatatcaaacgaactgtggctgcaccatctgtcttcatcttcccgccatctgatgagcagttgaaatctggaactgcctctgttgtgtgcctgctgaataacttctatcccagagaggccaaagtacctgcccgggcggccgctctagaactagtggatcccccgggctgcaggaattcgatatcaagcttatcgataccgtcgacctcgagggggggcccggtacccagcttttgttccctttagtgagggttaattngcgcgcttggcgtaatcatgggtcatagct

SEQ ID NO: 8388 - DNA, 331 bp, Homo sapiens
  misc_feature 3, 4, 8, 13, 21, 22, 31: n = A,T,C or G
ggnntcgntcagnctggaggnntgctctgtntacaattgcaagtaacaaaatggtcatctttaaggtacctgattgcatgcacttaaatgcagattattttggagtttgaaaagggactattaatgaaatctttcttttccctcctttctctttttcccttccccgccactgattcagtgagctggagattggatcacaggtataattcaagcttttcatgtagtcatgtagatcactagactccttggtgtactgacgtagcaatttaaaagcagatcatgtgtagtacatctagaagtagatttacaaatattctgaagagttgtaacc

SEQ ID NO: 8389 - DNA, 440 bp, Homo sapiens
ggcgaattggagctccaccgcggtggcggccgaggtacgcgggggccattactgcaggaaaaggtcccggagagctaagcagtcaagatgtgtgacttcaccgaagaccagaccgcagagttcaaggaggccttccagctgtttgaccgaacaggtgatggcaagatcctgtacgtgccaagcatcctcgtgcgaccgcgagagcccggggagcgggggcttgccggccgctctagaactagtggatcccccgggctgcaggaattcgatatcaagcttatcgataccgtcgacctcgagggggggcccggtacccagcttttgttccctttagtgagggttaattgcgcgcttggcgtaatcatggtcatagctgtttcctgtgtgaaaattgttatccgctcacaattccacacaacatacgagccgggagcataaag

SEQ ID NO: 8390 - DNA, 559 bp, Homo sapiens
  misc_feature 2, 3, 5, 8, 12, 19, 26, 448, 511, 514, 530, 535, 538: n = A,T,C or G
gnngnganttcnttcgggngtcgccncgcgtccgattaccggttctgtacagagtaatgacgatgtgtgacggctgcaaaccaggtgtttttttctgaggctgtgttgacagctgctaatgagcgtgttggtgttttgctcggcagcttggatcctagcatgactatacattgtgacatggtcattacatatggattagaccaactggagaattgccagacttgtggtaccgattatatcatctcagtcttgaatttactcacgctggtatgtgaattattcttttcctttttaatgtgttggtttattcaggcccttaaatggatatgtaagaaattaagggctttgtctgggtatggtggctcatgctagtaatcccagcgctttgggaggccaaagcagaagggttgcttgcatccaggaattctggcacagcttgggcaatgtngtgagaccccatctgtacaaaaaggcaaaaattaacttggtgtggtgggggtgcaccttgccnggncctggtttctcgggangcttnatngagggaggatcgattaaaccc

SEQ ID NO: 8391 - DNA, 626 bp, Homo sapiens
  misc_feature 3, 508, 520, 523, 546, 559, 568, 572, 573, 576, 577, 578,579, 582, 585, 589, 592, 595, 596, 597, 598, 599, 600, 603,606, 612, 616, 617, 621, 624, 625, 626: n = A,T,C or G
gcnagcgcgcaattaaccctcactaaagggaacaaaagctgggtaccgggccccccctcgaggtcgacggtatcgataagcttgatatcgaattcctgcagcccgggggatccactagttctagagcggccgaggtacttcctgcacgaggacatgaagctccattgtgtggaaagctgtttcgcgagcggtcggtaaaatcctgaaagagggagaaggagtgagtaaggcagaaagcccagcccagaaaaccggcgtctggggatttcagcctccgctccccggtccccagcccggtggctctccccgcgtacctgcccgggcggccgccaccgcggtggagctccaattcgccctatagtgagtcgtattacgcgcgctcactggccgtcgttttacaacgtcgtgactgggaaaaccctggcgttacccaacttaatcgccttgcagcacatccccctttcgccagctggcgtaatagcgaagaggcccgcaccgatcgcccttnccaacagttgcncanccttgaatggcgaatgggacgcnccctgtagcggcncattaagcnccgnnggnnnnggnggntacnccncannnnnnccnttncacttnccanncccntannn

SEQ ID NO: 8392 - DNA, 714 bp, Homo sapiens
  misc_feature 1, 2, 3, 4, 5, 6, 7, 8, 9, 10, 15, 16, 92, 98, 99, 505, 545,588, 623, 680, 682, 701, 702, 704, 712: n = A,T,C or G
nnnnnnnnnntgtgnnccgagcgtcgggctctctagatgcatgctcgagcggccgccagtgtgatggatatctgcagaattcggcttagctntggtcnngggccgaggtacaagtatgataaattattttctatttgctgtgggaatttaaatgtaaaataaatacaaaatacatgtgtggtttaatgaacactcaatgaagcatctcttctgaggtattcctttcagtctggttttatcccagatctttttacttcccctaggaatagtctattaaaccacacaatggatctgtgaacttgtagatcaagttcactgtaaatctgtgaacttgtgttttaattacattagacatattttttgatctcatcatacaacaccaatacaaaagcaccgccatgcctctcagcacattggaccaggcacctttgaagaaggcttggctccttcgcttttgcaatcttctccagcagtcaactgtcccgtgtcctgccggcggccgtcnaaattcagacactgcggccgtactagtgatcggctcgggnccagcttgcgtaacatgtcatagtgttctggtgaatgtatccntacaattccacacatacaccgagctaagttaagcntggggctatgaggactactacataatggtggctactgcccttcacggaactgctgcntnataataacgcaccccgggnngngttgttgncc

SEQ ID NO: 8393 - DNA, 679 bp, Homo sapiens
  misc_feature 233, 296, 314, 349, 372, 375, 387, 390, 397, 413, 416, 420,427, 429, 437, 440, 442, 445, 446, 448, 451, 460, 461, 462,465, 466, 467, 468, 470, 479, 480, 485, 497, 498, 502, 512,515, 524, 528, 532, 539, 542, 551, 553, 554, 556, 557: n = A,T,C or G
  misc_feature 559, 563, 577, 583, 587, 590, 596, 597, 598, 602, 604, 608,609, 610, 622, 627, 628, 634, 641, 660, 672, 675, 677: n = A,T,C or G
ggagctccaccgcggtggcggccgcccgggcaggtacgcgggggtagatggaaggaagaacttgtgtgcttagacctgacgctgggaggagatgctgccacctaggttacttgtaggaccctatacggcaacctcctttgccaggaactatttataaacatcctgcaggaaaatggtagctgagaccaatgatgctgacctccctcaaaagctgcatttctgaatttctgaangcaaactgtctgcctatattgtacctcggccgctctagaactagtggatcccccgggctgcangaaattcgatatcaagcntatcgataccgcgacctcgagggggggccccggtncccaagctttttggttcctttanggnagggttaattgnccnccttggnggtaatcattgggcanagnctgntttcctngnggaaatgngtntnccnntnacnaatttcccnnnaannnncnaaaccgggnnccatnaaaagtgaaaanncccnggggggcccnatngaggggggncccncccnaattttnttnggggggggncnncnngncccnttttttaaaggggnaaaccnttgnggncccctnnntttntnaatnnnccacccccccgnggggnngggggnttttatnttggcgcccttttcctttntttcttaaaaantantngg

SEQ ID NO: 8394 - DNA, 464 bp, Homo sapiens
  misc_feature 2, 3, 4, 7, 8: n = A,T,C or G
gnnnggnncccgaaacatacttagggcgaattggagctccccgcggtggcggccgcccgggcaggtacataacaaacatggcgaaaaaggagatgtttgaaaccatctgcatttttttctgtgatcggtctttaagctcactgtaaattggcaggactgacgggtggcaaacaaatgcaaatgcaatggtgggtaaagcatacacggtctttgaattgaaggtaacatattttggcgtacctcggccgctctagaactagtggatcccccgggctgcaggaattcgatatcaagcttatcgataccgtcgacctcgagggggggcccggtacccagcttttgttccctttagtgagggttaattgcgcgcttggcgtaatcatggtcatagctgtttcctgtgtgaaattgttatccgctcacaattccacacaacatacgagccgggagcataaagtgtaaag

SEQ ID NO: 8395 - DNA, 550 bp, Homo sapiens
  misc_feature 2, 20, 445, 454: n = A,T,C or G
gncgctgttccggttcgccncgcgtccgtgaatgtatccctctaaaattcatatattgaatctctaatccccaatgtgatgacactaggaagtaaagcccttgggagataattaggtttagatgaggacatgaggatgggatcctcatgatgaaattagtacccttatatgaagagaccagatagccctcccgccgagtccgtatctctccctgccatgtaaggacacagcaatatgacagacaagtcaagaagtcaagacaggcaagtcaggaagagggtcctcaccaagaacccaatcagccagccccttggtcttggtttcccaaccttcagaactgtgaaaaataaatgtttgttgtttaagctacccagtctgtactattttgttatagcagcccaagctgactaagataaatcgcttgtacctctacttttggtttctnatataattnaagagactaatacatttaaaaaaattattaacctaaaaagctattcttgcacctttggtttgaaactccactggttggttgtctacataatttaag

SEQ ID NO: 8396 - DNA, 455 bp, Homo sapiens
  misc_feature 2, 212: n = A,T,C or G
gnagccctatcatacttagggcgaattggagctccccgcggtggcggccgtcgcactcatttacccggagacagggagaggctcttctgcgtgtagtggttgtgcagaccctcatgcatcacggagcatgagaagacgttcccctgctgccacctgctcttgtccacggtgagcttgctgtagaggaagaaggagcccgtcggaagttccancacggggaggcgtggtcttgtaggttgttctccggccgctctagaactagtggatcccccgggctgcaggaattcgatatcaagcttatcgataccgtcgacctcgagggggggcccggtacccagcttttgttccctttagtgaagggttaattgcgcgcttggcgtaatcatggtcataagcctgtttcctgtgtgaaattgttatccgctcacaattccacacaacattaccgagccggg

SEQ ID NO: 8397 - DNA, 692 bp, Homo sapiens
  misc_feature 30, 490, 500, 509, 527, 550, 575, 578, 604, 607, 621, 627,630, 631, 634, 635, 641, 645, 652, 669, 674, 676, 684, 685,686, 689, 690: n = A,T,C or G
ggagctccaccgcggtggcggccgcccggncaggtactgcttctataagaacgtggtcctgtatattattgagctttggttcgcctttgttaatggattttctgggcagattttatttgaacgttggtgcatcggcctgtacctcggccgctctagaactagtggatcccccgggctgcaggaattcgatatcaagcttatcgataccgtcgacctcgagggggggcccggtacccagcttttgttccctttagtgagggttaattgcgcgcttggcgtaatcatggtcatagctgtttcctgtgtgaaattgttatccgctcacaattccacacaacatacgagccgggagcataaagtgtaaagcctggggtgcctaatgagtgagctaactcacattaattgcgttgcgctcactgcccgctttccagtcgggaaacctgtccgtgccagctgcattaatgaatcggccaacgcgcggggagaggcngtttgcgtanttggcgctnttccgcttccttcgctcntgactcgctgcgctcggtcgttngggctgcggggagcggtatcagctnatncaaagcggtaataccgttatccacanatnagggggatacgcanggaaanaannggnngcaaangcancaaaggncagaaccgtaaaaggcngtggngnggtttttnnnagnncc

SEQ ID NO: 8398 - DNA, 414 bp, Homo sapiens
cgcgtaatacgactcactatagggcgaattggagctccaccgcggtggcggccgcccgggcaggtacattggtgatcggagtatagttggagcgctttgtcatgatttccaggttggctttgtccacagctatgttggccaatgcaccttgagcctcaaagctggcaaatcgtccaaattcttcaagccgccagaccgtctccttctttgccatatccacatggaaaatctcatcaccccgcgtacctcggccgctctagaactagtggatcccccgggctgcaggaattcgatatcaagcttatcgataccgtcgacctcgagggggggcccggtacccagcttttgttccctttagtgagggttaattgcgcgcttggcgtaatcatggtcatagctgtttcctgtgtgaaa

SEQ ID NO: 8399 - DNA, 893 bp, Homo sapiens
  misc_feature 2, 3, 316, 329, 340, 402, 416, 420, 426, 441, 446, 451, 471,480, 484, 498, 504, 516, 523, 524, 525, 557, 560, 561, 566,567, 571, 591, 593, 595, 598, 607, 612, 614, 615, 620, 621,622, 627, 632, 633, 635, 636, 646, 647, 656, 659: n = A,T,C or G
  misc_feature 666, 670, 671, 682, 684, 685, 686, 689, 690, 696, 700, 703,708, 712, 713, 717, 722, 723, 729, 732, 734, 747, 752, 755,760, 763, 769, 772, 775, 776, 779, 784, 785, 791, 794, 797,798, 805, 810, 812, 827, 838, 839, 846, 870, 875, 884: n = A,T,C or G
gnntgaatgccccgactactataccgcgaattgggccctctagatgcatgctcgagcggcccgccagtgtgatggatatctgcagaattcggcttcgagcggccgcccgggcaggtacaaaactttttaaattttatattattttgaaactttgctttgggtttgtggcaccctggccaccccatctggctgtgacagcctctgcagtccgtgggctggcagtttgttgatcttttaagtttccttccctacccagtccccattttctggtaaggtttctaggaggtctgttaggtgtacctcggccgcgaccacnctaagccgaattncagcacactgncggccggtactagtggatccgagctcggtaccaagcttggcgtaatcatggtcatacgctgnttcctgtgggaaantgtnatccgntcacaattccacacnacatnccaancccgaagcattaaagtgtcnagcctggcngtgnctacatgaagtganctaacncacattaattgncgttgannncacccgtccccttttcacttcgggaaaacctngtnntgccnngctncattaatgcatttggaccancncnccngaggaaaangcccntnncgccnnntttgngccgnncnnttcaaatttnnttaattaantgnaattcgnttgnngcttaaacttntnnngtnncccctnaacnggngtttnaccnnaacntcaannaggggngtnancccggtttccccnaaaanccnggggntantccccnggnaannacntgttnncaaagnccnccnnaaggccnctaancnttataagggcccctngtcccctcttnnaataatnccttttcccttcctactaactaancctgncctcggccntcgggtgcc

SEQ ID NO: 8400 - DNA, 471 bp, Homo sapiens
  misc_feature 6, 10, 27, 335: n = A,T,C or G
cgcgtnatangacttactatatggctnattggagctccccgcggtggcggccgaggtacgcggggggagcgctttaggctggccggcggcgctgggaggtggagtcgttgctgttgctgtttgtgagcctgtggcgcggcttctgtgggccggaaccttaaagatagccgcaatggctgaaaatggtgataatgaaaagatggctgccctggaggccaaaatctgtcatcaaattgagtattattttggcgacttcaatttgccacgggacaagtttctaaaggaacagataaaactggatgaaggctgggtacctgcccgggcggccgctctanaactagtggatcccccgggctgcaggaattcgatatcaagcttatcgataccgtcgacctcgagggggggcccggtacccagcttttgttccctttagtgagggttaattgcgcgcttggcgtaatcatggtcata

SEQ ID NO: 8401 - DNA, 406 bp, Homo sapiens
  misc_feature 5, 7: n = A,T,C or G
gagcncnccgtaatacgactcactatagggcgaattggagctccaccgcggtggcggccgaggtacgagttgctacgctgctgacagtaataaactgcaaaatcttcaggctctaggctgctgatggtgagagtgaagtctgtcccagacccactgccactgaacctggctgggatgccagtggccctgttggatgcatcatagatgaggagcctgggagcctggccaggtttctgttggtacctgcccgggcggccgctctagaactagtggatcccccgggctgcaggaattcgatatcaagcttatcgataccgtcgacctcgagggggggcccggtacccagcttttgttccctttagtgagggttaattgcgcgcttggcgtaatcatggtcatagctgtt

SEQ ID NO: 8402 - DNA, 450 bp, Homo sapiens
aatacgactactatagggcgaattggagctccccgcggtggcggccgaggtacgcggggaagagagagggagagagagagaaagaagagcaggaaagatcccgaaaggaggaagaggtggcgaaaaatcaactgccctgctggatttgtctttctcagcaccttggcgaagccttgggtttctttcttaaaggactgatttttagaactccacatttgagaacggccgctctagaactagtggatcccccgggctgcaggaattcgatatcaagcttatcgataccgtcgacctcgagggggggcccggtacccagcttttgttccctttagtgagggttaattgcgcgcttggcgtaatcatggtcatagctgtttcctgtgtgaaattgttatccgctcacaattccacacaacatacgagccgggagcataaagtgtaaagcctggg

SEQ ID NO: 8403 - DNA, 466 bp, Homo sapiens
  misc_feature 3: n = A,T,C or G
ctnctatagggcgaattggagctccaccgcggtggcggccgaggtactggctgtccacccctgagcccatgcccatgtcaatggcacccatcacgggggaaaacataagaccatttattagtaggtgtgctgtgtgtgaggcgcctgccatggtgatggccgtgcacagccagaccattcagatcccaccgtgccccagcgggtggtcctcgctgtggatcggctactcttttgtgatgcacaccagcgctggtgcagaaggctctggccaagccctggcgtcccccggctcctgcctggaggagtttagaagtgcgccattcatcgagtgtcacggccgctctagaactagtggatcccccgggctgcaggaattcgatatcaagcttatcgataccgtcgacctcgagggggggcccggtacccagcttttgttccctttagtgagggttaattgcgcgcttgg

SEQ ID NO: 8404 - DNA, 586 bp, Homo sapiens
  misc_feature 2, 3, 12, 29, 87, 109, 118, 130, 132, 137, 145, 146, 149,154, 156, 159, 167, 169, 191, 193, 200, 226, 228, 236, 246,263, 266, 281, 295, 300, 301, 314, 332, 335, 336, 339, 344,348, 354, 356, 357, 361, 373, 378, 397, 404, 407, 410: n = A,T,C or G
  misc_feature 412, 424, 427, 431, 437, 438, 442, 445, 452, 456, 457, 472,477, 484, 497, 504, 506, 508, 512, 513, 514, 515, 530, 535,545, 546, 549, 554, 555, 557, 558, 562, 563, 569: n = A,T,C or G
gnngttggggcnccccgccgctcaagctnttttaggtttgagggggaatgctggagattgtaatgggtatggagacatatcatatangtaatgctagggtgagtggtangaagttttntcatacgaggtntntgagntggtcgtnncgnaatcngnggnatgctgtncnaattcataataacagggaggtntngaagtanggtcttggtgacaaaaatttgtttgncntagacctncactgggaanactagccttcatatttntgnatcctagggacaganttgacccccgcgtnagggnngttctatccatanataattgcaccgttgttnttnngcntatanaatnaaatangnngctnaaagggggcccncgccngtcgtacttcgtattgttntgaaatncanttntnttacctaatatntcnggancttccnncctnctngtcaaangttnnaaaatggggagggcnccgtntgtaggntccctgtttgacncattggntngnattnnnnaaaccttcaataatntgggngtgacccaannggntttcnncnnaatnnggccanttggactttaaattcac

SEQ ID NO: 8405 - DNA, 404 bp, Homo sapiens
  misc_feature 391: n = A,T,C or G
tacttagggcgaattggagctccaccgcggtggcggccgcccgggcaggtacagcccaatgagatctgcgtcattcagagaggaatgcggttcagcatagatgtctttgaggagaccaggggctacatcttggaggtctatggtgtccactttgagttacctgaccttggaccaattggggccaatggcttggccaatcctcgtgatttcttgatacccattgcctggtatgaggatcgccaagtacctcggccgctctagaactagtggatcccccgggctgcaggaattcgatatcaagcttatcgataccgtcgacctcgagggggggcccggtacccagcttttgttccctttagtgagggttaattgcgcgcttggcgtaatcatnggtcatagctgtt

SEQ ID NO: 8406 - DNA, 399 bp, Homo sapiens
gagcgcgccgtaataccgactcactatagggcgaattggagctccaccgcggtggcggccgaggtacattttatttttctcaagaaatacgttaagtccaactgctgaacatacatcttgaatctctgtagctgtaggattttcaacagccttacttatggggattcgccttccctctgcgatggtcttcttattatttaaataagcaggatagatacaaataaacctgtcctggtcggccgctctagaactagtggatcccccgggctgcaggaattcgatatcaagcttatcgataccgtcgacctcgagggggggcccggtacccagcttttgttccctttagtgagggttaattgcgcgcttggcgtaatcatggtcatagctgtttcctgtgtg

SEQ ID NO: 8407 - DNA, 880 bp, Homo sapiens
  misc_feature 2, 3, 662, 716, 729, 768, 774, 780, 788, 801, 819, 840, 846,861, 862, 864, 871, 873, 874: n = A,T,C or G
tnngcccgtatacgactactatagggcgaattggagctccacccgcggtggcggccgcccgggcaggtactttggcctctctgggatagaagttattcagcaggcacacaacagaggcagttccagatttcaactgctcatcagatggcgggaagatgaagacagatggtgcagccacagttcgtttgatctccaccttggtcccttggccgaacgtccacgttttgaaatcagtacctcggccgctctagaactagtggatcccccgggctgcaggaattcgatatcaagcttatcgataccgtcgacctcgagggggggcccggtacccagcttttgttccctttagtgagggttaattgcgcgcttggcgtaatcatggtcatagctgtttcctgtgtgaaattgttatccgctcacaattccacacaacatacgagccgggagcataaagtgtaaagcctggggtgcctaatgagtgagctaactcacattaattgcgttgcgctcactgcccgctttccagtcgggaaacctgtcgtgccagctgcattaatgaatcggccaacgcgcgggggagaggcggtttgcgtattgggcgctcttccgctttcttcggttaactgactcgcttgcgcttcggggcggttcggctgccggcnaagccggtatcagcctcacctcaaagggccgggaaataccgggtattccacaanaaatgagggggantaaccccaggaaaagaaccatgttgagccaaaaggccancaaaanggccangaaaccgnaaaaaaggcccgnttgttggcggtttttcantagggttcccccccctgagangcatcncaaaaaatcactctnnanttaagangnngccaat

SEQ ID NO: 8408 - DNA, 408 bp, Homo sapiens
cgtatacgactcactatagggcgaattggagctccaccgcggtggcggccgcccgggcaggtacacttttggtcaggggaccaagctggagatcaaacgaactgtggctgcaccatctgtcttcatcttcccgccatctgatgagcagttgaaatctggaactgcctctgttgtgtgcctgctgaataacttctatcccagagaggccaaagtacctcggccgctctagaactagtggatcccccgggctgcaggaattcgatatcaagcttatcgataccgtcgacctcgagggggggcccggtacccagcttttgttccctttagtgagggttaattgcgcgcttggcgtaatcatggtcatagctgtttcctgtgtgaaattgttatccgctcacaattccacac

SEQ ID NO: 8409 - DNA, 1121 bp, Homo sapiens
  misc_feature 3, 4, 6, 12, 13, 17, 22, 23, 27, 29, 32, 38, 39, 47, 48,50, 51, 54, 62, 63, 66, 67, 70, 71, 72, 73, 75, 77, 79,80, 81, 82, 84, 86, 87, 88, 90, 92, 93, 99, 100, 101, 110,111, 297, 428, 481, 569, 685, 689, 736, 751, 756, 761, 764: n = A,T,C or G
  misc_feature 774, 775, 781, 782, 792, 813, 848, 851, 857, 863, 868, 875,882, 886, 911, 926, 927, 938, 940, 941, 942, 951, 952, 964,966, 967, 971, 979, 985, 987, 997, 1004, 1032, 1034, 1050,1062, 1064, 1092, 1097, 1099, 1107, 1114, 1115, 1116: n = A,T,C or G
ccnntnttctanntttntttanntatntntanctattnnaccatttnnannttnccatgagnnatnntcnnnntncntnnnntnannngnannataatnnnattcctatnnggcgaattggactccaccgcggtggcggccgaggtacgcgggggtcggcggtggttgggtggtaagatggcggctgtgagtctgcggctcggcgacttggtgtgggggaaactcggccgctctagaactagtggatcccccgggctgcaggaattcgatatcaagcttatcgataccgtcgacctngagggggggcccggtacccagcttttgttccctttagtgagggttaattgcgcgcttggcgtaatcatggtcatagctgtttcctgtgtgaaattgttatccgcttcaccaattccacaccaacattaccnaagcccgggtagcataaaggtggtaaagccttgggggtgccttaattggagtngagcctaaactcacatttaaattgcgttgcgctcaacctgccccgcttttccaagtcggggaaacccctgttcgttgcccaggctgcnatttaaatgaaattcggccccaaccgcctccggggggaagagggccgggttttgccgtaatttgggccgccttctttcccgcttttcccttcgcttcaactggacttcggcttgcnggcntcgggtccggtttccggggcttggccgggccgaaggcgggttaattnaagccttcaacttcnaaaangggcnggntaaattaacnnggtttnntttccacaanaaaattcaaggggggggattnaaccgccaagggaaaaagaaaacatttgttggagnccnaaaaangggccnacccnaaaaaangggcccnaggnaaaacccgttaaaaaaaagggcccncgtttggccttggcnntttttttcccntnnngggcttccnncccccccttggncnnaggncatttacnaaaaanantttggccccntttaaangttcaaaaagggggggccaaaaaccccncncaggggcttttttaangaaaccccgggngnttttcccccctgggaaaagcttcccttnggggncncttttccntgtttcnnnaccct

SEQ ID NO: 8410 - DNA, 393 bp, Homo sapiens
cgcgtaataccgactcactatagggcgaattggagctccaccgcggtggcggccggacggaaagcttagatatgccaacaacagcaattacaaaaatgatgtgatgatcagaaaagaggcttatgtgcacaagagtgtaatggaagaactgaagagaattattgatgacagtgaaattacaaaagaagatgatgctttgtggcctccccctgatagggttggccgacaggagcttgaaattgtaattggagatgagcacatatcttttaccacatcaaaaataggttctcttattgatgtaaatcagtcaaaggatcctgaaggccttcgagtattttactatttggtacctcggccgctctagaactagtggatcccccgggctgcaggaat

SEQ ID NO: 8411 - DNA, 873 bp, Homo sapiens
  misc_feature 302, 432, 465, 485, 518, 535, 633, 639, 650, 660, 684, 688,693, 700, 722, 731, 733, 740, 741, 755, 760, 763, 770, 771,783, 795, 797, 802, 803, 807, 813, 819, 820, 826, 844, 848,853, 855, 859, 873: n = A,T,C or G
gggcgaattggagctccaccgcggtggcggccgcccgggcaggtacgcgggcggtcaccatccaggggagactccacctctcatcaccccaggctcagcccaaagctgatgaggacagaccagctgaaattgggtggaggaccgttctctgtccccaggtcctgtctctgcacagaaacttgaactccaggatggaattcttcctcctctgctgggactcctttgcatggcagggcctcatctcacctctcgcaagagggtctctttgttcaatttttttttatctaaaatgattgtgcctntgtcaaaaaaaaaaaaaaaaaaaaaaaaaaggtcctcggccgctctagaactagtggatcccccgggctgcaggaattcgatatcaagcttatcgataccgtcgacctcgagggggggcccggtacccancttttgttccctttagtgagggttaattgcgcncttggcgtaatcatgggtcntagctgtttcctgtgtgaaaattgttatcccgntcacaaattcccacacnaacaataccgagcccggggagccataaaagttgttaaagcccttggggggtgccctaaatgaggtggagcctaacctcacatttaattgccggttggngccttnactggccccgnctttttcaantccggggaaaacccttgtctgtgnccancttgnaattaantggaaattccggcccaaccccnccgggggananggccggnnttttgcggtaattnggggngcntctttanncctttccttggntcaacttgaaantngcttnncccntggtantctttnngttttngggggagagcgggttttnaaanttttnanccanaagggggggaaaan

SEQ ID NO: 8412 - DNA, 786 bp, Homo sapiens
  misc_feature 2, 3, 4, 5, 8, 10, 15, 671, 695, 701, 725, 728, 756, 775,786: n = A,T,C or G
gnnnngtntnccccntctcgaaattaaccctactaaagggaacaaaagctggagctccaccgcggtggcggccgctctagaactagtggatcccccgggctgcaggaattcggcacgagtctcctcaggggggccagattgcgatcgcgatgaggcttcggaaccagctccagtcagtgtacaagatggacccgctacggaacgaggaggaggttcgagtgaagatcaaagacttgaatgaacacattgtttgctgcctatgcgccggctacttcgtggatgccaccaccatcacagagtgtcttcatactttctgcaagagttgtattgtgaagtacctccaaactagcaagtactgccccatgtgcaacattaagatccacgagacacagccactgctcaacctcaaactggaccgggtcatgcaggacatcgtgtataagctggtgcctggcttgcaagacagtgaagagaaacggattcgggaattctaccagtcccgaggtttggaccgggtcacccagcccactggggaagagccagcactgagcaacctcggcctccccttcagcagctttgaccactctaaagcccactactatcgctatgatgagcagttgaacctgtgcctggagcggctgaattctggcaaagacaagaataaaagcgtnctgcaaaacaagtatgtccgatgntcttgntagagctgaggtaccccatcttcnganggtcctgtgtcaccgcttgatgcttaanccttaacatgtgcagttcnttttgacaatn

SEQ ID NO: 8413 - DNA, 710 bp, Homo sapiens
  misc_feature 1, 2, 3, 5, 6, 7, 8, 12, 14, 15, 24, 29, 30, 32, 38, 39,41, 42, 44, 45, 47, 48, 55, 57, 60, 62, 64, 65, 74, 76,81, 82, 84, 89, 92, 93, 94, 95, 96, 97, 98, 99, 100, 101,104, 105, 119, 121, 150, 224, 237, 375, 407, 439, 450, 458: n = A,T,C or G
  misc_feature 466, 488, 500, 506, 519, 546, 560, 627, 644, 660, 667, 685: n = A,T,C or G
nnntnnnnattnannctttattancactnntnctaatnntnntnntnnaataatnantananannttataatantnaaatnnanatatnatnnnnnnnnnnagnncgttgattgatccnantccccgcggcggcggccgaggtacctgtntccatccatgattgtcatcagcacaccaaactctgaattcaatcccctgtttccatcagtgaccttaagagagncagatcataaatntgagtggaccagaatggagtatcagacctgggctttatatgtggcaaatcgctatgattactctgtggagtttactggtgtcggggaaccaccagctggagctgagaatgtttggatactgtacctgcccgggccggnccgctctaggaactaggtgggatcccccgggnctgcagggaattcgatattcaagcttatcganacccgtcgacnctcgaggnggggggcnccggttaccccaagctttttgnttcccttttaantggagnggtttaaattgcnccgctttggggcgtaaatcaatggggncaataagcctgttntcctggtgtggaaaaattgtttattcccggcttcaccaaattcccacaacaaacaataaccgaagcncggggaggcattaaaangtggtaaaaagccctnggggggntggccctaaatggaggtngaagccttaaacttcacaattaaaa

SEQ ID NO: 8414 - DNA, 888 bp, Homo sapiens
  misc_feature 2, 6, 7, 515, 603, 635, 661, 685, 696, 723, 770, 794, 802,807, 816, 822, 824, 825, 841, 851, 868, 873, 887, 888: n = A,T,C or G
gnaagnnatattagggagtcgaccccgcgtccggagagaattgtaatacgactcactatagggatctagatcaagagcggccgctagactagtctagagaaaaaacctcccacacctccccctgaacctgaaacataaaatgaatgcaattgttgttgttaacttgtttattgcagcttataatggttacaaataaagcaatagcatcacaaatttcacaaataaagcatttttttcactgcattctagttgtggtttgtccaaactcatcaatgtatcttatcatgtctggatccccgggtaccgagctcgaattaattcctcttccgcttcctcgctcactgactcgctgcgctcggtcgttcggctgcggcgagcggtatcagctcactcaaaggcggtaatacggttatccacagaatcaggggataacgcaggaaagaacatgtgagcaaaaggccagcaaaaggccaggaaccgtaaaaaggccgcgttgctggccgttttttccatangctccgcccccctgacgagcattcacaaaaaatcgacgcttaaagtcagaggtggcgaaaacccccgaccagggacttattaaagatnccagggcgttttccccccttggaagcttcccntcgtggcgcctcttcctgtttccganccctggccgctttacccggaatancctggtcccgncctttcttccctttcggggaaagcggngggcgctttttttcataagcttcaacccctgtaagggtattcttcanattccgggggtaagggtcggttcncttccaangcttngggcttggngtgccncnnaaacccccccggtttnaagccccganccggttggggccctttnttccngggaactttttcgnn

SEQ ID NO: 8415 - DNA, 714 bp, Homo sapiens
  misc_feature 249, 252, 266, 270, 272, 281, 292, 295, 296, 300, 301, 302,304, 311, 324, 325, 331, 332, 333, 335, 347, 350, 351, 365,366, 371, 373, 375, 378, 379, 381, 382, 388, 389, 390, 393,397, 398, 403, 404, 405, 406, 408, 413, 415, 419, 421: n = A,T,C or G
  misc_feature 424, 425, 426, 427, 429, 432, 433, 434, 440, 441, 443, 444,447, 448, 458, 462, 464, 466, 472, 473, 474, 477, 479, 480,481, 483, 484, 485, 486, 488, 489, 495, 497, 498, 501, 502,503, 506, 508, 510, 511, 513, 519, 520, 522, 528, 530: n = A,T,C or G
  misc_feature 531, 532, 534, 538, 540, 541, 542, 547, 548, 552, 553, 554,556, 558, 561, 563, 564, 565, 569, 574, 575, 577, 579, 583,585, 587, 594, 595, 599, 602, 604, 605, 606, 607, 609, 610,613, 615, 619, 620, 623, 630, 632, 634, 637, 639, 641: n = A,T,C or G
  misc_feature 642, 644, 645, 646, 650, 652, 654, 655, 656, 657, 658, 660,662, 665, 668, 669, 673, 678, 681, 684, 685, 686, 687, 692,696, 699, 701, 702, 704, 706, 709, 711, 713: n = A,T,C or G
tacttagggcgaattggagctccaccgcggtggccggccgcccgggcaggtaccagcagaaacctggccaggctcccaggctcctcatctatggtgcatccaccagggccactggtatcccaggcaggttcagtggcagtgggtctgggacagagttcactctcaccatcagcagcctgcagtctgacgatttttgcagtgttattactgtctcccagtataaataactggcccttcgtaacctcgggncgntctagaaacttagngggntncctcccggncttgctagganttnngttnnncntgctttntcggttacccgtnnaccctnnnanggggggtgcccnggnncccatcttatctgnngcttntngntgnngnnttaatnnnccncgcnntgtcnnnntnttttntntttntnatnnnnanctnnntatatnntnnttnnctattaaatnttantntnatactnnnatnannncnnnntnntaccantnncannnatnananngnttctgnnangagtgnannncntcgnannnccagnntatnnncngntgntnnnatanttatnnantnctgntntnatgtatnngaanttntnnnntnntgntnttcnnttncattcantntntancnanntnnncatnancnnnnntncngtnatnntttncttancantannnntacanattntcntnnantnctncntnt

SEQ ID NO: 8416 - DNA, 802 bp, Homo sapiens
  misc_feature 3, 4, 5, 6, 8, 10, 23, 27, 28, 30, 532, 591, 594, 659, 705,708, 714, 719, 760, 762, 775, 781, 800, 802: n = A,T,C or G
agnnnnancnaacaactcctatntggnnantggggccctctagatgcatgctcgagcggccgccagtgtgatggatatctgcagaattcgcccttagcgtggtcgcggccgaggtacagactccaagtccaaagcaaatacccatggcatgaacaaataggatgcctaagattctaacatttgcttcggcatggctttcctcctcacttccctacctcacaacaagaaaaaatttcctagatgggacaatggcaagatattgtgctaatacatttcataggatttctagatgctgggctataacatccaggttacaatttggtgacggatttttttatttctattgcaaatggactacactccaaacacaaaaagattcttgccatagcatccaaacatccctatgtagacccacacttcctctcaatacagaaagagaatcactcagaaaggacaaagctggcagaccaagaaaggaggcaagggtaaactctgtcactggccaattatctaaaacaaaaatagcagcctntgttatcaaagttgtcagttaaaactgtcagctgtcaggcacagtgacacacacctgtnatnccaacactttgggagcccaaaggtgggggggatcgcttgagcccaggagttttgagacaagactnggccacacagaaaaaccccctttttttcaaaaaatacaaaacttanccnggtgtnggggngtgtgcctgtatcccaactgcttcaggaggataagggagangnacacttgaccccngaggtngggttgaatgaaccctttntn

SEQ ID NO: 8417 - DNA, 747 bp, Homo sapiens
  misc_feature 97, 100, 468, 567, 593, 595, 606, 618, 619, 634, 637, 644,659, 662, 668, 674, 693, 703, 737, 738, 741, 743, 744: n = A,T,C or G
atagggcgaattgggccctctagatgcatgctcgagcggccgccagtgtgatggatatctgcagaattcggcttagcgtggtcgcggccgaggtacnacnagtcgggcccctccatcgtccaccgcaaatgcttctaaacggactcagcagatgcgtagcatttgctgcatgggttaattgagaatagaaatttgcccctggcaaatgcacacacctcatgctagcctcacgaaactggaataagccttcgaaaagaaattgtccttgaagcttgtatctgatatcagcactggattgtagaacttgttgctgattttgaccttgtattgaagttatctgttccccttggtatttgtttaataccctgtaccttgcccgggcggccgctcgaaagcccgaattccagcacactggcggccgttactagtggatcccgagctcggtaccaagcttggcgtaatcatggncatagctgtttcctgtgtgaaattgttatcccgctcacaattccacacaacatacgagccggaagcataaaatgtaaaagcctgggggtgcctaatgangtgagctaactcacattaaattgcgntngcgctcactgnccgcttttccannccggggaaaccctgntcntgcccancctgccattaaatgnaantccggncaaccnccccgggggaagaagggcnggttttgcgntatttggggccgcctcttttcccgctttcctcanntcnanntgg

SEQ ID NO: 8418 - DNA, 369 bp, Homo sapiens
  misc_feature 7, 8, 241, 280, 336: n = A,T,C or G
gtggtgnnggcccgccgggcaggtacagccttgtttcaaactgttcactgtgatctgtgggtctttgagtttcagtgagtttgctgaaatgtcgaagaagtagttccaaacttcaatgttcaatgaaatttttgttcaagtttgaaatggagagagcagctttaaaaggtacctcggccgctctagaactagtggatcccccgggctgcaggaatttcgatatcaagcttatcgataccgncgacctcgagggggggcccggtacccagctttttgtttncctttagttgagggttaattgcgccgcttggcgtaatcatgggtcatagctgtttncctgtgtgaaattgttatccgctcacaattcca

SEQ ID NO: 8419 - DNA, 591 bp, Homo sapiens
  misc_feature 3, 4, 12, 14, 16, 18, 19, 24, 27, 457, 578, 587: n = A,T,C or G
ggnngttttttntntnanntagtntancggccgcccttttttttttttttttttaatatgaggtttcatatttattttggtcataaacatatgagtatttcatatataaccaggtgttatgtgctatttggcccgggtataaagcaaaacctaaacaaatcaaccaacgccaaaaaaccccaacaatttcatgttgtcaggaagcttatgttaaaggaataagcttaaacactgataaggctggtagtctagatgcatcttcaaggaaggcctctgaggaagggacaaaggagctgggaccggactggctctctctgagctttgagaccaagtctcctgcacagaaggcccagcaaaggcaaagactaggaggcagcagcaccctgtgtcatccagaagtgcaggggacaaggtgtgggacgccagatggaagtgggagaggatggaagtgcgaaanaccggaaggccattcccctcttaaacttccatggacacaacaatctgaatgtgcgaacttcaggcagttttacttttgtcccagccaaaccagtcccggaacaaaacccccatgccttganatggaaaanactg

SEQ ID NO: 8420 - DNA, 402 bp, Homo sapiens
  misc_feature 2, 9, 12, 19, 24, 30, 148, 390, 397, 398, 399, 400, 401, 402: n = A,T,C or G
anccgcatnatngacatantatgnttgctnattggagctccaccgcggtggcggccgcccgggcaggtacgcgggggcggcggtcactgcgccggggtagtgggccccagtgttgcgctctctggccgttccttacactttgcttcangctccagtgcaggggcgtagtgggatatggccaactcgggctgcaaggacgtcacgggtccagatgaggagagttttctgtacctcggccgctctagaactagtggatcccccgggctgcaggaattcgatatcaagcttatcgataccgtcgacctcgagggggggcccggtacccagcttttgttccctttagtgagggttaattgcgcgcttggcgtaatcatggtcatagcttttttnccttgannnnnn

SEQ ID NO: 8421 - DNA, 452 bp, Homo sapiens
  misc_feature 430: n = A,T,C or G
tgccctatcactactatagggcgaattggagctccccgcggtggcagcggccgcccgggcaggtacgcgggggacaccctagatcccaagatctccaaggatttggtggcatacccactccagcacacagaagcatgaggttcatgactctcctcttcctgacagctctggcaggagccctggtctgtgcctatgatccagaggccgcctctgccccaggatcggggaacccttgccatgaagcatcagcagctcaaaaggaaaatgcaggtgaagacccagggttaggcccagacaggcaccaaagcccaagggaagcaggagaatccagcccttctgggaaaaagggccttagaaccgggagttaaaaaaaaggctgtggggggggggactcgggaaaacctagggaaaaaagaatgcagtccgaagnatcttaagaaaggcgttgggtt

SEQ ID NO: 8422 - DNA, 432 bp, Homo sapiens
  misc_feature 5, 409: n = A,T,C or G
gactnctatagggcgaattggagctccccgcggtggcggccgaggtacgcgggaagaagggtcagctcagggtgttgccatgggaatgaaattcatattgcctaaccgatttgatatgaatgtgtgttctcgatttgtgaagtccttaaatgaagaagatagtaaaaatattcaagatcaggttaactctgacctggaggtggcatctgtcctatttaaagctgaatgcaatatccatacatctccttctccgggaattcaagtaaggcatgtctacaccccctctacaacaaagcatttctcacccataaaacagtcaaccactttaaccaacaaacacagaggaaatgaggtctctaccacacctctgttagcaaattctttgtctgttcaccagttggctgctcanggagagatgctctatctggctac

SEQ ID NO: 8423 - DNA, 657 bp, Homo sapiens
  misc_feature 16, 117, 118, 120, 123, 124, 125, 128, 129, 132, 133, 135,139, 141, 143, 146, 152, 160, 161, 165, 166, 168, 170, 174,177, 180, 187, 189, 197, 198, 206, 207, 211, 215, 217, 223,224, 227, 229, 240, 241, 244, 248, 251, 252, 253, 262: n = A,T,C or G
  misc_feature 264, 268, 273, 276, 277, 278, 279, 280, 281, 284, 285, 288,293, 295, 298, 305, 307, 310, 311, 316, 319, 320, 321, 326,327, 329, 332, 333, 336, 337, 353, 359, 368, 379, 384, 388,404, 406, 409, 410, 411, 412, 420, 435, 440, 443, 444: n = A,T,C or G
  misc_feature 452, 455, 458, 471, 474, 481, 482, 483, 493, 494, 502, 505,506, 507, 513, 514, 517, 518, 520, 525, 526, 538, 543, 546,547, 550, 551, 556, 565, 566, 569, 576, 581, 586, 594, 599,610, 612, 617, 623, 625, 635, 647, 648, 649, 650, 655: n = A,T,C or G
  misc_feature 656: n = A,T,C or G
tatagggcgaattggnagctccaccgcggtggcggccgcccgggcaggtacttttttttttttttttttttttgttttttttttttttttttttttttttttttttttttttttttnntnaannnaannagnnancttncngnaangggggncatgggcnngggnnancnaaanccnaancgggggnanggaaaaannttaaaaannaatnaaancngggggnnggnangaaaaaaaaannttngganggnnnggggggccngncccnaaaanccnnnnnnccnnggnggggncnggnccacccntnacnnaaaanggnnnaggannanccnnaannagccaaagtcctgggnaagggngggggccanggggggggggncccangggngaggggtttgggttancntannnnaaaaaaancgggcccaattccanccccnaannccgggccnggnccnccccccccccccnganccaaaannngggggggcanncgcccccnatnnngggttnnaannanaaaannaggcctggcccnatttnccnnccnntaaangcaaggggnntgnaaaaacnaaaancccgnaattcaanatttnccccccggcgngnaaaancaaaananatgccccccnaggaaaccccannnntttgnng

SEQ ID NO: 8424 - DNA, 899 bp, Homo sapiens
  misc_feature 39, 484, 500, 521, 533, 572, 616, 665, 669, 686, 689, 702,718, 724, 739, 745, 746, 754, 779, 787, 788, 793, 798, 819,820, 834, 836, 839, 841, 852, 856, 857, 862, 877, 881, 885,886, 887, 890: n = A,T,C or G
gccgtaatacgactcctatagggcgaattggagctcccncgcggtggcggcccgagggtacgcggggagagctctttgtggcttgggtggtcagcaagaattttttaagcagagatactcttgattgggttggataaataaaagagcaaggaggacattgtaggaggggaattgctcccagcagagcctagaagcagagagattttccagggttcccaggagaagagattgaataagtgcagtgggccatgtggtgacacatcttgagtgtccagctggagaactggaagtgcatatcataacaggggtggaaaactcagaggttgatagggaatggtgaggttgcaatgaggggaccggtggggactttgaccagtggagcaagagtctttccagatgaagggagcacttgcctcacagctctggccagctgtggacatttggcccagtttgtaatttgtcaaaagaaagtcagaaaatctgncttggtgtgaaatctnccaaattttttacattgttgnccaatttaattnaaaatattaaaatccaccccaaggggcaagactgctgancccatccatgggggcttggggggaaccttggggggcctccaccntggggctttttttgtggcgggccactttttgaaaattccaaccccaagngccncaggggaaaatggcccnagnaaaggattgtggncctggaaaattaatangggccngccccacttgagccnggccanntccacttngggcccggggcccattttttcttgnccaaattnnctttncccgnaaccccaaccccggcaaaatnnaggggaacaaaatnanggnanggggcccccgntttnnttaangggggggggcttaantttncttnnnatngggcccttt

SEQ ID NO: 8425 - DNA, 1094 bp, Homo sapiens
  misc_feature 3, 7, 8, 9, 10, 11, 12, 13, 15, 16, 17, 18, 19, 20, 22, 23,24, 25, 26, 29, 30, 31, 32, 33, 34, 35, 39, 42, 44, 48,50, 51, 52, 53, 54, 55, 58, 59, 61, 63, 65, 66, 68, 69,71, 72, 74, 75, 77, 79, 80, 81, 83, 84, 85, 86, 87, 88,89: n = A,T,C or G
  misc_feature 90, 91, 92, 93, 101, 102, 104, 105, 108, 109, 111, 114, 202,203, 230, 442, 624, 698, 774, 781, 810, 833, 858, 867, 871,877, 916, 929, 945, 1016, 1038, 1055, 1061, 1062, 1073,1082, 1087, 1088, 1092, 1093: n = A,T,C or G
atnccannnnnnntnnnnnngnnnnnttnnnnnnnatanttntntaantnnnnnnttnnantntnnanntnnanntnannntnnnnnnnnnnntagagggnngnngtnntnacnactactatagggcgaattggactccaccgcggtggcggccgaggtacccaggatctggaaggaaagggccaagctgggctgtggcatnnactggaccctagagtctcattgggcanggcctcagaatccacaaagactccccagtgctgttcctcttccaacgaggctggaccccttccagccatctgggaactcaagcaggaaggaaggttccttaggacaggttcctggcatggcaggttcccctggaagtggtcggagggccctcccacctcttgatgccagcagaagtcaggccttccctgctccctgaggacacatcagggcnttcttgcgggacttggtcttctggttcacacttggcacgttccaagacccaggtaccttgcccgggcggcccgcttctagaaactaagtggggatcccccccgggcctgccagggaatttcgatatcaaaagcttatctgaataccgtccgaccttcgagggggggggccccgggtacccanctttttgttcccttttagtggagggttaaattggcgccgcctttggccgtaaatcattgggtcaataagcctgnttttccttgtgttgaaaaattggtttattccgcttcaacaaattcccacacaaacaattaacgaagccccggggangccattnaaaagatggtaaaaggccctgggggggtngcccctaaatggaggtggaagcnttaaccttaccatttaaatttgcgnttttgcggncttnacttgnccccgttttttccaaggcccggggaaaaacccttgttcnttgccccagcctngcatttaattgaaatngggcccaactccccccgggggaaaaaaggcccggttttggccgtattttgggggccgccttttttttccgntttttctttggttcaaattganttctgcttggcgccttnggtccnnttcgggctttncggggtaanccggnntatnnt

SEQ ID NO: 8426 - DNA, 414 bp, Homo sapiens
  misc_feature 222, 388: n = A,T,C or G
gaatcactactatagggcgaattgggccctctagatgcatgctcgagcggccgccagtgtgatggatatctgcagaattcggcttagcgtggtcgcggccgaggtgggagtcgagccagcgtcgccgcgatggtgttgttggagagcgagcagttcctgacggagctgaccagacttttccagaagtgccggacgtcgggcagcgtctatatcaccttgaanaagtatgacggtcgaaccaaacccattccaaagaaaggtacctgcccgggcggccgctcgaagccgaattccagcacactggcggccgttactagtggatccgagctcggtaccaagcttggcgtaatcatggtcatagctgtttcctgtgtgaaattgttatccnctcacaattccacacaacatacgagc

SEQ ID NO: 8427 - DNA, 606 bp, Homo sapiens
atgctcatatttataatttctgatggtggtggcaggttggtccttaagggacatcttgctttagaaatacgataaattcctttacagtttggtccaaattcactccgtgatacactacaggtttgaaattgcgatgttcaaaggaacggatgaggcgaactgtgatggtcacttctccaggagccatgtgaagaaattcctgttcccggcgtccccttcggctactcccggcgtttgcccccgcgtacctcggccgccaccgcggtggagctccaattcgccctatagtgagtcgtattacgcgcgctcactggccgtcgttttacaacgtcgtgactgggaaaaccctggcgttacccaacttaatcgccttgcagcacatccccctttcgccagctggcgtaatagcgaagaggcccgcaccgatcgcccttcccaacagttgcgcagcctgaatggcgaatgggacgcgccctgtagcggcgcattaagcgcggcgggtgtggtggttacgcgcagcgtgaccgctacacttgccagcgccctagcgcccgctcctttcgctttcttcccttcctttctcgccacgttcgccggctttccccg

SEQ ID NO: 8428 - DNA, 981 bp, Homo sapiens
  misc_feature 347, 362, 365, 382, 401, 405, 425, 427, 446, 461, 483, 491,495, 499, 502, 508, 558, 574, 580, 586, 593, 596, 597, 604,612, 616, 618, 623, 644, 664, 669, 671, 672, 690, 700, 717,720, 723, 724, 725, 727, 729, 730, 732, 733, 739, 745: n = A,T,C or G
  misc_feature 746, 747, 757, 759, 760, 767, 769, 780, 782, 795, 810, 823,825, 837, 839, 845, 864, 868, 872, 873, 876, 879, 884, 885,887, 888, 893, 894, 895, 903, 904, 906, 918, 920, 921, 926,927, 928, 933, 934, 935, 937, 938, 942, 943, 944, 946: n = A,T,C or G
  misc_feature 947, 950, 951, 952, 956, 961, 971, 978, 980, 981: n = A,T,C or G
gactcactatagggcgaattggagctccccgcggtggcggccgaggtacctgggagtggccttctgtgcctgccactgtgcttcccacattgcttagtcacacacataactgggaggtgctgtgttcccagtttttgtgagtgcattgagcccctagtggttctaccccttagcaataactgtccctggaacaggtgtcatcactgtataaatgcatgttacagcccttgcagaacacatagattgggcccatgaattacacctgagctgccctcctttttgttaattgatgaagattgatcagatcaaggaaggtgggtggatgccaaaacccggatgggccttanacatagtcacaagcntgntcaaaggtggcaccctntgcccttttaagggacaanagtntttttaccttgccccgggcngnccgttctaaaactagtggnatcccccccgggctngcagggaattccaaaatcaagncttaatcnattncccnccnaccctngaggggggggggcccggtaccccaaacttttttggttccctttttagtgnaggggttaaaattggnggcgcnttgggnggaaatncanngggcaanaaccttgntttncntgggngggaaaaaatttttttttccncgttccaaaatttcccaaanaaaanannacccaaacccggggggcnattaaaatgntaaaacccctggggggnccntannngngnngnnccttanccctannnatttaaattngnntttgggncncaaatttggcncntttttttaaattnggggaaaacccttgngtggcccaccctngnaattaattaaantnggcccnaccccccggggggaaaagngggntttnncanaanttggnngnnttttnnngattgccnntnaaaaaaaattanannggggnnngggtnnntnnggtnnngnnaannngaanaaaanttttttaaanggggggnann

SEQ ID NO: 8429 - DNA, 506 bp, Homo sapiens
  misc_feature 6, 10, 13, 17, 43, 48, 58, 63, 118, 121, 189, 211, 425, 438,455, 496, 506: n = A,T,C or G
ggggancgcnctncccncgtccgctttggttcgatggagactnctacngggctgaccngcctngctcagcaccttctctcatgacccaaggactatgaagttgatgctactctgaagnctntcaacaaccagattgagacccttcttactcctgaaggctctagaaagaacccagctcgcacatgccgngacttgagactcagccacccanagtggagcagtggttactactggattgaccctaaccaaggatgcactatggatgctatcaaagtatactgtgatttctctactggcgaaacctgtatccgggcccaacctgaaaacatcccagccaagaactggtataggagctccaaggacaagaaacaccgtctggctaggagaaactatcaatgctggcagccagtttgaatataatgtanaaggagtgacttncaagggaaaatgggctncccaacttgcccttcatgcgcctgctggccaactatgcctntcagaacatn

SEQ ID NO: 8430 - DNA, 662 bp, Homo sapiens
  misc_feature 3, 9, 30, 96, 103, 146, 152, 163, 165, 222, 264, 267, 269,272, 273, 306, 309, 320, 387, 409, 426, 428, 437, 444, 446,467, 471, 505, 507, 523, 529, 530, 534, 537, 538, 549, 550,557, 561, 571, 573, 587, 590, 594, 595, 604, 635, 638: n = A,T,C or G
gtnatacgnctcactatagggcgaattggngctccaccgcggtggcggccgaggtacttttttttttttttttttttttttttctaaaagcaaggngatctgngatattttcgtccttttgtatgattctctacttcttattcaanacctgngattaagttgngngtatattgtctgtaaaatgaaacaaaagtaggtcctaaacattgtaagaatatggtntactaaaaagctttgaaaccaaaagaaaatttaaaaaaacancancnacnncaatgtagagtacctcatacctaacagacactntanaaaagctgatntttttttccgttgaagttaggacattaaatcatttttttccaaaaaatagattcccttaaaataaanacatggttggcttaacaaggtnttttccaagggcttttntnaaaaattcnaggcgtnanggattttggctcttttggccnaccncaagggtttctaaactaaaattccccccttttgnanaaaaattccctttttnaaaggnngggnacnnggggggggggnntttggangggnttttttcccncntttttttcaagggnccnttannaaaaaaaanattttttttggaaaaaaaaaaaaaggggggnctnggggatttttttttaaaggaaaaa

SEQ ID NO: 8431 - DNA, 695 bp, Homo sapiens
  misc_feature 3, 5, 9, 13, 20, 25, 34, 35, 36, 154, 354, 490, 497, 499,517, 530, 533, 587, 597, 601, 602, 624, 625, 637, 646, 650,651, 652, 664, 666, 668, 673, 690: n = A,T,C or G
gtnanacgnactncactctnagggncgaattggnnnctccaccgcggtggcggccgaggtacttttttttttttttttttttttttttacatgtatcaatttatttacttttggttttgctcatttttactgaaaatatgattatctatgtggngtcattatttttcatctcaaataacttcatttttacatagtgtagtccagctggaaacgtttatttcatgtttatcttttaaatgatattttcactggatacagaaacctgtcttctgcctcgctcacgctgggagctgtagactggagctgttcctattcggccatcttggctcctccccactaatgctgttcttctanacatgtttgaaataggggcattgctataatgaatggctagcaagtaggacaacctgaggtttgcgctgacatctttcacaaagcttctcatgtccctccctctcccttggccacaggttgacttcatctcctgggncctcaanantttcctgcatattcctgntttggtctcaagntcntcaaatccttaattccatcaagcatccaaaaaacccgaggctgggaaattcaanggccaagaangcanncagggcccgttccttttgagannatttctttgggnttgaaaaanaccnnncttttggggtcncnanaaggnctttcctaatggaacanacggg

SEQ ID NO: 8432 - DNA, 478 bp, Homo sapiens
  misc_feature 1, 7, 10, 20, 21, 25, 31, 413: n = A,T,C or G
ncctatnatncattatgcgnntagnagctcnccgccgtggcggccgtgacactcgatgaatggcgcacttctaaactcctccgggcaggagccgggggacgccagggcttggccagagccttctgcaccagcgctggtgtgcatcacaaaagagtagccgatccacagcgaggaccacccgctggggcacggtgggatctgaatggtctggctgtgcacggccatcaccatggcaggcgcctcacacacagcacacctcccgcgtacctcggccgctctagaactagtggatcccccgggctgcaggaattcgatatcaagcttatcgataccgtcgacctcgagggggggcccggtacccagcttttgttccctttagtgagggttaattgcgcgcttggcgtaatcatggncataagctgtttcctgtgtgaaattgttatccgctcacaattccacacaacatacgagccgggag

SEQ ID NO: 8433 - DNA, 639 bp, Homo sapiens
  misc_feature 631: n = A,T,C or G
tcactatagggcgaattggagctccaccgcggtggcggccgcccgggcaggtaccctgcaggtaggcatttaaattggtgcaaccgctttggattgctgctttgtagtatctggtgcaactgaagatgaacatgccctgtgacacagcaaccgcacttctaggtcaataccctaattatattcttactgtggttcacaagaaggtatgtaagaggtcattgcctgagcactgtttagaataggggcaaactggaaatcctctaaatgtctgtcaatgaaggaatagataaattgtaatatgttcatataaaatactgcataaataagtgaaatttataaatgtacctcggccgctctagaactagtggatcccccgggctgcaggaattcgatatcaagcttatcgataccgtcgacctcgagggggggcccggtacccagcttttgttccctttagtgagggttaattgcgcgcttggcgtaatcatggtcatagctgtttcctgtgtgaaattgttatccgctcacaattccacacaacatacgagccgggagcataaagtgtaaagcctggggtgcctaatgagtgagctaactcacattaattgcgttgcgctcactgcccgctttncagtcggg

SEQ ID NO: 8434 - DNA, 600 bp, Homo sapiens
  misc_feature 2, 14, 27, 61, 150, 153, 156, 159, 160, 218, 222, 226, 227,229, 230, 232, 234, 236, 288, 289, 290, 291, 292, 316, 319,323, 324, 325, 326, 328, 330, 331, 332, 333, 334, 340, 345,346, 349, 350, 351, 352, 368, 369, 370, 371, 372, 373: n = A,T,C or G
  misc_feature 374, 375, 376, 377, 379, 381, 393, 395, 396, 397, 399, 400,401, 402, 403, 404, 406, 408, 411, 422, 423, 424, 425, 426,427, 435, 436, 437, 444, 445, 447, 448, 449, 469, 472, 473,478, 479, 480, 481, 483, 497, 502, 505, 506, 514, 517: n = A,T,C or G
  misc_feature 518, 519, 520, 521, 522, 524, 526, 527, 528, 533, 534, 535,536, 537, 538, 541, 559, 561, 562, 563, 564, 567, 568, 569,570, 575, 589, 590, 592, 594, 598, 599: n = A,T,C or G
gngtacatcacccngagggcaggaaangagctccaccgcggtggcggccgcccgggcaggnacttttttttttttttttttttttttttttttttttttttttttttttttttttttttttttttttttttttttttttttttttttttnttnttntannaaaaaaaaaaaaaaaaaaaaaaaaaaaaaaaaaaaaaaaaaaaaaaaaaaaaaaaaangggngggnncnngngngnggggggggaaaaaaaaaaaaaaaaaaaaaaaaaaaaaaaaaaaaaaaaagannnnngggggggggggggggggggggggnggngggnnnnanannnnnaaaaanaaaannggnnnnaaaaaaaaaaaaaaannnnnnnnnnananaaaaaaaaaaanannncnnnnnnananagnaaaaaaaaaannnnnnaaaaaaannngggggcnncnnnaaaaaaaaaaaaaaaaaaanggnnaaagnnnncnaaaaaaaaaaaacnaaaanccnngggggggngannnnnnangnnnaaaannnnnnaanaaaaaaaaaaaaaaaaangnnnnggnnnnagaanaaaaaaggaggggnnanangggnng

SEQ ID NO: 8435 - DNA, 628 bp, Homo sapiens
  misc_feature 436, 437, 438, 439, 440, 441, 443, 444, 448, 449, 452, 455,470, 474, 475, 477, 480, 481, 484, 500, 502, 509, 515, 521,525, 537, 541, 542, 544, 558, 559, 569, 570, 571, 572, 584,589, 597, 602, 608, 609, 610, 611, 621: n = A,T,C or G
gcattaccctcctaagggaacaaagctgggtaccgggccccccctcgggtcgacggtatcgataagcttgatatcgaattcctgcagcccgggggatccactagttctagagcggccgaggtacgcggggctttcacattcgggaagcgtcgggattaggtgaaagaagctgagctgaacacattacgatggatgatggaaacataagactatcaagaaatccaagtggtaatgggcgaagtttattcagcatccggcaatggacttatcgtagttggggaaacgggtgttccgaataatatcctggaagttatcaggacacctattttaaatataggcctgaattttgtaaagtaatatttaaggtggtccgtgataattaaataaaatgcttaattcatgtggctaaaaaaaaaaaaaaaaaaaaaaaaaaaannnnnngnncctnnccnggnagcccaaaaagaagngganntnccnnttngcctgccgggggggcngntcccccngtgaanttccantagncttaaaaagaangccnncnaacccccctccctnncccactttannnnggggaacccgtnaaccnctgggatncccanttaaannnnctagcccctntcccttt

SEQ ID NO: 8436 - DNA, 369 bp, Homo sapiens
  misc_feature 8, 9, 13, 21, 23, 27, 29, 30, 31, 33, 56: n = A,T,C or G
cgcgttcnncgtncttcactngngggncnnntngggtaccgggtccccccctcgangtcgacggtatcgataagcttgatatcgaattcctgcagcccgggggatccactagttctagagcggccgcccgggcaggtaccatttaggaaataccgatgcctttgtgggggcagaatcacatggcaaaagctttgaaaatcataaagatataagttggtgtggctaagatggaaacagggctgattcttgattcccaattctcaactctccttttcctatttgaatttctttggtgctgtagaaaacaaaaaaagaaaaatatatattcataaaaaatatggtgctcattctcatccatccaggatgtac

SEQ ID NO: 8437 - DNA, 636 bp, Homo sapiens
  misc_feature 7, 592, 595, 610, 617, 619, 621: n = A,T,C or G
gggatcnaggaagtcccggtcctcctggcccagctggcatagcaactaagggcctcaatggacccaccgggccaccagggcctccaggtccaagaggccactctggagagcctggtcttccagggccccctgggcctccaggcccaccaggtcaagcagtcatgcctgagggttttataaaggcaggccaaaggcccagtctttctgggacccctcttgttagtgccaaccagggggtaacaggaatgcctgtgtctgcttttactgttattctctccaaagcttacccagcaataggaactcccataccatttgataaaattttgtataacaggcaacagcattatgacccaaggactggaatctttacttgtcagataccaggaatatactatttttcataccacgtgcatgtgaaagggactcatgtttgggtaggcctgtataagaatggcacccctgtaatgtacacctatgatgaatacaccaaaggctacctggatcaggcttcagggagtgccatcatcgatctcacagaaaatgaccaggtgtggctccagcttcccaatgccgagtcaaatggcctatactnctntgagtatgtccactnctttttntnangattcctagtggctc

SEQ ID NO: 8438 - DNA, 493 bp, Homo sapiens
  misc_feature 2, 468: n = A,T,C or G
tncgggtcgccgtaaacactactatagggcgaattggagctccaccgcggtggcggccgaggtacgcgggtgggcagccggagaacaactacaagaccacgcctcccgtgctggactccgacggctccttcttcctctatagcaagctcaccgtggacaagagcaggtggcagcaggggaacgtcttctcatgctccgtgatgcatgaggctctgcacaaccactacacgcagaagagcctctccctgtccccgggtaaatgagtgcgacggccgctctagaactagtggatcccccgggctgcaggaattcgatatcaagcttatcgataccgtcgacctcgagggggggcccggtacccagcttttgttccctttagtgagggttaattgcgcgcttggcgtaatcatggtcatagctgtttcctgtgtgaaattgttatccgctcacaattccacacaacatacnagccgggagcataaaggtgtaaagc

SEQ ID NO: 8439 - DNA, 859 bp, Homo sapiens
  misc_feature 4, 5, 6, 7, 8, 10, 12, 114, 232, 524, 551, 629, 678, 693,704, 712, 733, 741, 745, 754, 761, 787, 795, 798, 801, 806,827, 844, 848: n = A,T,C or G
gggnnnnncntntcgactcactatagggcgaattggagctccccgcggtggcggccgaggtacgcgggataattaacaatttgtggaaattgaaaaagcataaactgtgttatntgattagtaatatgttcccttaaaattcattttgaggtgtatgttatacacacagtaaatttttgttcaggaatgacttgctcattctgtgtttttaaaaataggaaatgaggcatantgagtcatcattacatcaattaaccaaaaatatttcatcccctccgtcactgaaattatctacttcagccacctttcttattctcgtgttaggagggcacgtttatggactttttaatttccatgtgccatattgtccactaccggcagtagccaaagctagctgtttcagtcccacagaagagacagtgctctgccatgacgacagggcactgctagggctggtttttcttgtttttcccttttggcagtgtggacttcaggaactagatgtatatgcacaagggattgantttacactaaaactagggaaatggagnttcaatctatgttcttgccccttcatacttttatttaattttttgtcatcctgccttatactgggctaaccaatgggnataaaaatataaaatccctttggaatactctttttccctttcatgcttntaaagcccattgganggaccttaccntttgctgntggcctcacatgcttaaacanccagttanttancgtggtatngaccttnctcacccattactcccaatttaaatngggcccgnttnaanccttnggaaggaagaaaactcttctnttcccatgggtttaaancaantttttcctgcc

SEQ ID NO: 8440 - DNA, 493 bp, Homo sapiens
  misc_feature 4, 5, 7: n = A,T,C or G
ggtnntncttagggagtcgaccccgcgtccggaggcaaacagctcagagtcttcgtatatcgtacagctgtctgcattgaaaattcatgcatggagaaagggagtaagcaagggagaaacggtgcgattcacatattccgcgagatcatcaagccagcagagaaatccctccatgaaaagttaaaacaagataagcgctttagcaccttcctcagcctacttgaagctgcagacttgaaagagctcctgacacaacctggagactggacattatttgtgccaaccaatgatgcttttaagggaatgactagtgaagaaaaagaaattctgatacgggacaaaaatgctcttcaaaacatcattctttatcacctgacaccaggagttttcattggaaaaggatttgaacctggtgttactaacattttaaagaccacacaaggaagcaaaatctttctgaaagaagtaaatgatacacttctggtgaatgaat

SEQ ID NO: 8441 - DNA, 665 bp, Homo sapiens
  misc_feature 4: n = A,T,C or G
gtanacgactactatagggcgaattggagctccaccgcggtggcggccgaggtacctgtgcgccagcagaaatgattgcactattgataaattccgaaggaaaaattgtccatcttgtcgtcttcggaaatgttatgaagcagggatgactctgggagcccggaagctgaagaaacttggtaatctgaaactacaggaggaaggagaggcttccagcaccaccagccccactgaggagacaacccagaagctgacagtgtcacacattgaaggctatgaatgtcagcccatctttctgaatgtcctggaagccattgagccaggtgtagtgtgtgctggacacgacaacaaccagcccgactcctttgcagccttgctctctagcctcaatgaactgggagagagacagcttgtacctgcccgggcggccgctctagaactagtggatcccccgggctgcaggaattcgatatcaagcttatcgataccgtcgacctcgagggggggcccggtacccagcttttgttccctttagtgagggttaattgcgcgcttgggcgtaatcattggtcatagctgtttcctgtgtgaaattggtatcccgctcacaattccacacaacataccaacccgggagcttaaagtgtaaagcctgggggtgccta

SEQ ID NO: 8442 - DNA, 666 bp, Homo sapiens
  misc_feature 20, 74, 291, 302, 325, 368, 378, 403, 415, 424, 438, 446,457, 476, 520, 529, 532, 546, 549, 553, 559, 575, 610, 615,625, 627, 630, 632, 637, 651: n = A,T,C or G
tcactatagggcgaattggnactccaccgcggtggcggccgcccgggcaggtacttttttttttttttttttgngtttctggtaacttcaaagctccctaagtcactaacctttcttcgcccctcctccactaaggggctgtcaggaagcatcaatttcagaaaatcttctttagacagaacatattgagtctctgcaacagcatctcccaccactgcctgatgctgagttgctgtggacatgacacccaactcactatacatcccggggacattcagtcacttcaggctnctcggggcggnggggctgcccctccgatttcttncagcccatgacatattttgttcactggcccctggctgggggangggttggganatggaccccgggaacccggtggtcncttgcttggganaaacccatntaaactttgggtgnaatccaanaacccccttcntttttgaaaagggggcctnaagggcttcctgaatgggggaaacccctgggggaaaaaaccaancaaagctgnaanaaatttggttttancangggntgggcnccgggccaatttaaanaccccaagggtttacctaaggttttttcccgaagnaaaantgggccccangnggngnaaggngccctttttttacnaggggggctggggag

SEQ ID NO: 8443 - DNA, 427 bp, Homo sapiens
  misc_feature 5, 7, 200, 208, 212, 213, 214, 215, 217, 223, 228, 230, 232,233, 234, 240, 242, 243, 244, 245, 247, 248, 249, 250, 253,254, 257, 258, 260, 261, 262, 263, 266, 267, 268, 269, 270,271, 272, 273, 275, 276, 277, 278, 279, 280, 281: n = A,T,C or G
  misc_feature 282, 283, 284, 286, 287, 288, 289, 290, 291, 293, 298, 302,307, 310, 311, 314, 316, 317, 318, 319, 322, 324, 327, 328,330, 331, 332, 336, 338, 339, 340, 342, 344, 346, 349, 350,352, 355, 356, 357, 358, 361, 362, 364, 365, 366, 367: n = A,T,C or G
  misc_feature 368, 369, 370, 371, 372, 375, 378, 379, 380, 381, 383, 385,386, 388, 390, 394, 398, 399, 400, 401, 402, 404, 406, 407,411, 412, 413, 414, 415, 418, 420, 421, 422, 424, 427: n = A,T,C or G
gagcncnccgtaatacgacctcactatagggcgaattggagctccaccgcggtggcggccgaggtactttaatagctcaaactcagagtcatcgtgctcccaattccaaagagattcctaaaagaggcaacttcggccgtttgagaagccagcgctcacccacccggggtctctgtgcattgacctttgggtgctgactnggagaaangccnnnncncttccntttcntntnnntgagtncnnnncnnnnttnnacnnannnntcnnnnnnnntnnnnnnnnnntnnnnnntnagtgnaatnaaagnagnntantnnnnaangnttnntnnntttnannngntntntcnntnttnnnngtnntnnnnnnnnnttnttnnnntntnntntntatnttcnnnnncntnntttnnnnnttnannntngcn

SEQ ID NO: 8444 - DNA, 807 bp, Homo sapiens
  misc_feature 605, 608, 612, 631, 632, 645, 652, 653, 660, 661, 664, 668,670, 671, 683, 684, 685, 686, 692, 696, 698, 699, 713, 714,723, 725, 726, 728, 729, 730, 731, 732, 740, 741, 742, 743,744, 745, 746, 747, 748, 749, 750, 751, 752, 753, 754: n = A,T,C or G
  misc_feature 756, 757, 758, 759, 760, 761, 762, 763, 764, 765, 766, 767,768, 769, 770, 771, 772, 773, 774, 775, 776, 777, 778, 779,780, 781, 782, 783, 784, 785, 786, 787, 788, 789, 790, 791,792, 793, 794, 795, 796, 798, 799, 800, 801, 802, 803: n = A,T,C or G
  misc_feature 804, 805: n = A,T,C or G
gaattgggccctctagatgcatgctcgagcggccgccagtgtgatggatatctgcagaattcgcccttagcgtggtcgcggccgaggtacagccccagatgggatggaaatgaaatggccaaaagagcaaaggcttatttcaaaacctttgtccctcagttccaggaggcagcatttgccaatggaaagctctaggaaacaccagtcttgagaggtggccagccagactgcctgtccacatgcgtgtcagcacatacagccgcttcctggaagccgcctggaatgtcttcacggcagcgttttgctcacacagcagcttttgcacgccccaggcagccccgactgctgaaatccaacttgagctggctggtggtccctggatcctagagcccttcacttcgggttactccctctttcttgcctctatttcttagttggaagaaataaactcacaaattatggtgcagtaattttccgggggaaagtaaagcctcaggaatgcccacgcctttctcccaaagcctttgtctctgagacctcttaagttctaagattaaatgcccctcgctgttcttcctctgcaaaaaaaaaaaaaaaaaaaaaanttnctgnccggggggggggtttttanngggggggaaattnccccccnnggggggnnggntttntnnggggggccccannnngggccnaaantnngggggaaaaaaaannggggaaaangnncnnnnntttttggnnnnnnnnnnnnnnncnnnnnnnnnnnnnnnnnnnnnnnnnnnnnnnnnnnnnnnnngnnnnnnnncg

SEQ ID NO: 8445 - DNA, 653 bp, Homo sapiens
  misc_feature 42, 229, 230, 235, 242, 244, 247, 263, 264, 280, 285, 305,341, 351, 353, 383, 403, 408, 412, 413, 428, 434, 437, 439,441, 456, 457, 459, 464, 468, 470, 471, 474, 479, 488, 493,494, 507, 509, 513, 514, 517, 522, 523, 525, 533, 547: n = A,T,C or G
  misc_feature 558, 564, 576, 584, 585, 589, 592, 595, 598, 600, 603, 604,610, 612, 617, 621, 623, 625, 626, 627, 628, 631, 634, 640,642, 645, 647, 649: n = A,T,C or G
cctcactaagggaacaaagctgggtaccgggccccccctcgngtcgacggtatcgataagcttgatatcgaattcctgcagcccgggggatccactagttctagagcggccgtcccatggcttccatctgagccacctcgggaccccagcgctcctggcgccctcttctcatcgcttggcctatgacaggtcaccgtgtgtaaatctttcccaataaagtgttgcacannggaanaaaaaananaanaaaaaaaaaaaatttnnaaaaaaaaaaaaaaanaaaangtccctcggcccgccacccnggggggagctccaatttcgccctttaggggagtcgnattaacgccncncctcactgggcccgtcgttttaaaaacgtncgggactggggaaaaacccntgggnggtnncccaaccttaattgncttggnagnananttccccttttcgccnngntgggnttantnnccnaaaanggccccaancgatnngcccttttccaananttgnnccnacccnnantgggaaangggacccccccttnaacggggccantaaagncggggggggggngggggggnncccntanggnacngntanntttagngngcctnagancncnnnnttnggntttagnangtnangnttac

SEQ ID NO: 8446 - DNA, 477 bp, Homo sapiens
  misc_feature 38, 210, 297, 340, 354, 370, 390, 451, 457: n = A,T,C or G
ctaacactactatagggcgaattggagctccccgcggnggcggccgtttgagaagccagcgctcacccacccggggtctctgtgcattgacctttgggtgctgacttggagaaaagcacaaacacgaccagtcccatcctggctcccgtggggcttcttctatctacgcattgtatcgactgcattagttggactaagatgatgactcanttaaaggaggagacaaatgctgactgtctaagcaagaatggtccaagctggcaagaaaaagcacactgcatacatcccgcgtacctnggccgctctagaactagtggatcccccgggctgcaggaattcnatatcaagcttatngataccgtcgacctcnagggggggcccggtacccancttttgttccctttagtgagggttaattgcgcgcttggcgtaatcatggtcatagctgttncctgtntgaaattgttatccgctcac

SEQ ID NO: 8447 - DNA, 819 bp, Homo sapiens
  misc_feature 9, 18, 474, 477, 586, 626, 645, 702, 751, 754, 779, 798, 819: n = A,T,C or G
actactatntggcgaatngggccctctagatgcatgctcgagcggccgccagtgtgatggatatctgcagaattcgccctttcgagcggccgcccgggcaggtacgcgggactcagaagcttggaccgcatcctagccgccgactcacacaaggcaggtgggtgaggaaatccagagttgccatggagaaaattccagtgtcagcattcttgctccttgtggccctctcctacactctggccagagataccacagtcaaacctggagccaaaaaggacacaaaggactctcgacccaaactgccccagaccctctccagaggttggggtgaccaactcatctggactcagacatatgaagaagctctatataaatccaagacaagcaacaaacccttgatgattattcatcacttggatgagtgcccacacagtcaagctttaaagaaagtgtttgctgaaaataaaagaaatncanaaattggcagagcagtttgtcctcctcaatctggtttatgaaacaactgacaaacacctttcttctgatggccagtatgtccccaggattatgtttgttgacccatctntgacagttagagccgatatcctggaaaatattcaaccgtnttatgcttacaacctgcanatacagctttgtgcttgacacatgaaaaaagcttttaagttgctgaaaactgaattntaaaaaaaaaaatttcaaacccttttttttcaggccttgaaacttgaanccnaaaaatttgaaaaaatggctatggnggaacttatgaacccctgntaggtatggttaaggttcaan

SEQ ID NO: 8448 - DNA, 641 bp, Homo sapiens
  misc_feature 22, 518, 577, 597, 612, 620, 622, 637: n = A,T,C or G
cgcattaaccctcactaagggnaacaaagctgggtaccgggccccccctcgggtcgacggtatcgataagcttgatatcgaattcctgcagcccgggggatccactagttctagagcggccgcccgggcaggtacttttcatgagtagcagggaagatacactccaggaaggtgggatacaaattattgaactgtgtgacttaaaagctccagtgagtttcgtcggaagtataggagtttgaaagtgctccccagtcaaacccagaactacatagggtcagccgtggttgagctaatttctgcttacacatgtgtggagggtgtcattttctgactacgcctaggcctgagtggacagccgattaaaagatgtaaattcgtggattgtatcaaggagagcgggttccatctttgtggtcaggagggggcccactcttttgttccgcaaagggtttatctggatgttccttgctggaagttgcttttccagtttggatcaaaccacttaagtggagctncagcctcagtccttgcattaaaaaaaaaaaaaaaaaaaaaaaaagtaccttggccgcanccggggggagctccaattcncctatagtgagtcgnattacccncnctcactggccggcgnttta

SEQ ID NO: 8449 - DNA, 449 bp, Homo sapiens
  misc_feature 1, 2, 3, 4, 6, 393: n = A,T,C or G
nnnngntgatcactactatagggcgaattgggccctctagatgcatgctcgagcggccgccagtgtgatggatatctgcagaattcggcttcgagcggccgcccgggcaggtacagaagccaaatgtagccccagccctagactccagcccaggcagagtccaagggaggggtgtcagggtcagaagtcacagggagcccagtgactatcaaggtggctgagagcaaggctagggtagggatggggcagagaaagggcagggggtgcagccccaggtggcccaaagcaacacagaggagcaagggctggcattcaagtcagcaggtccctggggagaacagatggtgcctggagtcccacatggtggtacctcggccgcgaccacgctaagcncgaattccagcacactggcggccgttactagtgggatccgagcttcggtaccaagc

SEQ ID NO: 8450 - DNA, 536 bp, Homo sapiens
  misc_feature 2, 3, 14, 528: n = A,T,C or G
gnngtcccgttacnctactatagggcgaattggagctccccgcggtggcggccgcccgggcaggtactatgatccaaacaccaaaagctgtgcaagattctggtatggaggttgtggtggaaacgaaaacaaatttggatcacagaaagaatgtgaaaaggtttgcgctcctgtgctcgccaaacccggagtcatcagtgtgatgggaacctaagcgtgggtggccaacatcatatacctcttgaagaagaaggagtcagccatcgccaacttgtctctgtagaagctccgggtgtagattcccttgcactgtatcatttcatgctttgatttacactcgaactcgggagggaacatcctgctgcatgacctatcagtatggtgctaatgtgtctgtggaccctcgctctctgtctccaggcagtttctctcgaatactttgaatggttggtgtaacaagttagccctggcttggtgttttatgtgaacatttctatcaatccaaattccttctggagttttaatggntatgcctg

SEQ ID NO: 8451 - DNA, 669 bp, Homo sapiens
  misc_feature 20, 364, 367, 474, 482, 489, 625, 630, 644: n = A,T,C or G
tcactatagggcgaattggnagctccaccgcggtggcggccgcccgggcaggtactttttttttttttttttttttttttttattttttccaacgaaattatttattgctgtcaggaggcccaggaccctccagactgaagagtccatgggcccctgtgcatgtgggagctacacagggaatcgctgtcaccttccaaggataagcagacagggccacacatgccacggccactcggtgcacaggggccaggctgtgcccagagacccaggcatccagcttgcattccaagttccttactgagagccccactgcttgatggcaagctctaggcttgcttgggattggtgactttgctcatgaanaanatgttctgggtgtctgtagggacaatgatcatcaggaagggcctgttgaaacgcacaatggtccttgtctccactaatgcagaaaggagggtgattttgactgctgnggcagcanatgcttntgtgccctcctcaaatacatcaagcacagccttatggaccacctgggagactgctaggttcctggcccctgtgatccctgacaggtcagccttgctggtgaaggcttcctcaatgcccagctggagaagtatgtcnttcangttatagtccctcnagatggaaaactttggcaggtagac

SEQ ID NO: 8452 - DNA, 354 bp, Homo sapiens
  misc_feature 4, 94, 108, 296: n = A,T,C or G
tgtnataccgactcactatagggcgaattgggccctctagatgcatgctcgagcggccgccagtgtgatggatatctgcagaattcggctttcnagcggccgcccggncaggtactcagaagtgtcctggaatggggcccatgagatggttgtctgagagagagcttcttgtcctacattcggcgggtatggtcttggcctatgccttatgggggtggccgttgtgggcggtgtggtccgcctaaaaccatgttcctcaaagatcatttgttgcccaacactgggttgctgaccanaagtgccaggaagctgaataccatttccagtgtcttacccagggtgggtgacgaaagg

SEQ ID NO: 8453 - DNA, 638 bp, Homo sapiens
  misc_feature 92, 638: n = A,T,C or G
tcactatagggcgaattggactccaccgcggtggcggcctgacactgcagtgaagggcatgctaagtctaggcacaggtcctggcagcaggnaaggagacagagcctctcccaggcacacatccgctctagaactagtggatcccccgggctgcaggaattcgatatcaagcttatcgataccgtcgacctcgagggggggcccggtacccagcttttgttccctttagtgagggttaattgcgcgcttggcgtaatcatggtcatagctgtttcctgtgtgaaattgttatccgctcacaattccacacaacatacgagccgggagcataaagtgtaaagcctggggtgcctaatgagtgagctaactcacattaattgcgttgcgctcactgcccgctttccagtcgggaaacctgtcgtgccagctgcattaatgaatcggccaacgcgcggggagaggcggtttgcgtattgggcgctcttccgcttcctcgctcactgactcgctgcgctcggtcgttcggctgcggcgagcggtatcagctcactcaaaggcggtaatacggttatccacagaatcaggggataacgcaggaaaaacatgtgagcaaaaggccagcaaaaggcaggaaccgn

SEQ ID NO: 8454 - DNA, 622 bp, Homo sapiens
  misc_feature 5, 27, 36, 37, 38, 97, 110, 362, 405, 418, 420, 425, 429,430, 432, 433, 434, 439, 441, 452, 453, 454, 455, 457, 460,461, 462, 464, 465, 466, 468, 469, 471, 472, 473, 474, 476,477, 479, 480, 481, 482, 484, 485, 486, 487, 488, 489: n = A,T,C or G
  misc_feature 490, 491, 492, 493, 494, 495, 496, 497, 498, 499, 500, 501,502, 503, 504, 505, 506, 507, 508, 509, 510, 511, 512, 513,514, 515, 516, 517, 518, 519, 520, 521, 522, 523, 524, 525,526, 527, 528, 529, 530, 531, 532, 533, 534, 535, 536: n = A,T,C or G
  misc_feature 537, 538, 539, 540, 541, 542, 543, 544, 545, 546, 547, 548,549, 550, 551, 552, 553, 554, 555, 556, 557, 558, 559, 560,561, 562, 564, 565, 566, 568, 569, 570, 571, 572, 573, 574,575, 576, 577, 578, 580, 581, 582, 583, 584, 585, 586: n = A,T,C or G
  misc_feature 587, 588, 589, 590, 591, 592, 593, 594, 595, 596, 597, 598,599, 600, 601, 602, 603, 604, 605, 606, 608, 609, 611, 612,613, 614, 615, 616, 617, 619, 620, 622: n = A,T,C or G
gcgtnatacgcactccactcatagggncgacttggnnnctccaccgcggtggcggccgcccgggcaggtacgccaccaaataccaataataaaaaanaaggttccagggnagggcatgacctctgaaattccccatgatctttgggtgtttaaatcccattttcccttctgagtcattggtcatccttggtctcagtagatcaggcacgttagaactgtggcagaagagataagaatgaagcagccaaaattgagcctttgcttcttaggtaatgctgaaaagtttcacacttttacctctgcctaagtcccccacgaatcatgcgtacctcggccgctctagaactagtggatcccccggnctgcaggaattcgatatcaagcttatcgataccgtcgaccttnagggggggcccgntncccancttnngnnnccttnangaagtttaatnnnncnctnnncnnncnncnnnncnnannnntnnnnnnnnnnnnnnnnnnnnnnnnnnnnnnnnnnnnnnnnnnnnnnnnnnnnnnnnnnnnnnnnnnnnnnnnnnnnnnntnnntnnnnnnnnnnntnnnnnnnnnnnnnnnnnnnnnnnnnnntnntnnnnnnnannan

SEQ ID NO: 8455 - DNA, 733 bp, Homo sapiens
  misc_feature 2, 3, 4, 5, 6, 7, 8, 9, 10, 21, 23, 655, 673, 688, 708, 720: n = A,T,C or G
gnnnnnnnnngtgcgggcttngncccgtccgggggaaacatgcataagtgccaatcctttgaatgttccacggaaacactggtggacagattctagtgctgagaagaaacacgtttggtttggagagtccatggatggtggttttcagtttagctacggcaatcctgaacttcctgaagatgtccttgatgtgcagctggcattccttcgacttctctccagccgagcttcccagaacatcacatatcactgcaaaaatagcattgcatacatggatcaggccagtggaaatgtaaagaaggccctgaagctgatggggtcaaatgaaggtgaattcaaggctgaaggaaatagcaaattcacctacacagttctggaggatggttgcacgaaacacactggggaatggagcaaaacagtctttgaatatcgaacacgcaaggctgtgagactacctattgtagatattgcaccctatgacattggtggtcctgatcaagaatttggtgtggaccgttggccctgtttgctttttataaaccaaactctatctgaaatcccaacaaaaaaaatttaactccgtatgtgttcctcttgtctaatcttgtcaaccatgcaagtgaccgacaaaattcagttatttattttcaaatgnttggaaacagttaatttnacaaaaaaaatgatnttttcttttttgctgttcancaaatacaattnaatgctttttgtt

SEQ ID NO: 8456 - DNA, 370 bp, Homo sapiens
  misc_feature 8, 169, 170, 174, 175, 185, 190, 191, 194, 198, 200, 203,204, 211, 214, 215, 216, 217, 223, 229, 234, 237, 245, 250,251, 252, 255, 258, 259, 260, 262, 263, 278, 279, 280, 283,293, 294, 296, 297, 304, 305, 313, 320, 321, 325, 326: n = A,T,C or G
  misc_feature 327, 330, 334, 340, 347, 348, 351, 352, 353, 356, 364, 366,370: n = A,T,C or G
tacgtacntcctagagggtcgacattgggccctctagagtcatgctccgaccggccgccagtgtgatggaatatctgcagaaattcggcttctaatacgactcactatagggctcgagcggccgcccgggcaggtactttttttttttttttttttttttttttttaannaaanntattttttanagaanncgngccntnccnnggggggngcnnnncccaantttttnggccncanaaaaaaangaggnnnttnaannnanntttataggggaattnnnggncccctaaacnncnnggggggnncctctttnaaacccnntttnnnacncccnattttngggcgtnntannnaancaaataanancccn

SEQ ID NO: 8457 - DNA, 392 bp, Homo sapiens
gcgtaatacgactcactatagggcgaattggagctccaccgcggtggcggccgtgtcctcagatctcaggctgctcagctccatgtaggctgtgtctgtagatgtgtcctcggtcatggtgactctgccctggaacttctgtgcgttgattgtttcaccatcttcaggatcaaaacctcccttccactcaagcccttttccaggagcctgtcgcacccagtgcatggataattcagtgagggtgtatccggaaaccttgcaggagaccttcactgaggccccaggcttcttcacctcagccccagactgtacctcggccgctctagaactagtggatcccccgggctgcaggaattcgatatcaagcttatcgataccgtcgacctcgaggg

SEQ ID NO: 8458 - DNA, 627 bp, Homo sapiens
  misc_feature 6, 14, 18, 23, 33, 35, 36, 42, 46, 141, 228, 498, 500, 509,513, 518, 535, 538, 539, 545, 546, 550, 555, 562, 568, 572,573, 574, 575, 578, 581, 582, 583, 584, 585, 586, 588, 589,590, 591, 593, 594, 595, 596, 597, 598, 599, 600, 601: n = A,T,C or G
  misc_feature 602, 603, 604, 605, 606, 607, 608, 609, 610, 611, 612, 613,614, 615, 616, 617, 618, 620, 621, 622, 623, 624, 625, 627: n = A,T,C or G
gacttntgtttttncagnatttnttttgttagnanntgcagnaaanctaatgatgtctctgtttttgccttctagcaattaatatatgacagcagtctttgtgatttattttaactttctgcaagacctttggctcacagnaactgcagggtatggtgagaaaccaactacggattgctgcaaaccacaccttctctttcttatgtctttttactacaaactacaagnacaattgttgaaacctgctatacatgtttattttaataaattgatggcaaaaactgaagtttctctttgttctaccgtagaaaagaggcgttagagggcctcacatattttacatacacacacacacacacttacttattaaagaactcatggtcatgggttgaggactctgtgaagcatttgtttcctcagtctggcctctaagccttggtacctgcccgggcggccgctctagaactagtggatcccccgggctgcaggaattcgatntnaagcttatngatnccggngacctcgagggggggcncgnngcccanntttngaaanctttaangagggnaaannnnacnctnnnnnnannnntnnnnnnnnnnnnnnnnnnnnnnnnnnannnnnnan

SEQ ID NO: 8459 - DNA, 504 bp, Homo sapiens
  misc_feature 5, 202, 238, 394, 429, 450, 456, 459, 460, 462, 464, 479,483, 484, 485, 486, 493, 494, 495, 502, 504: n = A,T,C or G
ttcgncacacttagggcgaattggagctccccgcggtggcggccgaggtacttttttttttttttttttttttttgatggtaagggagggatcgttgacctcgtctgttatgtaaaggatgcgtagggatgggagggcgatgaggactaggatgatggcgggtaggatagttcagacggtttctatttcctgagcgcctganatgttagtattaagttagttttgttgtgagtgttangaaaagggcatacaggactaggaagcagataaggaaaatgattatgagggcgtgatcatgaaaggtgataagctcttctatgataggggaagtagccgtcttgtagacctacttgcgctgcatgtgccattaagatatataggatttagcctatanatttaactttgacaaagttatgaaatggttttttntaataccttcccgctaaccgnccccgntanntntntttttattcttaaanttannnngattttnnnattatgngn

SEQ ID NO: 8460 - DNA, 648 bp, Homo sapiens
  misc_feature 617, 619: n = A,T,C or G
tcactatagggcgaattggagctccaccgcggtggccggccgcccgggcaggtacctgtcctagcagtggcaatcttttggggtcccctaaaataaagaaaggcttatctccacactgtaatggtagtgattgtggatattcatctagcatggaagggagtgaaacaggttctcgggagggttcggatgttgcctgcactgaaggcatttgtaatcatgatgaacacggtgatgactcttgtgttcatcactgtgaagacaaagaggatgatggtgatagttgtgttgaatgttgggcaaattctgaagagaacgacacaaaaggaaaaaataaaaagaagaagaagaaaaacaagatactgaaatgtgatgaacatatccagaagcttggaagctgtattacagatccaggtaatcgagagacctcaggaaataccatgcacacagtgtttcaccgtgacaagaccaaagatacacatcctgaaagctgttgcagctctgaaaagggtgggcagccattgccttggtttgagcataggaaaaatgtacctcggccgctctagaactagtggatccccccggctgcaggaattcgatatcaagcttatcgatacccncnacctcgagggggggccccggtcccagctt

SEQ ID NO: 8461 - DNA, 958 bp, Homo sapiens
  misc_feature 102, 206, 375, 414, 478, 481, 492, 513, 543, 567, 568, 570,577, 594, 597, 599, 600, 628, 633, 643, 647, 651, 660, 662,672, 674, 687, 693, 695, 696, 715, 716, 724, 726, 732, 733,736, 741, 743, 744, 747, 757, 760, 765, 767, 770, 772: n = A,T,C or G
  misc_feature 775, 779, 793, 794, 807, 811, 816, 817, 830, 831, 837, 839,844, 845, 849, 855, 856, 860, 861, 863, 872, 873, 877, 879,880, 881, 886, 887, 888, 890, 898, 902, 911, 913, 922, 926,927, 929, 935, 942, 944, 948, 950, 952, 956: n = A,T,C or G
ggagctccaccgcggtggcggccgcccgggcaggtacgcgggcactgtaatgctaacttagcattaaccttttaagttaaagattaagagaaccaacacctntttacagtgaaatgccccaactaaatactaccgtatggcccaccataattacccccatactccttcactatttctcatcacccaactaaaaatattaaacacanactaccacctacctccctcaccaaagcccataaaaataaaaaattataacaaaccctgagaaccaaaatgaacgaaaatctgttcgcttcattcattgccccacaatcctaggcctacccgccgcagtacctcggccgctctagaactagtggatcccccgggctgcangaattcgatatcaagcttatcgataccgtcgacctcganggggggccccggttcccagcttttgttccctttagtgagggttaaatgcgcgcttgggcgtaantangggtcatagcngttacctggtgtgaaaattgnttatccgcttcacaattccaacaccaacantacgaagcccggggagcataaagnngnaaagccnggggggtggcctaatgnagngnngcttacctcaaaattgaattggggttgnggttnacttggccgntttncagnttggtaacncntgttgtgccngnctggctttaaagnaatttngnncatcgcccgggggagaggnnggtatggngntttggnntgntcttncnnctntccttggttnacngactngntgngnttnggcngtttcggttgcggnngagcgggtattantttnattannaaggcggataatnnagggtntntcctnnaaanagtggnnatcnncnagtaagtanntgtntnnncaagnnnancatatggncagnaccgtatananggccagttngttnngnttttcnaaggttngncccntncngctntc

SEQ ID NO: 8462 - DNA, 487 bp, Homo sapiens
cctatcactactatagggcgaattggagctccccgcggtggcggccgaggtacgcggggatccttaaagaaggtgtggggtctttcccaacctgaggatttctgaaaggttcacaggttcaatatttaatgcttcagaagcatgtgaggttcccaacactgtcagcaaaaaccttaggagaaaacttaaaaatatatgaatacatgcgcaatacacagctacagacacacattctgttgacaagggaaaaccttcaaagcatgtttctttccctcaccacaacagaacatgcagtacctgcccgggcggccgctctagaactagtggatcccccgggctgcaggaattcgatatcaagcttatcgataccgtcgacctcgagggggggcccggtacccagcttttgttccctttagtgagggttaattgcgcgcttggcgtaatcatggtcatagctgtttcctgtgtgaaattgttatccgctcac

SEQ ID NO: 8463 - DNA, 658 bp, Homo sapiens
  misc_feature 570, 585, 592, 597, 598, 600, 603, 617, 624, 630, 635, 655: n = A,T,C or G
gactcctatagggcgaattggaactccaccgcggtggcggccgagtacttgttgctttggtgtagtgaaatgaatgccttgttgaaattgcattgcaccatttttgaaagagagaatactcaaacgtgtcacttctgtttcttgcaagcaactgtgatcctgagctgtgcacacttctggttgggattatttctggtttctacttcctgtttgaagatgtggcatggagagtgtaagttgaagagatgagtgcggggctcatctatccctggaattgtctttcccacaatccctgacacagaatatgagccatacaggaattctgaagaaatgggtctcttgccacctcccagtaaaagattatttttttaaaaaaaaaggtaaatctaaacttgtgctttatcttgatatgaaaatacagacagcaatagaaaaatttaaaaattaactgggcatggtggtgcatacctgtgatatcagctacttggggaaactgaagtaagaggatcacttgaacccgggagtttgaggctacagtgacctgtcactgcagtccaggctgggcaaganagcaagaccctgganaaaaaanatctnnanaanaaaaaagtacctgnccggagnggccgntctanactagtggatccccccgggnctg

SEQ ID NO: 8464 - DNA, 546 bp, Homo sapiens
  misc_feature 2, 3, 4, 9, 12, 13, 525, 530, 532, 534, 536: n = A,T,C or G
gnnnagagntgnncacttactatagggcgaattgggccctctagatgcatgctcgagcggccgccagtgtgatggatatctgcagaatttcggagcggccgcccgggcaggtactggatgtcaggtctgcgaaacttcttagattttgacctcagtccataaaccacactatcacctcggccatcatatgtgtctactgtggggacaactggagtgaaaacttcggttgctggcaggtccgtgggaaaatcagtgaccagttcatcagattcatcagaatggtgagactcatcagactggtgagaatcatcagtgtcatctacatcatcagagtcgttcgagtcaatggagtcctggctgtccacatggtcatcatcatcttcatcatccatatcatccatgtggtcatggctttcgttggacttacttggaagggtctcttgtttaaagtcattggtttcttcagaggacacagcattctgtggggctaggagattctgcttcttgagatgggtcaaggtttanccatntngncncagcatctgg

SEQ ID NO: 8465 - DNA, 654 bp, Homo sapiens
  misc_feature 20, 121, 626, 648, 654: n = A,T,C or G
tcactatagggcgaattggnagctccaccgcggtggcggccgcccgggcaggtactttttttttttttttttttttttggcttttatcctgtttgttgttctctgagcttcctgaatctgnggtttcgtgtcacatattaatttagaaaaatctcattcattattgctttgaatatttcttctattcctttctctctttcctctccttctggggttccactatgcatacttacatcttttatagttgtcccactgttcttggatattctgttccttttttattcagtctttttccctttgctttcatttttggaagtttctcttgaaatatactgaagctccagattctttcctcacccacatccagtctgctaatgaggcttcaacaccatgcttcatttttgttagtttcttgacttctagaatttttatttgattctttcttagactttccatttctctgcttatattactgatctgttcttgcaaattgtctattttttccattatcactcttaccatattagtcatagttgtttaaaattaccaatctgataattctaatatacctgccatatctgaatatagttctgtcagctagctctggttcttgaactttttgttgntttggggtttttggttgcttgntggttn

SEQ ID NO: 8466 - DNA, 664 bp, Homo sapiens
  misc_feature 20, 108, 209, 286, 396, 415, 417, 433, 443, 448, 449, 467,472, 483, 487, 511, 512, 531, 549, 555, 556, 562, 563, 565,591, 610, 623, 625, 630, 634, 635, 641, 642, 649, 650, 653,661, 663: n = A,T,C or G
tcactatagggcgaattggnagctccaccgcggtggcggccgcccgggcaggtactttttttttttttttttttttttttttctcgtatcttataggccaggcgtggnggctcacgcctgtaatcccagcactttgggaggtcgagacaggcggatcacgaggtcaggaaatcgagaccatcctgaccaacatggtgaaaccccgtctntactaaaaatacaaaaaaattagccaggcgtggcggcagacacctgtagtcccagctacgcaactgtgccacctcanagaagtagatttttaaacaaacccaattttctcttgctgttaacaacactgaagactagtagcagaggagtgaaagtgtgggttaagagccttaaaaacttgtggaaaanggctcgatgcccagtgganancccttagttttttcangtggagaaanaagcnncctaaccctggggtttgnaaaancatgaaaactnccanggctttgttccgggcctttttggnnattgggggggggggcccanaactccccctggagggcnttgccnngacttnntnttaaaaactgggccaaagggtttttnaatttttaacccccaaagnttccccccccccnangaccntttnncccccnnaagcttnnatncaaagggnang

SEQ ID NO: 8467 - DNA, 798 bp, Homo sapiens
  misc_feature 12, 631, 632, 633, 634, 635, 636, 637, 638, 639, 640, 641,642, 643, 644, 645, 646, 647, 648, 649, 650, 651, 653, 654,655, 656, 658, 659, 660, 661, 662, 663, 664, 665, 666, 667,669, 670, 671, 672, 673, 674, 675, 676, 677, 678, 679: n = A,T,C or G
  misc_feature 680, 681, 682, 683, 684, 685, 686, 687, 688, 689, 690, 691,692, 693, 694, 695, 696, 697, 698, 701, 702, 703, 704, 705,706, 707, 708, 710, 711, 712, 713, 714, 715, 716, 717, 718,719, 720, 721, 722, 723, 724, 725, 726, 727, 728, 729: n = A,T,C or G
  misc_feature 730, 731, 732, 733, 734, 735, 737, 738, 739, 740, 742, 744,745, 746, 747, 748, 749, 751, 752, 753, 754, 755, 756, 757,758, 759, 760, 762, 763, 764, 765, 766, 767, 768, 769, 770,771, 772, 773, 774, 775, 776, 777, 778, 779, 781, 784: n = A,T,C or G
  misc_feature 786, 787, 788, 789, 790, 791, 792, 793, 794, 795, 796, 798: n = A,T,C or G
atagggcgaatngggccctctagatgcatgctcgagcggccgccagtgtgatggatatctgcagaattcgccctttcgagcggccgcccgggcaggtacagaagggccatgctgttattactcttacacaaggaggcagccctcgagccacagggtccagctgttggctataatagcctaccggtctctgatgatcaccatgtttctggaattcaagccaggaagaagcagcaatctgtcttctggattaaaactgaagatcaacctactttcaacttactaagaaaggggatcatggacattgaagcatatcttgaaagaattggctataagaagtctaggaacaaattggacttggaaacattaactgacattcttcaacaccagatccgagctgttccctttgagaaccttaacatccattgtggggatgccatggacttaggcttagaggccatttttgatcaagttgtgagaagaaatcggggtggatggtgtctccaggtcaatcatcttctgtacctcggccgcgaccacgctaagggcgaattccagcacactggcggccgttactagtggatccgactcggtaccaagcttggcgtaatcatggtcatagctgggtttccgnnnnnnnnnnnnnnnnnnnnngnnnntnnnnnnnnnngnnnnnnnnnnnnnnnnnnnnnnnnnnnnnnagnnnnnnnngnnnnnnnnnnnnnnnnnnnnnnnnnntnnnngnannnnnnannnnnnnnnngnnnnnnnnnnnnnnnnnnangtngnnnnnnnnnnnan

SEQ ID NO: 8468 - DNA, 361 bp, Homo sapiens
  misc_feature 4, 13, 47, 242, 243, 244, 245, 246, 247, 248, 249, 250, 251,252, 256, 258, 259, 260, 261, 262, 263, 264, 265, 266, 267,268, 269, 270, 271, 272, 273, 274, 275, 276, 277, 278, 279,280, 281, 282, 283, 284, 285, 286, 287, 288, 290: n = A,T,C or G
  misc_feature 291, 292, 293, 294, 295, 296, 297, 298, 299, 300, 301, 302,303, 304, 305, 306, 307, 308, 309, 310, 311, 312, 313, 314,315, 316, 317, 318, 319, 320, 321, 322, 323, 324, 325, 326,327, 328, 329, 330, 331, 332, 333, 334, 335, 336, 337: n = A,T,C or G
  misc_feature 338, 339, 340, 341, 342, 343, 344, 345, 346, 347, 348, 349,350, 351, 352, 353, 354, 355, 356, 357, 358, 359, 360, 361: n = A,T,C or G
tacntacttcctngagggtcgaattgggccctctattgcatgctcgnacggccgccagtgtgatggatatctgcagaattcggcttctaatacgactcactatagggctcgagcggccgcccgggcaggtacttttttttttttttttttttttttttttttttttttttttttttttttttttttttttttttttttttttttttttttttttttttttttttttttttttttttgggggnnnnnnnnnnntttntnnnnnnnnnnnnnnnnnnnnnnnnnnnnnnntnnnnnnnnnnnnnnnnnnnnnnnnnnnnnnnnnnnnnnnnnnnnnnnnnnnnnnnnnnnnnnnnnnnnnnnn

SEQ ID NO: 8469 - DNA, 635 bp, Homo sapiens
  misc_feature 598, 606: n = A,T,C or G
tcactatagggcgaattggagctccaccgcggtggcggccgagtacctgtgaattggacatctgttgtttgcagatgtaattaagatgggtcatacttaagtagtgtgggcctctaatccaatgtgactggagtcctactaagggagcagggtcagaggcagacatgggagaatgccatgtgatgacggaggctgagattgaagtgttgcaactgcaatccaaggaatgccaacatttggtggccaccatgacaaggtagaaggaggcaaggaaggctccaaccagtgtctcagaggaagcatggccctggtgacatgctgagtttacgcttccagcctccagagctataagaaggtaaatgtctgttttctgtggttccctgttacagcagccttaaaaaatcattgcaatatttgacctacaaatcccacccatgaaacctctctccttaaaataaaaaaactacaagcattcaattatacacgtgcagggtgtttttttgcagccatgataggaatagtgcaatgaggaaattaaacaaatgaaaagagaattactcatcaagaggaatacattatggtacctgccccgggcggncgctctanaactagtggatccccccgggctgcaggat

SEQ ID NO: 8470 - DNA, 763 bp, Homo sapiens
  misc_feature 2, 4, 12, 716: n = A,T,C or G
gnanagctcctngagtcgaccccgcgtccgctccctcttggtgtacaaaaaacacaaggaatacaacccaatagaaaatagtcctgggaatgtggtcagaagcaaaggcctgagtgtctttctcaaccgtgcaaaagccgtgttcttcccgggaaaccaggaaaaggatccgctactcaaaaaccaagaatttaaaggagtttcttaaatttcgaccttgtttctgaagctcacttttcagtgccattgatgtgagatgtgctggagtggctattaacctttttttcctaaagattattgttaaatagatattgtggtttggggaagttgaattttttataggttaaatgtcattttagagatggggagagggattatactgcaggcagcttcagccatgttgtgaaactgataaaagcaacttagcaaggcttcttttcattattttttatgtttcacttataaagtcttaggtaactagtaggatagaaacactgtgtcccgagagtaaggagagaagctactattgattagagcctaacccaggttaactgcaagaagaggcgggatactttcagctttccatgtaactgtatgcataaagccaatgtaagtccagtttctaaagatcatgttccaagctaactgaatcccacttcaataccacactcatgaactccctgatggaacaataaacaggcccaagcctggtggtntgatgtgcccacttgctagactcagaaaaaatctactctcataaaat

SEQ ID NO: 8471 - DNA, 882 bp, Homo sapiens
  misc_feature 4, 61, 110, 665, 689, 720, 727, 765, 769, 788, 793, 799,848, 871: n = A,T,C or G
gcgnttatacactactatagggcgaattggagctcccccgcggtggcggcccgaggacttntttttttttttttttttttggggaatgaagacttttattaaattacagngtattacagattatatcataataataagcctttcatctttaggctaatatgatacaaaaacctacttggccacattcttttgagtttcttttgggcagctttcttcttgaccatctgtaatcgcttcatagcattgagctgtgattcttgtgaagttgggcctttaagggatgctgagggagagctgctggattctgaagtagttttgctggtagtacctgcccgggcggccgctctagaactagtggatcccccgggctgcaggaattcgatatcaagcttatcgataccgtcgacctcgagggggggcccggtacccaagcttttgttccctttagtgagggttaattgcgcgcttggccgtaatcatggtcatagctgtttcctgtgtgaaattgttatccgctcacaattccacacaacatacgagccgggagcataaagtgtaaagcctggggtgcctaatgagtgagctaactcacattaattgcgtggcgctcactgccccgctttccagtcgggaaacctgtcgtgccaagctgcattaatgaatcngcccaaccccccggggaagaggcngtttgcgtattggggcgctcttcccttcctnggttacngactcgctgcgctcggtcgtcggctgcggcgagccggntcanctcactcaaaaggccggtnatacngttttncacagaataagggggaaaccccaggaaaaacttgtgaccaaaaggcccncaaaaggcccggaacccgtaaangcccgtttcct

SEQ ID NO: 8472 - DNA, 652 bp, Homo sapiens
  misc_feature 461, 479, 498, 501, 529, 550, 566, 567, 570, 572, 582, 614,619, 621, 622, 636, 639, 649, 652: n = A,T,C or G
cctcctaagggaacaaaagctgggtaccgggccccccctcgggtcgacggtatcgataagcttgatatcgaattcctgcagcccgggggatccactagttctagagcggccgaggtacactccataaatcctgccatagtgtgctttccaataactgccttgtctataaccaggactgagaacggtatctgaaaaattaggtgaatgaatgaatcctttagagacacagaataaacagttaaaaattagatgaatggatgttttaaagacacggaataaagagttaaaaattaggccgggcgtggtagctcatgcctgtaatcccagcactttgggaggctgaggcgggtggatcacgaggccaagagatcgagaccatcctggccaacatagtgaaaccctgtctctactaaaaacacagaaaattagctgggcgtggtggcgcttggcctgtagtcccnctacttgggaaggctgangcaggagaattactttganccnagaaggcggaggttgcaatgagcccaanatcgtggcccctggacttcangcctgggcgaaaaaannggnantccccttccnccacccaaaaaaaaaaaaaaaaaaaaaaaaangttcntnnccgggcggcccccnccnggggggactncan

SEQ ID NO: 8473 - DNA, 668 bp, Homo sapiens
actcactatagggcgaattggactccaccgcggtggcggccgagtaccactataatctctaatacttactcagaattactgtgtatttacttaatttcttattatgtgccttattatgtgcttaagatacaataggttagagtttaatctaaatatcttgaaagctatattgtgggcttggtaagcattttgttttttctttctctgttttggtaaggatttaaaatttttttcattgcaattttaagtggttttcaataagtaatagtttttatcaaatttttggtgcttggtgcagagacggtgtggggaagggtgaatggttttgggaataattcagtgcacacctgtaggcctctttacattgtgactgataggggttattgcatatcaatttggggctgtagagtgcaatctcagtttcatctttttcacccatcagaatttgtctcaggattacttggtttttctcagtcctcaagcgagaacttgcttttctttgttaatgtgactttcattactgagtacctgcccgggcggccgctcgacgctcactgcccgctttccagtcgggaaacctgtcgtgccagctgcattaatgaatcggccaacgcgcggggagaggcggtttgcgtattgggcgctcttccgcttcctcgctcactgac

SEQ ID NO: 8474 - DNA, 689 bp, Homo sapiens
  misc_feature 95, 108, 140, 196, 197, 222, 231, 239, 256, 266, 283, 289,301, 307, 312, 314, 319, 321, 351, 370, 379, 391, 439, 443,470, 486, 533, 547, 548, 551, 558, 563, 566, 574, 600, 603,605, 618, 626, 629, 631, 633, 644, 647, 672, 687, 689: n = A,T,C or G
tacgactcactatagggcgaattgggaactccaccgcggtggccggccgcccgggcaggtacttttttttttttttttttttttttttttttgangttattttattgngtcgtaaataaggagtaggtaaaacattttgngctttaataagtgaggcacagcttaaaagttttaaacagcaatataaaaatacagnnctttttttttttttttttttttttngaaacaaancctggttntgttgcccaggctggantgcaggggcncaattttggctcactgnaacatntgcctcccaggngcaagngattntnatgtntnagcctttcaagtagctgggattacagctgngctccaacactcccggctnatttttgtnttttcagtaaanacggggtttcaccatgttggccaggctggtctcaaaactcctggcctnaagngatctgcctgccttagcctcccaaagngctgggattacaggcntgagcccccgcgcctggccatatattgggattattttttttaattgnctttccctttcccnngtnccttggncgctntanaactaggnggatccccccgggctgcaggaattcnatntnaagccttatcganaccgtccnccntngngggggggcccnggncccagctttttgttccttttagggngggttaatttgcccncn

SEQ ID NO: 8475 - DNA, 488 bp, Homo sapiens
ggtcctatcactactatagggcgaattggagctccccgcggtggcggccgtcacactcatttacccggggacagggagaggctcttctgcgtgtagtggttgtgcagagcctcatgcatcacggagcatgagaagcccgcgtacctcggccgctctagaactagtggatcccccgggctgcaggaattcgatatcaagcttatcgataccgtcgacctcgagggggggcccggtacccagcttttgttccctttagtgagggttaattgcgcgcttggcgtaatcatggtcatagctgtttcctgtgtgaaattgttatccgctcacaattccacacaacatacgagccgggagcataaagtgtaaagcctggggtgcctaatgagtgagctaactcacattaattgcgttgcgctcactgcccgcttttcagtcgggaaaccttgtcgtgccagctgcattaatgaatcggccaacgcgcggggaga

SEQ ID NO: 8476 - DNA, 416 bp, Homo sapiens
cgcgtaatacgactcactatagggcgaattggagctccaccgcggtggcggccgaggtacaaattaatttaacacatcttttgataatctcatccttggtgttggaaaagacgggaaaatccaaaagtgtctattttgtgcccaaatgctcaagttaatactcgagggccttgatctctggcctcttgccatccctctccccattatttctgaagaagtagccattttgcagattccggaggatgggagccacggccgctctagaactagtggatcccccgggctgcaggaattcgatatcaagcttatcgataccgtcgacctcgagggggggcccggtacccagcttttgttccctttagtgagggttaattgcgcgcttggcgtaatcatggtcatagctgtttcctgtgtga

SEQ ID NO: 8477 - DNA, 473 bp, Homo sapiens
  misc_feature 2, 3, 4, 7, 255: n = A,T,C or G
gnnncgnatcactacttagggcgaattggagctccccgcggtggcggccgaggtacgatatacgaagactctgagctgtttgcctccgatggtttccagtatttgcccgttgtaaagctcattaaggccaacttttactttcaatatgtgattctgcagaattaatttaaggaggcgctgatccatgctgagagtatcatcagaaaatgcattaattcacagggtgccagcaaagtgtattctccatctggcctnagagcagatgccaagcctaattgggccacaagatccgtgaaggtggtttgctgttttccagccagctcaataacttgtttggcagaatcaggaattaggacctgatcaatcaaatggatcacaccattatttgtcacaatatcctttttgttcaccattttgattccatttactgttatactgtcaccggcacatcctatctcaattgtatttccttc

SEQ ID NO: 8478 - DNA, 599 bp, Homo sapiens
  misc_feature 1, 2, 7, 8, 11, 47, 56, 78, 88, 101, 575, 588: n = A,T,C or G
nntttannaanactatgacgtcgcatgcacgcgtacgtaagcttggntcctctagnagcggccgcgacggaagcaagnaggaccaggnacaccgggcaagnatccccgcagtgccagcttcccaggactcaggattccagtcggccatgaagcaataaatacaaacatgccccacaaggtgagaataaagccatcaaggtgatgaggaagaagtcacggggattttcttcttctaagtccaagcacagtggcaatatttcaagtattgcaaagaaaaacacacgtgtgtgtatttttgtctgttatgtggcgtgtgaccctggaaccccccgctgggtccatggccccaccactgcctcccgcagactggggactcgttcaagtatctactgattcaggcagggctaaccgagggctgggcagaccaagggaggcccaggcggggtttgcagggcatgcccgcctggaatccggaaggcaggcctctctgcagacgccctccgtggccttgggcaaggcagaggcagggagggacagggctgtcatcaggcctaccctgccgaggagctgacatnaaaactgactgtnaaagctggaca

SEQ ID NO: 8479 - DNA, 612 bp, Homo sapiens
  misc_feature 15, 16, 17, 27, 45, 81, 526, 532, 533, 534, 535, 536, 537,538, 539, 540, 541, 542, 543, 544, 545, 546, 547, 548, 549,550, 551, 552, 553, 554, 555, 556, 557, 558, 559, 560, 561,562, 563, 564, 565, 566, 567, 568, 569, 570, 571, 572: n = A,T,C or G
  misc_feature 573, 574, 575, 576, 577, 578, 579, 580, 581, 582, 585, 586,587, 588, 589, 590, 591, 608, 612: n = A,T,C or G
cgggccccccctcgnnntacttctagnaattaattaacgcggggnatcctggtgatgctggaaatgaccccccagcagggnagatgtctacacctgccaagtggagcacaccagcctggatagtcctgtcaccgtggagtggaaggcacagtctgattctgcccggagtaagacattgacgggagctgggggcttcgtgctggggctcatcatctgtggagtgggcatcttcatgcacaggaggagcaagaaagttcaacgaggatctgcataaacagggttcctgagctcactgaaaagactattgtgccttaggaaaagcatttgctgtgtttcgttagcatctggctccaggacagaccttcaacttccaaattggatactgctgccaagaagttgctctgaagtcagtttctatcattctgctctttgattcaaagcactgtttctctcactgggcctccaaccatgttcccttcttcttagcaccacaaataatcaaaacccaacatgaaaaaaaaaaaanaaaaannnnnnnnnnnnnnnnnnnnnnnnnnnnnnnnnnnnnnnnnnnnnnnnnnnttnnnnnnnaaaaaaagcggccgccnccgn

SEQ ID NO: 8480 - DNA, 513 bp, Homo sapiens
  misc_feature 3, 4, 83, 120, 166, 210, 256, 275, 300, 322, 326, 339, 341,344, 351, 383, 386, 395, 397, 420, 436, 475: n = A,T,C or G
acnncctatcactactatagggcgaattggagctccaccgcggtggcggccgaggtacttttttttttttttttttttttttngaaggtaaaccaacgtttatttttttttccaaaacanagtcagtttgtgctggccatccaggaactcactaacactacccctnttagtttcatcattaatctgttactgaacttccacctccaaaanacttggatccttttcttatttttggagaccgttttgcttctgaaanccaagcttggagtgcaggnggtgcgatctttggctttactacanccttcaaacctctcggggcttnaagntgattctcctacntnaantctccanagtcccgcgtaccttgcccgggcggcccgctntanaactagtgngntcccccgggctgcagggaattcnatatcaaagcttattngataccgtcgaacctcgaggggggggcccggtacccaancttttgttccctttaaatgaggggtttaaatttgcgcc

SEQ ID NO: 8481 - DNA, 515 bp, Homo sapiens
  misc_feature 2, 3, 4, 5, 6, 7, 8, 9, 11, 12, 13, 19, 20, 23, 24, 28, 31,35, 323, 324, 325, 326, 327, 328, 329, 330, 331, 332, 333,334, 335, 336, 337, 338, 339, 340, 341, 342, 343, 344, 345,346, 347, 348, 349, 350, 351, 352, 353, 354, 355, 356: n = A,T,C or G
  misc_feature 357, 358, 359, 360, 361, 362, 363, 364, 365, 366, 367, 368,369, 370, 371, 372, 373, 374, 375, 376, 377, 378, 379, 380,381, 382, 383, 384, 385, 386, 387, 388, 389, 390, 391, 392,393, 394, 395, 396, 397, 398, 399, 400, 401, 402, 403: n = A,T,C or G
  misc_feature 404, 405, 406, 407, 408, 409, 410, 411, 412, 413, 414, 415,416, 417, 418, 419, 420, 421, 422, 423, 424, 425, 426, 427,428, 429, 430, 431, 432, 433, 434, 435, 436, 437, 438, 439,440, 441, 442, 443, 444, 445, 446, 447, 448, 449, 450: n = A,T,C or G
  misc_feature 451, 452, 453, 454, 455, 456, 457, 458, 459, 460, 461, 462,463, 464, 465, 466, 467, 468, 469, 470, 471, 472, 473, 474,475, 476, 477, 478, 479, 480, 481, 482, 483, 484, 485, 486,487, 488, 489, 490, 491, 492, 493, 494, 495, 496, 497: n = A,T,C or G
  misc_feature 498, 499, 500, 501, 502, 503, 504, 505, 506, 507, 508, 509,510, 511, 512, 513, 514, 515: n = A,T,C or G
gnnnnnnnngnnnaccgcnnaanngacntanttgnggctgattggagctccaccgcggtggcggccgaggtacgcgggcttctcatgctccgtgatgcatgaggctctgcacaaccactacacgcagaagagcctctccctgtccccgggtaaatgagtgcgacggccgctctagaactagtggatcccccgggctgcaggaattcgatatcaagcttatcgataccgtcgacctcgagggggggcccggtacccagcttttgttccctttagtgagggttaattgcgcgcttggcgtaatcatggtcatagctgtttctgannnnnnnnnnnnnnnnnnnnnnnnnnnnnnnnnnnnnnnnnnnnnnnnnnnnnnnnnnnnnnnnnnnnnnnnnnnnnnnnnnnnnnnnnnnnnnnnnnnnnnnnnnnnnnnnnnnnnnnnnnnnnnnnnnnnnnnnnnnnnnnnnnnnnnnnnnnnnnnnnnnnnnnnnnnnnnnnnnnnnnnnnnnnnnnnn

SEQ ID NO: 8482 - DNA, 667 bp, Homo sapiens
  misc_feature 490, 498, 527, 542, 569, 604, 606, 607, 612, 619, 624, 643,644, 645, 654, 660, 661, 666: n = A,T,C or G
gactcctatagggcgaattggagctccaccgcggtggcggccgcccgggcaggtacatgtagaaaatccagcaacgaagagccatggctcactgctaatcacataacacacacagggagtctatttatgcatggaatgtggcagattttttaacaagaagtcacaacttgttatacaccagagaactcatacagggagagaagccctatcaatgcagtgagtgtggaaaagccttttcacagaagtcactgctcacggttcatcaaagaactcactcaggagaaaaaccgcatgggtgcagcgaatgtcagaaagcttttagtaggaagtcactcctcattttacatcagagaattcatactggagagaagccgtatggatgcagtgaatgtggaaaagccttcagtaggaagtcgcagcttaaaagacatcagattacgcacacaatagagaaaccctacagttgcagtgagtgtgggaaagcattctnccagaaanttaaactcatccccatcagagagcgcccncaggagagaaacctnttcatgtagtcactggggaaagccttnttttggagtcgcagctgatacttttaaaggacccncnnggganaaacctncggtngggggggggcaaaagcctnnncaggacccncttttnnttagna

SEQ ID NO: 8483 - DNA, 445 bp, Homo sapiens
  misc_feature 346, 347, 350, 351, 353, 360, 363, 369, 394, 397, 401, 402,408, 409, 410, 416, 417, 423, 425, 434, 435, 440, 441, 442: n = A,T,C or G
tactatagggcgaattggagctccccgcggtggcggccgcccgggcaggtacgcgggcatttgtaaaacattccaaataattccacagtcctgaagcagcaatcgaatccctttctcacttttggaaggtgacttttcaccttaatgcatattcccctctccatagaggagaggaaaaggtgtaggcctgccttaccgagagccaaacagagcccagggagactccgctgtgggaaacctcattgttctgtacctcggccgctctagaactagtggatcccccgggctgcaggaattcgatatcaagcttatcgataccgtcgacctcgaaggggggggcccggannccnnancttttgngtncctttnaggggggggggtaaaattggccccngtngggnnaaaaannnggggannaaaatngntttttttcnntgtgnnnaaa

SEQ ID NO: 8484 - DNA, 484 bp, Homo sapiens
  misc_feature 305, 336, 354, 408: n = A,T,C or G
ctatcactactatagggcgaattggagctccccgcggtggcggccgcccgggcaggtacgcggggtagatggaaggaagaacttgtgtgcttagacctgacgctgggaggagatgctgccacctaggttacttgtaggaccctatacggcaacctcctttgccaggaactatttataaacatcctgcaggaaaatgcagtgaagtagaagagacagggatatcccagaaggttatgcaaaacatcaagagaagatgagaggagtctatatgtcagaatacacatttcccaccttgcccaacagtngaaaaaaaaaaaaaaaaaaaaaaaaaaaaangtacctcggccgctctanaactagtggatcccccgggctgcaggaattcgatatcaagcttatcgataccgncgacctcgagggggggcccggtacccagcttttgttccctttagtgagggttaattgcgcgcttggcgtaatcatg

SEQ ID NO: 8485 - DNA, 666 bp, Homo sapiens
  misc_feature 378, 397, 432, 481, 493, 500, 502, 517, 525, 539, 545, 555,561, 562, 571, 575, 580, 591, 603, 611, 613, 616, 617, 618,619, 634, 639, 642, 649, 652, 663: n = A,T,C or G
gactcactatagggcgaattggactccaccgcggtggcggccgagtactggccctgggccaatgcgtcctcgctggagcctttgcctccttctactgggccttccacaagccccaggacatccctaccttccccttaatctctgccttcatccgcacactccgttaccacactgggtcattggcatttggagccctcatcctgacccttgtgcagatagcccgggtcatcttggagtatattgaccacaagctcagaggagtgcagaaccctgtagcccgctgcatcatgtgctgtttcaagtgctgcctctggtgtctggaaaaatttatcaagttcctaaaccgcaatgcatacatcatgatcgccatctacgggnaagaatttctgtgtctcanccaaaatgcgtcatgctactcatgccaaacattgncagggtggtcgtcctgacaaagtcacagaccgctgctgttctttggaanctgcttggtggncgaagcntngggggtccggccttntttttttntccggcccattccngggctnggtaaaaacnttaaannccccccctnaatntactnggtgggcatangaaccccatctnggggcccntntannnnccggggttttttaangtttnggnttggggnggnaaccccctttnctt

SEQ ID NO: 8486 - DNA, 690 bp, Homo sapiens
  misc_feature 24, 74, 76, 127, 141, 142, 163, 168, 170, 176, 179, 183,185, 198, 200, 206, 210, 215, 218, 244, 245, 255, 259, 261,267, 278, 284, 288, 292, 294, 298, 301, 308, 309, 311, 313,323, 325, 333, 338, 342, 346, 351, 353, 361, 363, 364: n = A,T,C or G
  misc_feature 366, 391, 413, 421, 435, 443, 447, 448, 455, 461, 466, 479,482, 483, 485, 488, 490, 493, 501, 505, 506, 517, 528, 533,542, 545, 552, 556, 566, 576, 578, 601, 606, 607, 610, 630,639, 640, 644, 648, 650, 661, 663, 667, 671, 672, 679: n = A,T,C or G
  misc_feature 689: n = A,T,C or G
gcactcactatagggcgaattggnaactccaccgcggtggcggccgagtacttttttttttttttttttttttngnttttttttttttttttttttttttttttttttttttttttttttttttgcncggggtttttttannggaaagacagcccccgacctnaaaancncccccnccntgcncnggaccaaaagganangggganaccnaaccnccngggggcccgggggggggaggggcttnnaggaaaaccngggncngggacnctggcgggggngggggncatntgcncngaangcngggcctnnancncccaaccttntnggggacantaccngccngggnggccncnctaaaacnanngnatcccccgggctgaaggaatcccangtcaaacttataaaaaccgggnaccccggngggggggcccggancccaactntttnntcccctnaagggngggtnaaagggggcgccnggnncnaancnaanggcaaaanctgnnttccggggggnaaaaagggccncccgnccaaaaatnccncaaaaanaaanaaacccgggnaaaaaaaaangntaaaccccggggggcccaaaaanaaggnnccncccccaataaatgggggagnccccccggnncccntttnanggggggaaacntntagngccnnggggaanaaaaaagacnc

SEQ ID NO: 8487 - DNA, 665 bp, Homo sapiens
  misc_feature 52, 525, 551, 556, 648: n = A,T,C or G
gcaattaaccctcactaagggaacaaaagctgggtaccgggccccccctcgnggtcgacggtatcgataagcttgatatcgaattcctgcagcccgggggatccactagttctagagcggccgaggtactttttttttttttttttttttgtattgatatatacggttttttaaatggttattgtaattaaatatctcctcatttttctcttttaggagatgatgttgcattttcctctcaagaaaatgaatatcaattgttatcttgcttttgttgtcagctttcttatgtgcatgaactaattgctgttgaagccacatatttttgctttgtagttgaaataatttctgatctagagactcctgctgttcagtgtgtttgttcacattatcttgttcgttttgatacatgtgttcagcttccttcatttgacactgtgtttcacgttggtctctttgtgcatgttctgaaaccaatgtattttctcttagagcatctcctgcataattgagattaatttttangcttttggatttcctttgagcttcanaaagnggttgatggagcacctcattggtatatatcgactactcacatcaacattcatttttctttgcaaccaagcatttcctgcaagtggaaagcangttcttgactttttctt

SEQ ID NO: 8488 - DNA, 610 bp, Homo sapiens
  misc_feature 6, 27, 150, 153, 154, 157, 164, 165, 166, 167, 171, 174,179, 182, 183, 187, 190, 193, 194, 195, 203, 215, 217, 221,225, 227, 236, 237, 238, 239, 246, 248, 249, 250, 251, 252,255, 257, 258, 259, 260, 262, 263, 267, 270, 271, 272: n = A,T,C or G
  misc_feature 273, 274, 275, 277, 283, 284, 285, 287, 289, 291, 292, 297,298, 299, 300, 307, 309, 313, 321, 322, 324, 325, 329, 331,333, 335, 341, 343, 346, 349, 350, 352, 359, 362, 365, 385,394, 395, 396, 402, 411, 414, 424, 426, 427, 428, 429: n = A,T,C or G
  misc_feature 431, 432, 437, 442, 448, 452, 455, 460, 461, 462, 464, 465,467, 470, 473, 479, 480, 482, 483, 484, 487, 488, 489, 499,501, 502, 506, 507, 508, 510, 516, 519, 520, 521, 523, 524,525, 526, 528, 535, 540, 543, 545, 548, 549, 551, 553: n = A,T,C or G
  misc_feature 554, 558, 559, 574, 579, 581, 587, 596, 599, 609: n = A,T,C or G
acttanctggtaccccacccgggtggnaaaatcgagggcccgcggccgctttttttttttttttcttttttttttttttttttttttttttttttttttttttttttttttttttttttttttttttttttttttttttttttttttttnggnnccnccccccnnnntttnttnaaaanggnnaaanggnccnnntaaaaaanaggggggggggncnggcnaaancnccccccaannnnccggggncnnnnnggnannnnanncggnccnnnnnngncccccnnngncnannccccnnnnaaacccngncccngggggccnngnnaaancnancnggtaanantcnggnnangggcccnttnccnccccaaccccaaaaaacccnaaaaagggnnnccccanaaaaaaccnggnaaacccaaancnnnntnnacccnggganaaaaancccnggnccccnnngnngnccnaancccccnncnnnggnnncaaaaacccntnngctnnnangggggnaannncnnnntnaaaaaanccggnttntnccnngntnnaaanntttaaaaaaaaaccnccttngnttgcgngcttggccnacnaaaaggcccng

SEQ ID NO: 8489 - DNA, 630 bp, Homo sapiens
  misc_feature 20, 75, 371, 372, 373, 375, 388, 401, 402, 406, 413, 429,437, 438, 443, 450, 452, 454, 465, 499, 508, 510, 511, 512,522, 526, 528, 532, 548, 558, 581, 590, 591, 607, 617, 618,619, 623, 627: n = A,T,C or G
tcactatagggcgaattggnagctccaccgcggtggcggccgagtactttttttttttttttttttttttgctgngttatgcccgcctcttcacgggcaggtcaatttcactggttaaaagtaagagacagctgaaccctcgtgggagccattcatacaggtccctaaggaacaagtgattatgctacctttgcacggttagggtaccgcggccgctctagaactagtggatcccccgggctgcaggaattcgatatcaagcttatcgataccgtcgacctcgagggggggcccggtacccagctttttgtcccctttagtgaggggtaaattgcgcgcttggcgtaatcatgggcatagctggttcctgnnngnaaatggttatccnttaaaaattccannaaanatacaanccggggacataaaagngtaaagcnnggggngcctaangngngacctaccccnattaatggggtgggctaactgcccgtttcaagtnggaaacctntnnngccacttganttantnaatnggccacccccgggganggggttgggnttggggcccttttcggtttcttnttaattaanncttggcctgggggttngggtgggggnnngggntaanttt

SEQ ID NO: 8490 - DNA, 606 bp, Homo sapiens
  misc_feature 1, 44, 516, 571, 600, 606: n = A,T,C or G
nccccgcgtccgcatgaatcgggtgtttttcaaatttctcctgntttccttgtggcactggccgttgggactttgagtggtgatgcttttttacaccttcttccacattctcatgcaagtcaccaccatagtcatagccatgaagaaccagcaatggaaatgaaaagaggaccacttttcagtcatctgtcttctcaaaacatagaagaaagtgcctattttgattccacgtggaagggtctaacagctctaggaggcctgtatttcatgtttcttgttgaacatgtcctcacattgatcaaacaatttaaagataagaagaaaaagaatcagaagaaacctgaaaatgatgatgatgtggagattaagaagcagttgtccaagtatgaatctcaactttcaacaaatgaggagaaagtagatacagatgatcgaactgaaggctatttacgagcagactcacaagagccctcccactttgattctcagcagcctgcagtcttggaagaagaagangtcatgatagctcatgctcatccacaggaagtctacaatgaatatgtacccaganggtgcaagaataaatgccattcacatttncacgan

SEQ ID NO: 8491 - DNA, 665 bp, Homo sapiens
  misc_feature 1, 23, 99, 455, 471, 487, 500, 519, 542, 582, 585, 593, 599,608, 625, 627, 633, 642, 643, 646, 650, 660: n = A,T,C or G
nactcactatagggcgaattggnactccaccgcggtggcggccgcccgggcaggtacagtatatgtatttttttaagtgacctcctctccttccacagnaccccacatgcccaaaggcctcgggacttcccaccaccttgctccacagatccagctaggcctgacctgtgcctcatcccgtgccgctcggtctctggctgatcccgaggctttgtcttcctctcgtcagttcttttggttgtgttttttgttttttttaataactcaaaaaaaaataaaagacttggaggaagggtgcaagctcccagtgcatctggggcacatgtttcttggaagggactgtctcgccgacactcgggattccctcttgcctgcatgttgaggctatgggtgaccgtggttagtgggacaggcagtgagcagtgaagtgcctgagtgccgaattggtggggaangcttcctggatgaagnggcatctaaactaaangatggaactaaangatgggcatgggtgatttnctgttgccagaataagtcatgtnaataccccaaagacaaaaaatggaagggctgaaaatcctnaantaggcctnagctanggcaggctncctgaaggggcctgggnanaactgnggaggccannggntagnaaacgaaggngtgcc

SEQ ID NO: 8492 - DNA, 751 bp, Homo sapiens
  misc_feature 7, 8, 11, 13, 19, 21, 22, 25, 581, 591, 596, 597, 599, 602,605, 606, 607, 608, 610, 622, 640, 656, 663, 665, 674, 676,679, 680, 693, 694, 720, 731, 735, 740: n = A,T,C or G
gaaggcnnttnanccttgnannccnctactttagggcgaattggagctccaccgcggtggcggccgcccgggcaggtacgcgggacagcggcttccttgatccttgccacccgcgactgaacaccgacagcagcagcctcaccatgaagttgctgatggtcctcatgctggcggccctctcccagcactgctacgcaggctctggctgccccttattggagaatgtgatttccaagacaatcaatccacaagtgtctaagactgaatacaaagaacttcttcaagagttcatagacgacaatgccactacaaatgccatagatgaattgaaggaatgttttcttaaccaaacggatgaaactctgagcaatgttgaggtgtttatgcaattaatatatgacagcagtctttgtgatttattttaactttctgcaagacctttggctcacagaactgcagggtatggtgagaaaccaactacggattgctgcaaaccacaccttctctttcttatgtctttttactacaaactacaagacaattgttgaaacctgctatacatgtttatttttaataaattngataaccccngcacnnanttntgnnnnanaaggtcccttcnggcccggttttaaaactnggtgggatcccccccngggcctngnaggaaattncnganntttaaaggcttannttggataccccggcccacccttctanggggggggggncccnggganccccaactttt

SEQ ID NO: 8493 - DNA, 483 bp, Homo sapiens
  misc_feature 1: n = A,T,C or G
nccctatcgactactatagggcgaattggagctccccgcggtggcggccgcccgggcaggtacgcgggaattaaggattatgagctccagctggcctcatacacctcaggactggaaactctgctgaacatacctatcaagaggaccatgattcagtccccttctggggtgattctgcaagaggctgcagatgttcatgctcggtacctcggccgctctagaactagtggatcccccgggctgcaggaattcgatatcaagcttatcgataccgtcgacctcgagggggggcccggtacccagcttttgttccctttagtgagggttaattgcgcgcttggcgtaatcatggtcatagctgtttcctgtgtgaaattgttatccgctcacaattccacacaacatacgagccgggagcataaaagtgtaaagcctggggtgcctaatgagtgagctaactcacattaattggcgttgcgctca

SEQ ID NO: 8494 - DNA, 464 bp, Homo sapiens
atacgactactatagggcgaattggagctccaccgcggtggcggccgtggcccaccgtgcaagcttccacttggtgcctgcgtgggaacgcaccacctgccgtggaacttcctcctgcggggcagaggaggggtcccccgcgtacctcggccgctctagaactagtggatcccccgggctgcaggaattcgatatcaagcttatcgataccgtcgacctcgagggggggcccggtacccagcttttgttccctttagtgagggttaattgcgcgcttggcgtaatcatggtcatagctgtttcctgtgtgaaattgttatccgctcacaattccacacaacatacgagccgggagcataaagtgtaaagcctggggtgcctaatgagtgagctaactcacattaattgcgttgcgctcactgcccgctttccagtcgggaaacctgtcgtgccagctgcattaa

SEQ ID NO: 8495 - DNA, 530 bp, Homo sapiens
gagagcgccgcaaatgagacttccaaaataaattaatggtctcggccttgaaaaataaactgaagaagcagtctacagctacgggtgatggagtagctagggcctttcttagagcacaggctgctttgtttggatcctacagagatgcactgagatacaaacctggtgagcccatcactttctgtgaggagagttttgtaaagcaccgctcaagcgtgatgaaacagttcctggaaactgccattaacctccagctttttaagcagtttatcgatggtcgactggcaaaactaaatgcaggaaggggtttctctgatgtatttgaagaagagatcacttcaggtggcttttgtggagggaacccgaggtcatatcaacaatgggtgcatacagtcaagaaaggaggtgcactgttcaacacagcaatgaccaaagcaacccctgctgtacggacagcatataaatttgtctccattttaaattattaccaaagccatttgcttggagcatttctctggagaatacttgca

SEQ ID NO: 8496 - DNA, 611 bp, Homo sapiens
  misc_feature 404, 428, 437, 460, 462, 474, 481, 483, 486, 487, 492, 493,502, 513, 517, 530, 557, 575, 580, 584, 592, 598, 607: n = A,T,C or G
cctcactaagggaacaaaagctgggtaccgggccccccctcgggtcgacggtatcgataagcttgatatcgaattcctgcagcccgggggatccactagttctagagcggccgaaatcatggtgcttccttcgggcggctgttcccaccagcccaggcacccgccaacgaaaacacgggcgacaccgtcgccaatctcctcggcccgctctcaggccgaaatccctccccgcgtacctcggccgccaccgcggtggagctccaattcgccctatagtgagtcgtattacgcgcgctcactggccgtcgttttacaacgtcgtgactgggaaaacccctggcgttacccaacttaattcgccttgcagcacattccccttttcgccagctggcgtaatagcgaanaaggccgcaccgatcggccttccnaaagttgcncaacctgaatggcaatgggaccncnccctgtaaccgngcattancncgnnggtgnnggggttccnccaaggggacngtanattgcaaggcctnaggccggttctttggttttttccttcntttttgcccgttgccggnttccngtangctttaantggggncccctttanggtc

SEQ ID NO: 8497 - DNA, 666 bp, Homo sapiens
  misc_feature 20, 23, 30, 31, 54, 326, 329, 335, 338, 339, 341, 342, 344,350, 352, 354, 355, 357, 358, 360, 362, 364, 365, 366, 367,368, 369, 370, 371, 372, 373, 374, 375, 376, 377, 378, 379,380, 381, 382, 383, 384, 385, 386, 387, 388, 389, 390: n = A,T,C or G
  misc_feature 391, 392, 393, 394, 395, 396, 397, 398, 399, 400, 401, 402,403, 404, 405, 406, 407, 408, 409, 410, 411, 412, 413, 414,415, 416, 417, 418, 419, 420, 421, 422, 423, 430, 432, 433,438, 439, 441, 442, 443, 444, 445, 446, 448, 449, 450: n = A,T,C or G
  misc_feature 453, 454, 455, 457, 458, 459, 460, 462, 467, 469, 470, 480,484, 490, 491, 494, 501, 502, 503, 505, 506, 510, 514, 519,520, 525, 526, 532, 534, 538, 540, 541, 542, 548, 549, 563,567, 568, 569, 572, 574, 575, 590, 591, 592, 598, 611: n = A,T,C or G
  misc_feature 614, 615, 618, 619, 620, 625, 626, 627, 628, 629, 630, 631,632, 633, 634, 635, 643, 644, 645, 651, 652, 653, 654, 657,661, 666: n = A,T,C or G
gcgcattaaccctcactaanggnaacaaannctgggtaccgggccccccctcgngtcgacggtatcgataagcttgatatcgaattcctgcagcccgggggatccactagttctagagcggccgcccgggcaggtacgcgggactacaacaatttgtctgcctccaaggtcctctgaggcagcaggctctggggcttctgctgtcctttggagggtgtcttctgggtagagggatgggaaggaagggacccttacccccggcccttctcctgacctgccaataaaaatttatggtccaagggaaaaaaaaaaaaaaaaaaaaaaanaanaaaaanaannannanaaaaananannannananannnnnnnnnnnnnnnnnnnnnnnnnnnnnnnnnnnnnnnnnnnnnnnnnnnnnnnnnnnnccccccngnnggggnngnnnnnntnnnccnnntnnnngnttttnannaacccccccncccncccccnnttnttaaaannntnnaaangggnaaaannggggnncccccncnttancnnntttagnncatttccccttttncccnnnttngnnaaaaaaaaaaaaaannnaaaaanacccccctctttnaannttnnnaaaannnnnnnnnnnaaaagggnnncccccnnnnccncccnttaan

SEQ ID NO: 8498 - DNA, 629 bp, Homo sapiens
  misc_feature 505, 518, 551, 556, 561, 578, 579, 584, 588, 593, 618, 624: n = A,T,C or G
cctcctaagggaacaaaagctgggtaccgggccccccctcgggtcgacggtatcgataagcttgatatcgaattcctgcagcccgggggatccactagttctagagcggccgaggtacgcgggattcactttttggtagagttttaaagcagtgtttgttggttcatccagcagacaggggcactgcacaaagctcttagggattcaaaaaacagaacacaagtaagggagaacagaagacttagggactcatctgattttaactactggctccaccatttactacctgtgtgatcctaggcaagtcacttactgtcggtgaaccacaatttcctcacctgtaaaatgggtgtatgatgccacgtgtgtgggcacgtgcctgtaatcccaagctactcaggaggctgagtcgggaggatcgctggagcccaggagtttgataccagcctgggcagacaaatcgagaccccattccttccaaaaaaaaaaaaaaaaaaaaaaagtncctgcccggcggnccccccggggggagctccattccccctataggngtcgnattanccccctcctggccgtgnntttanaccncgggnctgggaaaaccttggggttacccancttaangcctt

SEQ ID NO: 8499 - DNA, 699 bp, Homo sapiens
  misc_feature 2, 3, 4, 5, 6, 7, 8, 9, 10, 11, 18, 22, 25, 27, 33, 35, 201,297, 422, 485, 487, 495, 538, 545, 557, 577, 588, 603, 621,622, 630, 643, 648, 695: n = A,T,C or G
gnnnnnnnnnnttagccntcanccncnttctcntnagcccagatctagatccgcgccgagggcaacagccgcttcacctacagcgtcactgtcgatggctgcacgagtcacaccggagcctggggcaagacagtgattgaatacaaaaccaccaagacctcccgcctgcccatcatcgatgtggcccccttggacgttggngccccagaccaggaattcggcttcgacgttggccctgtctgcttcctgtaaactccctccatcccaacctggctccctcccacccaaccaactttncccccaacccggaaacagacaagcaacccaaactgaaccccctcaaaagccaaaaaaatgggagacaatttcacatggactttggaaaatatttttttcctttgcattcatctctcaaacttagnttttatctttgaccaaccgaacatgaccaaaaaccaaaagtgcattcaaccttaccaaaaaananaaagaaanaaaagaatacataaataactttttaaaaaaggaaaaactggancgatatnggacaccgcggntaaaaaaagggcggccgctngactagtctanagaaaaaaccttcanaccttcccctgaacctgnnacataaantgaatgcaattgntgtgntaacttggttattgcagttatatgggtccaataaagcatttgcatcncaat

SEQ ID NO: 8500 - DNA, 649 bp, Homo sapiens
  misc_feature 23, 46, 159, 211, 377, 495, 518, 541, 543, 545, 546, 556,558, 559, 560, 563, 575, 579, 583, 587, 606, 614, 617, 620,622, 623, 627, 634, 637, 641: n = A,T,C or G
gactcactatagggcgaattggnactccaccgcggtggcggccgcngtacttttttttttttttttttttgccccgcagcttttattagccatcgttacagtctctcgtccacaaacactgcccagctcccttcccagggcactttactggaggcaagngcaaaacactgtggtgctttctattcaaagaaacagaagatgtagctgtggnggtaacggacagcccagctacccaccagttttacagcaggatccgcagtgagcttgatacagatagaggatagatgacggtaaagggggaaaagagtttaaaattatcaagtttcctcttgaagtgtcttttcccaaggcactgtgaagaagactgctgctagcantttttctaggactaaacacaccgatgggaatataaatatttcaaacacaaccccctgtacattcttacagtagtttatcacttaggccttttttagcctaaaatgatgtccctgaatnggttgggccctggaagggcaaancattttggtttctgaaaattganantnnccttttttangnnngtnttacattaaagntttngtanggtncttaacccttacttttaanctaaaggnttnatntnnactnccggggnaancaanggccaggt

SEQ ID NO: 8501 - DNA, 415 bp, Homo sapiens
  misc_feature 378: n = A,T,C or G
gaattgtaataccgactcactatagggcgaattgggcccctctagatgcatgctcgagcggccgccagtgtgatggatatctgcagaattcgcccttagcgtggtcgcggccgaggtacatttccttgtagactctgttaatttcctgcagctcctggttggttctggagcagatgatctcaatgagagagtcctcgtcggttcccagccccttcatggaagcttttagctcagaagcgtcatacttgagcaggtgtcttcaataggcccaaaatcaccgtctccaggtggccagataaggctgacttcagtgctgatgcaagttcctttttggtccttctctggtaggcgaggcaatatcctgtctctgtgcattgntgcggttggtcaaaatgttgacaatggtgacctcatc

SEQ ID NO: 8502 - DNA, 657 bp, Homo sapiens
  misc_feature 1, 3, 7, 12, 139, 140, 150, 154, 159, 160, 161, 162, 163,168, 176, 177, 181, 182, 201, 243, 247, 250, 258, 262, 263,272, 278, 279, 289, 290, 291, 292, 294, 295, 296, 297, 298,300, 301, 302, 308, 309, 314, 315, 316, 326, 328, 329: n = A,T,C or G
  misc_feature 330, 353, 386, 390, 391, 392, 395, 396, 400, 401, 402, 416,421, 424, 425, 428, 433, 443, 452, 454, 455, 456, 463, 464,475, 489, 495, 502, 510, 511, 512, 513, 518, 519, 564, 605,610, 611, 612, 614, 615, 620, 621, 623, 627, 631, 636: n = A,T,C or G
  misc_feature 637, 643, 648, 657: n = A,T,C or G
nanaggngtcgncccacgcgtccgctttttttttttttttttttttttttttttttttttttttttttttttttttttttttttttttttttttttttttttttttttttttttttttttttttttttttttttttttnngggggggggncccnaaaannnnnttttngggggggnnaaannacccccccccccccccccnaaaaaaaaaaaaaaaaaagcccccccccccccccccaaaaanaaanatncccccccnaaannccccccggnaaaaanngggggggggnnnnannnnnannnaaaaannccccnnngggggggggnannnccccccggggccccccccccctngcggggggggggggggggggcaaaaaaaaaaangggnnnggnncccnnnccccctttttttanggggnccnnaanggggncccccccccnaaaaaaatngnnnaaaaaannaaaaaaaaaanaaaccccccccccngggggnggggacnagaaaaannnngcccnnaaaaaaccccccccccccccccccgggcccccaaaaaaaaacccngggggggccccccccccccccccccttaaaaaaaaatgggntttcnnncnnaaccnntntttncccnagagnngggggnggggnaaaaaaaan

SEQ ID NO: 8503 - DNA, 611 bp, Homo sapiens
  misc_feature 3, 9, 13, 18, 19, 20, 36, 44, 56, 57, 246, 247, 248, 249,250, 251, 266, 267, 268, 269, 270, 271, 272, 273, 274, 275,276, 277, 278, 279, 280, 281, 293, 301, 302, 303, 304, 305,306, 307, 308, 313, 314, 315, 316, 317, 318, 319, 320: n = A,T,C or G
  misc_feature 321, 322, 323, 324, 325, 326, 327, 328, 329, 330, 331, 332,333, 334, 335, 336, 337, 338, 350, 351, 352, 353, 354, 355,356, 357, 358, 359, 362, 363, 365, 372, 373, 376, 377, 378,379, 380, 381, 382, 383, 384, 385, 386, 387, 388, 393: n = A,T,C or G
  misc_feature 394, 396, 397, 409, 412, 414, 422, 431, 432, 433, 436, 437,438, 439, 440, 441, 442, 443, 444, 445, 446, 447, 448, 449,450, 452, 453, 455, 456, 457, 458, 459, 460, 461, 462, 463,464, 465, 466, 467, 468, 469, 470, 471, 472, 473, 474: n = A,T,C or G
  misc_feature 475, 476, 477, 478, 479, 480, 481, 482, 483, 484, 485, 486,487, 488, 489, 490, 491, 492, 493, 494, 495, 496, 497, 498,499, 500, 501, 502, 503, 504, 505, 506, 507, 508, 509, 510,511, 512, 513, 514, 515, 516, 517, 518, 519, 520, 521: n = A,T,C or G
  misc_feature 522, 523, 524, 525, 526, 527, 528, 529, 530, 531, 532, 533,534, 535, 536, 537, 538, 539, 540, 541, 542, 543, 544, 545,546, 547, 548, 549, 550, 551, 552, 553, 554, 555, 556, 557,558, 559, 560, 561, 562, 563, 564, 565, 566, 567, 568: n = A,T,C or G
  misc_feature 569, 570, 571, 572, 573, 574, 575, 576, 577, 578, 579, 580,581, 582, 583, 584, 585, 586, 587, 588, 589, 590, 591, 592,593, 594, 595, 596, 597, 598, 599, 600, 601, 602, 603, 604,605, 606, 607, 608, 609, 610, 611: n = A,T,C or G
gtnatacgnactncactnnnagggtcgacattgggnccctctanttgcatgctcgnncggccgccagtgtgatggatatctgcagaattcgcccttagcgtggtcgcggccgaggtactttttttttttttttttttttttttttttttttttttttttttttttttttttttttttttttttttttttttttttttttttttttttttttttttttttttttttttttttttttttttttttttnnnnnnaaaaaaaaaaaaaannnnnnnnnnnnnnnnaaaaaaaaaagngggggggnnnnnnnnttttnnnnnnnnnnnnnnnnnnnnnnnnnnaaaaaaaaaaannnnnnnnnnaanngnggggggnnccnnnnnnnnnnnnnaaaanncnncccccccccccncananaaaaaaanaaaaaaaannnccnnnnnnnnnnnnnnnannannnnnnnnnnnnnnnnnnnnnnnnnnnnnnnnnnnnnnnnnnnnnnnnnnnnnnnnnnnnnnnnnnnnnnnnnnnnnnnnnnnnnnnnnnnnnnnnnnnnnnnnnnnnnnnnnnnnnnnnnnnnnnnnnnnnnnnnnnnnnnnnnnnnnnnnnnnnn

SEQ ID NO: 8504 - DNA, 872 bp, Homo sapiens
  misc_feature 2, 4, 7, 316, 322, 334, 463, 477, 481, 490, 492, 493, 499,512, 514, 520, 539, 544, 550, 578, 601, 604, 605, 613, 615,634, 641, 661, 662, 672, 678, 696, 707, 708, 717, 722, 723,743, 750, 753, 755, 756, 765, 767, 774, 779, 781, 784: n = A,T,C or G
  misc_feature 793, 798, 799, 800, 805, 807, 815, 819, 820, 823, 837, 843,851, 861, 866, 871: n = A,T,C or G
gnanganctatagggagtcgcccccgcgtcccgcccagacatctgttgagacctgacccctagtcattggttaccagtgtgtcaggcaatctggactttccagtgatgccactgagatggcacctgtcaaaagagcagtggttccatttctagattgtggatcttcagataaattctgccattttcatttcacttctgaaagtagggtcggcttgtgaaaagttgttaaacaacatgctaaatgtgaaatgtcaaccctcactctaaactttccctgttcagagcatcagatgaagacttcattgggttttatagnggctcnctgatttttggnagtccattgaagaagggagtttgaaagttgttgtatactgttaacgattgtctgcccatgtcctgcctgaaataccatgattgtttatggaaagtatctttaataaagctggatcaagtttggcttggnctacaacttggatnaacnatttatacntnnaaatcngggcggcccgttngnctagtntagagaaaaaacctcccanacctncccctnaacctgaaacataaaatgaaagccattngttgttgttaacttggttaattnccnnttattatngngtaccaaataaaggcattngcctttncaaatttccccaaataaaannattttttttnacttgnttttaaagtgggggtttnccccaaactcnncacgggtgncttanncatgggctggacccccgggncccccgnggntnnaataaaatncntttccgntttcntnctnacagacctngttgnnncggangntcggttcngganngcnggttttacgctcanttcaangggggtgntaccggttanttccncaaant

SEQ ID NO: 8505 - DNA, 635 bp, Homo sapiens
  misc_feature 571, 617: n = A,T,C or G
gaattggagctccaccgcggtggcggccgaggtacatgaaaaaattcatactggagagaaaccctatgagaaccctaaccctaacgcttcagttgtcccagttctttcatgagcatgaaaggagtcacatagagaaaccccatgaaagtaagaaatttgggaaagccttcagtcctttctgtttctttcaactacgtgaaaggattcacggtggagaaagaccctgtaagataattggctttaaattacgagagacttgtgataggacagtaaaacctagagttggagttggatctctggattgtgttatgtcagtgttggtaggttaggaactagatttcccagaatccattccatttgtgattccatgatacaattcaccagtaacctatcttacatgagattcggaagtaagttaagaaggcattagtcatggtttggaagcaccatacagggagacagctgtgtgaatacaggctgtatggacacttgcttccatcccattttcctgcttctttgggttgccaatcaagagtatcctcaaaacgacttgactttaattttctcggangtgataggcttccacacaggtctccagaagccccgcattgaatatncatcccactttggttttc

SEQ ID NO: 8506 - DNA, 577 bp, Homo sapiens
  misc_feature 2, 6, 282, 293, 294, 295, 296, 298, 303, 304, 305, 308, 309,310, 311, 320, 326, 330, 336, 337, 339, 341, 343, 347, 349,351, 352, 353, 356, 359, 360, 366, 367, 369, 371, 373, 376,381, 382, 383, 385, 389, 393, 395, 396, 398, 399: n = A,T,C or G
  misc_feature 402, 403, 404, 405, 407, 408, 410, 414, 415, 417, 420, 421,422, 424, 425, 426, 431, 434, 436, 437, 438, 439, 442, 444,445, 447, 450, 452, 456, 460, 461, 462, 463, 466, 467, 469,470, 471, 474, 475, 476, 477, 480, 481, 486, 487, 488: n = A,T,C or G
  misc_feature 491, 493, 494, 495, 496, 497, 499, 500, 503, 504, 505, 506,508, 509, 510, 513, 514, 515, 517, 529, 531, 533, 534, 538,539, 541, 543, 545, 546, 549, 552, 553, 555, 556, 557, 559,562, 563, 564, 565, 566, 569, 572, 573, 577: n = A,T,C or G
gngagnttgaacactacttagggcgaattgggccctctagatgcatgctcgagcggccgccagtgtgatggatatctgcagaattcggcttcgagcggccgcccgggcaggtactgcggcgggtaggcctaggattgtgggggcaatgaatgaagcgaacagattttcgttcattttggttctcagggtttgttataattttttatttttatgggctttggtgagggaggtaaggtggtagtttgtgtttaatatttttagttgggtgatgaggaatagtgnaagggagtatnnnngntaatnnnttnnnnttaaccctntctatntttnaatttnnantntnactntntnnnctnttnntttttnnancntnatnttttnnnancaantttntnntnnttnnnnanntntttnntnttnnntnnntaaanatntnnnnttntnnanttntncatntccnnnnttnntnnnttnnnnaannatatnnnaantnnnnntnnttnnnntnnnttnnntnatcctttttctntntnntatnntntntnnttnttnntnnntnttnnnnnttnatnnattn

SEQ ID NO: 8507 - DNA, 657 bp, Homo sapiens
  misc_feature 133, 140, 209, 216, 271, 299, 328, 364, 419, 422, 440, 441,442, 444, 448, 449, 454, 459, 461, 467, 470, 472, 482, 483,485, 492, 493, 499, 503, 505, 506, 520, 524, 525, 527, 528,530, 531, 532, 541, 542, 543, 545, 547, 548, 549, 554: n = A,T,C or G
  misc_feature 557, 559, 560, 562, 563, 564, 565, 567, 571, 573, 574, 577,578, 579, 582, 583, 586, 587, 588, 593, 594, 595, 596, 604,606, 608, 614, 617, 618, 619, 622, 624, 627, 632, 633, 634,637, 638, 640, 644, 648, 650: n = A,T,C or G
cactttttatagggcgaattggaacctccaccgcggtggcggccgagtactttttttttttttttttttttttttttttgcttccttgtctttggtttcattgttttttctttatcccatttccccctctagnggtctanaagtaataaatcctaatactgcgtttgtaatacttgctcttcacatatttgtatgcagccagtcacagnggaatgngactagaatccttgttactcaagaggctgaggttgaaggatcgcttgagctcaanaatttgagtccaacctgggcaacatggngaaaccccatctctaaaagaaaatacacncaaaactaagcttgattacttttatattttctccanaaacaaaaagaaatcacactatgctgccatactcaccctccccacactggtcctncancaacatataccattgtgnnntngagnncaaangggancnactganctnangtgctggganngngggactnnaccggngtgngnntaactgccaggtangtgnngnnannnggggaatannngngnnnaactnggnanncnnnngnaagnannggnnnganntannnagacnnnngaggaggngngnaaaaangannnctnantanaaagnnnagnngnaggnaggnanggatggt

SEQ ID NO: 8508 - DNA, 652 bp, Homo sapiens
  misc_feature 25, 623, 632: n = A,T,C or G
gactcactatagggcgaaattgganctccaccgcggtggcggccgcccgggcaggtactggcttccttgttaatcctttatccccttcaggtgttattcaaatgtcatcttctcaagaaggccttgtgtgattagtttattgaaattattccactcaactcctatgtctaacactattcagtctcctttcctgcttcaattttcttcttggctcctagcaccatctaacttggaacatgtatatgtgacatatttggctagattatttcacccattagcatgtaaactccacgaaggcttttattttactgcagtattttctgcacctagaacagtattggtatatagcagtcacttaaatatttgttgaatgagtgatgtagagaaggttcaaaaagccactggagaatgtcatggcttgaccggtttgaattgtaatactttaaatcaaagatcaatggaaacattaataggaaagatcttaacatcaattttcttccaggagaatttaaacataaacacatacaaatagataagcacatgctttagaaactctcccattccttctctaacctcaacccactctctctaccaccccttccctaaaaaaatgagagattaangaaaaagtnaacccactgtgtccagggcc

SEQ ID NO: 8509 - DNA, 636 bp, Homo sapiens
  misc_feature 1, 22, 626: n = A,T,C or G
nactcctatagggcgaattggnactccaccgcggtggcggccgcccgggcaggtacagtggatttttcatttgcaaagacgttaagccctccaaatgtgcaaatcatgaagtcagttgttgttccagcaaggtttgcccagcggtaaaaaacaagataaaactaatgcactagctgaaaccaggtggggagaccatgtgtggtagtgcttgggggtggagggaaactatttctgaaatgaggacttaaagtataataccagcttcactgcctgttcacatgagaaaccaaagcttcaatttaactgcaggcaataggagtttcacactgtcagcaccaactgtctaaaatccaaaactagtatctaaatgtgtaggatcaaaaccaaaaatctggagggatctagttaaacttcaatatgcatgaccccagattcccctttaaaatatagtccaagtattttatcttttccatagggcattgacattattgtgttaatgtgaaatagctatttacctctccaaacctcggctttatagaatagataattatcacatcctgtaggagaaccatttggaaaagacagccttgcccgcgtacctcgggccggtctaaaactagtgggtncccccgggct

SEQ ID NO: 8510 - DNA, 821 bp, Homo sapiens
  misc_feature 2, 3, 4, 5, 6, 7, 10, 28, 496, 582, 661, 664, 687, 719, 728,729, 754, 755, 769, 771, 772, 776, 806: n = A,T,C or G
gnnnnnnctnctattacgactactatanggcgaattgggccctctagatgcatgctcgagcggccgccagtgtgatggatatctgcagaattcgccctttcgagcggccgcccgggcaggtaccttctttctggcagtgaatggtctgtattcctctagtgatgatgtgatcgaattaactccatcgaatttcaaccgagaagttattcagagtgatagtttgtggcttgtagaattctatgctccatggtgtggtcactgtcaaagattaacaccagaatggaagaaagcagcaactgcattaaaagatgttgtcaaagttggtgcagttgatgcagataagcatcattccctaggaggtcagtatggtgttcagggatttcctaccattaagatttttggatccaacaaaaacagaccagaagattaccaaggtggcagaactggtgaagccattgtagatgctgcgctgagtgctctgcgccagctcgtgaangatcgcctcgggggaccggagcggaggatacagttctggaaaacaaaggcagaagtgatagttcaagtaagaaggatgtgattganctgacagacgacagctttgataagaatgttctggacagtgaaaaatgtttgggatggttgaagttctatgctccttggnggnggacacctgcaaaaacctaaaanccagaatgggcttgccgcagctttagaaagtnaaaaaaccnnccaaaaggaaaagtgaaactggcanntttggatgctcaantnnaatnaggttcttggcctcccaatacgggattaanaggatttcttacaat

SEQ ID NO: 8511 - DNA, 513 bp, Homo sapiens
gccgatttggcgccgtaatacgactactatagggcgaattggagctccccgcggtggcggccgaggtacaatacaatctagatgacggtgcagactaagtcaagaactaaagttgtgcagtaacccgagttaaggcatgaatgcggacacacacatgcacacacacagcacccatgctatcaagacacaggattttttcagttgcctcatgagaggcaacctgggcttggcagttaatcagaactgctgagcattccagaaaatgccccccacgactttatgctaacagctgtgtgtatgttttaatcaaaaaattaaagaagaaaaaaaacctaaaaaacaaagaaaaaaacaaacaaaaaatcaccaaaaacctagaaaccccttaatctcttacaatggctcttgagcatggaactcatgtagcagcatcaatggctggctctttaacaatttggaaataaaaggttggtttactatgtatttctttggtagtcatcactaccaaagttt

SEQ ID NO: 8512 - DNA, 863 bp, Homo sapiens
  misc_feature 600, 683, 696, 732, 745, 756, 777, 781, 783, 784, 788, 791,793, 796, 802, 804, 810, 812, 825, 827, 847, 850: n = A,T,C or G
tactatagggcgaattggagctccccgcggtggcggccgaggtacgcggaacaatcaacagtttctgatgttccgagggacctggaagttgttgctgcgacccccaccagcctactgatcagctgggatgctcctgctgtcacagtgagatattacaggatcacttacggagaaacaggaggaaatagccctgtccaggagttcactgtgcctgggagcaagtctacagctaccatcagcggccttaaacctggagttgattataccatcactgtgtatgctgtcactggccgtggagacagccccgcaagcagcaagccaatttccattaattaccgaacagaaattgacaaaccatcccagatgcaagtgaccgatgttcaggacaacagcattagtgtcaagtggctgccttcaaagttcccctgttactggttacagagtaaccaccactcccaaaaatggaccaggaccaacaaaaactaaaactgcaggtccagatcaaacagaaatgactattgaaggcttgcagcccacaagtggagtatgtgggttagtgtctatgctcagaatccaagcggagaagagtcagcctctggntcagactgcagtaaccaacattgatcgccctaaaaggactggcattcactgatgtggatgtcgattccatcaaaaattgcttngggaaagccacanggggcaagttttcaggtaccttgcccgggcgggcgnttcgagcttttanacttagtggantcccccgggctggagggattngatntnnagcnttntnganacccgncnaccttnanggggggggcccgntncccacttttgttccttttanggngggtaattggccc

SEQ ID NO: 8513 - DNA, 1038 bp, Homo sapiens
  misc_feature 2, 3, 10, 11, 12, 13, 14, 15, 17, 18, 22, 23, 25, 27, 28,31, 33, 36, 37, 38, 39, 40, 42, 43, 45, 46, 49, 55, 56,57, 58, 60, 61, 62, 63, 64, 65, 66, 67, 68, 69, 70, 71,73, 77, 78, 80, 82, 83, 87, 94, 97, 100, 101, 102, 103,112: n = A,T,C or G
  misc_feature 399, 427, 438, 476, 522, 539, 574, 618, 707, 775, 802, 823,824, 845, 866, 874, 899, 931, 934, 940, 967, 970, 973, 980,981, 985, 986, 994, 1015, 1021, 1023, 1029, 1033, 1034: n = A,T,C or G
tnnttttttnnnnnnanntttnngntnnttntntgnnnnnanntnntanaatttnnnnannnnnnnnnnnntntganntntnnaagnaagaggnatntcnnnntattcgctnactatagggcgaattgggtaccgggccccccctcgaggtcgacggtatcgataagcttgatatcgaattcctgcagcccgggggatccactagttctagagcggccggccgcccgggcaggtacttaaaacttttatttgtaacaaattcccgatttcttctgctcaaaagttctttgagacaattccatcagccttagccaatcggagaatagaatcatctgactcgcccatcctgcgaatggccccgcagatgccataggttttaaactggccattaaaccggcnctgtggtcctatcaacctcggctcggcncgctcacccgnggtgggagcctcccagcttttgttccctttagtggagnggtttaattgcgccgccttggccgttaatcaatgggtcattaagcntggttttcctggtgtgnaaattgtttattcccgctcacaatttcccacacanaccataccgaagcccgggaagccataaaagtggttaaaagcctngggggtggccctaaatggagtggagcctaaacttcacatttaaattgccgttggcgctccacctgcccggctttttccaagttcggggnaaacctggttcggtggcccagcctggcattttaaattgaaaatcggggcccaaaccgccgccgggggngaaagaaagggcccgggttttttggcngttattttgggggccggcctnnttttccggcttttcctttggnctttaacttggactttcggcnttggcggncttccggggtcccgttttccgggcnttgccgggcccaaagcccgggttatttcaaanccnttcaancttcaaaaaggggcgggttatttaccnggnttnttttccnncaannaaattcangggggggatttaaccccccangggaanangaaaanattnntgaa

SEQ ID NO: 8514 - DNA, 765 bp, Homo sapiens
  misc_feature 11, 15, 17, 19, 21, 26, 29, 33, 41, 47, 49, 51, 52, 56, 58,63, 65, 67, 68, 69, 70, 71, 73, 75, 77, 79, 81, 82, 84,85, 87, 89, 90, 93, 95, 96, 97, 98, 99, 100, 101, 102, 103,106, 110, 115, 116, 119, 121, 220, 432, 472, 476, 477: n = A,T,C or G
  misc_feature 484, 485, 487, 489, 494, 507, 509, 518, 525, 534, 564, 573,576, 577, 585, 595, 596, 601, 602, 606, 616, 632, 635, 641,642, 645, 663, 665, 669, 683, 686, 689, 703, 708, 713, 714,715, 718, 737, 739, 740, 746, 758, 760, 761, 763, 765: n = A,T,C or G
ctctatttgtntttntntntnttttntcntttntcttcttntttttncntnnattntnttttntntnnnnntntntntntnntnntntnnatntnnnnnnnnnttntttnctttnntantntgggcgaattggagctccaccgcggtggcggccgaggtacagagtcttttgcttcctcccacccctagggggaaaaactgctttgtgctttgggaagtngtctctgaaacccggggacagaggacgcaggacagactaggagggagccgggaggatgggctgcagctgtggaggagggtttcagaggagagaggtcggagagcagaggcctgagaagccagaggcaggtggagagagggtggaaagtgagcagcgggctgggctggagcccgcacacgctctcctcccatgtttaaatagcaccctttagnaaaaaatttcaccaaggtcccccattcccacaagatcttnttanncctttanngnanagttncctttgcccccgngncgggccccnctcttangaaacctanggtgggattccccccccgggcctttgcagngaatttccnatnncccaaggntttattccgnntaccnnggcnacccttcaanggggggggggcccccnggnaccccnnccntttttgtttccctttttnangggnggggggtaaatttnggngcnccctttgggggtantttantgggnnnttngccttttttctccctttgngnnaaattntttttacccctncnncnan

SEQ ID NO: 8515 - DNA, 428 bp, Homo sapiens
  misc_feature 3: n = A,T,C or G
tancactactatagggcgaattggagctccccgcggtggcggccgggcaaagcgatcggaacccgggaagaaatcgtcccaggcgcggagtggggcgatattaacgtccatgttctcagctttgcgttcttcgcctccagaatctggcggcggcggcggcggcaaccgatcagctgagctgagttggagagttgacagcccccgcgtacctcggccgctctagaactagtggatcccccgggctgcaggaattcgatatcaagcttatcgataccgtcgacctcgagggggggcccggtacccagcttttgttccctttagtgagggttaattgcgcgcttggcgtaatcatggtcatagctgtttcctgtgtgaaattgttatccgctcacaattccacacaacatacgagccgggagcataaagtg

SEQ ID NO: 8516 - DNA, 589 bp, Homo sapiens
  misc_feature 185, 232, 242, 244, 275, 278, 281, 307, 308, 309, 319, 322,326, 327, 348, 353, 388, 408, 424, 450, 457, 462, 465, 472,473, 474, 481, 482, 483, 489, 526, 539, 540, 541, 558, 563,567, 568, 570, 571, 573, 575, 588, 589: n = A,T,C or G
actactatagggcgaattggagctccaccgcggtggcggccgaggtacgcgggtgttcctttttgttcaaagtctatttttattccttgatatttttctttttttttttttgtggatggggacttgtgaatttttctaaaggtgctatttaacatgggaggagagcgtgtgcggctccagcccancccggttgctcacttttcacccttttttcacctggctttggcttctnaggcctttgntnttcgacctttttcctttgaaaccttcttcanagntgnaagccatccttccgggttccttctannntggcccgcgnccnctgnncccgggtttaaaaacaacttnccaancccaaaacaatttttcccccaagggggggggggancaaaaaaacttttaacctgncccggggggccctttnaaaaaaggggaaccccccggccggcnggaattnaaatnaanctttttnnnacccccnnncccccngggggggggccccggcccccccttttgttcccctttngaggggggaaaannnccccccgggggaaaaanggggnaaanngnntncnccggggaaaaaann

SEQ ID NO: 8517 - DNA, 529 bp, Homo sapiens
  misc_feature 331, 356, 370, 392, 395, 397, 403, 413, 416, 420, 421, 428,431, 437, 443, 446, 448, 458, 475, 480, 488, 491, 504, 509,519: n = A,T,C or G
gcgaattggagctccccgcggtggcggccgtttgagaagccagcgctcacccacccggggtctctgtgcattgacctttgggtgctgacttggagaaaagcacaaacacgaccagtcccatcctggctcccgtggggcttcttctatctacgcattgtatcgactgcattagttggactaaagatgatgactcaatttaaaaggaggagaccaaatgctgactgtctaagcaagaattggcccaaagctggcaagaaaaaaagcacactgcattacataagggataccagaaaggggcagaagcctttctgccttgcgggatctgcaacanttacattttgtttttgcctgcaaanctatcaagaaaggnttcttgttggcccagggagttntcnantgaaanaaacaaaatnggnagtnnaaaattnttngaggtngtcctnttncnacaaccccanaatcctttattcgtcanttcanggggagantcnttgggggggaaancattnaagtttcaancttcattgct

SEQ ID NO: 8518 - DNA, 370 bp, Homo sapiens
  misc_feature 13, 16, 22, 23, 29, 56: n = A,T,C or G
tggtacttcactntgngggccnnattggnagctccaccgcggtggcggccgtgggnacctgcaattactacgcaaacgcttacagcttttggctcgccaccatagagaggagcgaggatgttcaagaagcctacgccgtccaccttgaaggcaggggagctgcgcacgcacgtcagccgctgccaagtctgtatgagaagaacataatgaagcctgactcagctaatgtcacaacatggtgctacttcttcttctttttgttaacagcaacgaaccctagaaatatatcctgtgtacctcggccgctctagaactagtggatcccccgggctgcaggaattcgatatcaagcttatcgataccgtcgacc

SEQ ID NO: 8519 - DNA, 537 bp, Homo sapiens
  misc_feature 33, 212, 221, 224, 226, 229, 231, 282, 290, 298, 300, 317,323, 329, 370, 372, 373, 391, 413, 414, 416, 435, 447, 460,467, 474, 478, 480, 482, 492, 493, 497, 508, 522, 523, 535,536, 537: n = A,T,C or G
gtgcgatcactacttagggcgaattggagctcnccgcggtggcatgcggccgcccgggcaggtactcctgccaaggcagctcccaccgctatgggcacaaggaagttgtcgtcatctgcactgcagtcttgagctgtagaatactttccttgtgtcacattgaaaggctgaacccttagatcaaaggtatttatcttgaaatgcttcaaaanacttgaaancantntgntncttttgttggcacatataaagaaactttcccagggggggggccatccccantagcctgnagattgtntnttttgcaatgcttgaanaacggnagccantttaaccaaaatacattgcttgatgtttcaccttcctttgnannattaaaaaatttggattntttcaattcttttcaacaagtnnanagtacaaatcgttcttttntttacctttaantggggttgccttngccttanttggaanttcntnanagttagtaannccantttgttgtagnaaaccgggcctagnnttgatcctagtnnn

SEQ ID NO: 8520 - DNA, 660 bp, Homo sapiens
  misc_feature 305, 342, 367, 374, 398, 404, 411, 412, 419, 422, 424, 430,431, 432, 434, 438, 440, 441, 442, 444, 447, 449, 451, 453,455, 456, 457, 458, 459, 461, 465, 466, 467, 475, 480, 484,485, 487, 489, 491, 492, 495, 496, 501, 502, 504, 506: n = A,T,C or G
  misc_feature 513, 517, 518, 519, 522, 523, 524, 527, 532, 533, 536, 558,561, 562, 567, 568, 570, 575, 576, 584, 588, 591, 594, 595,596, 597, 599, 601, 604, 607, 610, 614, 616, 618, 619, 624,625, 632, 636, 637, 639, 641, 644, 645, 646, 647, 650: n = A,T,C or G
  misc_feature 653, 660: n = A,T,C or G
gagcgcgcgtaatacgactcactatagggcgaaattggagctccaccgcggtggcggccgaggtaccagtggaggaaggccttccggcggaacatggcagtgaactgctccgagatgcgcttgaagagctcctggatggctgtgctattgccaatgaaggtgactgccatcttgaggccacgaggtgggatgtcacagacggctgtcttgacattgttggggatccattccacaaagtagctgctgttcttgttctgcacgttaagcatctgctcatcgacctccttcatggacatccgaccacngaagacagcagccacggtgaggtatcggccgctctanaactagtggatcccccgggctgcangaattcnatatcaagcttatcgataccgtcnacctanatggggnncccggtnccnantttttnnntncctntnnntntangnanantnnnnncncttnnntattattntttcnaatnncngnannctnnttttnntntnatatcantatnnntannnttnatatnnatnttttttattttattttttttanatnnttttnntnttttnntttttttntttnttnttnnnntncnttnttnatntttntntnnttttnnatttttntttnntntnatnnnnttnttnttttttn

SEQ ID NO: 8521 - DNA, 451 bp, Homo sapiens
  misc_feature 5, 12, 15, 29, 35, 36, 38, 39, 42, 45, 50, 248, 344, 352,365, 377: n = A,T,C or G
gcccnctactantantatagggcaactcnaccctnncnnggncgnccggncaggtacgcggggtcccaaccaagccctccagcaaggattcagagtgcccctccggcctcgccatgaggctcttcctgtcactcccggtcctggtggtggttctgtcgatcgtcttggaagggagtggttttcagagacatttcagaaagtgaaggagaaactcaagattgactcatgaggacctgaagggtgacatnccaggaggggcctctgaaatttcccacaccccaacgcctgtgctgaggactccctccatgtggccccaggtgccaccaataaaaatcctaccaaanaaaaaaanaattaaaaacgtncctcggccgctntagaactagtggatcccccgggctgcaggaattcgatatcaagcttatccgataccgtcgaacctctagggggg

SEQ ID NO: 8522 - DNA, 657 bp, Homo sapiens
  misc_feature 21, 24, 31, 32, 55, 56, 486, 494, 500, 502, 506, 518, 524,526, 534, 548, 563, 586, 589, 601, 604, 605, 626, 629, 633,652, 654: n = A,T,C or G
gcgcatttaaccctcactaanggnaacaaannctgggtaccgggccccccctcgnngtcgacggtatcgataagcttgatatcgaattcctgcagcccgggggatccactagttctagagcggccgcccgggcaggtacgcgggggtcctgatcaagaatttggtgtggacgttggccctgtttgctttttataaaccaaactctatctgaaatcccaacaaaaaaaatttaactccatatgtgttcctcttgttctaatcttgtcaaccagtgcaagtgaccgacaaaattccagttatttatttccaaaatgtttggaaacagtataatttgacaaagaaaaatgatacttctctttttttgctgttccaccaaatacaattcaaatgctttttgttttatttttttaccaattccaatttcaaaatgtctcaatggtgctataataaataaacttcaacactctttatgattaaaaaaaaaanaaaaaaanaaaaananaaanatggccaaaaanaaaaananaaaaaaanaaaaaaagtccctnggccgccaccggggnggagctccaattccccctatagnggngtcgtattaccnccnnctcactggcccgtcgtttaanaangtcngactgggaaaaccctggcntncca

SEQ ID NO: 8523 - DNA, 650 bp, Homo sapiens
  misc_feature 5, 22, 156, 188, 208, 218, 251, 285, 290, 293, 356, 369,382, 395, 397, 427, 445, 456, 534, 558, 561, 573, 610, 622,626, 637, 649: n = A,T,C or G
actcnttatagggcgaattggnactccaccgcggtggcggccgcccgggcaggtacttttttttttttttttttttttttttttttttacagatgctttcagtttaatagttgttttaaattttttttttttttttttttaggttttaggctgaanacgtaaagcctgctgctcctgggtatcatttntcagcttctccttacagctntagtacatanaatactcctttttttaagtctaagtagcttcanaccaaatcggtctgacccaaaatacctgctagtntgganagngggatggggagaaggtaactagaaaatgcaagatcatgtttaccccaacagcataaaaccacnctagctggggctntggctgggagganatgctagtcattntntccccatgcacaaatggtttatagctatgnggtccaatatggtacctnggccgctctanaactagtggatcccccgggctgcaggaattcgatatcaagcttatcgatacccgtcgacctcgagggggggccccggnaccccagcttttgttccctttagnganggtaattgcccnccttggcgtaatcatgggcatagctgttttcctgggngaaattgttatnccgntcacaattccnaacaaaaaacanc

SEQ ID NO: 8524 - DNA, 641 bp, Homo sapiens
  misc_feature 224, 313, 320, 329, 382, 442, 530, 590, 603, 605, 607: n = A,T,C or G
cctcctaagggaacaaaagctgggtaccgggccccccctcgggtcgacggtatcgataagcttgatatcgaattcctgcagcccgggggatccactagttctagagcggccgaggtacttttttttttttttttttttttttttttccctgtcttctattttcttgaacaattatcattgttatttcaagtcctggtcttaactccactgcctgaatcatctgngagtatatttctattgtctgccctttctcttggttttcaatcccatctcttgaatgtctagtataattttactaaaagcttgacattgngtctaanaagttgtanaacctccatatgatgttatcttctaaagacagcattcatacattctttagctnggcaagtagacaataaacttaattcaatagctgactgaatttgggctactatgacattgngtaaaggctacagttggcaatggtgatcttcttgctggtcttgccattcctagaaccaaagttcgcttacccttagttttgtcccttnttcccgcgtacctgcccgggcggccggccaccgggggggagctcccattcgccctatagngagtcgtattacncncnctcctggccggcgttttaaaacgtcgggactggc

SEQ ID NO: 8525 - DNA, 737 bp, Homo sapiens
  misc_feature 1, 7, 8, 9, 11, 13, 223, 233, 241, 243, 322, 337, 394, 411,439, 452, 453, 474, 528, 540, 559, 560, 587, 601, 616, 619,671, 680, 682, 685, 698, 702: n = A,T,C or G
ngccaannncncnttttttaatatttggagcatgacgttgtcacttcttgtttgccttttttataaggaaatgttggagagttacatcattgctaatgtagaaatgttaagtggaaaaatatacagtttggtaaaataaactagattctacatttatttgtgggtttttttcccctcctttctttccacagcacttttgatatcaagcaagtggcttcctttntgagatattnaaaaaaantngacaggaaaaaagtcaatgaagcccaactacctaaccctttcttattcgtatttgttttagtattgtgaagttgtgttnaatagtactagctanaaatacaaatttctggttatcatttctcttccctgtggcacttgacattttaattgncttaaagtttttgaagncatcttctggccccttgagtactgccanaggcaaaagatgnncgattcttattcattccactnttgtctcctgggatcccttctgtagcctaaagtatggctgggaaatggactcgngaagattggctngaattagatcataatcatnngtgatcccatcatgaattcattggaanttgtgtgcatgtantgcaatctttcctgngtnaatctcctttttaatgacatatattcgaaaaatctaattacatgaaatttanataaaatananaangcggccgtttacngctngataaaacctccaactccctgactgaacataaaga

SEQ ID NO: 8526 - DNA, 667 bp, Homo sapiens
  misc_feature 82, 89, 93, 106, 119, 164, 167, 174, 176, 194, 201, 203,211, 215, 219, 227, 230, 241, 247, 253, 261, 266, 270, 271,275, 281, 299, 314, 318, 323, 341, 355, 361, 364, 366, 379,388, 391, 396, 408, 413, 427, 433, 477, 495, 500, 530: n = A,T,C or G
  misc_feature 533, 537, 547, 548, 555, 563, 564, 567, 570, 575, 577, 600,605, 608, 614, 616, 622, 627, 644, 653, 660: n = A,T,C or G
actactatagggcgaattggagctccccgcggtggcggccgaggttttttttttttttttttttttttttttttttttttcnactcagnaggngtctttattcatncttgttgacattncccatggggaatggttgaagggaggggcagggagggctgaccggnaanccacggntnggttttcctccatccagnggaaaananactcggtngggncatnctaagtanagngaacagggganccatcnctatgngggctganatgcnctgnncagngacttnaaacaacctgagtccttntgtcaggaaatgcantttntaagnggaaaaaaaaaaccaggncccaaagaaaaaancaaagngcntncaaagcaaactgntaatgtaanaanggttntaaggcacccancagtnaaaagccaggggtntggagnggccacctggccatgccctgtcccactgccctgtgccaggctgncgggccaccagtgccctnttganacagtctccattggctccaagggtttttgnganccanaaaaggttgnnaaagganaaaacccnnaantgnggcancnccagggcagcccaaaagcagggntgggnttnaaaatntnaaagtnttttnttaagggggggcttttngggttgggnggaattnaaggggg

SEQ ID NO: 8527 - DNA, 662 bp, Homo sapiens
  misc_feature 408, 414, 417, 531, 584, 587, 590, 612, 634, 637, 655, 662: n = A,T,C or G
ctcactaaagggaacaaaagctgggtaccgggccccccctcgggtcgacggtatcgataagcttgatatcgaattcctgcagcccgggggatccactagttctagagcggccgaggtactttttttttttttttttttttttttttttatgcttaaaacaacagccattttatttaatatctcatgattttgtggtcaggaatgtggacagagctcagctgggagattgttccactccatgtagcatcagaagacaggtctcttggtgatattcagctggagaataagttaatatgcagagttcaagatggtttcactcacattgacaccttggcagggatggctggagggctgggctaagccagatcagttaactggcgtgcctgcatatgcactctccaccatggnggtctntanaattgactcaaatctagaattggcgatgcatcccgtcagtcagcagctgtttacgggaacaccagctgcaggccaggcaccgtgctgcaaggcgtaaatatgttgctgaacacnactcccttccagatgttcaggatttaacaggcaagtaaacagggggtccaaanaangcnctcaacactgcctcatgacatnagggaggattgctcaaaggagngangccttaaacccagctggntcgtagn

SEQ ID NO: 8528 - DNA, 652 bp, Homo sapiens
  misc_feature 159, 199, 320, 322, 346, 400, 515, 542, 610, 632: n = A,T,C or G
gcaattaaccctcactaagggaacaaagctgggtaccgggccccccctcgggtcgacggtatcgataagcttgatatcgaattcctgcagcccgggggatccactagttctagagcggccgaggtacttttttttttttttttttttttttttttttanacagagtcttactcttttgtgaggctggagtgcagtggcncaatctcagctaactgtaacctctgcttcccaggctcaaaggatcttcccacctctcctttgtttagctgggactacagtagggcaccaccatgtccagctaattttcgtttttttagtananatggggttttgccatgttcctcanactggtatcaaactcctggcctcaaatgatcttcctacttaggctggccaaagngctgggattacaggcatgagccaccatgcctgaactttaaaaagcatttctactatatgtttttctttttgattaccaaaaaacttctattaaaaatcttttaaagttcattcancagaagaaggaattagtcaactttaanacatgttatttaaaattagccacttgggggaacaaaagaaaaaaagaatgaaataagtgaacaaagtntgagggaccctatggcacactntcagcatatgaacatttaat

SEQ ID NO: 8529 - DNA, 623 bp, Homo sapiens
  misc_feature 10, 20, 43, 464, 465, 475, 476, 477, 479, 481, 482, 483,485, 486, 487, 488, 489, 490, 491, 492, 493, 500, 501, 520,525, 545, 546, 552, 554, 555, 558, 559, 563, 576, 587, 589,613, 623: n = A,T,C or G
cctcactaanggaacaaaanctgggtaccgggccccccctcgngtcgacggtatcgataagcttgatatcgaattcctgcagcccgggggatccactagttctagagcggccgaggtacgcggggtggggtgggggttccagcagggagaaggctcagtgttcttttcagatcatgctctgatcctgttctttgctccccattccccaggtaaacgggggctggggtatgcaggaagagaccagggtagctaaacaaagcctggcctggcaaggattgaaagaaacacttgcaatgctgtcatcttccttttctcatctgtctgtttctgttccttcccttttgcaccaagtctttccctattgtttccccctttataccctgaaagccaaaatgcacaccatggagctccccccggcggggatcttccttctgctgtggtctctcccaaaaaaaaaaaaaccnnaaaaaaaaannnanannnannnnnnnnngttcctnnccgggggcccccaccgggnggganctccaattccccccttaaanngagtcntnntanncccncccactggcccgncgttttaaaangncgtgactgggaaaacctggcgttncccaactaan

SEQ ID NO: 8530 - DNA, 500 bp, Homo sapiens
  misc_feature 2, 3, 11, 214, 229, 233: n = A,T,C or G
gnnagttcatncttagggcgaattggagctccccgcggtggcggccgaggtactaacaaatgcagtagccaacaagattaccatgcaatcattaaggagaaccaaagtaagagagccactcaaaccagattttgaacgctactaaaattaaagtagttctttgatgaatatgaatgagtagggaaaggattctttgtaatagtgatacctctgngggtagaagaagggnggtntgtgagttttagtctacagattatggcaaattcagtgacaacaatcaaatggtctaagattgacagtggcacagttttactctgtgaaggtaatgttcaggacaaatttcaagaaaactagaaaaccattctttacagctgaaatctttccctaaccattgttatttccacttttaagtcctcaagagatgagaaaagggaggtaaggcttccttatacatttcctgcacaatgaaacatttttcctcctccaggcaaagattcaag

SEQ ID NO: 8531 - DNA, 567 bp, Homo sapiens
  misc_feature 2, 3, 6: n = A,T,C or G
gnnagnaggttgactcccgcggtggcggccgaggtacttggagaatatttccacaatagccgatgacttgttcttgttgacaagagaaagttctttggctgttaccctcaatgatagtgaggtccattgccgtctattaaatggagatgattccatcttgtctacagacactgaaatacctggctaaaagccgcctttcctctgcgctgctaccagccctgtcacaggtcccggcgctctacctccccgcgtacctgcccgggcggccgctctagaactagtggatcccccgggctgcaggaattcgatatcaagcttatcgataccgtcgacctcgagggggggcccggtacccagcttttgttccctttagtgagggttaattgcgcgctttggcgtaatcatggtcatagctgtttcctgtgtgaaattgttatccgctcacaattccacacaacatacgagccgggagcataaaagtgtaaagcctggggtgcctaatgagtgagctaactcacattaattgcggtgcgcttcactggccgctttccagtcgggaacctggcg

SEQ ID NO: 8532 - DNA, 601 bp, Homo sapiens
  misc_feature 1, 21, 117, 335, 587: n = A,T,C or G
ngtgccagtgtgaaccagcangccaagtccgcaaaagccctgttgtgtcctcagggaagcagggaaggcctgacttctgctggcatcaagaggtgggagggccctccgtaccacttncaggggaacctgccatgccaggaacctgtcctaaggaaccttccttcctgcttgagttcccagatggctggaaggggtccagcctcgttggaagaggaacagcactggggagtctttgtggattctgaggccctgcccaatgagactctagggtccagtggatgccacagccccagcttggccctttccttccagatcctgggtactgaaagccttanggaagctggcctgagaggggaagcggccctaagggagtgtctaagaacaaaagcgacccattcagagactgtccctgaaacctagtactgccccccatgaggaaggaacagcaatggtgtcagtatccaggctttgtacagagtgcttttctgtttagtttttactttttttgttttgtttttttaaagatgaaataaagacccagggggagaatgggtgttgtatggggaggcaagtgtggggggtccttntccacacccacttt

SEQ ID NO: 8533 - DNA, 495 bp, Homo sapiens
  misc_feature 2, 3, 4, 5, 9, 10, 11, 17, 221, 259: n = A,T,C or G
gnnnngtgnnnctacgnatacgactactatagggcgaattggagctccccgcggtggcggccgcccgggcaggtacgcgggggacaccctagatcccaagatctccaaggatttggtggcatacccactccagcacacagaagcatgaggttcatgactctcctcttcctgacagctctggcaggagccctggtctgtgcctatgatccagaggccgcctntgccccaggatcggggaacccttgccatgaagcatcancagctcaaaaggaaaatgcaggtgaagacccagggttagccagacaggcaccaaagccaaggaagcagagatccagccttctggaaaaaggcctagacggagcaaaaaaagctgtggggggactcggaaaactaggaaaagatgcagtcgaagatctagaaaggcgtggataaagggagccgtccattgacgttaaaagacgtccttgactcaagtacctcggccgctctagaact

SEQ ID NO: 8534 - DNA, 495 bp, Homo sapiens
atgcccgtatcactactatagggcgaattggagctccccgcggtggcggccgaggtacctgcagaagccagggcagtctccacagctcctgatctacttggcttctaatcgggcccccggggtccctgacaggttcagtggcagtggatcaggcacagattttacactgaaaatcagcagagtggaggctgaggatgttggggtttattactgcatgcaagctctacaaactgcgggattcggcggagggaccaaggtggagatcaaacgaactgtggctgcaccatctgtcttcatcttcccgccatctgatgagcagttgaaatctggaactgcctctgttgtgtgcctgctgaataacttctatcccagagaggccaaagtacctgcccgggcggccgctctagaactagtggatcccccgggctgcaggaattcgatatcaagcttatcgatacccgtcgacctcgagggggggcccggtacccagctttt

SEQ ID NO: 8535 - DNA, 463 bp, Homo sapiens
  misc_feature 357: n = A,T,C or G
tatcactacttagggcgaattggagctccccgcggtggcggccgaggtacgcggggacaccctagatcccaagatctccaaggatttggtggcatacccactccagcacacagaagcatgaggttcatgactctcctcttcctgacagctctggcaggagccctggtctgtgcctatgatccagaggccgcctctgccccaggatcggggaacccttgccatgaagcatcagcagctcaaaaggaaaatgcgggtgaagacccagggttagccagacaggcaccaaagccaaggaaacagagatccagccttctggaaaaaggcctagacggagcaaaaaaagctgtggggggactnggaaaactaggaaaagatgcagtcgaagatctagaaagcgtgggtaaaggagccgtccatgacgttaaagacgtccttgactcagtacctgcccgggcggccgctc

SEQ ID NO: 8536 - DNA, 646 bp, Homo sapiens
  misc_feature 1, 2, 3, 8, 9, 20: n = A,T,C or G
nnnctatnnggcgaattggngctccaccgcggtggcggccgcccgggcaggtacatagacccagcccaaggttggcctttggggtctgatagcattcacagagcaggagattcacccttggaagcaattgaatgtgtaaactctgagagcagacactgacaatgcaatgcctgcatacctgactcctgggctgccttccttctcagcagagcccactgaaagtctcacgtgtgcctttaaccaatgaggatggcaggccttatctgtgtttgaagtggacaggtcattgctacccctgttggagaagctatgtaagaaggagtaggctggcttctggtctagttcgactcattctttatagggacatttcagaatgatgagttggctaaaatttactttaaaggggaaatgtaaaattacctcttcttttcctatccccttcttcctttcccatcctgagccctctggcaaggcctgttgcagctcaagagtttttggtcagattacaagttaccaaatggtcaacagggaaggacccacagcagattccaaaactctttcattcacttgagttaactgaaaatggctccttcttttgagtaattgaagagtttgagttctagcagtttgctggtgtctccaagtc

SEQ ID NO: 8537 - DNA, 624 bp, Homo sapiens
  misc_feature 3, 4, 12, 17, 19, 24, 28, 33, 34, 88: n = A,T,C or G
gtnntacgactncactntnagggncganttggnnctccaccgcggtggcggccgaggtacacatggggtttcaccatgttggccaggnatggtctcgaacttcagacctcaggtgatccgcccaccttggcctcccaaagtgctgggattacaggcatgagccaccgcacccagccagttaatttttctattaactaagacctaattaagattgaggcagaagaaatgggtccttgggatttgaaaattactattcaatttggaagtttaatttgcaacatagattgtctgttattaaattactagatataatatcacaaaggtggaaagaaaggttgcttagttaaagatctaagttactagtcatggtgtcagatatagagaatgattgaaggttatcagagtcacacaccagatgagtaaattgttgttttcaaggaagaggttacataaaggtaagcggagtaatatttcagcatttttgttaattaaaaatttgtaaagttatttccatttcaaggaaattactctcagtaattttacgggtaaaatgacaaattccaagtttaattttcacatgtaacaccctccttgagcacttatttttataaagctattaatctt

SEQ ID NO: 8538 - DNA, 623 bp, Homo sapiens
  misc_feature 27, 48, 187, 211, 212, 340, 416, 421, 448, 449, 453, 461,462, 465, 480, 490, 508, 516, 517, 522, 530, 532, 538, 541,543, 551, 552, 556, 558, 575, 576, 590, 593, 608, 611, 613,614, 615, 616, 618, 619, 621, 622: n = A,T,C or G
tccaccgcggtggccggccgaggtacncggggagtcttggttttctgntagtgctgctgctgctgggaggacgacggacggcagcggccaagcaagaagaaagacgtggcagcaagcgggagtcggggatagtgtcatcggttcggtaaagtttctgttctctgatttggggatattccctgcccanaaaaaaaaaaaaaaaaaaaaaggnncctgcccgggcggccgctctagaactagtggatcccccgggctgcaggaattcgatatcaagcttatcgataccgtcgacctcgagggggggcccggtacccagcttttgttccctttagtgagggtnaattgcgcgcttggcgtaatcatggtcatagctgtttcctgtgtgaaattgttatccgctcacaattccacacaanatacnagcccgggagcataaagtgtaaagccnngggntgccctanngantgagctaactcacantaatttgcgnttgcggctcactgcccgnttttcaanntgggnaaaccttntngggccnacntncatttaannaaantnggccaaacgcccggggnngaggggggttttgnagnattggggcgcttttncgntnnnntnntnnt

SEQ ID NO: 8539 - DNA, 863 bp, Homo sapiens
  misc_feature 640, 659, 762, 772, 777, 788, 801, 806, 826: n = A,T,C or G
gacttagggagtcgccccacgcgtcccgtttttttttctttcgtgtgtggcatgagtgtgtatctgtgtaaatatgattgtatatgtgttactccgatatgtaatccatttcactggctgagtttggcccctagccatgtgttaatataaagtaggcatggcttcccaatggaaatctctgagaatgacagtggagtggcaagcattttacattgccacataattgacttgccattttatggttaaaaacggcacattaggcagttgaatatgacgttaccttgcagactaaaaggttgaaggcccgaaactaacttttagctaacaataagggctgtgccccaatggaaactgagttcattttctgagaaaggtttggatgactgaaatatttcctctacagtcaaggactttggcatgcggtggctgaaactgagcttttttgtgtgggctccagttctcactgttctgcaatgctcatggcaagttgaatggtgagctagcttataaattaaagagctctgaactgtattcagaccgactgggtatctagcttactgttttaacatcattgttgaaaccaagaccctgtagtcccagtggtgctgccctgttgtgcaaaactgctcctttttctcgnggttttgtaaaagagcttncatctgggctggacccagttctttgcacataccaagacacccgctgcagtcagctaggacctttccgccatgtattctattctgtagtaaagcattttcattnaccaatgccnaaatngaatctggtanttttgggttaacnccacnctggatcatacctaataaanattttcagggtttaaaaaaaaaaaaaaaaaaaaaggg

SEQ ID NO: 8540 - DNA, 1127 bp, Homo sapiens
  misc_feature 1, 4, 9, 11, 13, 19, 22, 27, 29, 30, 34, 35, 38, 39, 40,48, 52, 54, 55, 56, 58, 59, 60, 63, 65, 72, 73, 74, 80,84, 88, 90, 91, 93, 97, 99, 100, 101, 102, 105, 109, 110,112, 118, 121, 214, 455, 559, 587, 605, 611, 655, 669, 723: n = A,T,C or G
  misc_feature 727, 732, 738, 750, 753, 764, 769, 778, 791, 794, 803, 812,820, 857, 861, 862, 871, 883, 901, 902, 944, 946, 961, 962,964, 967, 971, 986, 990, 992, 994, 999, 1007, 1024, 1028,1032, 1037, 1042, 1052, 1054, 1058, 1061, 1063, 1064: n = A,T,C or G
  misc_feature 1072, 1085, 1086, 1095, 1097, 1098, 1105, 1107, 1109, 1112,1116, 1121, 1126: n = A,T,C or G
nctncatcnantntgaatnatnttttntnntctnntcnnnttatatanaatntnnntnnnagnanttagttnnnatcctnctcntttngnngngttngnnnnggntttnnantcactntanggcgaattggagctccaccgcggtggcggccgaggtacgcggggggtggttgggtggtaagatggcggctgtgagtctgcggctcggcgactnggtgtgggggaaactcggccgctctagaactagtggatcccccgggctgcaggaattcgatatcaagcttatcgataccgtcgacctcgagggggggcccggtacccagcttttgttccctttagtgagggttaattgcgcgcttggccgtaatcatggccatagctgtttcctgtgtgaaattgtttatccgctcaccaattccacacaacattacgaagccggggagcataaaagtgtnaaagcctggggtgcctaatggagttggagcctaaacctcacattttaatttgccgtttgccgcttcactggccccgcttttccagtccggggaaaccctgttcntgccaagcctgcaattttaaattgaaanttcgggccccaaaccgcnccgggnggaagaagggccgggtttttgccgttattttgggggccgcctcntttcccgccttttnccttcgccttcaactttgaacttccgccttggccgccttcggggtccgttttcnggcntgccnggccanaagcccggttanttnaaggcctccanctctnaaaaagggncggggtaaatttnccngggttttanttcccacangaaatttncagggggggattaaccgcccatgggaaaaagaaaacnattnntggaaatcnaaaaaagggccnaccaaaaaaagggccccnnggaaaacccgtttaaaaaagaggcccccttttgggcttaggncnatttttttccattanngnctncccnccccccttgggaccnaggncntnttatnaaaaaaanttcgaccccctccaaanttcnaaanagggnggggnaaaaaccccntncatnggncnntttttatnattccccagggcnnttttccccncnnggaaagncntnccnttgngggcnccctnt

SEQ ID NO: 8541 - DNA, 641 bp, Homo sapiens
  misc_feature 11, 15, 19, 49, 94, 284, 287, 329, 338, 363, 391, 396, 399,401, 404, 405, 406, 407, 409, 410, 411, 416, 417, 420, 422,423, 424, 425, 427, 428, 429, 430, 432, 434, 435, 436, 437,438, 441, 442, 443, 444, 445, 447, 449, 451, 452, 453: n = A,T,C or G
  misc_feature 454, 455, 456, 457, 458, 461, 462, 463, 464, 465, 467, 468,469, 470, 471, 472, 473, 474, 475, 477, 478, 479, 480, 481,482, 483, 484, 485, 486, 487, 489, 491, 492, 493, 494, 495,496, 497, 499, 500, 501, 502, 503, 504, 505, 506, 507: n = A,T,C or G
  misc_feature 508, 509, 510, 511, 512, 513, 514, 515, 516, 517, 518, 519,520, 521, 522, 523, 524, 525, 526, 527, 528, 529, 530, 531,532, 533, 534, 535, 536, 537, 538, 539, 540, 541, 542, 543,544, 545, 546, 547, 548, 549, 550, 551, 552, 554, 555: n = A,T,C or G
  misc_feature 556, 557, 558, 560, 561, 562, 563, 564, 565, 566, 567, 568,569, 570, 571, 572, 573, 574, 575, 576, 577, 578, 579, 580,581, 582, 583, 584, 586, 587, 589, 590, 591, 592, 593, 594,595, 596, 597, 598, 599, 600, 601, 602, 603, 604, 605: n = A,T,C or G
  misc_feature 606, 607, 608, 609, 610, 611, 612, 613, 614, 615, 616, 617,618, 619, 620, 621, 622, 623, 624, 625, 626, 627, 628, 629,630, 632, 633, 634, 635, 637, 638, 639, 640, 641: n = A,T,C or G
gcctgcgcccnctgnctgnatttcttttggctaaacactttttagtagnatgatctattttttcccccgtttatgtatgcaattatcaccaggnaaaattgtaactatactcaataatatgggctttacaattggacagacactttatttacgatatctgggctctgtggaatattctttgaaattctggaaatcattatgtctaaggctgaggtgtaagaagctctgcattccttcctgccttgattttgctacttctaaagtaagcatgacagggatataanagnttatgaagactgactaagaaacaacttgtgtcctgccagganaatacagtnctcatgctttagaagcactgaattnattgaagtcacaaaagtacctgcccggngctgnctnanatnnnngnnntgccnntcntnnnntnnnntntnnnnngcnnnnncntncnnnnnnnnctnnnnncnnnnnnnnncnnnnnnnnnnntncnnnnnnntnnnnnnnnnnnnnnnnnnnnnnnnnnnnnnnnnnnnnnnnnnnnnnnnnnnnnntnnnnngnnnnnnnnnnnnnnnnnnnnnnnnntnntnnnnnnnnnnnnnnnnnnnnnnnnnnnnnnnnnnnnnnnnnntnnnntnnnnn

SEQ ID NO: 8542 - DNA, 674 bp, Homo sapiens
  misc_feature 21, 22, 23, 27, 49, 52, 466, 471, 477, 478, 480, 481, 482,483, 484, 485, 486, 489, 491, 494, 495, 498, 508, 532, 563,570, 574, 575, 576, 577, 582, 595, 600, 601, 602, 604, 606,607, 608, 609, 613, 614, 615, 616, 617, 622, 623, 624: n = A,T,C or G
  misc_feature 625, 626, 627, 628, 629, 630, 632, 635, 636, 637, 638, 639,640, 641, 642, 643, 644, 645, 646, 647, 648, 649, 651, 652,653, 654, 655, 656, 657, 658, 659, 660, 661, 663, 664, 665,666, 667, 668, 669, 670, 671, 672, 673, 674: n = A,T,C or G
tttttttttttataaggtggnnnaagncttttatgaagtcatccacatnctncaactctcgtaacattaacattatggcctggctactttccagcatcaccatgatagaaaaaaagcaccctccaatttaataactaaattaatttttcctccctccacagagtgtgcaattattaaactcagaaagatcttggcagcctcttgccctggtaaataaaacgttgcattctcatcatatgattaattaatgttcctgattcaaggagatatgaaatcgctttacattccttgtgttattgaataacccaacgtgcattattgctcaggcactttttatatttatgcagttaaatcgcaaggaataaactgcaaagccctaacattattctgcagcactctgtgagttacagaaaataaaacgaggagatgcctgaaagggaaagaagaagaaaagcaacaggagagngggangaaaannannnnnnntantnggnngtncctgcccggncggccgctctagaactagtggatnccccgggctgcaggaatgggatgtgcagctnatcgatncccnnnncctgngggggggcccggncccannnantnnnncctnnnnnagggnnnnnnnnncnctnnnnnnnnnnnnnnncnnnnnnnnnnncnnnnnnnnnnnn

SEQ ID NO: 8543 - DNA, 589 bp, Homo sapiens
  misc_feature 2, 4, 8, 10, 11, 13, 18, 444: n = A,T,C or G
gntntttntnntnactcntttccttccggcgaattgggccctctagatgcatgctcgagcggccgccagtgtgatggatatctgcagaattcggctttcgagcggccgcccgggcaggtaccaatgtgtggcagtccaaaattacgaggaaaatgagttcccttcatgggtcacatcagcaatttttttttccccttttgagacagagtcttgctctgctgcccaggttggagtgcagtgggcgacagtgaggccctgtctcaaaaaaaaaaaaaatgcaagtctggagaaatatagctgggagtcagtaatgccagttttagctgagggagttaagatcatttaatcagtgttaaggaagaaactcaatagtagtgaccaccaatacttaaggaaaaaggataaagtaagaggaatgataaaggctggctgaaattcttgggngtctagcctaagaaaggaggggttagatgctcatgtttattataatggatctagagaagcatttatttcactaatacattttattatgtggtctctaattttaaaattaccttttcatcttgcttggattttccttcagcttaaa

SEQ ID NO: 8544 - DNA, 844 bp, Homo sapiens
  misc_feature 1, 5, 607, 626, 724, 732, 733, 736, 748, 769, 790, 795, 797,811, 812, 820, 829: n = A,T,C or G
nacgnatacgctcactatagggcgaattggagctccccgcggtggcggccgaggtacctgaaagtgacggggagaatggaaccaagttggaaaacactttgcaggatattatccaggagaacttccccaatctagcaaggcaggccaacattcaaattcaggaaatacagagaacgctgcaaagatactccttgagaagagcaactccaagacacataattgtctgattcaccaaagttgaaatgaggaaaaaatgtcaagggcagccagagagaaaggtcgggttacccacaaagggaaagcccatcagactaacagctgatgtctcggcagaaacgctacaagccagaagagagtgggggccaatattcaacattcttaaagaaaagaattttcaacccagaatttcatatccagccaaactaagcttcataagtgaaggagaaataaaatactttacagacaagcaaatgctgagagattttgtcaacaacatttgaatattataacctgcaggggtctgtcctgcagatggttgagacacataaccagatactgatattcagtgaaaggagcagcaagggattccgagctgattacagacacnaagggaaagatgctgtaanaggtcagcagccacagccctggctagcttggccctgtgggcattttattagtaaagttttaatgacaaaagctttggagttaacaccacccgtggggnaataaccnnggncttccccccccntggagaggccatcttgccctnggtggatcaaaggaaggaacntttgncnggaacacctggtgnnggtgcccntttggcggnaggaaccctgaccct

SEQ ID NO: 8545 - DNA, 615 bp, Homo sapiens
  misc_feature 22, 23, 24, 25, 35, 64, 85, 578: n = A,T,C or G
tgggtaccgggccccccctcgnnnntacttctagnaattaattaacgcggggggtctacgaagnaatagggtgaaaaacctcagnagggaaaactccaaaccagttgggagacttgtgcaaaggactttgcagattaaaaaaaaaaaaaaaaaaaaaagcctttctttctcacaggcataagacacaaattatatattgttatgaagcactttttaccaacggtcagtttttacattttatagctgcgtgcgaaaggcttccagatgggagacccatctctcttgtgctccagacttcatcacaggctgctttttatcaaaaaggggaaaactcatgcctttcctttttaaaaaatgcttttttgtatttgtccatacgtcactatacatctgagctttataagcgcccgggaggaacaatgagcttggtggacacatttcattgcagtgttgctccattcctagcttgggaagcttccgcttagaggtcctggcgcctcggcacagctgccacgggctctcctgggcttatggccggtcacagcctcagtgtgactccacagtggcccctgtagccnggcaagcaggagcaggtctctctgcatctgttctctg

SEQ ID NO: 8546 - DNA, 459 bp, Homo sapiens
  misc_feature 2, 3, 4, 10, 11, 15: n = A,T,C or G
gnnnaggttnnggcnggtatcactacttagggcgaattggagctccaccgcggtggcggccgaaggtaatcgggggccagtctttatactgctgacagtaataaattccaaaatcttcagactgcagtccactgacgacgagagtgaagtctgtcccagacccagagccaatgaatctggctgggacaccagtggccctggtggatgcagcaaagacgaggagcctgggagcctggccagacttctggtggtacctgcccgggcggccgctctagaactagtggatcccccgggctgcaggaattcgatatcaagcttatcgataccgtcgacctcgagggggggcccggtacccagcttttgttccctttagtgagggttaattgcgcgcttggcgtaatcatggtcatagctgtttcctgtgtgaaattgttatccgctcacaattccacacaacat

SEQ ID NO: 8547 - DNA, 649 bp, Homo sapiens
  misc_feature 19, 22, 197, 204, 212, 217, 233, 236, 239, 269, 274, 279,281, 288, 291, 314, 323, 332, 337, 352, 391, 411, 414, 429,430, 438, 449, 457, 460, 462, 469, 490, 496, 511, 518, 520,526, 529, 532, 536, 548, 550, 553, 556, 559, 573, 576: n = A,T,C or G
  misc_feature 596, 603, 606, 608, 626, 627, 629, 636, 637, 644, 646: n = A,T,C or G
gcaattaaccctcactaanggnaacaaagctgggtaccgggccccccctcggggtcgacggtatcgataagcttgatatcgaattcctgcagcccgggggatccactagttctagagcggccgaggtactttttttttttttttttttttttttttttttttttctaagccattactttttattttgaaggatttgngaaactnttcacatnatggngagagtttgtatgatnaanaanaagcagctttttcatgaaatgcttggaggngaacnagttntnagcctgnganatccgaccatcccattaactttnaagtttttnttgattaanagaanaaaaaaggggagggngaaaaaaaggaggaacatgctaaaaaccttatgacaatnatccaaatgtgaggaaagancanccgattcaccaactnnactttttntattttacaanctttctanatntnactcttnattttggcccttcctggcctnaaacancctggcagtccctanagccccntnaaaaanganccntggntctccaaaaaananagnganganaagcccttgaggangcnctgaccctttcccaaaaaanctgcccnggntncctgccggggggcccccnncnggggggnncctcaantnccc

SEQ ID NO: 8548 - DNA, 646 bp, Homo sapiens
  misc_feature 2, 12, 14, 15, 27, 34, 90, 93, 105, 110, 116, 119, 120, 123,124, 126, 127, 134, 135, 136, 138, 139, 140, 144, 145, 146,148, 149, 150, 153, 163, 164, 169, 179, 187, 188, 195, 198,199, 200, 201, 202, 206, 208, 209, 227, 235, 245: n = A,T,C or G
  misc_feature 251, 261, 269, 270, 271, 276, 277, 279, 282, 289, 291, 296,300, 302, 305, 322, 342, 345, 355, 359, 369, 376, 384, 389,399, 415, 417, 419, 445, 457, 469, 479, 506, 507, 508, 530,531, 548, 558, 565, 566, 579, 581, 588, 606, 608, 622: n = A,T,C or G
  misc_feature 624, 639, 642: n = A,T,C or G
gnatttcgcgtncnngtactcacttgntggcctnatggaactccaccgcggtggcggccgagtacttttttttttttttttttttttttnggnaaaaaatttttnttttncccccnggnnggnngnnaaggggnnngnnnaaannnannnaancccccccccnnggggntaaaaaattncccccccnnccccccnaannnnngggnannaagggccccccccccccncccggggnaatttttttntttttnaaaaaaaaanggggtttnnnttttnngnccnggggggntnaaaancccnanccntggaaaccccccccctnggccccccaatttttttttnttnaaaaaccctntttnaggggtaacntttcctnaacattgnggccnccccccaaantttgccagggacgggnangncccaaaaaaattttttcggggggggnttttttgggccntttttttttttnaaaaaaaccnttttttttttcccccaaggggggaggnnnggggccaaaaaaaagttggggnncccttaaaaccgggggnaaaaaaattntttttcnnaaaaaaaaaaaanangggcccncccccccccgggggcctntnaatttttttggggnanaaaaaaaaaaacccnccnccag

SEQ ID NO: 8549 - DNA, 649 bp, Homo sapiens
  misc_feature 527, 528, 534, 556, 565, 573, 581, 599, 612, 616, 624, 634,635, 642, 643: n = A,T,C or G
cctcactaagggaacaaaagctgggtaccgggccccccctcgggtcgacggtatcgataagcttgatatcgaattcctgcagcccgggggatccactagttctagagcggccgcccgggcaggtaccaagctaagaagttcttatagttggaactggaaaaaacactctggctggacttgcagttgatggtggccctctcgcccagagacacagccagggagtctggagactgggtcatcacaatgtccccgtaggcaccagagatccagagcaacagagaaatgaagacctgggtctgcaacaccatcttgctgcccctgcctgcctgttgtagctccccgcgtacctcggccgccaccgcggtggagctccaattcgccctatagtgagtcgtattacgcgcgctcactggccgtcgttttacaacgtcgtgactggggaaaaaccctggcgttacccaacttaatcgcctttgcagcacatccccctttcgcccagcttggcgtaatagccgaagaaggccccnnacccgnatcgccctttcccaacagttgncccaccctngaatggcngatggggnccgccctgtagccgcgcnattaagccccggngggngggggggnttccccccanngggaccnntcactt

SEQ ID NO: 8550 - DNA, 487 bp, Homo sapiens
  misc_feature 2, 3, 4, 5, 6, 7, 8, 10, 12, 21: n = A,T,C or G
tnnnnnnngnanacaatatanggcgaattgggccctctagatgcatgctcgagcggccgccagtgtgatggatatctgcagaattcggctttcgagcggccgcccgagcaggtacaggtagatcttgtagtcagtgcctggttgtaaacctgtgatggtgtagcttctgacatctggcttgatggttctctggattggagtctggccattggctggaacggcatcaacttggaagccagtgatcgtctcagtcttggttctccagctaatggtgatggtggtctcagtagcatctgtcacacgagccctccttggtgggctgacattctccagagtggtgacaactccctgagctggtctgcttgtcaaagtgtccttaagagcatagacactcacttcatatttggtggccaccataagtcctgatacaaccacggatgagctgtcaggagcaaggttgatttctttcattggtccggtcttctcc

SEQ ID NO: 8551 - DNA, 569 bp, Homo sapiens
  misc_feature 2, 11, 405, 415, 437, 449, 458, 508, 542, 567, 568: n = A,T,C or G
gntgacgttgngccccgcgtccggtgagtgaaattgagttcatctgtgaggcaggaaatccttatcaaaccccaaattaatcatttttaaataacccatgatctattgacttgtaagagtgcagaaatttaaaatgaggctacattattttaaacatgctcctgtttcacttttactgatcaataaacagtaagtccttaggaaagggcaaggaccccgaggctatagttccagcccattctcatatcataagacatgtcacggtctatataaaatcaaacaacagctaaccccatctctactacacatacaaaaaaattagccaggcatggtggcacacgcctgtaatcccagctactcgagaggctgagacaggagaatcacttgaaatcagtagatggaggnccgcagtganccaagatcacgccactacactncagcttgggctnccagagtgngacttctgtcttcaaaaaaaattaaaaaattaaaaaatcaacacagctgntggggccttcaattcattttcagatcactggggngaagggggtttaacaacaactgttnnt

SEQ ID NO: 8552 - DNA, 559 bp, Homo sapiens
  misc_feature 2, 3, 4, 5, 16, 452, 456, 524: n = A,T,C or G
gnnnnttcttggaccnagtttggttgccagaaaaatgtgcttcattcccccctggttaatttttacacaccctaggaaacatttccaagatcctgtgatggcgagacaaatgatccttaaagaaggtgtggggtctttcccaacctgaggatttctgaaaggttcacaggttcaatatttaatgcttcagaagcatgtgaggttcccaacactgtcagcaaaaaccttaggagaaaacttaaaaatatatgaatacatgcgcaatacacagctacagacacacattctgttgacaaggggaaaaccttcaaagcatgttttctttccctcaccacaacagaacatgcagtactaaagcaatatatttggtgattccccatgtaattcttcaaatgttaaacaggtggcagtccctctttcgaaagcttaaagatggaccatgccgccctttncctntgtacatattaccccttaaagaacgcccccttcacacactggccccccaaatatatgccggcatttgnctgggctgggggtattggcctatggtacattttaa

SEQ ID NO: 8553 - DNA, 647 bp, Homo sapiens
  misc_feature 358, 362, 365, 378, 379, 381, 382, 385, 388, 392, 394, 395,396, 398, 402, 403, 405, 407, 409, 412, 415, 420, 421, 423,426, 429, 431, 432, 436, 439, 445, 446, 450, 453, 455, 456,461, 465, 472, 476, 479, 482, 488, 492, 500, 507, 513: n = A,T,C or G
  misc_feature 532, 534, 538, 543, 547, 552, 574, 596, 635, 636, 639, 645,647: n = A,T,C or G
gcatttccctcactaagggaacaaagctgggtaccgggccccccctcgggtcgacggtatcgataagcttgatatcgaattcctgcagcccgggggatccactagttctagagcggccgaggtaccattgctgtagatggccttaatgggttacaaattggatttttttttttttttttttttttgagacagagttttgctcgttacccaggctggagtgcaataccttccgaagcttccatattccctggggccagcacatgcaaggtttatatggtcagtagctcacgtgaagtcatctgaatctttcttaaatctgctctcttaaaatctcttatgcaaaaaaaaaaaaaaaaancccnttntttaaaaaaaaannanngtnaangttngnnnancttnncntngnaanctnaaaanntngcnctntnntttnggntcggannccanttngnnggggncccntgggggnagtnatnaancctccngggnggccgccnccggggnggaccnccaattcgccctatagggngncgtnttacncccnctaantggccgtcgtttaaaacgtcgngactggaaaaaccctggcgttnccccaacttaattcgccttggaaaaaaattccccctttnnccnggtggngn

SEQ ID NO: 8554 - DNA, 809 bp, Homo sapiens
  misc_feature 1, 662, 677, 680, 705, 717, 728, 734, 745, 748, 757, 781,788: n = A,T,C or G
natcgactactataagggcgaattggggccctctagatgcatgctcgagcggccgccagtgtgatggatatctgcagaattcgcccttagcgtggtcgcggccgaggtacaccaagcacctatttttataacttagcttcccatggagagataatggcttgcgtgcattttatgtatccataacatacatacaaggctcggtcttttcaatgggataacagttcacaactcttcgatttgaattgtaatgaatctggtgacaaggatttttctctaatggattccaaagttagccagaacttttaatgtcaagatgaaaaagggtgtaaggtgttatattttcttcaattcctttaccacaggaggctaactccacaggaggctaactccacaatttccctcatgtttctcattcagaaaaaaaaatattaaatttgtgttcagaattatttgatgattgcttctttgtgctgatgtttcagttcctgaagtcaacttggctctcacaattttctaaggtcaggttattgacttaagggttgtataaacatttttttctggtttttggattttcactgagaacgaccttcccttaatcgtcttctagatccctgaacttttttggtggcttgcaacttcctcaccggtggtgtcttcttggnacaaatttctttaanagnttcttctgtttctcccctccagtanaaaatccaagtntttttatttcnagaccnggaatgaatcngtnctctcgggnctcttttcaggtatttcccaggcnctccatnaaggatttggggtttttttaa

SEQ ID NO: 8555 - DNA, 649 bp, Homo sapiens
  misc_feature 446, 448, 451, 462, 463, 464, 465, 481, 487, 491, 500, 515,516, 518, 522, 524, 525, 534, 540, 541, 550, 551, 562, 568,570, 584, 587, 603, 605, 607, 609, 612, 613, 614, 627, 631,632, 635, 637, 638, 639, 645: n = A,T,C or G
ctcactaagggaacaaagctgggtaccgggccccccctcgggtcgacggtatcgataagcttgatatcgaattcctgcagcccgggggatccactagttctagagcggccgcccgggcaggtactgggatgttatgcattatattaatgtttgttaaaaattttttggcaataatcataaaaaggatgaatgttgaaaccagaaggtttcttttttactcaacagggcttgcaacccaagatgggattcaggtgtatctgtgctccttgggaactgggtctgaacactcaaaggaccactgcttcacccttctaaacaccagtataatctgggtcatgatgcatgtgaatgattatgcataggattcttccttgaatccaggggatggaattgttgcttttgaagtgttcacttatggacaccttacttataagaaaagaatgagnanccnaaataaacggnnnnaaaaagttccctcggnccgccnccgnggggggaanctccatttcgccctnnangagntnnatttacccncccctnnctggcccgnntttttaaaaangtctananttggaaaaaccctnggntttaccccaacttaancncntngannnaatccccttttcnccanntgngnnnaaaacnaaaa

SEQ ID NO: 8556 - DNA, 663 bp, Homo sapiens
  misc_feature 2, 8, 9, 11, 12, 634: n = A,T,C or G
gnagagcnncnncgcgtcccacatctacttgctaaattgtgggcaaaagagaaaaagaaggattgatcagagcattgtgcaatacagtttcattaactcctttcccccgctcccccaaaaatttgaatttttttttcaacactcttacacctgttatggaaaatgtcaacctttgtaagaaaaccaaaataaaaattgaaaaataaaaaccataaacatttgcaccacttgtggcttttgaatatcttccacagagggaagtttaaaacccaaacttccaaaggtttaaactacctcaaaacactttcccatgagtgtgatccacattgttaggtgctgacctagacagagatgaactgaggtccttgttttgttttgttcataatacaaaggtgctaattaatagtatttcagatacttgaagaatgttgatggtgctagaagaatttgagaagaaatactcctgtattgagttgtatcgtgtggtgtattttttaaaaaatttgatttagcattcatattttccatcttattcccaattaaaagtatgcagattatttgcccaaagttgtcctcttcttcagattcagcatttggtctttgccagtctcattttcatcttcttccatgggtncccaagaagctttggttcttgggcaagct

SEQ ID NO: 8557 - DNA, 670 bp, Homo sapiens
  misc_feature 152, 413, 600, 601, 611, 628, 647, 659, 662: n = A,T,C or G
gcattaaccctcactaagggaacaaagctgggtaccgggccccccctcggggtcgacggtatcgataagcttgatatcgaattcctgcagcccgggggatccactagttctagagcggccgaggtactttttttttttttttttttttttgntttacatttgggggtaaagtgcaagtttgttaaaaagatattgtggaatgttaaggctggagtacaaacaaatccatcatccaggtagtgagcatagcacacaattggtagtttttcaacccttttttctctccctcccttctcatgttccccagtgtctattgttcccatctatatgtacatgcatactcaatgtttagttcccacttataagtgagaacatgtggtatttagttttattcttttttatactcagtccanatttgtggctcacaggctgggtagataaagacttttgtgtccaaatttccaaccagtagctgctatacacacatatctgggcctgccgattttcccatttgcttgttgaagaatcgacttttatgaaagaatcaagatctgtttatttttcctaaaacaacagtaatgacggaatcataagtagaannggggtaaccntgggtccctgaatccancttttaggcacacactttntcctgttttccnaantaagtttg

SEQ ID NO: 8558 - DNA, 637 bp, Homo sapiens
  misc_feature 2, 9, 19, 21, 28, 105, 403, 404, 405, 419, 423, 450, 458,460, 465, 467, 469, 470, 476, 478, 481, 482, 483, 484, 485,487, 492, 493, 494, 497, 498, 499, 500, 501, 502, 507, 508,515, 519, 521, 522, 531, 533, 534, 535, 541, 544, 545: n = A,T,C or G
  misc_feature 546, 549, 550, 553, 554, 556, 557, 558, 561, 562, 566, 569,570, 571, 575, 576, 577, 581, 585, 587, 590, 592, 593, 596,597, 599, 601, 604, 606, 608, 611, 612, 613, 615, 619, 620,623, 624, 625, 626, 629, 631, 633, 635, 636: n = A,T,C or G
tnggccggnctggtcttgnantcctggnctcagtggtacacccacctcagcctctgggagtgctgggattacaggcgtgagcaagccactacacccagcccaggnatgaattttaaaaactttaaaaatgttcacatagaaatgttatttttgctttattattttatgacacaaggtatctaagctctctctttactgaggacaaaaaatagtttaaaaaatatatacaatatattacccacatgttcatctttactaattacaaagagtttaattttagcattgttatcctgtaggaagtcatttccattgttacagtgtatggcatgcatttatctttagcaaatatcctagtattttatatcttgtgtagaaatatgctttggtgtgattatgagatggnnncttgattaatactnttanaaaactgacttgagggcggttggtggntgaggggncnagaantntnnttgagngngtnnnnntntcatnnntannnnnntattnnttttttnttgngnntgctttgtngnnntttatnttnnnggnngtnngnnntanngttnttnnntttnnntgcnttcngngcntnncgnngntncantntntgnnncnatanntgnnnnctncntncnng

SEQ ID NO: 8559 - DNA, 504 bp, Homo sapiens
  misc_feature 2, 3, 4, 5, 9, 25: n = A,T,C or G
gnnnngggngcgccgaatacgactnctatagggcgaattggagctccaccgcggtggcggccgaggtacccttcctgtgttcccaaaccatgccacagagactcagagactggctttcatcgatcatttggtagaaaacatcttccaggttttccatatccttgactttgaacacatgttgctcattgtctttcttggaagccaaagcattgatgttcacttggttcaccaaaggcccgaccccaaacacatagacatccagataatcctcccttgggtttttgcgatccttgccaatgtatagcaagtcccggatctcatcaatgcccgcgtacctgcccgggcggccgctctagaactagtggatcccccgggctgcaggaattcgatatcaagcttatcgataccgtcgacctcgagggggggcccggtacccagcttttgttccctttagtgagggttaattgcgcgcttggcgtaatcatggtcatagctgtttcctgt

SEQ ID NO: 8560 - DNA, 638 bp, Homo sapiens
  misc_feature 5, 7, 20, 22, 32, 37, 44, 47, 218, 219, 220, 221, 223, 257,258, 259, 275, 286, 287, 288, 289, 290, 293, 294, 295, 296,301, 302, 303, 315, 316, 317, 318, 332, 333, 334, 335, 342,343, 344, 359, 366, 393, 394, 395, 396, 397, 399, 400: n = A,T,C or G
  misc_feature 402, 415, 420, 421, 422, 423, 427, 443, 444, 452, 464, 465,466, 467, 468, 480, 481, 482, 483, 484, 485, 486, 487, 494,495, 497, 498, 502, 503, 510, 511, 531, 535, 537, 542, 543,544, 545, 548, 549, 550, 554, 555, 556, 558, 561, 562: n = A,T,C or G
  misc_feature 563, 564, 565, 566, 567, 568, 569, 570, 571, 572, 574, 577,578, 592, 593, 594, 595, 596, 597, 598, 599, 600, 601, 602,603, 604, 605, 606, 607, 608, 609, 610, 611, 612, 613, 614,615, 616, 617, 618, 619, 620, 621, 622, 623, 624, 625: n = A,T,C or G
  misc_feature 626, 627, 628, 629, 630, 631, 632, 633, 634, 635, 636, 637,638: n = A,T,C or G
ttgtnanacgtacttcactnanagggtcgacntgggnccctctnatngcatgctcgacggccgccagtgtgatggatatctgcagaattcgcccttagcgtggtcgcggccgaggtactttttttttttttttttttttttttttttttttttttttttttttttttttttttttttttttttttttttttttttttttttttttttttttttttttnnnncnaaaaaaaatttttttaaaaaaaaaaaaaaaaaannntttttttttttttttnaaaaaaaaaannnnnggnnnnttttnnnaaaaaaaaaagnnnnaaaaaaaaaaaaannnnttttttnnnaaaaaaaaaaaaaanggggggngggggggaaaaaaaaaaaaaagggttnnnnncnntntttttgggggggnaaaannnntttnaaaaaaaaaaaccccnngggggggnaaaaaaaaaaannnnngggggaaaaaannnnnnnnccccccnnanntttnnggggggnnaaaaaaaaaaaaaaaaaaanacangnggggnnnnaannnaaannncnccnnnnnnnnnnnnanaannaatttttttttttnnnnnnnnnnnnnnnnnnnnnnnnnnnnnnnnnnnnnnnnnnnnnnn

SEQ ID NO: 8561 - DNA, 659 bp, Homo sapiens
  misc_feature 23, 30, 374, 376, 380, 387, 394, 398, 399, 406, 408, 410,413, 414, 421, 424, 429, 430, 434, 436, 441, 448, 451, 453,455, 456, 457, 461, 466, 468, 474, 476, 477, 488, 491, 498,502, 515, 534, 535, 537, 545, 549, 552, 557, 561, 564: n = A,T,C or G
  misc_feature 567, 568, 575, 584, 586, 591, 596, 610, 613, 618, 619, 628,629, 630, 633, 650, 652, 653, 659: n = A,T,C or G
gcgcattaaccctcactaaaggnaacaaanctgggtaccgggccccccctcgggtcgacggtatcgataagcttgatatcgaattcctgcagcccgggggatccactagttctagagcggccgggggatgcgaggctcggagcacccttgcccggctgtgattgctgccaggcactgttcatctcagcttttctgtccctttgctcccggcaagcgcttctgctgaaagttcatatctggagcctgatgtcttaacgaataaaggtcccatgctccacccgaaaaaaaaaaaaaaaaaaaaaaaaaaaaaaaaaaaaaaaaaaaaaaaaaaaaaaaaaaaaaaaaaaaaaaaaaaaaaaaaaaaaaaaaaaagntncctncccgggnggccccnaccnngggggancncnaannccccctnaanggagnnggtntnacccncccccantgncngnnntttnaaaangncgggananngggaaaacccnggngttaccnaaanttaatcgccttgnagaaaatccccctttttcnnangtgggganaaanaanaaagncccnacnganncgccctntccaaaaantngccancctanaaaggaaaatgagnccncccanntaagggagnnntanagccggggggggggggntnncccaan

SEQ ID NO: 8562 - DNA, 619 bp, Homo sapiens
  misc_feature 483, 532, 534, 553, 556, 594, 597, 619: n = A,T,C or G
ctatagggcgaattggagctccaccgcggtggcggccgaggtaccaatattctgcagaaaaccaaaacctcacctgcattcctactcctatcatgatgttctgccccccgggacccttgtttatgctggtctctccttttgaaagaacgttacccttttcttcacccagcaaattcttactcagacttcaagactcagttcagagtctggggatgaatattctacaaatggcccccaggattgtcatggtcctcacggcaggtgatttgctcttgaacaattaacagagtgaaggctgtgttccatctcctcacagtctcccgctgggcatccttgggagcacaggaggagaaaggctttcttcttgatcctattactgctgcccagcatcaagaaggattaattaacccaccaggttttgcttcattacgaggaaaaaagaaaagccagtgacagtggaattcaaacattgaacaggcaaangaatcagtgctcaagcaccttatgaacatttcgaagacttagctgggcngngtggcgcaatgtaaagganggngacttggtgcaagttacacacccctgcagccctgtttnttnattctcagaggtcaaccttaan

SEQ ID NO: 8563 - DNA, 683 bp, Homo sapiens
  misc_feature 2, 3, 4, 5, 6, 14, 17, 27, 51, 52, 284, 554, 605, 634, 646,648, 666, 676: n = A,T,C or G
gnnnnnaaagtatnganccgactcccntttttttttttttaaatagaaggnnagaaaattatacatgggagaaaaaatgtatccacaatttttaggaaattagcaaggctctcgcataaacaatagtttttaaacgatgtcccatagaaatctaaggtactacagaggacatagcagtattaagggataatgaagtcacagcttcagagcctccatcctttctttagcaagttagctctacttgtatctgttctgttttatataatatggttgcatctaactgnttttaaaaaaagttctgttcttcaaaaaaattttaagctatgaaaatcactgattaagtcaaaccctcattttacaaaagaggcaacacaaactcagagcacttatgcctcaccataggtcacaaagccaagtagctccaggccagaaatgggctttaggtcttccgtctgagactggcatttgatgccagtgatttcctccatatttaggagaaatgtatagattttaaaatataactcagagaaaatgcatgcatatggtaaaactgncttctagctcaatcatgtttaggtgcaacaggttaaaaaataggttctcancttaattgggaatcctaaaattagaaatncaaagtaagccntntgaaactaatatcatacntcagtgagangtagtct

SEQ ID NO: 8564 - DNA, 683 bp, Homo sapiens
  misc_feature 1, 2, 4, 5, 6, 7, 8, 9, 11, 12, 18, 20, 21, 31, 53, 63, 87,91, 317, 351, 353, 363, 395, 399, 407, 417, 427, 432, 433,435, 442, 451, 464, 466, 470, 478, 491, 494, 501, 502, 505,509, 511, 517, 528, 533, 534, 542, 545, 550, 554, 557: n = A,T,C or G
  misc_feature 559, 562, 567, 572, 577, 600, 601, 608, 610, 611, 614, 616,619, 629, 630, 633, 634, 636, 640, 646, 647, 648, 671, 672,674, 680: n = A,T,C or G
nncnnnnnncnnctcctntnnggcgattggnactccccgcggtggcggccgcngtacccaaantgggtcttgaaatataattgtttntganaggaacttattctcaggatatttttgtaagagggacaaaactacttaacagtgtgtatccttgcaataagtatattaatgaatacgatacaaccattttatacaggcaaaagatggtttaatgccaaagcacaaactcataaacccagttgatgaggagccagaacaatggtcattactgtatagagatgttttaaaaagtcaccatataagctttgaaataattntaatgaaaaattatatgacctttgaaggcttggncncgggtggctnatgcctgttaatccccagcacttttgggaggnccgnggtgggtnggatcaccanggttcaaganatcgnnancatcctnggccacatngtgaaaacccttntncttnttaaaaancaaaaaaaattanccnggcattnnggngccntnccttgnattccccactnccttnngggggctnaangtggncggntcncnttnaactntaaanggcgnaggtttcaaattgggcccaaaanngggcccntnnacntncancctggggggnnaannanaaantctttnnnaaaaaaaaaaaaaaaaaaaaacnncnccgggnggg

SEQ ID NO: 8565 - DNA, 611 bp, Homo sapiens
  misc_feature 22, 23, 24, 25, 34, 52, 492, 493, 494, 495, 496, 498, 499,500, 501, 502, 503, 504, 505, 506, 507, 508, 510, 511, 512,513, 514, 515, 516, 517, 518, 519, 520, 521, 522, 523, 524,525, 526, 527, 528, 529, 530, 531, 532, 533, 534, 535: n = A,T,C or G
  misc_feature 536, 537, 538, 539, 540, 541, 542, 543, 544, 545, 546, 547,548, 549, 550, 551, 552, 553, 554, 559, 579, 588, 593, 595,597, 601, 603, 604, 605, 607, 609: n = A,T,C or G
tgggtaccgggccccccctcgnnnntacttctanattaattaacgcgggggnatcttcctgcggctgaaccgcccggctgagccgacattgccggcgtcttggcgattcggcccgacgagctccgctttcgctacagcatggtggcctactggagacaggctggactcagctacatccgatactcccagatctgtgcaaaagcagtgagagatgcactgaagacagaattcaaagcaaatgctgagaagacttctggcagcaacgtaaaaattgtgaaagtaaagaaggaataatctaccctgactaaagcttgaaatgctacatttccaaggtgaagatgtgtgggcacatgttatggcagattgaaaaggatctcattccatgggaaaaaaaaaaatcctgtcttgttcataaattgacaatgtcaataaattgaaatatggttcactgttactcttgaaaaaaaaaaaaaaaaaaaaaaaaaaaaaaannnnnannnnnnnnnnnannnnnnnnnnnnnnnnnnnnnnnnnnnnnnnnnnnnnnnnnnnnnaaaanggggccccccccgggggggncccccattnccccntntngggngnnntntncc

SEQ ID NO: 8566 - DNA, 532 bp, Homo sapiens
  misc_feature 3, 10, 410, 432, 434, 480, 506, 515, 520, 521, 530, 532: n = A,T,C or G
ggngtttctngccccgcgtccgtgcgccctccctgctgagatgcgcaaattcactccccagtacaaaggtgtggtatctgtgcgctttgaagaagatgaagacaggaacttgtgtctaatagcatatccattgaaaggggaccatggaattgtggacattgtagataattcagactgtgaaccaaaaagtaagctcctaaggtggacaacaaacaaaaaacatcatgtcttagaaacagaaaagacccctaaggactgggtgcgtcagcaccgtaaagaggagaaaatgaagagccataagttagaagaagaatttgagtggctaaagaaatctgaagtcttgtactacacctgtagagaagaaggggaatataagttcccagcttaaacactattacccttggagcatnaaatgtcacccgccaccagttncngagaatgaagggagaatgcaaagcattggaaccagtcaaatttatnttactgggaaacctggctttcccctnttgaggggncttgnngtccttgancn

SEQ ID NO: 8567 - DNA, 644 bp, Homo sapiens
  misc_feature 9, 12, 61, 119, 126, 228, 286, 293, 316, 335, 453, 459, 465,567, 569, 571, 579, 581, 595, 616, 621, 623, 640: n = A,T,C or G
cctcctaanggnaataagcttgcggccgccctttttttttttttttttttttttttttttngggtcatttccacatgctttattccagcaatcaaaataattaaaaacatctcaaattnttatacncatacaaaataggtacagagtcttttgcttcctcccacccctagggggaaaaactgctttgtgctttgggaagttgtctctgaaacccggggacagaggacncaggacagactaggagggagccgggaggatgggctgcagctgtggaggagggtttcanaggaaanaggtcggaaagcaaaggcctganaagccagaggcaggtgganagagggtggaaagtgagcagcgggctgggctggagccgcacacgctctcctcccatgttaaatagcacctttgagaaaaattcacaagtccccatcccccaaaaaaaaaaaaaaaaangaaaantttcanggaataaaaatagactttgaacaaaaaggaacatttgctggcctggggggggcattttcaatttctatagcaccagtgattcccttccccaccccacccatnananaaatgtancncctttggtataaangggggagccgttttcaccctnccccnantccccgccccccaggcngttg

SEQ ID NO: 8568 - DNA, 444 bp, Homo sapiens
tatcactactatagggcgaattggagctccccgcggtggcggccgggggcagctggaggtgcctcagaaggtgcattctgcttcctgcaggggcttgaaacaccaaggcactccagggatcctggagtcaaagcagcagccccggttgttgcactccttgggggtgacatgggggtagccgcagtccaccctgtccttggctggcacggcacacttggttttgcagacagggcccacgtacctcggccgctctagaactagtggatcccccgggctgcaggaattcgatatcaagcttatcgataccgtcgacctcgagggggggcccggtacccagcttttgttccctttagtgagggttaattgcgcgcttggcgtaatcatggtcattagctgtttcctgtgtgaaaattgttatccgctcacaattccacacaacatacc

SEQ ID NO: 8569 - DNA, 477 bp, Homo sapiens
  misc_feature 2, 3, 8, 12, 213: n = A,T,C or G
gnngcggngctntacactactatagggcgaattggagctccccgcggtggcggccgcccgggcaggtacgcgggcagagtgtagcttaacacaaagcacccaacttacacttaggagatttcaacttaacttgaccgctctgagctaaacctagccccaaacccactccaccttactaccagacaaccttagccaaaccatttacccaaaatnaagtataggcgatagaaattgaaacctggcgcaatagatatagtacctcggccgctctagaactagtggatcccccgggctgcaggaattcgatatcaagcttatcgataccgtcgacctcgagggggggcccggtacccagcttttgttccctttagtgagggttaattgccgcgcttggcgttaatcatggtcataagctgtttcctgtgtggaaattgttatccgctcacaattccacacaacatacgagccgggagcata

SEQ ID NO: 8570 - DNA, 540 bp, Homo sapiens
  misc_feature 7, 10: n = A,T,C or G
gcgtggnatngagctccccgcggtggcggccgcccgggcaggtactgtggatatttaaaatatcacacgtaacaagatcatgcttgttcctacagtattgcgggccagacacttaagtgaaagcagaagtgtttgggtgactttcctacttaaaattttggtcatatcatttcaaaacatttgcatcttggttggctgcatatgctttcctattgatcccaaaccaaatcttagaatcacttcatttaaaatactgagcggtattgaatacttcgaagcagaacaggcaatgtgcagccctcatttatgagaaaaccctcaggaaactcccagggtgatgcttggagaagctgtgagttgagctgaagctggagaacttcctccagagcaaagggcttaagaaagaaagaagaactctaagctgggtctgctaacatcactccagtttagatgggatcttggcagagagacatgccttgttcctctggattggaaagatgatttactctcgggaatcttctctgtcagcctgtcctcggc

SEQ ID NO: 8571 - DNA, 621 bp, Homo sapiens
  misc_feature 26, 188, 193, 312, 322, 325, 332, 337, 351, 354, 379, 407,415, 422, 446, 447, 509, 512, 527, 541, 550, 568, 578, 586,601, 609, 614, 620: n = A,T,C or G
aggctcctgacgcgtccgcagcagtnatattaataattttcatgatttgagaagccttcgcttcgaagcgaaaagtcctaatagtacgaagaaccctccataaacctggagtgactatatggatgccccccaccctaccacacattcgaagaacccgtatacataaaatctagacaaaaaaggaaggnattcnaaacccccaaaagctgggtttcaagccaaccccatggcctccatgactttttcaaaaaaaaaaaaaaaaaaaaaaaaaaaaaaaaaaaaaaaaaaaaaaaaaaaaaaaaaaaaaaaaangggcggccgntanactagtntaganaaaaaacctcccanacntccccctgaacctgaaacataaaangaatgcaattgttgttgttaacttgttnattgcagnttataanggttacaaataaagcaatagcatnncaaatttcacaaataaagcatttttttcctgcattctagttggggtttgtccaaactcattnaanggatcttatcatgtntggatccccgggtnccgagctcnaattaattcctcttccgntttcttgttnactggctnagttgcgctttggtngttcgggntggcnggaaanc

SEQ ID NO: 8572 - DNA, 685 bp, Homo sapiens
  misc_feature 20, 175, 242, 263, 275, 341, 369, 383, 397, 441, 454, 491,493, 502, 508, 533, 535, 536, 541, 544, 546, 550, 555, 559,562, 563, 571, 572, 582, 594, 597, 602, 603, 609, 613, 614,617, 618, 621, 622, 626, 629, 636, 644, 656, 669, 671: n = A,T,C or G
  misc_feature 675, 676, 677, 679, 680, 681, 683, 684: n = A,T,C or G
tcactatagggcgaattggnactccaccgcggtggcggccgcccgggcaggtacttttttttttttttttttttttttttttaagaagctttcagtttaatagctgttttaaattttttttttttttttttttttagggtttaggctgaaaacgtaaagcctgctgctcctgggnatcatttctcagcttctccttacagctatagtactgagtcaaggacgtctttaacgtcatggacggntcctttacccacgctttctanatcttcgactgnatcttttcctagttttccgagtccccccacagctttttttgctccgtctaggcctttttccagaangctggatctctgcttccttggctttggngccctgtctggctnaaccctgggtcttnacctgcattttcccctttgagccggctgaagccttaatggcaangggttccccgaancctggggcaaaagggggcctttgggatcaaagggccnancccagggcncctgcnaaacctgtcagaaaaaggaaaagtnannaaccncangncttntgggngccnggnngggggttnnccccccaaancccttgggaaanttnggaannaagggncccnnggnnccnngggnccntaaaaanaaggggancccccccgggcnggggggaattaantnaaannntnnntnnt

SEQ ID NO: 8573 - DNA, 876 bp, Homo sapiens
  misc_feature 2, 3, 4, 7, 9, 382, 394, 439, 446, 520, 522, 557, 560, 562,570, 576, 579, 608, 610, 611, 615, 616, 625, 626, 628, 629,631, 633, 634, 635, 638, 639, 644, 649, 654, 661, 673, 679,680, 681, 683, 684, 685, 687, 690, 694, 695, 697, 699: n = A,T,C or G
  misc_feature 706, 707, 708, 715, 716, 718, 720, 724, 726, 727, 733, 734,736, 737, 743, 745, 749, 754, 757, 760, 764, 766, 769, 778,779, 780, 788, 789, 791, 797, 798, 800, 801, 806, 808, 809,812, 814, 819, 821, 824, 826, 829, 832, 833, 834, 835: n = A,T,C or G
  misc_feature 837, 838, 841, 844, 846, 847, 849, 852, 854, 855, 856, 857,860, 861, 868, 870, 875: n = A,T,C or G
gnnnacntnatcgactactatagggcgaattgggccctctagatgcatgctcgagcggccgccagtgtgatggatatctgcagaattcggcttagcgtggtcgcggccgaggtacatttccttgtagactctgttaatttcctgcagctcctggttggttctggagcagatgatctcaatgagagagtcctcgtcggttcccagccccttcatggaagcttttagctcagaagcgtcatactgagcaggtgtcttcaataggcccaaaatcacccgtctccaggtggccagataaggctgacttcagtgctgatgcaagttcctttttggtccttctctggtaggcgaaggcaatatcctgtctctgtgcattgctgcgggntggtcaaaatgntgacaatggtgacctcatccacacctttggtcttgatggctgttnaatgttnaaagcatcccctcagcatcaaaattagtataggcttttgacagcccatatgcacttgggggtggtagaagtgantngccttggacttaagaaaaccacttatcttgagctnttngnactaacangcccangantcacgccccagtatattttatttttaaananngtanntccttatanntnntnannnttnntaagnataancaacnaatatantaaaaataaatnaatatnnntnnnanatnttannananactatannnattgatnntnangtcntnncacganntnntgaaantntganatatnatnatntttnanatnacttgttannngttatgannanatcatnntnnatatnannatntnatgananatnanatnatnnnnanntgnttnanntnacnannnnatnntatgatnanatatna

SEQ ID NO: 8574 - DNA, 724 bp, Homo sapiens
  misc_feature 707, 723: n = A,T,C or G
tcacttagggagtcgacccacgcgtccggccagtttgaatataatgtagaaggagtgacttccaaggaaatggctacccaacttgccttcatgcgcctgctggccaactatgcctctcagaacatcacctaccactgcaagaacagcattgcatacatggatgaggagactggcaacctgaaaaaggctgtcattctacagggctctaatgatgttgaacttgttgctgagggcaacagcaggttcacttacactgttcttgtagatggctgctctaaaaagacaaatgaatggggaaagacaatcattgaatacaaaacaaataagccatcacgcctgcccttccttgatattgcacctttggacatcggtggtgctgaccaggaattctttgtggacattggcccagtctgtttcaaataaatgaactcaatctaaattaaaaaagaaagaaatttgaaaaaactttctctttgccatttcttcttcttcttttttaactgaaagctgaatccttccatttcttctgcacatctacttgcttaaattgtgggcaaaagagaaaaagaaggattgatcagagcattgtgcaatacaagtttcattaactccttcccccgctcccccaaaaatttgaatttttttttcaacactcttacacctgttatggaaaatgtcaacctttgtaagaaaaccaaaataaaaantgaaaaataaaccatnt

SEQ ID NO: 8575 - DNA, 421 bp, Homo sapiens
  misc_feature 2, 4, 11, 12, 21, 22, 36, 40, 42, 103, 130, 137, 164, 169,173, 196, 201, 205, 207, 210, 219, 222, 231, 237, 239, 244,245, 266, 269, 270, 271, 272, 301, 328, 332, 371, 372, 373,374, 375, 376, 377, 382, 383, 384, 385, 388, 399, 400: n = A,T,C or G
  misc_feature 401, 407, 409, 410, 418, 419: n = A,T,C or G
cngnaagaacnnattgggacnncgcccccggcgatngtgngngcaacacgcatgctcgagcggccgccagtgtgatggatatctgcagaatgcggcttagcgnggtcgcggccgaggtaccccagaactnaaagtanaataataaaaaaaagaaaaaagaagtncattnattnagactcctacaaaggcaaggaanagggntgtngntgntgctgcagnttntgagactgncccgcncngaagnnttttttggagagcagcggcgnaannnnggctcactgcaacctccgcctcccagggncaagcaaggctcccacctcagcctccnaagnagctgggactacaggcacacaacaccacatcaggctaannnnnnnggagnnnnagnagggacagggnnncaccangnnggccaggnngg

SEQ ID NO: 8576 - DNA, 919 bp, Homo sapiens
  misc_feature 4, 6, 26, 28, 32, 36, 42, 434, 468, 514, 519, 569, 622, 632,654, 659, 677, 692, 694, 698, 700, 702, 704, 705, 707, 727,730, 736, 737, 749, 759, 781, 792, 795, 799, 801, 823, 829,841, 843, 846, 884, 893, 900, 913, 917: n = A,T,C or G
tggntnggagtactcactatagggtnantatngggntgcatnggagctcccgcgcggtggccggcccgcccgggcaggtactttccttttccaggaatccctttagggaagaaaagaagaagaaccctgaagcttgcgagatacttagttgccagtttttctccaactctccagcctccccaaagtctcttcatcctctgcaaccccgaaggcagagctacagagcatatgaaatctcagccatgctacaaagtcaaagccctcgaggaaacagctcaggtgtgtatttcagtatctttcactctgtctcctttgatacaacaccaaaaaccaaaatattgtccatgaaagcaaaaactgcttgagtcgaactatgttaaaagtaacatttctgaactgcaaagacactgttaaaagaataaaaagaaaaggcncagaatgagagaaaataattgcaaaacacataanggataagagactggtatccaaaaacattgccaaaaaataaaaaatnaaaanccacttaaaacttcaaagaataggaagggccgtgggggtgggcttacgcntgcaatcccagcactttgggagggcccaggcttggcgggatcacgaaggccanggagatccanaccattctgggccaacgtgggngaacncccgtcttcacttaaaanttccaaaagggaaanantatnangngnnanaagggcccttgggccgcttntanaacttnngggaatcccccngggcttggangaaattcgattttaaagctttnttgtttcccgnccncttnangggggggggcccgggccccaanttttgntcccctttaagngnggnttaattggccccttggcgtaaacaaggggccaaacctngtttcctgngggaaantgggatcccctcncaanct

SEQ ID NO: 8577 - DNA, 453 bp, Homo sapiens
  misc_feature 2, 3, 31, 39, 41, 42, 70, 82, 119, 127, 162, 182, 185, 192,193, 203, 209, 212, 215, 217, 218, 226, 231, 235, 237, 309,311, 317, 323, 326, 328, 338, 362, 363, 406, 408, 417, 437,453: n = A,T,C or G
gnnaaattggagcacgcgtaagacgtgtttngcacccgncnncgacaataaattcccatcatcggcgcantgggcatcggcnttgccgcggtcatgatatttggcatgatcttcaatangatcttgngctgtgctatccgcaggaaccgcgagatggtctanagtcagcttacatccctgancangaaagtnnacccatgaanattganggnatntnntgtccganagctntgtncngttcgttgtttgctgttcgttcttttgccactaattttagtattcattctgcattgctagataaaagctgangntacttnatgtcngtntnttaatgcttnattcaatattgacatttgtagttnngcggggggtactggttctgctttggtctatattcctacagccngntttgctttngctctgattatattaagcangaaatcctggcaatgn

SEQ ID NO: 8578 - DNA, 703 bp, Homo sapiens
  misc_feature 39, 357, 363, 385, 394, 402, 408, 413, 415, 428, 443, 444,458, 471, 474, 481, 507, 510, 512, 515, 519, 523, 528, 535,536, 540, 545, 557, 558, 565, 569, 570, 577, 580, 581, 583,589, 594, 598, 620, 621, 624, 627, 628, 639, 646, 648: n = A,T,C or G
  misc_feature 651, 658, 671, 672, 674, 683, 685, 691, 692, 693, 694, 697,698, 699, 700, 703: n = A,T,C or G
tatagggcgaattggagctccaccgcggtggcggccgangtacttttttttttttttttttttttttttttgctcgggggggggcggtgaggggaggaagagttagagtagaagataaagaaaaagatttttttttaatgcaagcatcaagagccctgaaaatggctaactaggtaaagtataccattcttttctcaagaatcacacactgaaacaacagagagaatcagcctgagagattttcgcaggagccttaaaagcaggagttgtaggtcaatggaaaaacaaatgctatccggtaaagcacccccttcacccatcttccccgcgtaccttgccccgggcgggccgctctanaactangtgggatccccccggcctgcangaaattcgnttttcaangctttntcgantnccgtccgaccctngaaggggggccccgnnccccaacttttttnttccctttatggnggnttaattnggccccctgggggaaaaaatgggaanaancnggntttncctnggggnaaaatgnntttnccctnccaaattccccnnaaaaatnaaanncccgggnaannanaaaggnaaaancccngggggggcccaaaagggggccnnccnccnntttattggggngggcccncntgnccctttnacaagggaaaacnntntgggccccntntttttnnnnaannnnccn

SEQ ID NO: 8579 - DNA, 888 bp, Homo sapiens
  misc_feature 2, 3, 4, 5, 11, 14, 15, 16, 17, 55, 172, 237, 293, 396, 611,718, 779, 881: n = A,T,C or G
gnnnnatgtgngtnnnntttgattccggagtcgccccgcgtccggtctcactctnctgacctcaagcaatctgcctgtctcagcctcccaaagtgctgggattacaggcggtgagccaccgcccccagcctgagcctttttttttttctaatgcatccaaggttaaggggangacgcaaataacaggactactctaaaaggaaacctgtttgaactctgtgagatcagtcatcagtntcagtattccacaggcacaccttaatttcattgtaaaaagatatatatattttggntatttttgtgcttttgggggcctattttgtgcttttttaccttatgtagagatcttattacaaagtgattttctacattaaaaagagactgaaataaattgtntagttacttaactaatgaagacatttcagaactctgggatgattttaatcttgaagtagtaggtggtatagtcataaaaccattcatccccttcttgattgtatcttaattttctggctttaaggcgacatctgagaggtaatgcattcttttttatattgaaatcataaactatcacccgctgcttctctgagttacttttaattttgccttgnggttatgggttggcggttccttctgtttgggttttcagagccccatgtctatataggcctgagtgcaaggtaattactatcttggaaatgaagatcagtatttctgnctagatctggataaaaaaaaatttcttggcttaagtataaaaattcaaaggaaatgggttncaaagatcctagtatagggtctcagccataacccgggacttggggaggaaatttaaccagatccaattactttgcagatcataaggcttttatctcttggtntcaaaat

SEQ ID NO: 8580 - DNA, 655 bp, Homo sapiens
  misc_feature 349, 355, 358, 360, 372, 374, 379, 382, 387, 389, 393, 395,401, 402, 405, 411, 413, 415, 416, 418, 419, 425, 428, 434,436, 440, 449, 454, 455, 458, 459, 460, 467, 471, 488, 489,491, 494, 495, 496, 505, 514, 516, 520, 523, 526, 535: n = A,T,C or G
  misc_feature 536, 545, 552, 555, 563, 564, 574, 577, 585, 590, 594, 600,603, 604, 607, 608, 611, 613, 621, 626, 627, 629, 635, 642,650, 654, 655: n = A,T,C or G
ctcactaagggaacaaaagctgggtaccgggccccccctcgggtcgacggtatcgataagcttgatatcgaattcctgcagcccgggggatccactagttctagagcggccgcccgggcaggttttttttttttttttttttttttggtaaggttgaatgcacttttggtttttggtcatgttcggttggtcaaagataaaaactaagtttgagagatgaatgcaaaggaaaaaaatattttccaaagtccatgtgaaattgtctcccattttttggcttttgagggggttcagtttgggttgcttgtctgtttccgggttggggggaaagttggttgggtgggagggngccagntantncaggagggtgantncaggnagngggcngntccnangttaanncgnaatttngngnncnnagcacncanggctangnggtnccaactttnaaaannggnnnacatggncaanaccatgctattcctcanncnctnnnaggtctcanagagacacngnctanttnaanccacagctnnacctttctnttatagnaanaacccagnncctgcccggngcngccaaggnaagcntccncctggnctnngannggngncacgcgcnatttnngnctccanatgaacngacgctancccnn

SEQ ID NO: 8581 - DNA, 652 bp, Homo sapiens
  misc_feature 15, 20, 29, 30, 31, 33, 74, 642: n = A,T,C or G
gcccggctttctttnccgtntcttattgnnngnagtcatgatccttatggaccccttcagggtttctacacagnaaaagaaagagacaagaaacagagggccctcgaactctcagaaataggccaagatggcataattaagtctatgaatcaagataggttttctaagtggagagcaatactaaatttcttgtaggtgaagactaaaggaaataccaagcatctttattttaacaattctctaagaattagaaaaattaactcatttttaaacatttaagtctaccacacccatcatcatgacttaccaattctttacaaagctcgatcctatctcaaaaagccacatatgttaatattctaccatcaaatccagtatctcacctcttgctcaaatgtaaatgccactgatgcatttatttgttctgtcaaagaatattgtcttggggcaaccatggggtcctcacatacagagactttaagaatggaaaaataaaatgcaatagtttggttcaccaccccttaaccaggaccaaagaaaacaaacttcagcatgactgacatcagagaacactcagcccttcctcaccacataaactcccatacttcttgccatgagagtttctggcaaggaagcagagtntctatgattc

SEQ ID NO: 8582 - DNA, 666 bp, Homo sapiens
  misc_feature 370, 375, 404, 408, 420, 432, 434, 436, 438, 445, 450, 451,457, 462, 472, 482, 499, 505, 507, 508, 515, 519, 523, 525,538, 543, 546, 560, 566, 567, 569, 571, 573, 581, 591, 611,618, 633, 646, 660, 661: n = A,T,C or G
ggcgaattggagctccaccgcggtggcggccgcccgggcaggtactttgcctacggcagcaacctgctgacagagaggatccacctccgaaacccctcggcggcgttcttctgtgtggcccgcctgcaggattttaagcttgactttggcaattcccaaggcaaaacaaatcaaacttggcatggagggatagccaccatttttcagagtcctggcgatgaagtgtggggagtagtatggaaaatgaacaaaagcaatttaaattctctggatgagcaagaaggggttaaaagtggaatgtatgtttgtaatagaagttaagttgcaactcagaaggaaaaaaaaaaaaaaaaaaaagtacctcggccgntttanaactagggatcccccggcctgcaggattncganttcaaccttttncgatcccgccancntngnggggggnccggnncccacnttttnttcccttttnggggggggtnatttgggccccctgggnggaaancnnggccaanacgntttncnctggggaaaaatngtttnccngttcaaatttcccnaaaaanntnangnccgggggntttaaaggtnaaaacccggggggcccctanggggggnccccccccctttttntgggggggccccnccccccttttcaannggaac

SEQ ID NO: 8583 - DNA, 618 bp, Homo sapiens
  misc_feature 616: n = A,T,C or G
ctcctatagggcgaattggactccaccgcggtggcggccgaggtaccagttttaaacctgttctattctaaccttggaatggagtcacatgtttcagcagcaatatgctgtttcccttcctcggtttctcacatcaccctctggagaatggtgtggaaactgccctgtttttacatcaagataaaagcttcaggaagttactggagagtggaatgcaggggtcattctggataacacaaaataactatttgattagaccaaccatttggtctctaaaattgggtgctaaagacaaagataggaaattcaaaaaatcaccacctgtagaagaaaaatcagttaataatttgacagatttaagggcctcaccttcctctcacagaactttacctcataacaccctgtttgggaaaattggaaaatatcttctccttacctcctaggggataaacaagagtttaaatgttgccaccaactcaaacaaaacacacctcattctttatgttctggagggagagggagtccttattttgcttcaaagtttcctttctggagcttcttttttttaagtaaaaaaaaaaaaaaaaaaaagtacctgcccgggcggccgctctanat

SEQ ID NO: 8584 - DNA, 857 bp, Homo sapiens
  misc_feature 5, 17, 30, 656, 706, 761, 767, 771, 778, 788, 818, 846: n = A,T,C or G
cggtnccctttgtactncgggtgtcgaccncgcgtccggattgttgcggtgcgctggagccgagtttcgctctgctgcccaggctggagtacagtgatgtgatctcctgacgtcaagtgatccattcgcctcggcctcccaaagttctgggattacaagtgtgagccactgccactggctgaaaaagtcttattgtggcataattgaatacaaaatacagttaaaataaaatgtcaacctcctggagtgatcggttacagaatgcagcagatatgcctgctaacatggataagcatgccctgaaaaagtatcgtcgagaagcctatcatcgggtgtttgtgaaccgaagtttagcaatggaaaagataaagtgttttggttttgatatggattatacccttgctggagagccagtgtaactccttcaagactggagtgacacacactgcatctgcatctgcctcattgtacaagtccccagagtatgagtcccttggttttgagcttactgtggagagattagtttctattggctatccccaggagttgctcagctttgcttatgattctacattccctaccaggggactttgtctttgacacactgtatggaaatcttttgaaagtcgatgcctatggaaacctctttggtctgngccccatggatttaactttataagggggccagaaactagagaacagtttncaaataaaattattcagcgaggatgatactgaaggatttacattttgacaccttnttcaanctancagaganctacctggtnggcctgcctagtaaattttttactaaatgncccaaaattccagtgggaaacaggattnaagatggggcc

SEQ ID NO: 8585 - DNA, 931 bp, Homo sapiens
  misc_feature 6, 7, 8, 9, 10, 11, 12, 13, 14, 15, 16, 17, 18, 19, 20, 21,22, 24, 27, 28, 36, 66, 68, 78, 86, 87, 115, 117, 133, 142,143, 157, 158, 162, 165, 173, 176, 177, 183, 184, 186, 188,200, 201, 203, 206, 207, 213, 214, 215, 217, 221, 222: n = A,T,C or G
  misc_feature 229, 231, 234, 256, 294, 295, 299, 309, 310, 317, 331, 334,339, 344, 357, 360, 361, 363, 366, 369, 380, 387, 397, 407,412, 418, 424, 426, 428, 432, 437, 441, 444, 456, 459, 460,462, 463, 470, 471, 472, 478, 503, 506, 520, 528, 538: n = A,T,C or G
  misc_feature 541, 542, 544, 550, 554, 555, 557, 561, 569, 580, 595, 597,607, 629, 638, 658, 660, 663, 666, 675, 701, 703, 710, 712,718, 724, 726, 728, 732, 735, 746, 749, 754, 759, 761, 764,770, 773, 779, 780, 792, 800, 801, 822, 824, 825, 826: n = A,T,C or G
  misc_feature 832, 833, 843, 845, 854, 868, 872, 874, 885, 892, 897, 900,909, 929, 930: n = A,T,C or G
gggggnnnnnnnnnnnnnnnnngnggnngggggggngggggggggggggggttttttggggggggnanaaaaaacccntttttttnngggggggggggaaaaaaaaaccctcccncngggggggggggggggnagggttttnnggggggggggggcnngcgnggnaaaaaaanccnngggggnngngngaggagggaggnngngannaggcgnnngnaggnnggctagncnggnaggggggcggggcggagggggngggggggggggggggaggggaggggggggaggacggcnngaanggaagaaagnnaggggcnggggagggtggcgnggnggggnggggnggggccgaagccngcnntnggnggnggggggggggnttttttngggggggggngggggggggnggggngggggngggggncngngggnagcgnggancanagaaaaaaaagntanngnnagggggnnnagaggnggggccccccccggggggggggggnggnggggggggggaggngggagacngggggggggnggnngngggaangcgnnangggnggcggggnaggggggggangaggggagggggggnangggggggggngggcgggcgggggcggaggggncaggggggnggggggggggagaggggcgngnagnggnggggggagngaggggcggggggggggggggggggngnggggggngnggcggngggggngngngggnggnggggggagggnggnggganggggncnggntgcagnggngggggnnggggggggatgngaggatgnngggggggcgagaagagaggangnnnaaggannagggaggccngnggacaaggngggggagggggggngggngnggggggggganggggggnggggnggnggggggggngggggggggggagggggagnng

SEQ ID NO: 8586 - DNA, 637 bp, Homo sapiens
  misc_feature 2, 3, 4, 5, 6, 7, 8, 12, 17, 41, 546, 634: n = A,T,C or G
gnnnnnnnaggnttacngaatgaactcgttccgaccacgcntccgtgcttctgaacttttttctgccactgctccctagccctgtttagtttgttattgctgcttttcttttttctttctgtatctatgcctttttttcacagtagtccttggctctgcacggaataaatgataccctcaaatctaattggatgtgctttcgcctttgcatgtaagtacggtagtaagaaacctttgagatctttctgacttttcaaaattagagaaagcaaatgggatggatagattttttttttcttttcaaggggggcaggaaggtaatggtttgagtagcctttgtttaaaaaaaagactaaatatatttaaaaggccacatttatatttttttcacaagaaccacataataaattccacttcttgacctgaatttggaaatccgaaattactaatccaggccaggtgtggtggctcatgcctgtaatcccagcactttgagaggccgaggtgggcagatcacttgaggcctggagttcaagaccaccttgncgaacacgggtgaaccccgtctctacaaaaaatccaaaaattagccaggcgttggtggcacgtgcctgtagtcccagctacttgggangct

SEQ ID NO: 8587 - DNA, 1094 bp, Homo sapiens
  misc_feature 1, 2, 3, 4, 5, 6, 8, 9, 11, 12, 13, 14, 15, 16, 17, 18, 19,20, 21, 22, 23, 26, 27, 28, 29, 30, 31, 32, 34, 36, 37,39, 40, 41, 42, 43, 44, 48, 49, 50, 52, 53, 54, 56, 58,61, 62, 63, 64, 66, 68, 69, 70, 71, 72, 73, 74, 76, 77,78: n = A,T,C or G
  misc_feature 79, 80, 81, 85, 86, 87, 92, 93, 95, 96, 97, 102, 103, 104,119, 584, 620, 659, 761, 778, 780, 783, 806, 814, 819, 832,837, 845, 900, 914, 937, 943, 951, 952, 964, 971, 975, 976,977, 982, 991, 1009, 1024, 1027, 1040, 1046, 1050, 1051: n = A,T,C or G
  misc_feature 1058, 1061, 1065, 1070, 1085, 1092, 1093: n = A,T,C or G
nnnnnngnntnnnnnnnnnnnnnttnnnnnnngngnntnnnnnnattnnngnnnangntannnnantnnnnnnnannnnnnattnnnagganntnnngggtnnnttatattggcgaatngggccctctagatgcatgctcgagcggccgccagtgtgatggatatctgcagaattcggcttacacttctggcgccagtactggcacgacaggcccacggcagattagatcttttcccagtactgatcggtgcgtggaattccagccaccacttctgattcgattccacagtgatcctgtcctctgagtattttaaagaagcctttacagccctcacaaagccgaattccagcacactggcggccgttactagtggatccgagctcggtaccaagcttggcgtaatcatggtcataagctgtttcctgtgtggaaattgttatcccgctcacaattcccacaccaaacattaccgagccgggaagccataaaggtgtaaaaagcctggggggtgcctaatggagtggagcttaacttcaacatttaattgcggtttgcgcctcaacttgcccgcttttcccagtncggggaaaacctgttccgtgcccaagcttgcatttnaatggaaatcgggcccaaccgccgccggggggagaaggncgggttttgccgtatttgggggcgcttctttccgctttccttcgcttcaacttggaacttccgcttgcgcctcggggtccggtttcggggcttgccgggcgnaagccgggttattcaancnttnactttcaaaaagggcggggtaantaaccggntttanttccaccaagaanttcanggggggantaaccgccagggaaaagaaacaatgttggaagccaaaaaggggccagccaaaaangggccaagggaaancccttaaaaaaaagggccccgcntttggnttgggccnntttttttccatnaagggcntccnnnccccnttgggccgnggcttttaaaaaaaaaantgccaccccttaaanttnaaaaggggggggngaaaancccnnacggggntcntttnaaaanaaccccgggcggttnccccccnng

SEQ ID NO: 8588 - DNA, 689 bp, Homo sapiens
  misc_feature 16, 158, 159, 172, 173, 180, 184, 187, 194, 199, 209, 214,226, 227, 228, 229, 230, 236, 242, 249, 255, 261, 263, 266,267, 271, 273, 275, 276, 279, 280, 287, 288, 290, 295, 297,298, 299, 300, 302, 304, 311, 315, 317, 319, 323, 326: n = A,T,C or G
  misc_feature 327, 330, 332, 334, 335, 339, 353, 356, 357, 359, 362, 363,364, 365, 367, 369, 372, 376, 378, 380, 384, 387, 394, 398,399, 401, 402, 405, 406, 411, 414, 416, 417, 421, 423, 424,426, 430, 432, 434, 435, 436, 446, 451, 452, 460, 462: n = A,T,C or G
  misc_feature 467, 474, 479, 482, 483, 486, 497, 498, 499, 501, 503, 505,509, 511, 512, 513, 514, 521, 528, 537, 541, 544, 545, 551,553, 559, 560, 568, 574, 575, 585, 587, 590, 591, 592, 593,594, 598, 600, 603, 604, 607, 609, 610, 611, 613, 616: n = A,T,C or G
  misc_feature 620, 621, 623, 629, 632, 633, 645, 646, 649, 654, 657, 659,660, 661, 667, 668, 670, 675, 680, 682, 683, 687, 689: n = A,T,C or G
tatagggcgaattggnagctccaccgcggtggcggccgagttgcctcttttaggaatctctttggaattgggagcacgatgactctgagtttgagctattaaagtacttcttacacaccaaaaaaaaaaaaaaaaaaaaaaaaagtacctgcccgggnnaataaaagaaaanngaattanaatnaanataaaanataangaataaaatntcaantattcttttaannnnnataganataaanaatttgnaaaaanattggnanttnntaantngnngtnnggttggnnanagcgnannnnangnacaatanatangngngaangannatnananngtantaatatattaattnganntntgnnnngngntgntttntnanagtnttnatattgntttnntnnttnntttantgntnnttgngnnanggtnantnnnaggtttcttnatatnngttttctntntttantttttgntatanttnntgntgattttttgnnntntntngttntnnnnggtgggntttgttntttttgtgntttnttnntatttntnagaaannacgagatntgagtnntataaggtananatnnnnngagngnatnnganannnanaanagtnntntaggangtnngataagtggggnngcngtgtngantnnnttaagnnanggggngaggngnngggnan

SEQ ID NO: 8589 - DNA, 649 bp, Homo sapiens
  misc_feature 140, 158, 308, 396, 417, 425, 447, 462, 465, 498, 503, 513,532, 534, 535, 543, 548, 560, 565, 587, 589, 603, 614, 622,637, 643, 649: n = A,T,C or G
cctatagggcgaattggagctccaccgcggtggcggccgaggtactttttttttttttttttttttttgtttcatttactccattatgttacgcttatgcttgggatttcattttcgacatattgcaaaatttatactgnggtcagaattattcaggngtatctcctgaacttggaactacttactactttaccctaaattttaataaacttaaccttcaggatagctcccaacacactctacatgaactacctcaaaaaaattagccaattattataaactttcttaactttgttgaaggactttgncttttttctactggaaattttacttttatcttttctcatggaagcataaaaaactcataaaaattaagacttctgccctttcttgganaaattagaccttttttatggnccaaaatnattaattctttgggaggtaggntttaaaaccttcccngtncttttttttttttttttttttttttgggaaggnggttnccctttggtncccaggctgggggggcaangnnggaatttnagttnttggaacctccncttcngggtaaaacaattttcctgccntnacccccggggggcngggattccggngttggccnccccccccgggtatntttggnttttan

SEQ ID NO: 8590 - DNA, 425 bp, Homo sapiens
ctaatacgactactatagggcgaattggagctccaccgcggtggcggccgaggacgcggggaggcagacatgggagtgccaaggtggccagatggttccaggactacaatgtctttatttttaactgtttgccactgctgccctcacccctgcccggctctggagtacctgcccgggcggccgctctagaactagtggatcccccgggctgcaggaattcgatatcaagcttatcgataccgtcgacctcgagggggggcccggtacccagcttttgttccctttagtgagggttaattgcgcgcttggcgtaatcatggtcatagctgtttcctgtgtgaaattgttatccgctcacaattccacacaacataccgagcccggggagcataaaagtgtaaaagccttgggggtgcctaatgagg

SEQ ID NO: 8591 - DNA, 658 bp, Homo sapiens
  misc_feature 5, 581, 597, 622, 637, 652: n = A,T,C or G
gagcnccccgtaatacgacctcactatagggcgaattggagctccaccgcggtggcggccgaggtacgttttaagactcttgtcctaaatggattttctattaaatatcaggcttttttttttctaatgaagtatatataattatgaatcgttgtccaaaggatgtatttgttcatctgccctgaatgatagaccaatgaatgaattaaaaggaactacatttagaaaagcaggataagtatgattttagaaaacttgaaggaagaaaacaagaaagaagggcacttgtagagatgtgaaggggcagaaaacagaggtgaaagggtttcctggacccacgtctgtagtagagaccactactgagttacagttctctaagcccatctgggatcctttggtgacatgaattttgctctagtggtttatgacatcactggaaccccgttggtggaattacaacttcataattcacagttagctcttgtttattttatatttaatcatttgtggagcatactggcagcatactcaggggaactatgtgggtatgctcctgcaaatcttggtggtgcataattaantacctgcccgggcggncgctctagaactagtggatcccccnggctgcaggaattcnatatcaagcttatcnataccg

SEQ ID NO: 8592 - DNA, 494 bp, Homo sapiens
  misc_feature 2, 3, 7: n = A,T,C or G
gnnagcnatcactacttagggcgaattggagctccccgcggtggcggccgcccgggcaggtacgcggggacaccctagatcccaagatctccaaggatttggtggcatacccactccagcacacagaagcatgaggttcatgactctcctcttcctgacagctctggcaggagccctggtctgtgcctatgatccagaggccgcctctgccccaggatcggggaacccttgccatgaagcatcagcagctcaaaaggaaaatgcaggtgaagacccagggttagccagacaggcaccaaagccaaggaagcagagatccagccttctggaaaaaggcctagacggagcaaaaaaagctgtggggggactcggaaaactaggaaaagatgcagtcgaagatctagaaagcgtgggtaaaggagccgtccatgacgttaaagacgtccttgactcagtaccttggccgctctagaactaggtggatcccccgggct

SEQ ID NO: 8593 - DNA, 657 bp, Homo sapiens
  misc_feature 4, 7, 14, 15, 19, 29, 33, 34, 38, 71, 78, 81, 84, 85, 87,95, 102, 121, 123, 126, 128, 143, 145, 148, 171, 173, 218,221, 234, 296, 319, 358, 359, 374, 441, 452, 454, 500, 506,521, 541, 542, 543, 551, 554, 556, 558, 559, 561, 562: n = A,T,C or G
  misc_feature 564, 568, 569, 573, 574, 575, 576, 577, 578, 580, 582, 583,585, 586, 591, 592, 593, 599, 600, 601, 608, 609, 625, 628,648: n = A,T,C or G
gagnagngcgttcnnagcnaggttaccangcgnncggncgctgactgtacaataaaaatggatcccaacantgggcgntgnatnngncatgatangaggctncattcactggtttcccctntnctnangggtacaccctcaancnganctacgccaaaatccatttcactntnatattcatcggggtaaatctaactttctttccacaacactttctnggnctatccggaatgncccgacgttacttggactaccccgatgcatacaccacatgaaacatcctatcatctgtaggntcattcatttctctaacagcagnaatattaataattttcatgatttgagaagcctttgcttnnaagcgaaaaggcctnatagtagaagaaccctccataaacctggagtgactatatggatgccccccaccctaccacacattcnaagaacccgtntncataaaatctagacaaaaaagggagggatcgaacccccccaagttngttttnagccaaccccatggnctccatgacttttttaaaannnaaaaaaanaananannanntntganntctnnnnnntntnngnncattnnnaaaaannnaaaaaanngggggggggcggttgnctnttttttaaaaaaaaaaaccncccccccct

SEQ ID NO: 8594 - DNA, 474 bp, Homo sapiens
  misc_feature 2, 3, 4, 12: n = A,T,C or G
gnnnaggtcccnaaacactacttagggcgaattggagctccccgcggtggcggccgcccgggcaggtacgcgggggagactggcaacctgaaaaaggctgtcattctacagggctctaatgatgttgaacttgttgctgagggcaacagcaggttcacttacactgttcttgtagatggctgctctaaaaagacaaatgaatggggaaagacaatcattgaatacaaaacaaataagccatcacgcctgcccttccttgatattgcacctttggacatcggtggtgctgaccaggaattctttgtggacattggcccagtctgtttcaaataaatgaactcaatctaaattaaaaaagaaagaaatttgaaaaaactttctctttgccatttcttcttcttcttttttaactgaaagctgaatccttccatttcttctgcacatctacttgcttaaattgtgggcaaaagagaa

SEQ ID NO: 8595 - DNA, 532 bp, Homo sapiens
  misc_feature 2, 3, 7, 16, 258, 286, 300, 470, 490, 513, 528: n = A,T,C or G
gnncganacacttccntcgggcgaattgttaccgggccccccctcgagttttttttttttttttttggttagggtaccgcggccgttaaacatgtgtcactgggcaggcggtgcctctaatactggtgatgctagaggtgatgtttttggtaaacaggcggggtaagatttgccgagttccttttactttttttttttatgagcatgcctgtgttgggttgacagtgagggtaataatgacttgttggttgattgtanatattgggctgttaattgtcagttcagngttttaatctgacncaggcttatgccggaggagaatgttttcatgttacttatactaacattagttcttctatagggtgatagattggtccaattgggtgtgaggagttcagttatatgtttgggattttttaggtagtgggtgtttgagcttgaacgctttcttaaatgggggctgcttttangcctactatgggggttaaantttttttactctctctacaaggntttttcctaaggggnccaa

SEQ ID NO: 8596 - DNA, 917 bp, Homo sapiens
  misc_feature 352, 515, 543, 560, 562, 571, 638, 641, 661, 663, 689, 714,715, 733, 752, 766, 770, 771, 796, 799, 816, 817, 824, 830,838, 843, 870, 873, 881, 900, 904, 907, 909, 913, 915: n = A,T,C or G
atatggactactatagggcgaattggagctccccgcggtggcggcccgaggtacagtattgtgagcaggaactgtgagcactttgtcacccagctgagatatggcaagtcccgctgtaaacaggtggaaaaggccaaggttgaagtcggtgtggccacggcgcttggaatcctggttgttgctggatgctcttttgcgattaggagataccaaaaaaagcgacagcctgaagcagccacaaaatcctgtgttagaagcagctgtgggggtcccagtggagatgagccccccccatgcctccagcagcctgaccctcgtgccctgtctcaggcgttctctagatcctttcctntgtttccctctctcgctggcaaaagtatgatctaattgaaacaagactgaaggatcaataaacagccatctgccccttcagaaaggacttctaccatgtttttatagacttctgaatcacaaaggaggaaggtaacattgagtgaacactcactgggtagttncagcaatttctagcccggtgacttttanaaaagctcttgattctnanaacctcagntctttcatgtcaagtgatgtcagggaggatcacctaccataatgcatacacgacacccagcactatngtntgatatgtaacagatgttcnanggaatggctttcatcattctacacanacataacaacgacataaatggatgnncattaattttactctcanggaggcgaaaaaaaaactnaatacccttccggntcgnntatgggggggcttaaatcccttaanaanactacacattttaccannatttttnccagtncctttctnaaatnggcccttttttaaaaaggtttttttanttnaaaggttnaagttttacccccctgacnacanaangnggantntt

SEQ ID NO: 8597 - DNA, 639 bp, Homo sapiens
  misc_feature 20, 44: n = A,T,C or G
tcactatagggcgaattggnagctccaccgcggtggcggccgangtactctgctcaaaatggctggtgctactggtgcactaagttgtgaggaattacctctgctcgggacagaataaaaaatcctaggcctcaaggaaaaactggtggcatccttctgggtcttttcaagtccttgcatctaaaaatcaatcttgacaaaaataaaacaaaaagccacaacaaaagaaagccaaaccaatcccccaccctaaaggaagaaaaaaattgatgtgaagcccatccacccttctacccaggtgccttatagcaaaggtgactgcagctgtaagtcagagctgaatgacagacaaaaatggaggccagacaccacggtctggaggtagctacgctgaattccagaacccagactctctctgggttaatttcttgtttttcctgagattaaattaataccagatgtccactaggtcctaggagatccccaccaatcagatttttgccaagtcccaggaaataacctgatcaaataggagacttcagattccaagaactactgtattccacctctcccctccctcagatttttagggttatatccattgcttgggtcaccactgtatacagccgggttgctggt

SEQ ID NO: 8598 - DNA, 666 bp, Homo sapiens
  misc_feature 348, 533, 540, 565, 569, 572, 576, 583, 601, 604, 613, 625,650, 656: n = A,T,C or G
ctctttttgggcgaattggaagctccaccgcggtggcggccgcccgttttggtactcactgctgcaggcagccctgctctgcgtcaacgccatcgcagtgctgcacgaggagcgattcctcaagaacattggctggggaacagaccagggtaattggtggatttggagaagagccgggaattaaatcacagctaatgaaccttattcgatctgtaagaaccgtgatgagagtgccattgataatagtaaactcaattgcaattgtgttacttttattatttggatgaatatcagtggagaaaatggagactcagaagaggacatgccagtagaagttattactttggncattattggaatatttatatcttagctggctgaccttgcacttgtcaaaaatgtaaagctgaaaataaaaccagggtttctatttatctgtttttttttaatgttgcacttgtagtttcattacaaaagatcagatcatgaaaggcagtaactctccaggactggaatatctgattgctcagtgntaatagnagttcatgctggggtgagattgttnaaanggngcangactggngcttctctttttttaganatntttctatcnctcacttctcanggatgaaattctttttcaaagcttngaagtnccttgcaact

SEQ ID NO: 8599 - DNA, 624 bp, Homo sapiens
  misc_feature 2, 3, 6, 7, 11, 28, 36, 37, 364, 550, 560, 592, 614: n = A,T,C or G
tnnggnntcgnccccacgcgtccggggnaagcctgnntttgcaaccagttgtagggtttctgttgtgtttttttttttttttttgaaataaaactataatataaattctcctattaaataaaattattttaagttttagtgtcaaaagtgagatgctgagagtaggtgataatgtatattttacagagtgggggttggcaggatggtgacattgaacatgattgctctctgtctcttttttcagcttatgggtatttatcttctattagtatttgtatcttcagttcattccactttaggaaacagagctgccaattgaaacagaagaagaaaaaaaaaaaaagcagcagacaacacactgtanagtcttgcacacacacaagtgcccaggcaaggtgcttggcagaaccgcagagtgggaagagagtaccggcatcgggtttccttgggatcaatttcattaccgtgtacctttcccattgtggtcatgccatttggcagggggagaatgggaggcttggccttctttgtgaggcagtgtgagcagaanctgatgccancatgtcactggttttgaagggatgagccccanacttgatgttttggggattgtnccttatttta

SEQ ID NO: 8600 - DNA, 915 bp, Homo sapiens
  misc_feature 539, 551, 553, 570, 598, 601, 617, 624, 631, 639, 651, 654,660, 673, 695, 742, 747, 752, 756, 762, 774, 788, 789, 793,794, 796, 806, 815, 817, 818, 834, 849, 853, 854, 857, 861,873, 879, 886, 889, 895, 904, 905: n = A,T,C or G
acgccgtatacgactactatagggcgaattggagctccaccgcggtggcggccggggaactcatcttctaacttcttcttgagctgaagatacttggacttgtagcctcaagcgccacaataaacgactcggacggcgagagccatggctcggggctgccacatccgctgaggagcggacgcccgggccacactccccgcgtacctcggccgctctagaactagtggatcccccgggctgcaggaattcgatatcaagcttatcgataccgtcgacctcgagggggggcccggtacccagcttttgttccctttagtgagggttaattgcgcgcttggcgtaatcatggtcatagctgtttcctgtgtgaaattgttatccgctcacaattccacacaacatacgagccgggagcataaagtgtaaagcctggggtgcctaatgagtgagctaactcacattaattgcgttgcgctcactgcccgctttccagtcgggaaacctgtcgtgccagctgcattaatgaatcggccaacgcncggggagaggcngnttgcgtattgggcgctntttcgctttcttgcttaattgacttcgntgngcttcggccgttcggntgcgggnagccggnttaacttnacttcaaagggnggnaatacnggtatttcacaanaaataaggggattacccccggnaaaaaacatttgagccaaaaggcccaccaaaaaggcccggaaccctnaaaangcccnttgnttggcntttttcataggnttccgccccctggnnaggnntnaaaaaaattnacctttaantnnaagggggggaaacccnccggcttttaaaaanaccnngcntttncccctggaaagntccttngggcctnttnttttcnaaccttgcnntaacgggaat

SEQ ID NO: 8601 - DNA, 603 bp, Homo sapiens
  misc_feature 10, 35, 42, 50, 589, 603: n = A,T,C or G
gtcgctcagnctcggggggctcgtctgttccaggnaccctgnaaccaaanacagcggagtttgagaagccagcagctcggggttcggcagcagcggtcccatcggctgaagttcggggggggtggggcgccgagcgcgcggggtggggggggtcctggtctttggcttctcgactcggtcctgtttcgacagcgaacatgtcgcggcctgtcagaaataggaaggttgttgattactcacagtttcaggaatctgatgatgcagatgaagattatggaagagattcgggccctcccactaagaaaattcgatcatctccccgagaagctaaaaataagaggcgatctggaaagaattcacaggaagatagtgaggactcagaagacaaagatgtgaagaccaagaaggatgattctcactcagcagaggatagtgaagatgaaaaagaagatcataaaaatgtgcgccaacaacggcaggcggcatctaaagcagcttctaaacagagagagatgctcatgggaagatgtgggcagtgaggaagaacaagaagaggaggatgaggcaccattccaggagaaagattccngcagcgatgaaaan

SEQ ID NO: 8602 - DNA, 695 bp, Homo sapiens
  misc_feature 2, 3, 4, 5, 6, 7, 8, 9, 10, 11, 17, 18, 20, 219, 485, 495,605, 607, 613, 638, 640, 662, 665, 678, 683, 689, 690, 694: n = A,T,C or G
gnnnnnnnnnngcccgnncncgtttaaagcctttttttaggcccattgacacgtggtgggcggggagaagatagggaacactcatccctggtcgtctatcccagtgtgtgtttaacattcacagcccagaaccacagatgtgtctgggagagcctggcaaggcattcctcatcaccatcgtgtttgcaaaggttaaaacaaaaacaaaaaaccacaaanataaaaaacaaaaaaaacaaaaaacccaagaaaaaaaaaaagagtcagcccttggcttctgcttcaaaccctcaagaggggaagcaactccgtgtgcctggggttcccgagggagctgctggctgacctgggcccacagagcctggctttggtccccagcattgcagtatggtgtggtgtttgtaggctgtggggtctggctgtgtggccaaggtgaatagcacaggttagggtgtgtgccacaccccatgcacctcagggccaancgggggcgtngctggcctttcaggtccaggccagtgggcctggtagcacatgtctgtcctcaagcaagggccagatgattttctcctggtttgcaactgttttaaaagccccgatatcgntntttcanttcaagatgcctcttaaaccatgtngnaagattctggctttatcatggnctntaataggcttttnttccnttgtgnngggng

SEQ ID NO: 8603 - DNA, 1070 bp, Homo sapiens
  misc_feature 2, 3, 6, 8, 9, 10, 11, 12, 13, 14, 15, 16, 17, 18, 19, 20,21, 22, 23, 24, 25, 26, 27, 28, 29, 30, 32, 34, 35, 36,37, 38, 39, 40, 42, 43, 44, 47, 48, 49, 50, 51, 52, 53,54, 55, 56, 57, 59, 60, 61, 62, 63, 64, 66, 67, 68, 69,73: n = A,T,C or G
  misc_feature 74, 75, 76, 77, 78, 79, 80, 81, 82, 83, 84, 85, 96, 98, 99,112, 200, 202, 207, 571, 576, 688, 719, 720, 727, 739, 829,849, 871, 875, 890, 909, 913, 927, 940, 954, 961, 967, 968,971, 983, 1021, 1035, 1037, 1038, 1060, 1065: n = A,T,C or G
cnnccntnnnnnnnnnnnnnnnnnnnnnnntnannnnnnntnnnttnnnnnnnnnnnannnnnntnnnnttcnnnnnnnnnnnnnaaggtagaacncnnccccattccggcntttggtaccgggccccccctcgaggtcgacggtatcgataagcttgatatcgaattcctgcagcccgggggatccactagttctagancngccgnccgggcaggtagaaaactgaaaatcacggaaaatgagaaatacacaatttaggacgggaaatatggcgaggaaaactgaaaaaggtggaaaatttagaaatgtccactgtatgacatgaaatatggcaagaaaactgataatcatggaaaatgataaacatccggacgcgtgggtccgactcaagctaggacctcggccgccacccgcggtggagctccagcttttgttccctttaagtgagggtttaattgccgccgcttggccgtaattcatggtcatagctgtttcctgtgtggaaaattgttatccgctcacaattcccacaccaacaataccgagcccgggaaggccattaaagtggtnaaagncctggggggtgcctaatggagttgaagcctaaacctcacaattaaatttgcgtttgccggctcacttgccccgcttttccaagtccggggaaaaccttggtcgtgcccagcntgcatttaaatggaatcgggcccaaccgccnncgggggnaagaggccgggntttgccgttattttggggccgccttctttcccgcttttccttcgcttcaacttggacttcggcttgcggcctcggggtccgtttccggcnttgcggggcgaagccgggtntttcaagcttcaccttcaaaanggcngggtaatttaccggnttttttccacaaagaaatncaanggggggattaaccnccaaggaaaaggnaaccattgttgagnccaaaangggccnnccnaaaagggcccanggaaacccggtaaaaaaagggccccgtttggcttggcnttttttcccataangnntcccgcccccccttgacctaancattnaaaat
